United States Patent Application Publication US 2014/0325702 A1 - sequence listing, part 38

SEQ ID NO: 77603 - DNA, 1467 bp, Heterodera glycines
gaagtttttcgaggacatcgtggactgtacgatttcaacattggcatgttctacgaccagcacgagcatcagcttcacccatcatttctgccgaaagtggctttggaatacgtcaacaattgccctcaagacttccttctctcgactctcctcagcgagcatttccaaaaccataaaattgttgtcattgatgtcaacagttttgggcccgacgcttcatgtcgttctgaaaccgaggcctttctggcacgtcggattgtcaacaagctatctgcagccggtgtggaaatgacagacattgctgttattacaccatacaaaagtactaatttatcattagacgaattgtatattaaaatatgtccctaatcaactgaaatacatgattatctttttttagcccagctattggaacttttcaaagtttttgtggttaaacatctgccgcatcggctgatttcttgtgcccatacacttcaaatcctgaactcattgttccctttgatcgtcgtgcatattcagaccttttggttggtactgtcgatgcggcacaggggaaggaattcgactacgtgatagtatctggtaagacaattttgtgacttattaaggcacattccatttataaacaaatttaaagagacatatattttttaaatctagtcacaagcgattattaaaaattttgatcctaaattttttacttaattatgtgtctcattaaatgctgagccacattaatgtgtccattaatgtgagccacattaatgtgtccattaaagtgagccactttaatgtgtccactaacatgatcaaaatcatttgaataccaattaaagttggccgcaataacacctctacgcttggttttctggccgattcatatcatccgacacttcgaatgtggaagaatggtcgcgttaatgtgatgttttcgcgtcaccgaaaagcactgattgttttgtgtgacgcatcgtcattcctcgcggttagtctgcatgcttttaaaaggaaattattaatcacgagcccgagtcacaagccctagcattcaattggaaccgcttgttagacacatatatgttaaatatacattaaaggacacattattcattctcagcatttcggggcagcattaggaaaaaggatagtgtgtctccttatatgattattatcataaatgtgtctcacaaatcctgagtaacaaatgtcgttgcggtttagaattacaatgaaaatgtgtctcataatttgttccatgaattcttgaaagattgttggaatcattatgtttagaatcctctgctgacgataaatactgctcctgaaggaactgaggccgttgcattcgagtccggcatcgaagctggtcgctttatgccctacaccaaacaaagcttcatggttttcttgaaagaagcaagacgtgaagggctcattttcgatgccaaggaccttgagctctaa

SEQ ID NO: 77604 - DNA, 1021 bp, Heterodera glycines
atgacattgattttgatgcaaccatgcataagctctacggcgggtcggggatgggtccccaataggtaattggatcggccattctaaaatattccttctgatcaagtgttttttgtttttgtgatgaaataaactgatgtgtttcttgaataaatgtcatttaagccgttaaaataaaaaggacataaatgtgtcttgtgcataaaaaagagaaacatatatgagtgggtgagtttaaaaaagacactattgtgtcttatacataaaaaagagaaaaatatgagtgggggtgggatttaattttttgggaacgtatatatacattagtgatattcagctcagtcttagagctcaaggtccttggcatcgaaaatgagcccttcacgtcttgcttctttcaagaaaaccatgaagctttgtttggtgtagggcataaagcgaccagcttcgatgccggactcgaatgcaacggcctcagttccttcaggagcagtatttatcgtcagcagaggattctaaacataatgattccaacaatctttcaagaattcatggaacaaattatgagacacattttcattgtaattctaaaccgcaacgacatttgttactcaggatttgtgagacacatttatgataataatcatataaggagacacactatcctttttcctaatgctgccccgaaatgctgagaatgaataatgtgtcctttaatgtatatttaacatatatgtgtctaacaagcggttccaattgaatgctagggcttgtgactcgggctcgtgattaataatttccttttaaaagcatgcagactaaccgcgaggaatgacgatgcgtcacacaaaacaatcagtgcttttcggtgacgcgaaaacatcacattaacgcgaccattcttccacattcgaagtgtcggatgatatgaatcggccagaaaaccaagcgtagaggtgttattgcggccaactttaattggtattcaaatgattttgatcatgttagtggacacattaaa

SEQ ID NO: 77605 - DNA, 442 bp, Heterodera glycines
ctatgttatctaccatctaatcgtggataacggccaaagaagtgagatagcgtacaagttgcgctataatgagttcaaggtggctaaagttgttggaactggcgagaacactgtcaggatgtgtcccttgttggactcaaagactgattcgactgacgcatggattggatggagcaatcgtctttacaagctaactaaacgcctgcgcatttatgttgagcaacaccaacagaagttgtctgccgtctcggctcctcaaattacagaacatgactacctctttcgtatgcctcagaacccgttaaggggaatttctcgaaagcatttgaacgaggcattgcgaactttctttggtcgtttccgagatgtaaaccctatcccattcacactgcataaaatccgagcaatagtggcatcccaatcagttaattatgcgagataa

SEQ ID NO: 77606 - DNA, 420 bp, Heterodera glycines
atgcacaacagtttgcattaccgacacgctccatttcagtcgattggaattgattttctcgggccaacaacaatttcgttggccggagaaaaaataaaggcatggatcctcatcataacatgccttgcgacgcgcgctgtctaccttgaggcaacattggacctcacatctgaatcattcatcaattttctccgtcgattcataagtcgacgaggaaaacgcgacatcatttggagcgacaacgctacgaccttcaaactcgctcagaaaaccctggagcttctcagtgctccgggtccggatcaggaagtacaaaacttcctgactcagaacagaatcaaatggagattcattgcccaaataagccttgggcaggaggcttttacgagcgcctcttcatacaattattttcaacactaa

SEQ ID NO: 77607 - DNA, 1345 bp, Heterodera glycines
atggcaaccaatatgcacgacaaaaagacgctgctcaaccaaatacttggtgaagcggatattacagtttctaatagtgggattaccgtaagcggtcctcgcctctccactcctcgcttcgttccgtttgacgaaattggcagatgccactgctgtaagtcaactgaggtcgaagtcgacaccatgttcaccaaagaaggggtcacaatttggtgtagcagaattgacaaagtgcaatttgttccctttgatgtcgtctatgacctaccgggccattgctttttccgactaaagaataaagcacgagtgttcaacatcccgtatggagagcctccaccaatgacgtgcaaaaaccaaaatagtcaaagtgatcaacgagaattgaaacgaaaagcaaaggttgcgctcgatttgttggagaccggactaatggcagatgccttacaagacagtgagagctggaagaaagcaaagacagcaatgaacgtgctcggaaatgtacttttggccgagtctctacctaccgtcaaaaaagaaaacaaaaactctccggcttcccctgttgaccaaaatattgcgcagccaaaggccgagcctcaaaaagaaaccaccaaaaaacgagaagctagcgaagagaagaaagccccaacaaaaagccatcactcacaacgtcaatcaagtggcacacgaaaaagcagcaaagagttgatgaacgaaaagccatcttctcctcgtgctgagtccattcccgtacagcacttggactctgcttccacgcaaattgatgacgtcagcgtgcctaaggcggataaaataccaaaaagcaacaacgaagaagacctcggtgacattgataaaactcttgatgaattttttgctagcataaaagcagcgaccaccggtatgtaaaatgcatatttaagtcattcacgtcatcattacaacacaaattaaaatgcttaatacacaatcatttgttgataaagatatttgctttaaactgccttgtggaattattatttctggtccatcctcctcagggaaaacacagtttttgttgaaatttattgacgaattactaattattccgcagcctgtctctatactgtattgttttggggaaatgaattcggcagtgccggcacttcaacgggcgggtgttgccgtatactcgggtgtcccttcggaggaattgattaaacaacattgcaaacctctcctactcattctcgacgacctaatgctgtccattgacgaacgttatttgtcagagttatttaccaaaaaatcccaccaccaccaatttgcggttgtgtttgtaactcaaaatttatttgaacgaaaa

SEQ ID NO: 77608 - DNA, 2598 bp, Heterodera glycines
atggctaataaatttattcttgttccacaagaaatttaccgtggtctcacatccgcacctagtacgggggatattaatttggataccgtacggcatgatttggaccgtaccagaggtgaacgtgccaacccttctactaaaaatgtccgctataatcaacagcttaggcgctacttacagatgagacgggaggtcgcagatcggccatccaaagttgagcttaccaagggaataagtgtgctgttaaaaagaggtggcgaagacggagacggccaagttgtggatacacctccccgtcctcctggtccccctcctcctccgccacatcgacctcgtggtccccctcctccgccaccgccgcctggtcgtccaccaagccctccaggtcccggtccctcgccgccgggaagtcctccgcctcgtccacaacgtcctcctagaccaagcagagctgcgccgcctcggagaaaccgtcgtctggagcaatggcggaaaaggcgatacgatatacaacaacgacggcagccagctgtgcgcgactttcttgcggaagcagctgcagctcctttacccgaaagcgacgaagaagctgattacatgctggagaatggattcgcgctgccagcgccttcacaatactatggtgacttgcctgtgctaccagacaatgcggatgaaattgaggaaatggacactgttcaacaaagattggctagcaggaggaaactaaaaaaggacgacgacgacgacgatgatgattggcaagacaaaaaatacaaaatttactatccacctccccctgctcgccggcccccgtctcgtccagcaaaaattgaaccaatgcatccaccacgtcctaacccgaagagagagccacagccaaaggtcgaccctcggccatccacatcaaagcaggccgatataaaacctaaaagggagccaaagtttgagccggatccgcgaccatccacatcacggcaagccgggtacaaccccgccccaccagctcccaaaaaagagccaaaacatgagtggaaacagacaaagcggcgccattctcctcctcgcaccgcaccccatcggattccgaaaagagagccagaaattgaagaaacaccacaagagcaacctccggctgctgctgctcctgctgacgttgaaatgccccatgttcctccgcctaggcgaggaaccaaacgccgttatcccccggaaaatgttgaggatggtcagccgcgcttacgtaagagagtgaggcaagcgagaagagcaagagtatattattcgccagagccaggtccatcgacctctgcacaaagtgatgaacaacaacagcaacgcgaactattttccattccgacaaatcagctgacgatggcacaaagagttgagctgatatgcatcaaatgcaatcgctattccgatcgtatgggtgttcggggaaacgcaattattaacaccaaaaatggacaaccattggtgcgaagcaatttacgaatggccatcaggtatataatagacaggagagcaggccgtcccacgattagaccaccaggagcggacctattggaagaacggcttaggcaggacccaattttgtattcattgacagctccaccaaagagaccatcacagagtacaaccaccaggacggcatcgaaaatcaaaaaagagtttcgcccgaaaaaatggaattaataaatgccactcttgacaaactgtacaacgatccatcctcccccgcggctttttccggtgttactgcactgtggaaagaggcgagaaaaaagataaaacaattaagtaaaaaagaagtgcagaactatttggaaagtcatcgtacctacacgttaatgcgcccccgacgggtgcacttccggagagcaaaaactgttgcagcaggattcatgacagatgtccaagtggatttggccgattttcaagcgctttctcgtcaaaatcgaggccatcggtatctgctcgttgcggttgacgtcttgtcaaaacgcttgtttgttgttccgttgaaaaataagagggccgaggagatgctggaggcattcaaggaacttgttaagcaaatgccaatggttccacatcgcattttctccgacaaagggactgaattcaaaaaccaattactcaaaaaatttttcgatgagcaggaaattcagaaacatgagccagtccactcatccgtgaaggcatcagtagctgaaagagccattcggaatgtaaagcaacgactgtacagatattttgcagagaaggaaacattgaattgggtagacattgttgaggaaattgttgaagggatcaatcactctccgtcacgggtccatggaatgcgtccaattgatgtgaattttaaaaatgcacaaagggtatggaaacgcatgtatcagactcggcctcctattaggcgtccgccgcgcttctataaagatgattttgtgcgaatgactcgtgagaagggacaattcgagaaggggtatctgcctaactacggtgacgagattcttgaggtagatgaagtgttaaaaggtgtacagcctgtacgatacaaactcagagatgatcatggtgagaagttcaggg

SEQ ID NO: 77609 - DNA, 1673 bp, Heterodera glycines; identical to SEQ ID NO: 13693

SEQ ID NO: 77610 - DNA, 1448 bp, Heterodera glycines
atgcgtgtgactgcttcaaagcacattgttgtccaaatgccgaaagagggtaagatgatgggaaaaattcataaatgggaggactttttagggccctaagattttgcctgttttcccagtttccgccctggcgttttacccggaattccattttccaagagatttttgatcactaggtttctggttttcaaaaaaaaactgtgctgttttacctccatcccgttttgatcacctgcatccctggcactgttctttaacaattttgttaatttggtttgagtttttcgaatttgaccgaatttcttgatggcataaatttcaaatttgggccaaccaaacggggactgaccggtgctaaactggaagccaaacaatccgtgaatattgcttataaaaaatttgccaacaaattttaaggccagcctgacgccggactcacaaaggaattcacgaattcatcgctgcatcgtttcaaaaagcctggcagcaaaaactacatggtccttaatgccttgggcatattaaaattcggattttcaaattatagaatatttatccgccaagttcgactttgcacttgtcaaatattccaaacggagtcagtgaggaagcaatgcttgaaattttcaaggatttcaaagttgtcgaattcaaatttttccagtatgttttttgaatattattttctgtatttttattaaataattttgcttaatttagaaaagatcacaaaatggcacttcttcagcttgaagacgtggagaatgcaattgattttctggtcacaatgcatgtaataatcgaattttatttttaaactaattatctatttttgaatttaagaattacaaattagccgagagcgctcatttgcgtgtttcattctccaagaaaggcatcaacggctaagctgcaaatttaatttatcatttttatatattttattttattttttaatttcattaattcaccacaccacacgtggggatgcaagttcctaatgagctttatcatttttatgagaattattttttgtcttcattgttgggaccggacataaacaagtccaataattggtctaacaacatttggacaccgaaatttttaaaccaattagtcatttttatcttttgggatttcacatgatttaatacattccaatacatcgtctagtctcttattatatattttttctctctactgtataaggcatattatttcatattaaaactgcacaaatatttgtagtatttcaggttcgattctggacctggatccaggcctggattttttctgagtccaggtcttttctggggtccggattttccggggcttttgtccaggaaatccaggtcaagatcaatttggaaatccaggcccaggtttttgcaaaatgtcgaactctatttgcattattatgcgttagaaaaatctttttctttgtataa

SEQ ID NO: 77611 - DNA, 1579 bp, Heterodera glycines
gtctcatcctgaaaatcaaattgcttactcatatccgagaaaaggaggtgagaattatgcaaaaaatttttccaccgtttttttctgtctacattttcaaaagtttcaaaattatattttaaatggctttaaggtgtattgtgatgcggactttttcgaagtacccgaagactatgactttacaacgagggtatgtaattttttggaaaaaaaacctaaaaaaaattatttccaaaatcttttaaaggttaccagccacattgaccatgtcgaactgactgagacaagagtaagttggaaaatattctaacattcggcaaattcgattttctccggtagcggtaacggtaaaaaccggaaattaccgtagtttctggctttagtttttccaaaaatcgacttgttaacggtagatttaccaggtttttgccgcgataaattttattttgttgaacgctaaatgttttttttactgttataagaatttaattaacccataattcttcataaggttgcttccgagcaaaagccgcttatgggcgagaaagcttaggaaggatttcaacaatggaacaacatctttggtcatcaaacctaactgtaattcgaaatctcacgacctcttttacattttcgattcgtatttgaatttttttttttaatttaattttctacacaaaattactaggatttttcctattttttttttgcattattaccatataagaaaagtatcttttgttttaaaaacacatttcaacctcttctgccgaatttacttgtctaatttatgtttttataaacattttttttttgattttaaaagatgaagccggacaatttaattatttgaaattatttgtaaaaattttttgccttctcatctcatatgcttaaaaaaatgaccagatcaaaccaaaatgttcatttcaaaacagaatttgatctgtaacagagcaatgtccgatttcatcttttaacattgtttttttttttattaccacgatggtttccatacatcattaatggtgctcgaatgatcgatcaatcacattgttaccaattaaaatggcatgagctaataaactcaattaatggggatgggattttttgaaaaattcataatcgacaaaataaataccctttccctattaattaatcataatcattcatttaaccatgcttaaaacattatatttgtcaacataaacatcatttgttcgttttgcaacacatttgaacactacatattttgagtgagaaaataaaatgggaaaaaacaacatgaaaatttttgaaaaatgggtaaattaaaaaatgatgaatatatattagaatttagaacaaatattaaatgcataagagaggattaacttgttgtttaattccatccaattcaaaaggctataggatattagaaattttagggattgatttgagaaatttttagcttttgaaaaactagaaaaatatttaattcctcaaaaatccctaaaattcctgtttttttaaatttaattttagcattatgaattagatggctgctgttttgtgaacttttaattttacacacaataaa

SEQ ID NO: 77612 - DNA, 821 bp, Heterodera glycines
atgcaaaatgttgagttcggctcatcctcagataatccaattatgttctttgatgatgaatcggaacaaacagtccaaaattggcaaatgaaacggccaatgaaaagcagcgaattattggaggagacggagaaacagacaaagagagatgggaagagaacggcggaagaagcggagggggaggaaaagcagagacagaacagagagagcacccgtcgtctgcttggcatcaaaaaagcttttcgtaaaaatggaaaaaactgatttaaaagttttatttgtttttcaagtgaacgaaatctggcaaattgttacggtcagtttcgccatgttgggcatcgcagtggagccgattgagcagcaaatgaatgggggcaaatggccccaatttgaattggcacttcgccaaatcggtactgctcaagcgctgctggttttggacaaagagcagctgcaaacgacatggaactttggtgccaaaacgatcaccgcaattaattccgagtcacaaacatttctcggttctgaaatatttaagtgagtggccaaatgggcataaagtgtttaaagtaatgaatgctaaatgtttattcagaataatggaagttggtggaagagacgaaaatgtcaaatttattggagtaatggacacaaacggcgacaaaaaactcaaaatgctcttcttttttgtgcgactcatcagaaaattagccggagaattagagactccatacgaaagttacagtcaaaaagatacagtaagaacatccacagtatacagtagtgtatctgtgcagatgattaaagagaagcagcattaa

SEQ ID NO: 77613 - DNA, 1989 bp, Heterodera glycines
atgaccgaccagcagcagagagacggggctgtctgtgccagtatgacttcaccggttgcggtcgatcagcaaaagtcgctcattccatcgctttccatatcgcctgcatccactctcttttctccgttcatcactcagcgatcaaacaaagacaaagtaatgtcagtggagaaaactcattggcgctgagttgccagagggcaatgctccctttgaataatgaaaaataggggtagttttgcaatattcgtattacggttctgtcacaacccagggaaccatatgtggaatttttgcaattgaagccttaatggcaccaaaattggagaacatgttttggagaaatcatactttaccgtgtcctgagaattcgggtagggactgcaaaaaaaaaaaagttcggctcgggactcgtgaatagaaatgtaacggttttgggattcgaatcggaactacaaaaaccaaatcggatcgagactcgggacgaaaaatgaaagaatttcgggattcgagaccggacgggaaaaaaaagttgcgagacgaaaaaaagtcgggttttctgatggaaggcgatcctttaggtgggaaataaaagaatacttttggtttttattagcttttccaattcgggctttaaaccaattaaaaaatatatgttaaggattttaaattgcttccctatctaccaaagatttgcgttgcaaagaatgcgcaaaaagcgaaggaaaagccggcaaataaagcaaaagcaacggaggaggcaaatgccaagagataaaccagtgccggcagctgctgcagaagtgccaactgatcagtgcggcatgccaaggagttagtggttgaacatctggataaaatttgatgaccaacggaaaaagcgctctgatcacttttccaccattgatatcaatagatcagcagatcagcttgagctgctcaagctgggaatttgggttaaaaagttgagatatagaactcaggaaataatttttaatggcacaaacagggaaatttttcaaacataagccagcttggttaaaaatttcaaattttatcgaaaaattttgccgaaagtcgagtatctcgcatgttcctacaatgataacattaattattgtttaattatgtcgaaaaatttcagagcggcaacatcaaagcatttttctgtttgatggtcgccgacaatttgttgctaatcatcatcatcatctattgctgcttgttgtgctgttcattttgctttgtttttgttctccttccgtccgtgccattccgtccgcttcttctacccagcaacggcaccaccagcagagactgacggcaccgatgcttaacggggacgagccaccgctggtggtcaccaaattgggcaaaattcgcgggttcaatcaggtgagtgccgagggctttttaaaaattaatttttttttgaaaattaaaaaatgccaaataatttaaattaaaaaaaataatttaaaatctatttataaaatttcttgggattcggtgccatttttggcagggaaaggctttgtgaaaattattcttcttttttaattttaaaaaatgccatttaagggaggaatttaaatttaacgaatttagtgccgtttttggatttataattaatgaaaaatttgaaaaaaaggcggaattttttaatttttcagaaatttaatggtaaaactgtgcgcactttccttggcgttccgtacgctcagcgacctatcggtggactacgttttgcaatcccaaaaatggtgtcaaatttttggtaaaaattctgaaattttatttaacatttttcagattgatcgatgggaaggcgaattggaagcgacgagttcggcacggacatgcttttatccgatcggtaaaatctgtacaaaattgaggcagtttgatttaattgttgaatcaattaacggggaacggcgtttaattagaacgcagaaattgcggtccatccccgacgtcgaacactga

SEQ ID NO: 77614 - DNA, 562 bp, Heterodera glycines
atgtttgtgccgtttttgcaccaaacttttttccattgtgcaacggtatgcattttctttattctcctcggagtttttttccgatgccaacaggtcacccgtggcactcttgcgctctgtgcgaaactgtcgttgtcttccacccgctcaattcgttcaatgaagaatgatgcccgctcagtggctgactttgaccgctcgggcaacaacaaaatcggcgagtcgccaatttccatgccgttgccagtgggggcggcccgctcgccttttgaggcgtttgtccaagtgaacgcgggcgtagtggacgccggaaaaacgcggttcgggtaattttcaacaaacatttttaaaattgctttttcattccaccattcgaactgatttaatttgccattgatttttttgtccttttcttaatttatgtctttttttcagtgtcgaatgttcggtgagttcgtgcacccgcaattcgcgccttgtcgtcagtgcacttcgcccactattcagcaactctgtcagttttggcatagccaatctcttgacactgctccaagttgaatga

SEQ ID NO: 77615 - DNA, 578 bp, Heterodera glycines
atgatgtgtcaagtcaaattgcccgcgccatccgatgtgctgtcccttcttctattcctgatctccgtgacaatctggtctcggagtcgcccgaactccagcttcatggaccagaaaagcccaacaaacccgacgaccatacaaatgagtatggaaacaaagacggaaacggcgaagtacgcaaaattggtccatttgtcaaggagctccgtgtatttagtggaaacttccgcacgaatctgatcgcgcccatccgtgctcactgagcgcgtttgcaaataagccatcgggccgaactaaaaagttgggagctttaaggaaggttgggactccaaaattggattattggaaaagtccaccgacttttcaaaaatgttaccaaaataacgctgaaagatttgacaatttttttattcaatttcttataaattttcagggggcgggaaactatgcggtatgaggaactgataggggggacaaaatgccgtttaccgattcgcgccctccgccgatcattcctcgccgcattccatgatcacccgcgagcagtccaacgaacgaattgggcgctgcactga

SEQ ID NO: 77616 - DNA, 103 bp, Heterodera glycines
gtcggtgcggttccgtctcagtgcagcgcccaattcgttcgttggactgctcgcgggtgatcatggaatgcggcgaggaatgatcggcggagggcgcgaatcg

SEQ ID NO: 77617 - DNA, 859 bp, Heterodera glycines
atgtttgtttttccatgttgtcaatatgatgttgatgttatgttagaagatctaaatggcaaagtgttgtacaaggaggctaggaaacagttggacacccacacgtacaaagtgagtgatgaaggcaccggtgaaatcgaatgccaagggtttatttttcataaaaaaaccattaaaatctagtttttgcctccattttcctgcattattgccttaatttttttgtgacagagtaaatttttgagtttttcaaattgcagccaggcacagtaaaattcacaaaattgttgagatttgaaaatttttaagcccgtccttgggaagaacccgtcattcgtcgggcactgtttccaattccatattggaacgtgcactcgcatgcggcttcagcacttgcgaggaccaacaatggactagaagcaactcatcttcatttctctgtgttttttatttaaaaaaaccaaaaaaaaacttcaattttagaagggtctttgtcatcatccggccctttccgacttcatttctgaagtgtgtagaagcatcgacagacaagtggacgcggcaagatcagctcggaattcatacacaaacgacacaaacgttatgttctccaggacgcagtaatcatgcgaattttggcggacgcaacatacaacagcgatgccgaaattcaagagcttatgacggctcttggtctccaggttgcaggatacgcaggaaaactaatggattatgaaaatgtggaagattcagtgcaagccccttagaattacctaaatttattatgttcatttttgttatcttattatcttctttttatttcccgctgattttattcatttattttgtgccaaattga

SEQ ID NO: 77618 - DNA, 411 bp, Heterodera glycines
atgtcactgtcatccggctcattctccgacagcatttgcaagcagcgcaataaagggtcgaccagacaagcactcaatgacttatcgatttgtctgaccagaggaaacaattggtggtcaaaaatggcatttggttacccaccaaaaagtgaccacctcacctgtacaccgggtacagttcagtcaaagttcggacgtaattccgaaacattccccgactttgggcgcgaatttcgtgccgaaaattgtagtcgcgcaaaaccaaagcgagaacttgggaatacaccttcacattctgaagttggaacaaggcatagtgccaagcatttgccaatgtataataccgtgctcatgtgggcaataatttttggagtgattttggcaaaatgcgagtcggagagccatcgctaa

SEQ ID NO: 77619 - DNA, 1990 bp, Heterodera glycines
atgccttcagcagcaatgcttgcattttgccttcttctggcgctgtttggggcattaaatttgccgactgagtgtaaaggtttgttgtaaaggtagcaaatgattattaacaatgtaatggatttgtaaaaaaggaataatccaaagtgggcctcgcccccacaacgtccggcggtacgccaatagctcataaagcaaatccagtgcacggccctcgaaaaaatatttaaaaggttttactggccaacgaagagagaaacaacctttcttgaaataaaataaataaataatagaaaaaattatttatttttagtttccttttcaaccacttacgaattgctcgagacggggacaatgcttctcgacgaagtcaaaaagcagacagacaacgaacgagtggagcatgaagctgatgacgaactcgactcacaaaaagcaaaagcattggaagagaaaggcgacaaatttttaatagccgttgagaatttatgtaactcggaaattgaagttcgaaagcctgtggcagagaagataaaaccaaaagaagatgccaatttgttagctgttaaaaatgtctgccaaaattggaaaaatcgcaaaagcattcggaaagaacagaaagaggcagagaatggaagcgtagcaccagcaatgagcaatttgaaagtgaacccacaaatacacgaaagttttcttcgaacattgtctgaaataaaaattttgaaccccaaaaacaaagaagaatttggaaaattggccaaagttggtattgatttgctgccgaaagtaactaaaattcttaaaggtgatgactgttttcgaatttagaggctaaaaataatcacatttctttccagaactcaaaacgattgctgattctccgtctgatcagacttcggcttctcctgctgatcagccgaaaggcatctcaaaacgacgggaaaaaaaggacaacgaccgttggaatctttttaagaaaagagttcatgatagagaacgctgttcactgtacgtcgtcctggctttaacgtcgagcatcctcttcactgacatgacggttcgcttaactcaacaacacactttttcgatcggaaattcatcgcgtactgatgagcatcgaacgggagttgaaacattttttcaagtacttgaattggtcgcatggatttactcacttcttaccattttggtgagtttcggcatggccatattcgcgtgccggtgcaaagcttcttttttgccccattaaaaatgcatttgctgcttttggggagcgtctttggattttgaactctttttcgttttctttttcttgggaccctattttcaggcctttttttacacggtttttgttcgagttgatttagtaaatcagtctaaagttttcagaatgaaatttaatgttagaatagaaacatcactggccacgaataccttataaacaaatttgttgacactaaaatttgaaatctatttaactagcagcatcgggccactgtaactagaaaagtgctaaagttttggctctcgttattgggcttttgatgatcaaattcctgaatttgggttgaaataagtcgctttttgtgcttttttcatctttctttctttttggtctttttattctttttaattttctttagttttttaaattgttctttattcgtataataccaactttgaagatgtcattgtatttggattatcactattttttgataaagcgttttttgggaattcttttcattaattgatttgctgataaaaggctaagaaaatgttaaaattcgtaggatttcaaatgatagaagaaaaaactagggttgttcactaattatgggtctaattttacgaaattttttgtcagaactttttataaaattttgctaaatttttttaaaatgttagtggatggcatgtaaagctatctcttaatttacctagtttgagctaagttatgatttattattcagcaaaatatttaaataaa

SEQ ID NO: 77620 - DNA, 297 bp, Heterodera glycines
atggatacgaaatttcaattaaattcagagagatttttgaggtaaaatgcaataaaaattaattgatttgattggcgacagattcagatcgaatcggcttatgaactttatggaagaaggcaaaaacagcaccaacaaaaggagcatttagcagcagattttcacgataacaattgccctaatgattttttggtggaaataattataaaataattaaaactttcattggacaaattattttttatcgaatttctattaattttagttttttagtaaattttaaataattctaaaaaa

SEQ ID NO: 77621 - DNA, 819 bp, Heterodera glycines
tcagtctcggcgacacaattggggtcggaacggcgggcacagttgcgcatttgctggacgaagtgctgcgggctgtgccttgcaaaagtgtggcggtccattttcacgacacttatggacaagcattgagcaatgtgcttactgcaatcgatgtacatacaccgcctaattgaacttttattgcccaaattatgcgcattaatttgattagcgtggcattcgcgtggcggacagcagcatcggcggcctcggcgggtgtccctttgccaaaggcgccaccggcaatttggccaccgaagacttggcttatttgctgcacggcatgggcttccacaccgtttgtgaacacgagcgattttaggaaaacatatttaaagccgaaaatcgaaattcaaagggaatggcactgccgcggggcgtgaccggaaaatgcgtcagtgatacaaaattcgtgtccggggttcgaaattgccccttaatggataccggaatcatggtcagtgcccttgaaaacccaaggaacttattttatgacaataaaaatttcattgacgcatgttctactaacgctttttccactgacgctttttccgggcgccccgcgggggcgcaaaaggaaaactttgtgatttttcttcgccattgtcataggataaatggcattctttgctgttgattctctttttaaaaaatgaaattcggcagggcattgacttggacaaactcatcggcacttccgtttggatatgcgcacaaatgggcagaaaaaacgagtcgaaagtgaccaacgcaatgcaaaacagcagaaaatgcggagag

SEQ ID NO: 77622 - DNA, 1758 bp, Heterodera glycines
atgagcagagaaattgaccaatttaacaatgcaatacttctcgataaaggcgatgtaagtgatgagcggatctgagaagcaatttgaaaagtgattaaaataaaaataagaaaaaacatttaatactaattggggatcggattagtaagcaaatacaaaatttcatattttgcatttaatttattaaaaaattggttttacatggttttcactaataaattagaaataactttaaaatcccacaatctttggtcaaatccgacccttaatgataatcggcaatttaaaggaggaattgtggcggatgttgattggacatcatttccactaattgttttttaggagtctgtgcggagagtcggctcttcggcttttgccggcgctgacgagaaggagcagttgcgctttgttggattggtcctttggcatttggtgttccgcgactgtcccatcattgacccgacggcggacgaatttgtgttcatcgcaaaggtcgagccgagcattgacgccaccgacccaaacgtggcgatggcattctgtgccgaattggacaacgaattggcgcgaaaaagccaaccgaaggagcaaaaagaagagaaaaaagtggcggaagaaatgcaagagaaaattgagaaggaattcgaactgtttgaacgattggaggacaaaatattaaaagacaccgcatttaaaggcgtcgagttggagaagtacaacgaactgcacgagaagttcgaactgctcagaatgtattgggactggcaaaaagggaaaaggagacgccgaaacatccctttttacggcatcatcgacagggcattcatcgctttcggaagcgaggcgccggtactgatcgtattcatcagagtaagcaaaattgtgcccaaaattcagttaaaataaaattttattgaaagcaaattttaaaatggaaaaattaaattcgaaaattattaaaatgccaaaaaatcagacagagagagtaaataaaaggcagacaattcaacaattcatcactatacattttagcgatttattcaaatgatttttggtcaatgttttaggtgcttttggaaggtgccattggctggacggacttttcggaatatatccaatatcccaccagaaatacaataaggataaaagatatcgaaaaatactaccaaatgatgcgacaattggaggaaatatgggacggatatggcctctaataggcagaaaatgaactgatcagtgatcactttagaataattaaaatttatactttatagtggaaaaaaacaatgattaaatttttggttttaaatttaattcggcctttttaatataaattttattgcaaaaatttattaaaatgaaaatcgcctccaaatttctatttcataattattgaaatttgaatgttcattaacaaattaatgtgatttggccaccgttttgcaaaacttttgctgacaattttcgtgatgcctttcaacaggtgccaaatcggacaatgaccaattgctcaacgaatttctctgccgaaatcatgcgtttttttgtaattaatgagttaattaactgacgaattaccgatttattttttgccaaatttggcattgttttgctattaaaattccagttttctgctttgccaatgttcaatgtgtagtttgtggcgttcgttttgactttgcattgtccaaattgctcctttcgttttaatctgttttcaaaatttaattttctaagtaattagcgaatataaataaa

SEQ ID NO: 77623 - DNA, 2238 bp, Heterodera glycines
  unsure (1)..(2238): unsure at all n locations
atggccgctgacattggtcaaattcttcaacaattagttaaaaatcagacggaggcttttcaagcccttctccaaaatgcccaaacaaatcaaaattccaacaaccattccacaatttatgcgactatcaatagccaacttagccaatttacatataatccagaattggatttaacttttcaagcatggctcgaccgttttggcccgtccattcaggtggatggcaaggaccttccagacgcaatgcaagtgcgactgctgcttgggaagctcggtcaggaggagtacgctcgtcatgccgaacgtgtacttccaaaactgccgaccgacttcactctggcacagacaattgataagctcaaaattttgtttggggaaaccaaaagcattttcacacgtcgatatgagtgttttcagttaacaaaatcattttcccaatcaccattagattttgctagccaagtgaatgccatgtgtgaacgctcgaaaatggacttgaccaaagatgaaatcaaggccctcattttcctcactggactctcagatgaagacagagaactgagggaacgatgcttgcggattttggaggaagccaaaaagaaaacaccgccggaagtgatcacttttgagaagcttactgaagagtgccgtgcgtttttgtcattgcgcaacacatctcaatctttggcaactgtttctggaacaaacgccatcactctcaagccgcagaaattgaaggaacagcagctcaaaaagcgcagcacatcacagcgcccgtcgacgaaggcacaaagcaacaacaatcgcagcccttccccttttcagcgccaaccaaaaccgccatcaccgtgcaggttttgtggtcaaatgcattgggtgcgtgattgttcacgggcgccaacttgctcaaagtgcaaccgccgtggtcactacagttccgaatgccgctcatcatcttcatcccggcccaattcacaacgttacaacgcaacaatgtcggtcttcaacattacggacgacgacttatcggaatggataatgatcaactgcagcattaacaacattgatgtggtgttgatggctgactctgggtcccgtctgtcggtcattcagattggtttatgggaaaaattgggtaaacccaaactcataagtggcatcaaaaaggccaaatcttattctggtcactttttcgaaattttggggttttttgtctgttcagttacgtaccagggctgcacgcttcaactcaaatgccatgtcgccccggacggaccaatgaatttgttcggattgccatggatcaaagcgttcgaaatggcattgcagcgaccaatcgctacgacactcaatctcgcacaggcacacgccgtcacagtttgcgacgacccaaacactttggccaaaaatttaaaacaaaaattttcaaaagttttttcctcaagtttgggtctttgtacaaagatgcgggcgcacctccagctcaaaccggacgcacagcccattttctgccggcctcgtccagttccacatgcagccaaagcagctgtcgacgacgaactcgaccgtttgctcgcttgtggtgccataaaatctgtggacttcagcaaatgggcggcgccgattgtggtcgttaagaagaaatgtggcaatgtgcgggtttgtattgattttgcaaccgggcttaataacagtctggaactaaaccgccacccgctcccacgcattgatgatatttttgcctcgctggagggttgcacagtttttagtcaaattgatttccgcgacgcgtacctccaagtcgaattggacgaagagtcaaaggagctggtggacataaacacgcaccgtggtttatttcagtatcaacgtttaccattcggagtcaaaagtgcgccaagcatttttcaaaagttgatggacgagctcaccgctggccttcacggagtgttcgggtatttggacgattttatcgtggccacgcccacgttagaggagcacgatgctcttctaaaacttttctttggtcgcctccaagactgggggctccgtgttcatttaaataagtgcaaatttctttgtccccaaattaagtttcttgggcacattgtttctgccgaaggaattcgtcccgatccggaccgatcagcagcaattgagtcaatgccaccaccacatgactttgcaactctccgatcgttctttaggtgcactanatttattacgacgcttcattaa

SEQ ID NO: 77624 - DNA, 1184 bp, Heterodera glycines
  unsure (1)..(1184): unsure at all n locations
atgatttatggccgacgcttcactctgttgactgatcataagccactcatcgccattttcggttcgaagaatgggatcncaatctacgcggcgtctcgacttcaaagatgggctctcattttggctaattacgattttgaaataaaatatatctcaacgaattgttttgggcaggtagacgttctctcgcggcttgtggcacaacaacgcgagacggtggaggcggaagaacgagtgatcgccaacgtcgacaaaacttcacttcaaatttcagatgattcagcgctcgatgaatctgaaacggccgctgtcgactacatcttcatggccaacattgatcagctgcccgtcaccgcggatgaagtcgccgagcacactcaattggacactacgctcaggaaagttttcgatttttgccgtaatggatggcccaagaaatcgcctagtgatttgtctgcctttttcactcataggcacaaactttccgaagtgaatggttgcctccttttcggttaacgtgtcgtcattccggcagctttgcgtcagcgaattttggccgctcttcatttcactcacccgggaatcgttcgcatgagggcattggcacaacaacatgtttactggccccgcatggaccttgacattgaacgttgggttcgccactgcgttgactgtgcgatggcggcaaaaacaccaacaaaaactacactctctccatggcctaaggtctatgagcgcattcacatggattttccaggcccatgttctgacggcaatctctacctcatcatcgtggacgcattcagtaaatggcccgagacttttcaagtgaaaagcacttctgcggacaatgtcatcgttcaactcgagtggctcttttcgcgatacggttttccacgtgaaatcgttaccgacgatgggccaccctttcattcgaaagatttttcccatttttgcaggattaaaggtatcaagcaaacatttagtccgccgaatcacccacagagcaatgggcaagccgagcgttttgttgacattttcaaaaggcaaatgaagaagtgttcacacggagacaaaaagtggatcaccaattctctgttcgcctaccgcaacacaccaaatgccgcactgaaaggacaaacaccagctgaacttttccttggccgttcacctcgaactcaact

SEQ ID NO: 77625 - DNA, 724 bp, Heterodera glycines
atggatcaacttctttcaacactgattcaatacgatggaaaacatcgaagagtgatcactgtgaatggaaaaaggtgagctacggtaatctgatcaatcgattaaaatggattggattttctatcagcaaattcgcgagtttatttaaattttctatgcctgttttttattggtaaaaaatttcaaagatgtgttaaaaaattttaaacaaaatttctttccgaattaattttttcgtgactttcttgtttgtttttttttttggtagattgacccaaaaaattaaaaacttacgaaaaaaaatcgtgaatatttgtaggctgaatgccaaattttttttttattctgtataaaacagtaatattttttaatctttcggttgaatgattttcaagtacatacttggattcaagcacgcttcaattttttaaatctttttttaaaaaaagaataccacatgccattcaaatatactgaaacctgtgctaatattgtgattttaaaatatatttggcgttttgttatttaatttgtttcatttttgtttgtgatttttgtggagtgttggttgttagtttatgctgtcgcagttttcctattgattgtcctcgccctaattttatttggaattaaacgataatcatcttcggcattgggctgtattgttttgtgtttgctttgggctgttgtcttttgccgtgggcagtgcaacaacattaataaa

SEQ ID NO: 77626 - DNA, 340 bp, Heterodera glycines
atgttttacaaaataataattataataattgttattcattttttaacatttcgacaatcaaaagcatggagcttttgggaaaaacagcttgaaatggccagaccaaatgaggtgttaaattttattactttttttcccccaaaataattagtgataattagtactctgttaataatttaaggacggaatttatgagtttgatttaacaattgaacatgggatgacaatggtcacaactcaaaatgatggaattacaccaatcattgactattcaccagaacaagtttattattttataatcaatagttaaattttagtggcaaaattgcaaaaaaataaa

SEQ ID NO: 77627 - DNA, 540 bp, Heterodera glycines
atgcgtctaaatatattccttctcctaattgttcatctcctatttgtgtgtagcgatgttttcggtgacgagcaaagtgccgaaaaacaaagacaaatacaacaaaatggcattgcgagtctgaaaagtatgaattcatacacatcacgtgagtttgaagaaatttttggcattacgccaatcaaaccgggaaagctgaataagaaccagaaaaaagagttgaaaaaactgcgcagaaccgaagaaaagaaggccaaggagttcaaaaaggaccttaaatacttgccatttaacaaaggtaaatttaaattgctcttaaaaatgtcaaaagaaattttttaataatttaattttaaataaaaatagctttttcggattaatgttccgaaaatgtagaaatttcgggattcgaaaacaaatttataaaaaggggaaacatttttttacattttttgcttcagaaagagttaattaaaaattatttaaaaattggtaaatcgctcttaaatgtcctaagaatattttgtaattgagttttaa

SEQ ID NO: 77628 - DNA, 275 bp, Heterodera glycines
atgtgtacttttggaacagaattccatcttttcctcaaggttagcgctcgatttggaggcaaacggttcaccaggaccaatgccgactaatgttgcgcccaaattttgcaggatcggtgtccaaatttcggcaaaactgacctaaagtgaaaattgtaatgtgatattttttcaattttcagtcatgttacaatgccagggtccgtctcggcggagctcgaccaaatcagcacacgctttcccttcatcagcacgcccctttagtggtctcctaa

SEQ ID NO: 77629 - DNA, 765 bp, Heterodera glycines
aaacattgcaaatttaggagaccactaaaggggcgtgctgatgaagggaaagcgtgtgctgatttggtcgagctccgccgagacggaccctggcattgtaacatgactgaaaattgaaaaaatatcacattacaattttcactttaggtcagttttgccgaaatttggacaccgatcctgcaaaatttgggcgcaacattagtcggcattggtcctggtgaaccgtttgcctccaaatcgagcgctaaccttgaggaaaagatggaattctgttccaaaagtacacattttgagtgaattattacacttattttggatttatttctacagttgagcctcccgttgatgtgctgctggcggagacggactgccaggccgaggtggccaagctggtcgaggaacggggcggtttggccgtgtccagcgaatgggtcattcaggttggttctttccattattttaagccatggtttcccggaaatacgaaaagccgttccattttaaaggccatcgtcactggttcgctgcccgacctgggcgagcccggaggcgagaagttccgctacgattttgtttagtgttggctgaatgaacatccacagttttggtggtgaatgacggcggcaatggactttgactctacttgaacacacctaacaatatcataaaccattcgcttttttggaacgatacccggaaacttttctctttttgttgcagaattatctgccctaattaattattattttattgtcccactgacat

SEQ ID NO: 77630 - DNA, 255 bp, Heterodera glycines
atgtgtttcggccggaagaagaaagggaagcgacagagttcgcctgagtacaccaaagtggtgagttgttttttgaggctctatgtattgcaatttaattttttagactgatgaagctcctcccgacttttgtgagttgaggcgaaagagttaacgcgaaaatatttttttttcattttcagcggttccttcgagcctgttgtctgatgcatcctcagccgaacagaaggtcaaactgcccggcaacaccaagaa

SEQ ID NO: 77631 - DNA, 1375 bp, Heterodera glycines
atggacgccctcaaaagacttgcgagccgtgcacggcaggtaaaaaaggacggattgtggtgaatcaatttttttaaaattgccatccctgcacatttcagaagtcggcggagatcatcctgagcgcggagaagaccgaaatcggtaaggagggcatttttggatttccaaaaatcaaaaaaacaattccccaaaattcaggcgccgagcttgaacaattgctgaccaagaccgacaagacggaggagcacatgaagaagctggtgcatgccatcgaggtgtacctgcagccgaaccctggtggacacttggaatttgcaatttttggaggaaaacactaatttttcccccaattttcagcagtccgagcgctggacccgcgaaaggacaaatccggccgacagaatacgctggacggtcttggggaggcgatgaaggtgtggtttttggcattcacaacacattttaatgcccaccaaaatttaaggaagcagcatcgaaagcggtgggcgccgagtcgaccttcggaggtgagagaatttgaatcggaaatgctcaatttaattaaccccactaattgcattttctgttcttttcagctattctgctgaaggtgtcacagacggagtccaaaatggcagcaggggaacgccaactcatccaatcggtcaccacgcaaaccttggcaagcctccggcacctcctggagaacgaactgcgcaccgtccaggcgtggatttgcaatttttcactcaattttcgacaatttttaatccaaatccctcccttttcctttacagaaggaacgcagcgtgttgaacaagaaacggctggatttggacgcgacaaaaagccgttggaagcgcgcctcggacgacaaaaaacccgctgtacgtcgtgtgttcatttcgtcgccggggctccatttttcaaccatcgaccaatttcactgttttttttttcaggttgaggcagagttgcgcaaagcccaagacgaatttgacacccaactggagaccatcagcactgcgttggaggctcttcaaacggccgtggtgagaattctcaaccccaaaaaattgtttgacaaaatttcaattcttttccaggatcgtcaggctgaacaattggtgcagttcgtggcggcacagatcgaataccacagcagcagcctcaaacttctgaaggacctgaagcgcgacttgggagcctagtgattgatgagcacaacagcagaagaagaagcagacggatgatgagagacgaattgccatggagattcatattggacatacccatatttgtgtattatactggattaatccaaattgatgcgtatatattacttgtacttgtacataattgtatgtgtata

SEQ ID NO: 77632 - DNA, 1386 bp, Heterodera glycines
atgcaaccgttgtggcgcaagagcggcacttggtcttgcgaatgcaaatgtggcggcggcgaatggcggtgattttcaaatagattaaacatattcctcacgaaaaattcaaattcaatgtcaaaaaatcagaacaaattgcaaaactttttttttccaagggaaaagggctcctccggcaaccaatgagaaaatttggtgttatgaaatttataaaattcaaatattacgtaatatgccctgagcatcaaccatgactgatcaaattaaaatttaatattttaataaaatttaatttcgaagacttcacatttaaattatcggtcaaaatgtttttttaggttcgttttcctaattatttgtttcttgaaattcctcttttttgattttacttcccatttgtcagcaggcgtttaacgcgtattatcggaataatttttaattttttaaaagaataatagtataaaattaaaaatatattaagggattgtgtataaaatgttaaaattgtctgccaaacatttctttagcatgtttcgaccgagtggggcccaacggtcggtcggactgtcccgaccgcgtggcatactgtaccgtgcccatataccgtagtctgatgatacaggagtgcccgttcacctgcaacttgtgtaacacagcagctctaagccttcagcaacaggcgaaccgatttgtgcgaccacgcatttctcagccgtctccatggagcggcataaatttgccacagacaggcggaggcgtaccaaatgtaataatggcataagcaatgcttcatttaattgatcaattaattaaaattaatgattagtttttaggtacttttcggttttggtctggatttaatttattattttttttgattacaatggtgcgcaaaattgcacaaatatttgttctcactgcagaaattaacgaaatgagtatttgaggaaataattgcgcaaattgtggcatttagcctcaccaaattggcgcgtagtttttgaaaccctttgttgatttaaaaaaaaaatcaattccaggccccaaagccgaaaagtacctaaatttagaaatttctttacaacacaacttttggctcattttttaaatttggcataatgccgcatttttgtgtttttaaaaaaattaatggcaattattagtaggctccaatttttaggcactaaaaaccgtcaaaataggtaggctttaggctctaaaaaaaaccccaaaataggctctaaaaaatggaaaataggcactaaaaatcctcaaatttaagggcgtaaaatgaccaaattcattcaaaaaggcaaaaaaataagtctgatcagcattgagataaataatatctaaatcacaaatacttgtcgagaaaataaa

SEQ ID NO: 77633 - DNA, 703 bp, Heterodera glycines
atgctttttcacattttcaaatttattttcatttttttggtcatcacgacacaaaaacaacagtttgttgatgggcagcaatatttctgttatggtaatttattaattgaataatttataaattaattttctctgtgtgaaactgataggcgtcaattgaaaatttttaaattttgagaattttttacttttcctgagattagcttcgcttttataatgcctaaacgacacatttcggaatattaaagtttttaataaactcaaataaaaaatttttgatgatgaaagcaatttttaaagaatttttaaaattaaataaaaattaatttttgtagaggttgtccgcgacataacaaccggagcaaatgattgtccgcccccacttgtgtaccagccaagtgttcaagttaaaaacactaacaattaatccctcaaaattaaaaaatatttacattaaaaattaaataatttgaataaaataaaaacaaaaaaggctgacttaattagtttattcacagctgtgctgtggccaacaaccgataccaaacggaacaatacaacaaacttttgaccaactcccacagcccggctcaccggacgcaattccggacggatgcgaacgtccgttaaactaacaatatttatttattgaatacgataatttgtccgaaaaaatacgtcaaatttgtttttttttaataaa

SEQ ID NO: 77634 - DNA, 800 bp, Heterodera glycines
gaagtatggctatgctgaaaagctaacaatacaaaaactatggtagaaaataatattatcaatgcacatgaaaattgataattaaatataacataaatataaatttattttgtttaaattaattaaatagaaaaggataagagaaataaaagagagaaaataatttaaaaataaatttaattaaagtaagttgtataatatttttaatgaaaaattaaagcaaaaatatatgctaacaggtcaattctagcagtatctagtccctggtcagttatgaatcaaaaaataccgtttaataattatgtaaattgaatagaaataattatatataaagaaatgtaataaatttaacaaggaaatattgctaaaaataataattataaattattgataatctttataatccagtgagaaataaacagaattttagtgcctaaaaatacatttagaaaaagcctttaaaaatgctaactttttaaaacaatattccgagtatttatgatatgttaaaaaataacgacgcaaagttaagatttttactgttatcaatctaacaacatatatattgcagttatcaaatgtcaataaattaatttaagaaattatttattattttgttttgaagaaacatttttttaaattaaatatccatacaaaatttagaacaaataaattaaaaaccaaaaaaaaagttgaaaaaacaaataaataaacaaattatttcagaaataaatgattaaaattaatttcttaataatcttcgatttatagtgagtgacctaaatattttaaaaagtaaa

SEQ ID NO: 77635 - DNA, 1855 bp, Heterodera glycines
gaatttgaatcatttttgaacaacgaattggaaaataaacccgtggaagaagcgccggaatggctgaaatgtgaagaagagcaacggaactgcttaattggtcaactgagtgactcgtggataatgctgggcgctgtatgtcatatttctgatttgaatttttaagagtacggggtcgaaaaccaaagcgtggtaaagaaaattttttcggtttcctctctgtttttgtcgatccatactctaaaaagcttctcgttttattgtcattaaaattttatttagcctatcacaaaagacgagcagttgatgaaacaagacaaatattgtcccagcgaactgatcgctgaactgatcgaagccaaaaatgttttcgatacaatggaccgtaaggaagtggaggcagccaggtcacgagccaacccatacgaaacagttaaggcaggattcttccaaaacaggtaattgcgcatgctttttggctttgtttggtgcattcaaacttattattacaccaatttcccagttttgcagagctgcgatgaaaacagcaaacctcgacaaaatattcgattggcgtctcagctgggaatttgacgatgaaaggcgattggctaaaaaccctctcaacgaaaatgagcgtgacaacgtcgaaaggtgcgttttcaagttattttcttgttgagtcaaccttaaggttttctcctcctttttacttcgccgatgtttgcgcggggcccggcggatttagcgaatatatgttgtggcggaaagccttttacaacgccaagggattcggctttactttaacaggtttgaaatgatccctttgtattgagggagttggtctaaaagaaaagggaggggaggtcgaaatgacgggaaaaagcctaaaaaatatgttttttgctgtcccactctttcccgaatttgatcaaatgacaacattggatttaaggaaaggacgatttcaaattggaaagattcaaagccgcttcatctgattactttgagacattttatggggtcaatgaggatggggacgtgacaaatccgaacaatttggaatcgttggaaaagtttgtgaatgaccgcatccacactggttggaagcatgttttaagattgaagcattccgatccttttcgcttaggggtccatttggtgatgtgtgatggcggtttttctgtcgatggccaggaaaaccttcaggaggtcctttccaaacgcctttatctgtgccaattcattgtcggactgtctttatgccgtgccgaaaggcgtaaaatcaaagaggaaaacgtagagggaaatgctaaagtgacggaaaagggcggcaactttctgtgcaaactgttcgatgtgttcaccccattttcgatgggtcttatttatttgatgtgaacaaaacttttaaatcttataaatactttaactgtaacaaaatgatagggcggaaaaaacagcaaactttggaattgatattttaagaaaataaataatagcgggcctttcgaagttcgttaaaccgttccttcgtcattccccctcttttgcaggtatctctcttttgaccgtgtctctcttcataaaccgatcacttcccgacccgccaattctgaacggtaattccgtcaatcctttccacatttcttttaattctcattttagatatattttttgtgaaaatctgaatttatttggctccacaaaggttaaaaaatatttgatggaagtgaataaacgaatggaatcgatggacagaaaaaaggaggacattatggaattggtgcctgatgaagtgatcagcgaagacgacactttcatggcgtacattcggcaaagcatcgaacagtga

SEQ ID NO: 77636 - DNA, 153 bp, Heterodera glycines
cactaaattacaacacttcgccaactgcagaatgttagctgaatttaaatgaatgaatatttaataaaaatgaatgcttacatatattgacgcttgtgtattgttacataaatgttaattgaaataattagaataaatatttgccttaattaa

SEQ ID NO: 77637 - DNA, 563 bp, Heterodera glycines
atgcgcagaattgtgcgctcagacccacagggacctacaggaaaagagggaatgccaggctgtaagcaaaattattattattttttaaatccagaaatattcaaaaaataaataaatcaaaattatgttcaaaatgccaaaattttaaatcaaaaactcggatgcaataaataaaataatatggcactctttggaatttaatttatacgccatttgccatatatttggggtaatttcagcagaatttccttcaaaatattcgtttgaggcgtcaaaaactcaaaatttttctatagaaactatttagcatttattatttattttgccaaaaaatctttcagtgaacggcgagccgggccttcccgggccacccggcatttccggcgttcaatttggcgagcagatgttcagtcggccatgcattcaatgccggcaaggaccgcccggcaaaatgggccgccgtggcgacgtcggacagagcggaccgcttggcccacccggcgtaccaggcgcgccaggacgcatgggcaacccgggcaaggagggcaaagtgggcgagcaag

SEQ ID NO: 77638 - DNA, 1714 bp, Heterodera glycines
gagctcaaagcttttttgcattcttgctccgttggtgttggctccgaatgggaaagttgttcctcgttgagtctactcttgcactttcttttccaagagcacaaagatacacgccaattccgcaggtcctatcgaaacagtgcgtttcaattgcggactccaaatttttctctagatggttttacaagaaattacagctagaactgaatgatgtcactgcgcgaagttcgaccgccggtcgaattatccatggcattcagatccgcgacctcgaagcgggcatgaactcgccggtggtaaataatgtgcgagtggaaagtttccaactatctgaggacgatcccgacctcttcgaagaattggtccttcttttggacgtcgattaccgtggcggttttcaaatgtctgttgatgcgaatatggcctttggaaaatttgcacaactctctgttaaggtctttcaagtagtcttctttgtttacgacataaattttattaaagttactccaactgaatggccgcgctcgtttttcaatccgacgccaaccattcgcccattggagtttctcttttgttgaagcccctcagatggatttgaaagtcgattctcagttccaaggacggagtctccgccatttaattccgttgattaattcggcctttcggaaggctatacagctcaaacatgtgtggccaaactacaaattgcgtttcagaccattcttccaaaatcctctctacagtccctcgcccaatacaggtccattttggaccatagatcgaatatccctgtaattctaatttagctgccttcgagcatgttgatctctctggtgccggcttagaggtgactgtcctgtccgcatctcgcctaaacttgtccggctttgagcattctgcaatgcgtctgttctgcatggtttccattggtaagttttgaaagcgataacaaaatccattaccaaatataaattgaatagagaagcgacccatcaatccgtaccaaactagcgaccaaaacacttccgaaaagttgagaagagccgctcatttgctcagtgtccttctgcaatttacaagaaaaggggcgggcggtcctttgggactggcattcaacgccaacggcaaggttatttttgacgaagggaaaatgttttgggtcaaatgtttcctccggaattttttgtactggaatgaattttaaaaatggaattttcgactttttgttcaaattcgggtctggggattcggaaggggcttaaattaatggtggtatatttacgatcattaacaccaaaaagcctcaaattattgtttctttcatgccttgaaaataaaaaattttgctaaaaacgcgcaagtatctgaagtaggtatcaccaaattgaattatcccaggaaacaaaaaaagtagtaaaaatttagtctactcacttttgcttcgtgctttttgtccttttgtacacattaaaactgaaggaaccgaacagtcacgagcttcgggtggccaatgttgagccggggtcgaatgctgataagagcggctttcgggtcggcgacactttggtagcggtgaataatattccggtgagaaatgagcgacaggcgacgcgacttctgacggggacagcgggggatttgctcgttttagtggagagagagcttaacgaaagtgtaaaaggcagcgaagaatcggcgggtgaagagacggaag

SEQ ID NO: 77639 - DNA, 724 bp, Heterodera glycines
tagagttgagcgggagaccgggaccggggcgggaaatcccgggtttttcaggtcccggtcccgatcccggtcccggtttttggaaaaacagaaatcccggtcccggttttgccagtcccggtcccggcgggactaaataagcactggtaagaatgggggtctgggtgagaaaagagaagggaattggtgagggatcagaaatttttgataaaaaattaaattatttattttcatttatagcatagttcatatgcataagtggttaagtggctaaacatttttactttcattatttgtctcttcggttcaattccctgatggaacagaaaaaatttttatattttctttaccattattttaattgaatttaattaataaaaaatatcttaatttaaaattattatttttttcatttttagtagcctaaaaacccataaattaaccaaattgtaaatttattttaaaaaatacagaattttgggactcagaaaattccaagaacccccctgaaaacaaaatttttataattttcctcgaactcgtcccccaaaacgtacaaaattttatgggtacatttttgaatattggcaattttcataacaaagtgcagttaaattttcaatttttttcaaaaaaaattttcacttgggaaaagtcccggttggtcccgggttttttcgcggtcccggtcccggtcgaaaaacttggtcccggtcccggtttt

SEQ ID NO: 77640 - DNA, 430 bp, Heterodera glycines
atgacatttgccgggcgttttaccttatccccaaatcaatcaattcgatggataatttttatccaactttcatttgtaaaaggttagaaattttctttgtcaaccaaatccaacatttgttggtagcaaaaatggagaaacaagggaagaggagggaaatagcattggggaaggaggagagacggaagagaaagagaggaaaaggaaaaattcgacggaaggaagaggaggatgagagaagaatgaagcagaaaagagaggaacagcagcaaattgacacttttgaaaattttgaggtaggcccaaaaccgaaaagtaccgatattgttagatttggcttacgaagaaaaaagtgaatagttcaaagctccaaaacatgccaactgctgacggattccgatgcattcataagcagcgaaaacaaaacaaa

SEQ ID NO: 77641 - DNA, 391 bp, Heterodera glycines
atggtgccatttgaatttcttaacgaatggacaaaggaaaagctgacattggccaaagcaaaggaattgggcaaccgatggataatgaaacgatgcaaaattattggggagaccgcggcggttcagcagcaaaagaaagatgaaaattggggcaacaattgtaacaatgtgttcatttggctttacatttgcaataattgcattgggtgagcaattaaaaaaaggcatttaattttgtttaaataattaaaattccgcctaatttaggccattgtctcctccaccattcgcagaagaatccggacaaagcatcacaaaagggccgtcttctgctgacaaaatgagtgatggacaaaacaacaaaaacagtgatcagccgcagaagaaatga

SEQ ID NO: 77642 - DNA, 1514 bp, Heterodera glycines
gcaaaaaaggaagaaaaaagaggaggacaaaaaggagcagatagaggaagaaaaggaagaggaaaaggagacaaaagaaaaggaaaaggagtataaaaaagaacagacaggggaagaaaaggaagaggaaaaggagaagaaggaggaggaaaaggaagacaaaaaggagaaggaggaggaaaaggaagaggaaaaagaagacaaaaaggagcagacagaggaagaaaaggaagacagcaatttgataagtgataagagaagtggtaaagaggagtcaaaaaatgaacaaaaaatggaagaagatgcgcacgaaaaaggcaacagcaatttaaattatgttttgttggagcacgaaaacctaatggcatttgtggaaagggtaaatcttcttttcttttaaattgttttaaattaatcagtgccctcgagtgtactcattttagatttgcactgcatttagcgatcaaaatttaagaagcaggcaatttttttgaattttcccggcggcgcttatcggcaccgccagcagacctaaaaagctccctgattcgaaaaaattgactcaaaaatcgcgagcaaatttggttattttttgtacaaaaactgttagtaaatctcacctaaattatcccgaggcgcctgtcggcaccgccttctccccctcctcgggattttggaccagagtctgaatttaaaatttggacgatgtttgtttgtcgtgaattcaaagaaataatttgattttgatttaaaattttcttcatttttagtatagtaattttattgtgataaattgcgtggcggagcagaaaaatgtttatgacaatttatgcaaattccttaaaggaaaaattagaacaaaattaatggacaaaattgaaataaaaaatataaaaaaaattgaaattggtgtaatggacacggaggcgaacagagaagtaacactcaaaattgtggacgaattggttaaccggggattcaggtgacaaattgggcgggagtaattaattaattaattaatcggggttgaattgacatgaaataacgttgagggaggggagcgggtcatcaataaattaaataaaccctataattaccttatcccgagaaattttgacctttgaagtgattaatgcaaatacaaaacaaaaaaatgtcgctcgcccgaaaaaatttattatccttcatttttttcaatttaaaattttaaaaaattaatttgttcaaattttagcattaattttggcaaagtttggctttttggcattaaaataccagcgaatggcaacgaaaatttgaaggaacacttgatgaacttcgatattgaaatgaaaatggaatatttgcagcagttgggccttttgtctgttgaaatggacgaaacggaaataattaacgaattccaaaaattgggtgccaatgttttgtcgacggtggcgaaaaaatggtttttgatggacattttggaggacaaaaaacattgggaaaatgatgaagtaacaatctatgaatga

SEQ ID NO: 77643 - DNA, 387 bp, Heterodera glycines
atgaaacaaacggaaaaaagaacaaaaaaagaaaaatgcaaaaaaggaagaaaaaagaggaggacaaaaaggagcagacagaggaagaaaaggaagaggaaaaggagaccaaaagaaaaggaaaaggagtataaaaaagaacagacaggggaagaaaaggaagaggaaaaggagaagaaggaggaggaaaaggaagaggaaaaagaagacaaaaaggagcagacagaggaagaaaaggaagacagcaatttgataagtgataagagaagtggtaaagaggagtcaaaaaatgaacaaaaaatggaagaagatgcgcacgaaaaaggcaacagcaatttaaattatgttttgttggagcacgaaaacctaatggcatttgtggaaagg

SEQ ID NO: 77644 - DNA, 819 bp, Heterodera glycines
  unsure (1)..(819): unsure at all n locations
atgtcaatgagtttttcgacttttcttaccagagaagaaaaggaattggaccaggctttcgacaagctcaaacaaatacgggaacaaattaacaagcgaaagggtgtcaaagttgaagcaacaaaaaatgctaagggcgaagtgataattgcgcagggtgtgtaatgttaatttaattttagttttgcttccgtactagcaatgaatgaatgtaaaaaaagatcaattgcaatttaattaatctctcaaaactgcttaagcctttcaagacggtgaaacgaggacagtggaagttcgaaaagctgcggcagatggcaaattggtgttcagttgcaagcctcaaaaagatgtattcaaacaaaggccacacaccaataaacggaatagggtaaagaaaaccaaaaaaagatactagtacgttttcaagcggtcactttagaatgacgataacagcaacagtatttccgaagacaacaacgacccatccgaacaacaggttggcatggtcaaacatggaagactcgaatcggacggagttcagaatgaacacgaaggcacagtccaagccactggagagcacacctcacaaccagcggatcagatggacggtgccgagaaaacacagacaaatgtcggacccngtcggtctgttcttcaatgcaccaatttcttctaaatgctattatttgatcaacgaaactgcatattttcaatgctatgaaaattagttcttcagggcttttcaatggaaactttcgcattccaaaaaagaaacccaggatggacgaccaagaatttggtgtcgagtttttcaagtaa

SEQ ID NO: 77645 - DNA, 862 bp, Heterodera glycines
  unsure (1)..(862): unsure at all n locations
gttagaagtgctgaagacgagattggctcttcgaaggtctcncaanacatatgttctttnntagtcgcaattatntaattcttgtacttttgttttagaacaggcgaactcaatcgtgggctgtgccattttgctagagaaatgtaccaccgtgagggcttcacctgtctttacagagttttttctcaatttctttttgacaaataaaacaatattatagggatatgccgccaattgtattgggattattccatacgccggcatcgatttggctgtttatgagacgctaaagaatttgtggattagacggaagaattcgcctgggacggacccgggttggatttatatttaaaataagaggccaaattgggtttcggcaactaactaatctattttgaggagtttttatcaggtgtggtcgtaattctcggctgtggtcttgtctcaagctcagtcggacaagtcataacatatccaattgcactcatacggacaaaattacaagccagaggtcagctgacgaaaaattttaattgaacaaaaagtaggaacgaactgtaatagagccaaaaattactttactcactaaacacaaacaaattttcgccgtataatcttgcaaattacattattttcagtaatttcgagtgatccaaatcagccttcgacaataacaggacaggtaccaaactgcgagtgttctttaatgtcgctttcttaggttgcgtacatagtgaaacacgaagggtaccgtggcttataccgaggactggcgcccaatttcatgaaggtgctgcccgccgtttccatttcctacttgacctatgagcaatgccgaaagtggttgggggctaagatgacc

SEQ ID NO: 77646 - DNA, 198 bp, Heterodera glycines
atggctgcacgttctaatactaataaagaaactctaaagaaccatcaaacgagtaaaacaattgcaaccaagaagctggtggttcaagactacaaaaatcgattgaaggacagtataaaatcgttaaatgataattttgaatgtatattgggcgcttcgaaggtcctgttattgctgattcgtggatttgtcggcatc

SEQ ID NO: 77647 - DNA, 435 bp, Heterodera glycines
atgctaaaggtaaattgcgatgatgcgacacatcgatcaaacagtgccggaaaattaggagagcattatgcaatcagaaacgaagcaattgcgagggctgcgcttctcgtcaaggcaacaaatgagttaaaaatgctgacaaagtaagtttttatttattatgaatttcaattaattagtaatttagtgaaatccgagaatttctcactattcgcgacttcaattttataagcaactcaatttccaagtcagcattcgttcgcttagctatttacccgacgataaaagcaatcaaagaaattcagagcagaagaagatttcaaaaagcgattgaaacaatatgaaaatgattacagtgcacttcggatgagcataagcacaatggcatcagagattgatcgagaattggtggaaaattctttgtatagattctga

SEQ ID NO: 77648 - DNA, 652 bp, Heterodera glycines
atgagtgagtcaattaacgttagagacttatggagggaattcaatgagataaagtcagcgcttcagaaaaaaatgcttaaaaaaccgaatttccacgaagcaattgtgcagtgtcgtcgtattgctactttattggagtgagtgaaatgcattcttattaagtaggagtttgggtttttggaacatccattgctttagggacaatgaacaattcgatcagtcggcagtatgtcatcgagaaattgcagcattttgtgcaaagattggaaatcattttatggagcgacggcatttgctgaaggcggcaaaattatattattatgcgcagatgatgatccaacgaacgaattcggaatgtatcttgggaaaggactaattgttgcaatgggtggatagaaggattttctccgcttgattttttgctaatttctcgccattttaggctctgctgagtttggcaaactcatggagcagtgctatttggaagtgatccatggtttgctgaggtcggagtcttccttcaattatttctcaatcgttggcttggttcattttgaacttgcaattcaactgatttcgctaaaagaaccgttcaaagcattcatttatttgaggagaggtcagaagaaaaattgggcaaaaaaggggccaa

SEQ ID NO: 77649 - DNA, 724 bp, Heterodera glycines
atgttcccgggcaagtcaaatatccaaatgctcaagttcatgatggatttgcgcgggaagttcccgaacaaggtgattcgaaaggcggtcttcaaggaccaacacttcgactacaactgcaattttttgtaccatgagacggacaaagtcaccggcaaagtgagtactgacaaacaaacaatcataaattctgagtaaacctttgaatgcatttgtctttccattgtcaggacaaagttacagtgctcaccaacatcaaattgttgcgcaatcttccggctgaactctccggtgatcaggaacttgacagagatgggtttgccaaggttgaccatttccggtctttgctcgaacagatgacagctttggacccctccaaacgaatttcgtgttcggatgctttgaaacaccctttcattgtagaaaagtgatgtgaactttaagcgcagaacatatttgaacttaattccacttcctttataatttgttttcattaaacaatcgaaaaagtacggaaaataatgataaaagttttaaatgtcgccgaaaagaaaaaaatgaattcaaagagatttttactttttttctgatatttggcaaattttgagtttttgaaggaaaaaaaatttgacgacctttttaggtgcaccagttttcatgtcctttagaagatttagaaaatggggggggggcagacaaactgttaccttttcttgttaataaa

SEQ ID NO: 77650 - DNA, 1079 bp, Heterodera glycines
atggcaaaacaagccgaggaatatgaacgggaagagaaaatgcgccaatttctggaggagaagcaaagggaaaaaattgaacgctgcaaaggggaaagtgccgaagttgtagaagaaagtgagcagcagcaaaaggaggcggacactgcggatgggtcccttcagttcgacatgttcgccgatgatgcccccgttgaggtaaaacggaccaaatatcctttgtaattcgttttgtttcagcttctttcgaaagcagccacaatccaatccctggacacaaccacagctgcgttgaaggataattgggatgacaccgaaggatactatcgtttgtttttttaaattggtttaatgtacaagaaattagaaatttcagcattttaacgataaaaaaaataaatttaaatgacatttcagaattagattttatgttctgtttttttaatcttatggtgtttttgctctatttatatgttccaatttcttttattttaaggtgtgcgaatcggcgaacaattggacggtcgttaccgcgtttacggctacacaggggccggagtgttcggaaatgtcgtccgggcaactgacactcaccgttcaaattcaaaagtggctataaaaattatccgcaacaacgacatgatgtgagacacaaaaaactgcagtattccgttaaataaattcttttttctattgaatgaataatattcattaaatgtttaattaggcgtaagaccggtgtgcgggaattggaagtgttgaagaagttgaacgaggccgaccgattggacaagtatcacattttacagctttacaggcaattttaccatcggaatcacttgtgtttggtcttcgaaaatctcaggtgttttcttttgtcgtcactttgttagtaacagattcccccccccccccccccctttagcatgaatttgagggaagtgctgaagaagtacggcaacaacgtcggccttcacatgaaagcggtccgcagttatgcacaacaattacttttggcaatgaaactgctgaaaaaatgcaacattttgcatgcggacataaagccggacaatattttg

SEQ ID NO: 77651 - DNA, 3415 bp, Heterodera glycines
atgactggtattatttcaaccgaacccagtgtaaatacagtcgatgattccaaaagcagtggttcttctgcaagtaagcgattctcagctaatggactaaccgatactttgctcattcagaccctgaaatcagtgctgaacaggaattctgtctatatgaacttgaaacactttctgattcttctagcattggcttggttctgaggtatctatttatttgcatactttggcagtaattactttccaccaaaaagagcaatttatgattctggagatgtgcacaaattcacacatgctttggagaagcgaataactcactatgacaagagcatattgaaggtgtgcactcatcattatcagggctttctcgattcgatcaaacagcttcgtgggctcaaagaaaaatgtgcggagattcgcgtaattttctttttttaatgtttttcaatttatcatttaaacagaaaatgacagagacgactgatcaccaggttcaagaggaaagcaaggaactgctcaagcgcagtgccgaaattgtccgatatcgacgattacaccgaaatgccaacatagccattcaacaactttcgatgtgcttaccaatgttggaaaattatacacatctgcaaaaattaatggagcagaaaaagtaatggttctaaacgcgattttaggaaaataacattggactgtctatcatggctcttatttatgggggttaaactgtatgatagtccctatcattgcactcttcgagatcatatttttttaataaaaagaccatttccaggtatttacaagccttgaaaattctcgaagaacttgagcataattacttaaatcagcttcataaatatcggtttgcgcatcaattcgtcaaatcaatcaagccgattcgagaccagattagagagaaatcgtattccgaactgaccgacttcctcgaaaaattaattgtaatttttacatttatgatttaaaactgaaattatttgtttagaaaatctcagaaacaatcggtgaagacgcatgcaaacaagtggacatttgaatgattgaaatttatggaccttttatttttagaccgagaagttctacacacaatttcattcgaattccgctgagaaaacacaaaaagcaaaccaaatgggcagtgcaaatattttagtgggcaaaatggaattgttggatattgaaatttccgaggacggatcgttgcttagaaagacagcaaacgcagcgaaaccaatgcaaagggacaacgaaggaaaaacaacagaaaaaccgaaaccgatggctagaaagatgcttccggcgaacaaacaacaacatcagcatgttcaattccattcacaggacaaattggaattggggccggtccaccgatgctgccaaatattcaatgttatggtaggcatttggagaaattcagaaatcacagcaatttttaattcttttcaacaacagttaatgttattataacagggtgaccgcgacaaatttgaagcctactacagaaagcaaagatgcgaccaactccaactgattgttggacgacaaatttcaatggtaagttttttatgaatatacgaacaatttcagaatagtcaacaaataaaaatggtgaagaagaatgccaaaacggacctgtcaggattttcccgggatcctgtttgtttattgatgctaaaattttgttaattttgcataatgtttatccaattttcaatttcgctttttaaccccaaaagtgttcctttggtgtttggaacacactgccgaaccgtaaccgttcctttcagaaaataaaaactagaaaaattgattgaaatattttagctctcttgtaattttttaggctttttgtattctcatgtgggtaatcaaatgtgattcgatccgtgtcctatttccaaaccccaaacctgaatttttcaaaatatggtctcttttttatttaattatatatgttttttatttataaatagcaaaagtgttcactaatcaatggcgaaattatgaagtttttacgcttgcaaattaaacaaagaaatttatatgattttttattatgatttcttttgcaaaaaatgcctttgaaaataaatgattgacaataagagaattttgtctattttttaaacatccgaaaaatttagacagattccgtggaagtgttcgtaccatatctcaacgaaatcgtcggcttttttgtcattgaaaatcgaatcgctcaaattcagtcgtcgcttgtaaccgctggacacaaagacgaggcctgggaattggccttaaatagcatctcagactcaataaacgcacattttgtgagttttttttaattaaaatcttaacattttttgatttagggctcatgccaaaatgtttctctgatgttagcaatgaagaaactgatccttctgtttacacttaccaccaaaagttgtggttacgacccgaccactctctacagtctacttcaaaactttaggtaattatcgtttttctaaaaattaatttagtttctttttctgggataaatacaaccaaattttgatcgaggaatacagtgaacagtttgaaaatgcgttagagaacgacgattacacgcccattcaagtgaaggatgagcgcgagtatcgcaaggtggtcgaagagtttcccgtcaacaaaagaagcgttgaccaagaggtgagttgacccctttataatttggttataatttgattgattggaactcactcattttcaggatgcatttccacgaaaatttcccttttctcggtttgtgccaaaagtttattgccaggcaaaagaatttgtcgcgaattgtgtgcgctttatggaagacctgcaattgtcccactcggaagtaagcgacaccgtcagacgatatgcaaacattttattggccaaatggtcaaatgcgctgagaaagttcgtcagctcgcgaaaacgatcgcttattcaggtggggtttcccaattcctttatctgcaccaccgcattttaagctcatccaaatcaccattaacatgggatatcttgaacgatcttgcgaatttctcgagcgatttattgcggaaatggcgcgtaatttaagtggcgaattcgttggttcattgggcaacagtgggggcactttgtttgaaggagggggccatttggtcgcattgaagaaccaatgtatttatccgattggacatttattttctatgcttttcatttttagtgttcagagattctcgatcagaagttgagcaactcatagacgaggctttccgggagaaagtccaagtatttttggacaattgtaagttaacgtttgccggaatatgcacatatttcgatacttttagcgcattacgtttgggagttggaacagtcaagtggagtcgcaagtgaatttatgtga

SEQ ID NO: 77652 - DNA, 489 bp, Heterodera glycines
acgtgcaaattccttgccgatcgcatgagttcgatgttactttcgtcggagcatcgttcggttagcatcggtgcacttgagcagttttcgcttgatgtgatgcaatgcgaacttttcactgcccagtgccctgtgcccggtttcgaagataatgctctcgccattactttcgcacatttgcgtcaattgttggacttggtgatggggcccgactggacaactttctttgccgaaagggatgaaggaaattcgcatcgcaagggcggaagcagcggcaccaaatacgcccgagtaaaggcgtcgagtgccgcggcacttttggaaaagtaaacctctgaaatgttttgtgtccagctttttaaaaatttcagagtaattgaatttgaaaagaaaaacagtggcttttttgctattggtcgagcggacagtcgcgacaaacagaaactatatgagacaattctacgaaaattgcgatcatttacagattaa

SEQ ID NO: 77653 - DNA, 499 bp, Heterodera glycines
ttccaacacaattggcgctggacaatttgggacggtttatgcgggaacaaatgtaaaagatggacatcgagtggccgttaaagtaattagacaaattacctattttagtttttgacttattttttaatggttatttcctcaggttcttttaaaagagaagtttctccactcggccttttgttgtgttggctcgttgagaaatgagttcattttgcttaagaagttgaaacatcccggcatcataaacttagaaatgctgacggaatcttcgaaagaaatattcgctgtgatggaaagggcggacaaagacatgctcgagttcatcctgagccaggcatatttttcaggagttttttttaagaatgataattttttaggaaaacaggcgactggacgaacgtcacaccaaatttttgttgcggcaaatactcagtgccattcattttctccacggtcggagagtcgcgcactgcgatttgaagccgggtaaagacaaacg

SEQ ID NO: 77654 - DNA, 1656 bp, Heterodera glycines
  unsure (1)..(1656): unsure at all n locations
cttgccgtcagaaacattcttcgctatgttcctaatcgcttccatcactttcttggccctgaatttgccgatgaactcgtccattgcgggcacatttatgccttccgttttatgccctactttgtgctaaaggttagggcgtatgagcggagataattgggacacataattaatactagagactgaagtttttcgagtcgagacaaagcgaccgtttgtaaggtttaggcaccgccgttggacaaaattgagacgcggagcagacaagcagctgcaataattctgatgctgttgaacaacttggacccagaagttgcccaatttccgcaggtcactgcgattaaatggcaattagctaattaccatttgacgtatttccgccattcccataaatcgtcttcctttttttattgtcaattgaccatttttgttttgtttgaaggaattggtcacttacggcggcaatggccaagtcttttccaattggatccaattccgactgacccttcgtttgttggcccaaatgacagacgaacagactttggccatgtattcgggccacccgctcggtccttctcctcccgataattagctgaatgccgcccttcccttctttagggcttttcccctcccacaaagatgcgccgcgaatggtgatcaccaacggaatggttctcgacattcaccaatgactgcataatgaatcaaagcaattccttcccctcagatgatccctaattactccaccaagtcactctatgacaaattttttgctctcggagtcacaatttatggccaaatgaccgccgggagttattgttacattggaccgcaaggaatcgttcacggaacaacggcagacaaaatttgaacatccaaagcaatttgtttttcctggcacagattacactgatgagtgccattcggaagtatctcggaaaggggataagtccagcggggaaagtgttcgtcacttctggtctgggagggatgagcggagcacaggcgaaggccgcagtgatcgccggtgggtcgaagggattttattcggcaaatatttgccacttttaaaggctgtgtcggagtgattgctgaggtgaattgttaacggaaatacaaagtgatcagaaaagatactcttggcaaaggtcagcgaaagtgcgctgaagaagagacatggccaagggtggctggacacattcagcgccgacttggaagtgatcgtccgatgggtcagagaaagtcggagcaatcgaagggtaatcaaagacggacaaattcatttataaaacgaatgaaggcgataagcatcggatacttgggcaatgtcgtggaattgtggtaaacactgcacaataacccctgctaattgaaaggatcaaatgtttaaaatgccagggaaagactggcggaagagcccgagttgatcgtggaactgggctcagaccaaacctcgtgtcacaacgcttttaggagggggctattgcccggtaggactaagttttgacgaggcaaatcgaatgctaacggaggacaagccaaattttgatcggatggtgcggcagaggttgggattanagcgaacacccctacacatttgtccattctgaagcttattgcgacatattgccgctatcgaaaaactgttcgctcgcg

SEQ ID NO: 77655 - DNA, 797 bp, Heterodera glycines
cagacagactgtgagtagaattacagactttcaatggtcttttggcaaaatgcctttgtcagtgagtgaatggaggcgggagcagtacgaagacaatttgttgtggatcaaaaatgcggagaagcaccaattggtggtgggatcggaggcacgcattttatattcggacggaatgggaagggtcgaattggcacgggcattcaatgcggcaattagggaacgaaagttggaggtcgaaagggatggttggattgtgtattatgttaaaacacgtgaattgttgtgcgggacagggaccaattgtgatcagtcgagaccatcatgacgtcagcggcaccgattcgcccttccgcgaaacgtcggacatcggcgacggatcggcgtacacagccgacatggccattcaggtgccaatggccgagaattaggcgacattgccttaccttcagaatgtaatcggcgattcctttcggggggcgacttgggtgtccattcacaacggagggggcgtcgggtggggagacgccataaacggaggcttcggcatgttcctcgatgggtccgcagtgagttacgtaagacagagaacagtgaacaaaggaaatcccatgaaggaagcggaccaaagactgagttcgatgttggcatgggacgtggcgaatggcgtggcccggagatgttgggcagggaatgagaaggcaatggaaacggtgaagagaatggaagggatggacccggtactgaaagtggtggtcccggaaagggtggacgaagaacttttggacggactgaaattc

SEQ ID NO: 77656 - DNA, 1207 bp, Heterodera glycines
atgtctggccaaataaagactccgactaatcagaaattgctcacaaatgttgcaattgtgcggatgaaaaagtgtggcaaacgctttgaaattgcatgttacaaaaacaaagttttgaattggcgcaacaaaacgttagtttttttatttgggcagaataaagcacatcattttgttcagtgagaaggacattgacgaagtgctgcagacgcaaacagtttttgtcaatgtttcaaagggacaattggcaaaaagggacgacctccaagcatcatttggcactgaagaccaattggaaatttgtaaattggtcagtccttaattgggaaaatgaaaattttaaacagtttttagatactcgaaaagggcgatttgcaaatttcagacaaagagagacaagtgacctcggagagctcttttaaggtaatgataatttcttctaatttccgctcactttcaatccaaataccagtccttttttccattttaggaggttgccaatctgatcacggatatgtgcgtcaattccgagacacagcgacccttttcacttgctgtaagatttgattgttttaattatgctaatcgaattgactaatttgctgtttcagacaattgagaaggcattgcatgatgcgcacttctcattgaaaagcaatcggtccacgaaacaacaggtgaccgttttatttaaaccttttttattgaaattttaaaggccctcgaaatgataccgaaattgcgcgagtcgttgaaaattgaccgtgcgaaaatgcgaattcgagtgtctgtgcctgccaaaaatgcgaaaatgttgcacccaaagctaaaggcattttttgacaccaccgaagtcgaagattgggacaaaggcgacctcgaaatggttattattttatgtgtggaataaacccagataatgtattgtgcttttaggtgggtctgattgagcccggcagttacaaaacaatcgttgaacttgtgaaaggtgacaaaaaggagaaagttgaacagattggactggaactgctgagtctgaaggttattggagagaatgaggtggaaataagctgaaaagtgaaaacattcgaatgatttcgttttttattgtgatttgacccattctcaacatttgacaatgaattttttgcatttgagtcaatttgctgccccgcaggtgcattattcacaacttaaaatgaattga

SEQ ID NO: 77657 - DNA, 1386 bp, Heterodera glycines
atggtgtcgaaaaacattttccgtgttcttcccccaagtgacaattcggaatttgacccagaggaggacgaacccacgcttgaagtgtcatggcctcacttacaggtactccaataaaaaatagaaatactctgtgcaacctatacaactaaattctttgcatagtattgccaaagttttgataactaaattcgattattttagctcgtttacgaattgtttttgcgttttctcgagtcaacagattttcaagcatctattggcaagaaatatattgaccagcgatttgttcttcaactgctcgaacttttcgattcggaagatccccgtgaaagggattttctaaagacaattttgcaccgtatttacggaaaatttttggggcttcgtgcgttcattcgaaagcagatcaactacatgtttttgtctttcgtatttgagactgagtcattcaacggagtgggagaacttctggaaatccttggaaggtgtttttatgtagccgaatataatggaaactaaaccaattaatttaagcatcatcaatggatttgcgcttcctttgaagcaagagcacaaagtttttctcgtaaaagtattgttgccactgcacaaaccccgttgtctgaacctctatcatgcgcaggtcagttccgcttgggttctcttaaaaaccaagttttatgcaaaaaataaagacgaacagtttattttatttttattttccgttgacctaaagtattactagtgtgaatgcagtaaagtaaacgcactctatgattgttttcggctctcttttagctcgcttattgtgtcgtgcaattcattgaaaaggattcgtctcttactcctcaagtgttcgattcgctgctcaaattttggccaaaaacatacagttcaaaagaggttagttgtatttgtattcccattgcaaaatttagttttgtttttgcttttaggttatgtttttgggcgaagttgaggagattttggatataattgagccggaacagttcaagaagatcatcgaccctctttttaagcagctcgccaattgcgtgtcgagtcctcattttcaagtatcaaattaaacattttcaaatcatttgctattgtttgaggttgccgaaagagcgctttacttttggaacaacgaatacattctgtcgctgattgaggactgcagtgcccaagtgatgcccattatgttccctgctctttatcgtatcagcaaagagcattggaacccaaccatcgtggctctcgtttacaatgtgctcaagacttttatggaaatgaatgggaagctgttcgacgaattgaccacgaattacaaattggagagacaaaagtaaagaaaaattaaatcaccttttacttgagtca

SEQ ID NO: 77658 - DNA, 875 bp, Heterodera glycines
atgcaaaagactgtgctttttacacctcttacaaatctcgtaatgacaggggcagtaatgacaacacttaattttatgtggacagttcattttttcaatttaattttatttttggttgctatttatagaaggggtatataaagggagtgaaaggaccatttgattggtacattgtatcaaaaattcaaaaaccgataatcgtaaatataattgctctcactaatctcggtaccggaattaaactaaactctctgacgatcaccgaattcgaatttaagtataaccctagaaaattcaatgccgcggttatcaaatgtacaagccccatcaaagccacggcattattatgggaatccgggaaaatgatatgtctggggacgaaaagtctgatagactgtgaaaatgctattaaaaaatttatagaaataattaagagctcggggtgtccgggggcttcttacaccggacacacggttgaaaatattgtttcgacctttaaattcggacgtgaaattgaactgaacgagtttcgaaaaaatcgtcgtgcattttatgaaccggaaatattttgcggtttaaatttcaagcggggtaaaagcatggcagcgttaattttctggaccggtaaagtcgtaattacgggaactaaaaacaattctgaattgaggaaatgtatcatgatattctcccctatttgaaaattgctcaaaagaatttaatgagacgataaaaaatttttatttattgagacggtcccgaattgatattaaaagaaatttttctatctaaattagtacagaaacatatgtattttgttgaatatttaattaagatatatttttgatggtaattgcataaagtttttttttaataaa

SEQ ID NO: 77659 - DNA, 3292 bp, Heterodera glycines
atgttgttgttagtggtggtgctgatgttcatttgtctcttagaggaggtgacaatgttagttcgcaatccgcatctgagacggattgccaaggtcaccggcaggggcagcagcaacaagaatcggttaatttaataaccacctttagggacaaacaactttaaaagtaaataattaaatttttaaattttttataattaattactaaatttttgaaaaaaatggctgaatattttattttattttgaaatggaaaaatgcttctgtgtttggattttacagctttgcaagtttggttttatttaaccatttctataacaaatttctatagcatttccatatattgagtttattattttacgttttgttgctgtttatattctaatttttataagaaattctgcaattctttcttcaatattacaagcgaaaataatttaatgtcgccgcccatcaaaaaaagaaaagcattttccggcgccgtcaattcttctgcaacaattagtgaaaatcagcagcaatcgccgagttcacttgtgaaaacattttttggaagtcgacggcattggtaacactgacgaaacgcaattaaaaattgccaatttaatgggggaggatcaaaagtagtagactttttcattaaaatattaataagttgggtgtcgtccgaaaattaggatggtcatgatgaattgggcgcgtaaactgaaaatttcagctgggtgtgtaacgacatttggatggacattttcccactttttgaccgtcctgaacttggcctcaaattggtactgatttcgccccgtttcgatgcgttggtggacacgcatttcaatgccagcacaacaaaattgataattcgaaaaacaatcaaaattcaaaaaaagtttggtgcggaagaacccaagctttgtgtgcttgccatcaatgccaaatttgcggaaactggcgcggaaggacaaaaaattcgcatgttgactaggaatgccgaattcgtggaattaccttggcccgacagtccgctgcctaacaaaattcgcttttatttactttccattgagtaatttttttcaaatcgcgggttctctcctggacggacgatttgtacctttttccaaaagaattttcgacaaaaacatacataatataaaatcgattctacatccgtttcgaccaattccgaacactgactcaaacaaaaaatcgaaaccccatttttgaacaaaattcagatttatacacaaaccgcaaaaaaatattatagaaatcaagtccggattaggaatttgttgaaacggctgtaattattgggtttcccgaccctgaaaactcctaaaataatttgggccaacaaatcagttccatttcaggtgtatcgaccattcagttatcacttttctccgttccaatcaaaaaatttgggacaatgggaccaaattggttttgaatgtgcgttgttcacacaaaaccggaactgattcccagccgatttgggatatttgggcccgtcaaatttggccaatttttgtaccaaatattcgccgttttcaatttctcaatgctgacaacctggacaatttgcgtcgtctcatctccacaacaattctcaccgatctcaacctgaattcaatgcattctggtaatctgttgcccgatttgatcgctgatgatgggccaaatgcaactgctggccaagcgttgtccaaatggttgcacacgccgagaaaagatggccaaccgaggcgattgcgttgcagaattatgaatacacctaaagattgggtcaacgatttcaaggaggttacaatatttcggggattttttcatgttagccccaaaaactctaaatttggacaatttattttcgttcattttgctatctattttttcaaaaagaaaatgaatcctgcaaataaaacaactttgtggaaaagaaaatattaaattttaatgattcttacgcgtgtttttttgccttgaaaaacaagctaatgccgggatttttgaaatggcattgagtcgtccctgctaattggcgctgtttcggcatgcaatttactaatgggctcgcaaatgtccttattttaagatttttcttattttcaggcttcccctaaactttttaaatttattctgcttaattatatttttttttgctggtttttgatttaaaaaatcctttaaaatggcctttttataaaaaaatgctaccaaaaactctcaattttcaaattttcccgcaggcgtctatcggcactgccggcccccaaaagccttatgttcttaaaaattggttcgaaatcgcaaaacttgagcctttttggtgaaaatctgttgataaaatgaactcaaattttcaaagaaaaattttccacggccctctgtttccaaaaagtttgttttgttttttggaaaaaacgcgtcgcaaaaaattttttgttttcattttgactaaaatttccaaagtgttgatttttgagatgattttcgtcggccaaatgctggttttgaaaattttagacagcctagtttttaattgtctctacaatgtaaagccttttgttcaaaaatctttatttttggggtcaaaatcttttttttaaccgtttaacctcgtttgcccttattttggaaaaaaatactttcaagacttgtttttactcgttaattgtttaggcatttctccatgccacaacttcaaccagttacataattagctttgcactgtttgggtcaatgccaattgaaccattcgaattggtgaacgaacgaacgggggaaaagctgacattgatgagtaaaaaaacaaacaatttttatatttggtggctgaagcgatgcccaattggggaagaggcgacagtttggcagaatgaagaaaatttaaacaatgtttacttttatttaagtgcccactgaatttggtgcggcaacggcattttcttttgttattaaattatgaattaatcgatgtacgaaaaattgcgaatatgtacgaattttcgaaattggtatttctagttcaaaaattgcataaataatctcttattgaaggattgatggttttcaatttgtttccgtgtgtttaaaccaattttgtccaaaactctaatttcgaaaattatgactttcgactttttgttcgaattcgcgcccggggttcgaaattcagaacgatatttgtcaagaattttatttttatactaccatacttaatgctacagaactttaatatagaatatttgtagcactgacgcattttccactaacgattttccggtcacggaataaa

SEQ ID NO: 77660 - DNA, 1103 bp, Heterodera glycines
atggtggacagtgactttgaagaggaggaggagtatccgatggataatcaccaccaccaccacaaacaacgggcgtgcatgcagaacaatcaccgtcaccagccaaacaacctaaaaaatggtgacatttccgctgctgtgccgtcctcattctcctcaacaacaacggcaccaccggttggagcaacgagtgcaaacgcctcctcttcttccgtttctcataaacgggcaccgcgtcggctgaacgcggacggcacgccggcggagcgattgaagccgggccgcaaatcggtggacgaattgcgggagaaatttgcgcaaaagttgaccgccgtttggcaggacgtgcacaatttgaaggttggaaatgcttttttagatccatggatgtataatcaaatcgaacatcatactcgcgcagtacttcaaattattgtaaaatttagacattttaaaaattcgccaagctattaaattattctaccaaagcgcaacttatttcttgtatttttcaaaaactaccatgtcattttttcgcacaatttcttaacaacaccaattattattttttatttcacttgatacttcttacaattagcattggcagaccaagaattagttagaatcgtctgaaaaacaggaaaatttgtcctaaatcaaaaaaggagacaattttaagtattcatttgttaccaaggtgttcttttcgtcaacagatattccaaaaatcactgtttttaaatgataataacaacaatttttaagatgggcgaccgtgcgttggccgagccgttcgagtacttgccatgtgacaagacattccccgactactaccgcaccatcaccaagcccatctcgttgatgtgcattcagcgcaaaatcaaggagcagcggtacgcggactcggacgaactgctcgcggacctgcgccagatgtttgccaacgcgcgcatcttcaacaaaccggacgcacaaatctgtgcggatgtgactattttggagtcggtggcggttggctcaatgcgcacccataccgagggggtcacactgttctacccgtacagacgcactgacaagggctggtcggagaaggcgtccattga

SEQ ID NO: 77661 - DNA, 650 bp, Heterodera glycines
ctcattgtccacaaatgcggacggcacaaatttgtcgtcagtgccatcaaccaccgctgcaactgcacaacagctggcggcacatcatcaacggcaacaacaacaatctcttccgcaactgcaacaaccgactcacaatcagcaacaacaccacccctcagcaatatgtgcacaacaacagcgctcattggccgccgcttcgtcttccgccgtttatgttgcaccgccgctgccgccgtcctcggtgtgccagacactgaacaacaacaacaacaataatgccattgccagcacaagcggtgccgtttattatgccgctggtggtggctatttggtgccacagcagcagcaacaattcattttacatcaccacaacgtcatgcctatggcacaagcgcaaccgccgcaacaatttgccgctccccattcggttgtccatgttcagcaacagcagaaataccttcatcaacaacaacaacaaccgatggcattagcaacatctgtcaaacacttgcagcagcaacaacagtgccatcaatcgcaacagcagcagcagtatttctcgtcaacttcggcactgatcaacggcggtggcataccgccaaatgcggctttgcagcaagcgctgcacaatgggccaattgctgcag

SEQ ID NO: 77662 - DNA, 563 bp, Heterodera glycines
gctcactttgcagggttatggaaagaattcttagccaaaatatttacaactttctcttaaaaaacaataaaatttcggaataccaatttggttttgttagaaataggtctacgacaagtcaactaataacagttgtggaagattggtacgaggcaattataaatggaaaaaatgttgactgtatttatattgattttcaaaaagcatttgactcagtgccccataatttacttttatacaaattggaaaaaataggtataaggggcaaacttttgatgcggataaagggctttttgagtaataggacttttcgagttaaaattggggattctttatcctcaagtaaaaaagttacctctggcgtcccccagggctctgtcctgggccctttattatttttgatttatattaacgatcttcctgatgctttgccatcaggagtgaaaataaaattatatgctgatgatgttaaattatatatttgatataaagcaagagccgacacggaaattatgcataaatcaaagcataatttattcgaatgggcaaataaatggcaaata

SEQ ID NO: 77663 - DNA, 1232 bp, Heterodera glycines
atgacaaaattaataattgatgatcaatatttatttgtcaatattacctgtcaggttgaagtgaacccgggccaaattggcggccccggcgcggcaactgccgtttcaaagtgccaccgtaaaatgctggacaaggtggagattatgcatgtcaagaaattgccaattttggcgaaggcatttgtgcctgaaaatcgcccagggccaggaattgcgcggaccctttaccaagcctggtaaacaaaattcaaaaatgcttttaaaatcgattaaagtcaattagcacattcattagtatggacatactcaacaattaatgccaatgaaaaaaaaagatttctttgatagggtagcgacaaaatttcaaggacagataaacgtgcaaatcaagatacttagaaatatatatattagttcgtcaatttttttgacaggaaaatgttcggcgacccaaacgcaatcattttgtacgtcaatcagcccgacctgttcccggtgtgccacttagagcagctccaatttgtgatgttccaagtggaaaagcttgccaagcaggacggtaaccatgtgctggtccgtcgggcgtcatttattgaactgcgcaaaagatgaacaaatttgggaatgtctaaaattggcatccatgtgccattcgagacaaggtgccatgcgtagtttaaagagtcaacaactttgaaagattgggatcaattattggaattaatctggacctgattttgaattgaacctattttttgtggttttgtgatcggatcaggatcatggaaaaatattttcaggatctttctaaactgtggcccaaacttatttaaaacgaaaaaaaccctgattcgctgattactgatctggggaccgaaaaatccatgtgaaatccgtatgcatgaagattgttttggcgatctccgatgcacacgatccattgttctgctgatccgatccttggatcaattttatttttttcgaaaataaaaaattttttttcgattctttcaaaacccaaaaatcctattaattctaagcctaatttttagacttagccttgacgaggccggcgactattcactgtattttgacggtaccaagcgtgttgcattagttcacatggcctacggttatttgcctgaacattaccctgagaaggactttgacctgcgcgtgatgatggagcgttcaacagctattgtacaaatttaaattcattgaaaatataa

SEQ ID NO: 77664 - DNA, 271 bp, Heterodera glycines
atggttcgcccgttcgagaagccgcaccaagaggaagtgaacagtgagatgggcatctatggctcactgatcggtgatcagagtacgggaaaagtgctggtcaactcggtgaacgggcatttggtgcgaagcaaagtcagaatttgaacacaataaaaaataacttaaattaaattaattttttaatatattagcaaatgcgtgttaattctgcgttgtctttccattagtttaaagttcattagcatttttatacatttttatattgtta

SEQ ID NO: 77665 - DNA, 931 bp, Heterodera glycines
atgattaatttaatttttccattattcatatatggtataacaatgctttccgaattggccgaccacggtaatttcaaatttatttaaaaaaaacccaaaaaatatattatctaatatcaactcaatattctagaaaatgactttccgacatctcttgatctacgctacactcggcgcggagaacgacgtattccttatccacaaaatcaaggtaaattcttgaatgaaaattttgttgaccaacatagttcggtgccactgtttccgtgccattgcggatgaagaatccttaattttttctcagttgaccaattttataaatttgatttatatcgacaaagaaggccattttaagatatttctaagcatttaaaaacattgtcaaaagttgtaacaaaaaacttcaaaaaaagtttaaaaattttgagttctctggcacgaaacgttggcacgaaattgaaactagaaaaatttaataggaatcaaggccaatagatttgttataagaacctggataagaaatggaatttaacatagtaggtcggattagggtcgagtccgacctgaattctgggtcgggatttggtacgcaaaaaacgatggctctagtgcactttatgagtccaatcgacttttatgagtccaatcaattgaaaatactcggtttttatacaataactttgttcatgttcgagctaaacctatctttttggtatcatttgaaagtacaaagtctaacgaagctaaaatatataaaatcgcagcgtttaggcaattaccaaaaaagatttgattatttaagtaaatacttattattttcgtttgtaactttcttgaaatgttagaattttcttgttttctcgtattattacattatttagacttcgtactttcgaatgataccaaaaagatagggtttgttcgagcataa

SEQ ID NO: 77666 - DNA, 876 bp, Heterodera glycines
atggggaaaagagaaaagggaaggggaaaagaaaaagaggaaaaggaggaagaggagggaaaattgaaatggaagaaaaagagaggacagagaatatggattagggaggaaaagaggaaagggagaaagaggaaaaaagaggaagagaaggaaagaaaaatggaagaggaaaaggaagagaaaataggaaggaaaagagataagggaagagaaaaaaagaaaagggaagaagaaagatgaaagggaaggggagaaaagaggaaggagaaagggaaagaaaagagaaaagggatgaggaaagatgaaaacggaagaggaaggaaatagaaaaaggaagggtagagaaaagagaaagagttcgagtggggtggtgttgtaatttgtgtaacggagtaggacaaacaatcggcgaaagtgaaagcaaaaggacagtgagaagcgacgacagcccaacagaacaaaagtcgaatggtcgtttaatttaattaattttttgttttttttttgtcgcttttcccttttctccccaattaatcacttcccttctttgtgttacttttggcagcctcataaaaatgcaaataacagctgaagtcactcataagagagaaaacattggcatggcattcgaatttggtggcacattttcgctggggcggggaaggcaaatgcaaaattggtggacaattaattggcgaacgaatgagcggaggagcacaacagaatcgatgaatgatgttttggagttgggggaatgggggaagaaagtcaacggaaggacggagggacaggggaggcaaaacggcaccaatttgacggcattttgtcattgcattggcacgccttccctccccaagtccacgttcgcgcaataaa

SEQ ID NO: 77667 - DNA, 1524 bp, Heterodera glycines
gagctgagaaaatggtataaggtaaggagtaggaggagaaaaatgagcctaataaatttaaatttttgaggactttgtccgcgactgcccaagcggagaattgagactcgacgaagtgagagacagagagatagagagggggggggggcgaagagaggggagggtgggcgtaaaggatcacggaggcggatcaaagtgtttatttatgattttggtggctttagttccaaaatatttatcgtcaatttttccccaacggcgacccgtcaaaatttgccgcctttgtgttcaatgtgttcgacgacaatcgggtggaattgcgaagggatcaatatcattcagttaatttgaattctgttcaggacgggcacatcagtttcaaagagttcatcgcggcactttcgatcacttcgcggggaacgctcgacgagaaattggactgtcagtggggggggggggggggacgaattgaaactcgaattcgattaatcgcctttttcttattttcaggggcattttcactgtacgacgtggacaaagatgggttcatcaccaaagcagaaatggccaatgtcagaacaaaaaagcaattgaccaatattatttaaattatttgagtaattttaatgaataaattttgcacagattgtggacgcaatttactcaatgattggcaatatgttggaattgccaaaggacgaagacacaccacagaaaaggtgaatgaaaatggaaaacagtgcaaaaataaaaaattaaattaaaaatataaataaaataaaaaatataaaaataaaattcagagtggagaaaatctttgccaacatggatttggtgagaaaatgaaaataaattaattctccaatcagatgagggtttaatttgtttttttcattctcagaattttgacggcaaattgacacgggaagaattcaaacagggatcaaagaatgacccatggatagtgcaggtaaaaaagaaggggggagagaaagggggaaagagagagagagggggagagagagagagagaaaagagagaaagggagagagagagggggagagagagagaggggcagagagggggagagagagagagggagcgggagtgagaaagggagagggaaagagaggaggagagagagagaggggcagagagtgagagagggggagagagagaaagcgggaaagagagagaaagggagagagagatggggagtgaaagagaaagagggggagaaagagaaaagagagagagagagagaaaagagagagagagagagaaaagagagaaagggagagagagaaaagagagaaagggagagagagatggggagagaaaggtggaaagaaagagagaggcgggagaggacggaacttaccctgggaggggcagaatggagaaggggaggggagaagggcgcttaaaacttataaaggcttataattgaaaattctccaggcactgacaatggaaatgaatggcgccgccggcgaagagcaaacgcctcaaaaagccgcgtga

SEQ ID NO: 77668 - DNA, 154 bp, Heterodera glycines
gatttcaacgtggtacaaaagatcaaccaagtgcccgtctatgaaaaggtatttcctaattgtaagcgaattttaatttaaaatttattatttttagagtgggagaccccgagaagagatttcaatcatttccatttctctgaagagtgtttag

SEQ ID NO: 77669 - DNA, 2437 bp, Heterodera glycines
atggctgtcgatgctccgaatgatcaacaaaaaagtgagccatcatctgagtcaattcccaaaaatgttagttttctttactttttattgtaaatttaaaaaatttacaggaattccgacgacccgcggacccaaatattaaggaaaatggaggacgagcgaagaaggcgagggttgagcagcaaaaaagtcaaattggggagccaaacattcaccaaaccaacacaatcccccggtttcagctctgaaacacgaggaagtgtatttgcgtgccatcccgcggtcggaccaatacgaaaagtcatttatgcacagaaatgtgataactcacgtcaaatgcacggagtgggctgtgttttatgggacattcgaagttataaattgaattaaaattaagaaacgattttatcatcacggccagtgaggacggacatttgaaattttggaagaaaaagcacaacgaaggcatcgaatttgtgaagcactttcgttgccatttgagtgggcaaccgttttttttttttttattattatttgtttgttttttagaaggattttcggacattgcaattaatcacagcggaacactgatggccacttgctgtgcccatgacaaatcggccaaagtgttcgacgtggccaacttcgacatgatcgtacgctgttaaaatgacgaattgtttgcaacatttcttctttttctccctctactcagaatatgttcaaattggacttcagtccgcgctgcgtttgctttgtccaccagggctccgatttgatcagcgccttggccatttccgatgcgaattcaggcaaaatttacattttggacgcaaacggagacaaacagccgatccatgttttcgaatcactccaccaacacccggtcattctcatgcaggtaaactgaccgctgaaacgaccagactattacaatacataaattgacattttgttgcatttcactcgctcacaaagggcggaaattttatatttttcaaaaaaaaagcattttaccatttaattacagtacacagcggcatttgatgtagcaatttcctttggtgagtttagaaagcaaattttttgaatttgtccaattttacagacgaaattggaatggttgaatattggtcaggcagcagaaatgagttttcatttcccaagacggtcaatttcgaatttaaaacggacacggatttatacgaattttgcaaggtttcgtttgctgtgatgtcattcatttaacccatttgatttgacagataaaacaaatgcccaaagcattggccatcagtccggacggacggacattcgccgtttggtgttccaattcgtacatttacatttttgacttgagaagcggcaaaataatcaaaaaactcgacgaaactcttcaacgatacatcgaaatgggaaaggagactaagtgaattaagcaaaaaaagttcattgaattggactgaatggttaaggggcaacggactgccggcgatcgaatggaatcgccgtgttgcgctcgaaaaggaaatgagccgtgacccgaacgcactgcgattcatcagcatcacttacgacgcctccagcaactttctcatcttcccaactccgctcggcataaccgtaaaccgtcgcggaattgccaattattttggcacattctaattttggcaggtgtacaatttggtcagcgaccaagtggcaaggcgtattggggcgggagagaatctgcgctttgttggcgttgcgttgtgtcgcgctgttcccggcgtaacggtgccattcatttccttttgaccatttaaaatagatttttctaatggaattgcacaggaaaaactgcaaggtgcagcaacaagtgtgaaggttgaggcggcggacaatccgaaccttcgcatcaacgaacccgacccaatgctggtgcttatttatttgcccaacccaccaacgaatacattctctaaattaaacatttttcaggtgacttgtgcgcatcgtaagtttttactgtcacaaattcaataaaatgcaaaaatgaacttcaaaagtccaccaaattgtgtcccctccccatactgaagtgtccgaactcagctgtcctcgggcatgcccacccgtccctctccttataagtaatacatttgtacaatttcccttcccccaggcaacaatcgtttttatttgtttaccaatgtcgaaccgtacgcggaagaagcggatggtgtgttttgttatgcaaaaacagtcattaaaaatcgtttttgtctttttaagggtccactcatagcagagacgtgtacaacgaaaagccgctaaaggaggacatgatcaccgcaatagaagtgagttagggagacgagccaattgtgggaaataatttaatttatttttattactgcaggaagaagcaccccaatcgaagctgtgcaacaagtaa

SEQ ID NO: 77670 - DNA, 635 bp, Heterodera glycines
atgtcaaattctttaattgaatcgctcgttagagccgctgggtttttgatttatcgtaagaatacggctggacaaattgagtaccttttgcttcaagtgtcttatgagcctttccattggacgcctcccaaaggtaattttgatgctaatctcgagaaaagacctatcattgttattcaaaatgtaaagctatcgcttgggccgattttagggcatgtcgaccccggggaggacgaatggacggcagcaatcagagaaacgatggaggaggccgggattgacgtgaacaaattgcgaatccacaaggaatttatgtacgaaatgcgctatttgtcaaaatccaccaaatacggggaggaacagaagaaagttggacatttaaaaaattaacttttgaaaattcaacacattttggaaaagaatttttctcatttgaattggtttcataaaattgttctgtttaggtcacttattggcttgccgaatccacagacccggaagtgaaagttatgttgtccgatgagcatcaaaattggaaatgggccgagcttaaaagtgcgcttgaattggccaaatttgatgagatgaagaaacttctgaacaaagctgagatgtttattgccgagaatctgtaa

SEQ ID NO: 77671 - DNA, 318 bp, Heterodera glycines
ggattctgcgtggcgctggagggaagccgtttcaaaggcaccgaaatgctcagagatttcgtgacggacgaagcgacgagcgaaaaataccaaagaattgcggacgaacagccaatggccagcgcattttacgaagtgatgttttcttcgctgaatgaaagcggcgaggcggaaaatgtcactttaattgcgattgacgaggaggagggaatggggacgacgccaaacggaaatcggacaaaaaaaagggaggagcaaaacgaaggaaaggaaatggaacgaacagcagaaaacggaacagtgccaacaaataattaa

SEQ ID NO: 77672 - DNA, 1236 bp, Heterodera glycines
gttttcgttttgcttggccacaacggcgcgggcaagtccaccacttttgctgtgctcaccggctccgtgcgcgcctcgggcggcgatgttctgatctgcgggcaacagttggagcacaatttgcgcgactgtcagcgtcgcattggcttctgtccccagtacaatccgttgttcgacaaattgacagtgcgcgagcatttgctgttttacggacgaatgaaactgagccaaggggagggcgcggaagaattgagacggcaattggacgtcgaagttgccgaattggtcgcagaagttggcattgcggcgcaattggacacggcaagttgacgcgagagggagcggggaaagtggggaggggcgtgcgagaagtgagaaggggtggagagaaaagggcgggcgggggaagacgggagacagacgcgagagaaagtggggaggagaagagggcggcagaacgtgtagagcaagggcggaaggacgggagggagttaattctgctgctaaaaattcgtccataattttttcagttggctaaaaatttgagcggtggacagaagcgcaaattgtgtcttgcgatggctttggtgggccgaagtccggtcgttttgctggacgaacccaccgcagggatggacccgggggcgcggaacgaggccggcaaagtgttggagaggataaagcgcgatcggtgattatttttttgggcgtgagagaaatagccggggaatggctaactcgccccttgctatcactctctgccaaactacaacccgtttcattcgttgatcactaccatccgccgtttgagtacgattcgcttggccacccaaacgctttccatttcagtaccattctgttgaccacccattacatggaggaggccaacacgttgggcgatcgcattggcattatggtccaaggccgcatggtgtgcaacgggtcgcccgagtttctgaagcagcgctttggcgtcggctacgttttgtccgtcgttgtccgtgcgggtgccgactttccccgcgcagtcggcaaagtgttcgacgcaattaccaaacattcgcccggcgcaaaacttgaacagaaccaaaaaccacccgagttttccatcgtcctcccgctgggcgacaagcgaaagttcggcgacattttcgcggagttggagcagtgcacggacgaatttggagttgactcattcggagtgtcttcaaacacgctggagcaagtgttcctcaa

SEQ ID NO: 77673 - DNA, 1276 bp, Heterodera glycines
  unsure (1)..(1276): unsure at all n locations
atgctgaaggatctgttcaaagatgtgatgggcaacatgggcgccgcaatgtccgtgatcaccgccttctccataatgactgccacaatggtgatgccgttggtggaggagcgaggaagccgcttcaaacaccaggtgagggacgggcggaggacgaacggacggggaatgggcggacaattcggcggatggacggaaacttattggaaaagaatgaaagttgngagaccggtgatcaatacgtcattcctatcgaatgtctgatcaaatttaaacaagacaatcttgctcaaattgccaaatgccattgtccataatatttgccttggcaaatgccattcttccgatcgctttgatcactttctattttcctattttcttcctcttttcttccttaatcttccctaatctccccccccctccctctgctgcagttgttgctgacccatctccacccctttgtctattgggcttccgttctgttgtggaacttcgttctgtacgccgtgttctgttccgtcatcggtgtctctctgttcttcttcaattggatgcgtccctttctcggctccatcgttctcctttggcttctttacttttgggccaccgttccaatggtcggctgcgcgtctttcctttttgaaaaggtataaatattatttatttattttttatttcaatttgatttcttcactttttgctccaggcgacgaaggcattcagtgcgcttatgtgttggtttatggtcggctccatgctttccaccattggcaccgctcttttgaaactgaatgccggtgccatcggcgaacgtaccgcccttctgctgaacatgctgcttggcattgtgttgcccaccaaagcgttaagcggcggcattctcaacctggcactgattgccacttatcagcaactgattggccaacatttcgacgacgggtccgacaacagtttcttcggcactgccgggcccatcggcgagctgtggaaggaattccgacgggaactgttcgccatgggcatcgccgggctcatcttctgggttctgttggcactgctccaatcgcgccgcgtcgcctgggcatggcacaaaatgagcaacaacatcgccgtgagggacaatgcttttggagtcccttctcctgataatgcgacagcattcagatggtcatctacggcaatcggtcgctgtctgaggaggacgaagacgaagacgtacgggaagagcgggacagaatgttacgggagaccaacgagagccacgcccttgccgtga

SEQ ID NO: 77674 - DNA, 2225 bp, Heterodera glycines
  unsure (1)..(2225): unsure at all n locations
atgatgcttgaccagaatattattcgtgagtcggaatccgagttcgcttctcctattgtgatggtcccgaaagcggacaaaaaatcatggagatttgcggttgattacagggcgttgaataaaatgaccaaaaagagagtttttcatcttccgaatattcaagagcttttggatttaatgggagccaaaaaatattacacatgcatggacatgcagcaagggtttatgcaaatccccatggcaaaggaggacattgaaaagacagcttttatttctcatttgggcatttatgaatttatcacgatgccttttggtttaacggcagcaccggacacatttcagagggtaatgaaatgagactaattacccatcgattgagcgagaagctttggcattagtctattcagtgaaagaattttcaccttatattgttggatcaggaataagtaagatcatcacagattgtatgggaaatcgtgagaactgagattgtgaaagcacaagaaagaaacaaagagggaaatgatgccataagaagggccacagaaagagagttcgaaattggggatttagttttggttaaaaaggaagtgatgaaacataaatttgatcaaaggtggggtggaccattaagatgtgttggaattgaggcagaaagaaaaaatttgattttacagtcattagatggaaaaggaaaatataaaaaagtacatcaagaaaaagtgaagaaattccatggtccagcaactttgcctttgagagaggcggatgagccgataaattgggaaaaatatgtgcatgatccaaatttggaacaggaggaggcagaagaaagtgaagaagaaggctttgagattgtcttgagtaaagagaaagaaatgagcggggaaatgattggcaaaagcaaaaaattttcaaaatttggttttgaaagcagtgaagaggaggagaatggtaatactattgcttttgttcaaaatcaggaagaaataagtgacgatgagggtcccgaaattttctttgaaaacagaaattttgtgttcgaaaatgacgagacaccaactttgttggcagttatgttgaacggtaaaatggttacggtgtgtacagggtggttaaatcccaccataattccccttacttcatcggtccctgagaaccaagtggaagaaaattgggaaatttatagtaatgaagacggtgagagatatgtgacgtgttggatttttggagagagttttgaaatgtacattagcagtattacggacaaaattgttttgggcatggatgtccaatttctttttgcagaaaaatggtcattaaaaacggaaaatgaacgggaatcatattgggaaataatttcgggaataaatggagtaatgtatgaaataaaccagattccagaaattttcataagtgaaaaagaaaattatgacgaccaaaacgagttcagaatgagtataaatgtcataagaagtgaaaaaaatgaagaaatgggacaatttatgaaaaataaggagcgaaataagcagcttttaggcctaatcgagaacatgaacaagaaaggcagattaaacgagcccaaagaaaagaacgggaaaatttacgaaagccattcatttttcaagatggaattgttatcgaaagaggaggaagaatctctgaagaggttgaagagaaagctcgaacatcaacttctgaaggtccagcaaagtctgaccgaaagcgaaaaatggaaatccggaacgtcggacgatgatccagtgggaccacaggagcgagaagaaaatgaggaagaaacgacgaaaaagggcaaaggaatggagaaaaaagaggaggaggagaagaaaggaagagaggaaaaagaaaaagagacggaaaagaagaaggaagagatgaagcagaaggacgagacggaaaccaaacgaagcctcagcgtcggaacaacgaaagacgatgaaatctcgattgtggattctgaagaaaaagaaagagatgccttcgaaaacccgccgaagccgacaaacgagcgaatggcattttgggagtcgactttgaacaatgaggcaaaaaaggatttgcgagaggacaaagagaaagccttanaaaacacaggccaaggtattgtcgtaagctccagaaaacgaacgataaacgaagtcgacccgccaactctgtcnaatgaagccgccacgaaattcggggaaaaatgcggcaagcattga

SEQ ID NO: 77675 - DNA, 1435 bp, Heterodera glycines
atgctcaaaacttttgcagcccggaaagtttatgcaccttataattatggaagtgttgattttgaactacgggctcaagaaagttcaactgtggcgttaattgaagcgcttccaaaagcgaaaccgagcaatgaagaaaaagccttttttacatttttgagccacaagttttccttcgccggtgatttcagcccaataccaatttaaaaaattcggaaaggagaaaattttgtgtaattaaagccatttaaaataatattaaaaaattaaataatattaatatgttagtgcattgttattttttggttatttcagaaaaaaccaaaacaaaaataactgcatggaatattggcggattttttgaattttttattgagtggcaaagaagtatgaaaagcattaaaaagccattaaaaatttttttagggatgcactattaaacttcaaaatgtcaaagttaaagaaggccttggaaaagacgagattgtgttcgtttttgtgaacacaagcaagattgtttgttttttatgaaaaaccttttaaaaaactttatttagtagggatggatattttggcaaaatcctaaattttttacgtacttaatatgcacagttaaacacgaaaaacaggtttacactttgcttaggatgtctacaatgatttttaatattttttattattacttttgttttgtatttaatacctaggaacgtattttttggattttttgaaaaaaacaccaacaaaaaactattagtaattggaaacatttctcaaaaatttctacaaaatttttttgttgatagaaattttgattgagtgatttttttgtaatttaaagtagcaatttcgcgatttttatgcctgaaatttccatccttactaatagtaaattgatttaataattttaaaacacaaggttgtatccgtttatgcgtggcacgaaagccgacagcatacaatcttacaaaaagattggatggaacaatttgtaccgatggtatcaacaaaacccaatttgtttttcccaattcgatcaaatttgaagtgggcgatgaatttacagcgaatgcagtgaatgcggacactaatgagggtttgaaaaaggctatgttaataatatttttattaaaaaaatgcatgcgtgaatttaaataaatcccttttaatttctttgcagctggagttttgacattgacttcttatgacgagtctgcactggtccgacacaacgataaaacaattacttatgaattaacagaaattgaatatccataatatattcacatcctttaaaataattcgtgttaaaatgaattatcaacagagttttcgtcaaaaaataattttattttgttttaaaaactctgttaaattttttaatttgtgtttttttaacgcttgaaattatggaaatatttttgtttgaaataaa

SEQ ID NO: 77676 - DNA, 371 bp, Heterodera glycines
atgcaacaacaaaaatgcaaaaaacccaaatatttaatattcatggtaaataaagtgatccgcggatcaggtcgatttagaggaaaggaaaatagcgttggatttgatgagaactactgaggaaaagaaaaggaatacaatccacggatcgagatccatggatcacccaatccgatctttatgcatacggattttgatccacggatttttcgatcctcgaatcagtgattcgtggatcacgatccggggatccgatcctgatctttatgcatacgggtactgaagtttccattgcattattttattatttgtttatcatcataatcgctacttgttttttaattatattaatttatgattttttcaataaa

SEQ ID NO: 77677 - DNA, 1220 bp, Heterodera glycines
atggcggcgcgattcaatgaagccatggtggctcgcttgatcgaacttgttcaatcgcgtcaagatgatttgaaccctccaactcgaactgcaaaagcaaacgaaaagcaaaaagaggcgtggaaatttgtcactgattctatgaatcgtgagtttcctcaggaagtgccccagggcggcttaacgattgcacaaatccaaacaaaattcaaaaatctaaaacaaagggccaaggacgaacgacaaaccgaaaaaaagttaatcatatgtgcgcctgtgctgggtttcagcattttctttaggcatcagcgtgccacaggcggtggaaagaaattcgaaatgactgaagtttcgcgcaatgttcaagatgatttgaaccctccaactcgaactgcaaaagcaaacgaaaagcaaaaagaggcgtggaaatttgtcactgattctatgaatcgtgagtttcctcaggaagtgccccagggcggcttaacgattgcacaaatccaaacaaaattcaaaaatctaaaacaaagggccaaggacgaacgacaaaccgaaaaaaagttaatcatatgtgcgcctgtgctgggtttcagcattttctttaggcatcagcgtgccacaggcggtggaaagaaattcgaaatgactgaagtttcgcgcaatgtttcccaattgtttgctgattcaccggcatttgagggtagatatgtgttcgagctaatgtgtaagtagatgtttgttaaaggagtgcccggcggcgtacagaccggtctcaacatcggcgacaccattttctttgaaggcaaagaacaagaggaaagtgccgaattttcctcacagcaagttgttgttgaagaaggaaagtcctatgccgttcttggcactgtgccacgcggagaggcggtgaaaactccaaaatttgaatcaagcacctctcgcgtgccattccgatctcgtgccggaactgcttcaactgttacagctgctgatgtaatggaactgcagcggagtgttctcgagatgcaatttgaagaaatgacaaaaaaacaagaaatttttaaaaaatttgaggatgttcttgacgatgctaagacattttttactgagggtcgcgaattttttcgtggaaagcattcaaatgagaaagaaacttaaataatgctacattcatttattaattggtgcgttttagcactttgtatttttttcagtttatttta

SEQ ID NO: 77678 - DNA, 1119 bp, Heterodera glycines
atgagaatggagataaaagtagaatgtgttagggaagagagtatctcattggaaagagaagaagagatacgaattgcaattaatgtgcaacaaaaagactcaaatgggcaagtgacagctgtattagaggtaattagcaaataaaaaggaggtattagtgaagaaataattagcaaagcaattagaaatgtttgaagaaatagcagaagaagaaacagcgagagaaagaaaaaggcagaagagataaacgaaaaagccgaagcaggaagagaaagctgcggaagtgccgaagtgaatgaagaaaaggagcgaaaggaagcagaagcaaatgggaagagagatgccgaagaaaaggccaaaaaagaggcagaagcaaagaaaaaggaggaagaaatgaagaaacaaaaggcaaagcccgaggaaaagcccgcggcacctgcagaagccaaagcactagtgccggaacagaagaaggcagaagagacaaaggaaaagctgaagcaggaagagaaagctgcggaagtgccgacctcacctgaagaaaagaagagaaaggaagcagaagcaaaagcgaagagagatgccgaagaaaaggccaaaaaagaggcagaagcaaagaaaaaggaggaagaaatgaagaaacaaaaggcaaagcccgaggaaaagcccgcggcacctgcagaagccaaagcactagtgccggaacagaagaaggcagaagagacaaaggaaaagctgaagcaggaagagaaagctgcggaagtgccgacctcacctgaagaaaagaagagaaaggaagcagaagcaaaagcgaagagagatgccgaagaaaaggccaaaaaagaggcagaagcaaagaaaaaggaggaagaaatgaagaaacaaaaggcaaagcccgaggaaaagcccgcggcacctgcagaagccaaagcactagtgccggaacagaagaaggcagaagagacaaaggaaaagctgaagcaggaagagaaagctgcggaagtgccgacctcacctgaagaaaagaagcgaaaggaagcagaagcaaaagcgaagagagatgccgaagaaaaggcccaaaaaagaggcagaagcaaagaaaaaggaggaaagaaatga

SEQ ID NO: 77679 - DNA, 826 bp, Heterodera glycines
atgccaaatttagccgaattccaatggatggttaataatttcgaagtgaaagatggcaaaaacgtcgagatcaaacagatggtcgagaatcatgaacaaataacattcaaaaagccaatcgaaggaagaggtgaagggaaagagaagccaacagaaattaaatggaaggacaaattcagtggaagtgcacgcggtgaacaaattgggcaaggacagccaagggacgaaagtgatcgttgactatgaggacggagttgtggaggaacagcagcagaaggacaccaaaacggggaagggcaaagaaatggtggaggagggtacggtagaaagtgggaacagtatgatggaggacacggtagaaggggaagacggtagaataaaggatacggtagaaagagaggacggtaagataaaggatacggtaatagtaaaagaagcggagaaaggcacagaaaaagcaagtgaagcggaggaaaagcaacagcaaaaggcagacttgatcagcatagagaaggaagaaggtgaaaatgtgccatgaaattttggaggtaaaatttgtttttcagaaagatacgcagtgttagtgaaagtggcggagagtgtggcagagcaaatgatgctaaaaataattgtaaatgccatggaagaagcagcggaggaattaaaatgggaggaggaggagcaattgaggaggggaaaggaggaggaggaagagcagctggaaatggaagtgcgactgggaagggatgaggaacagaaggaagaagtccaagcaaaggttgaggtaatttgggacacgggacaacagaacgagttattacagtaa

SEQ ID NO: 77680 - DNA, 2021 bp, Heterodera glycines
atgaatttgctcttcaaatttttcatcattttcgtgatattgcactgcgaatgtgaaacattgggaagctgtgctcctggcggcggtatcaatatcaattttttgtccaaacttcgaaaaaagccaatcgcttcatcaacaggtaaatttgtaaattaaagaagagaatttttaactccgcaaaatttcaaaaaattatttaaaaaaatcggaaccaaagacctggatttcctggaaaaaaatccaggaaaatccaggtccatgaaaaatcttggttgccgaaaaatggcctgggcctggatccaggaaaaacccaggctcctaaaggcctggatcaggcctggacatgggccaatgccagatctcgcacgatcccgttgaaaaggacaacataatccctcaaaacctcacgaaaattggtcgaaatttcgagaatggccatataaatgggccaatattttagagacttcagcggataataggccaactatttctgccgctgagtttgatcagcgattgaaaaagattgagcaaatgcttggcccacttttgaaattcgaaaatgccgaccaagtcttggcacagctcgagaaacgcattgaaagccttgcgaagcgcatggaagcacttgaaaccaaaatcactgcttggaatgtgacttttgagatcaaagagaagcagatgatggaacaacagcgaaaacaattgcacgaagaaggattatctgttggtgagagtttttttatcggcacatttgctcgacattggcacatcggaatggtcacatctgaaccaattagtagggatgcgttttttaggcaattgcctaaaatttctgcgcatttgatacgcacagataagcacgtcacgaaaaactttgttaacaaattgcaaaaaatttaaaagtgaacggatttactctcccaattactaattgtttaaattattattttgacatatacaaaaaatataaccgaaaattgagttgataaaatattgttcgattctcagttaaacatctccgggcagtaacggaatatttaaaatggaataagaatgaacggagaacattttccgaaaaaatttggcgttgtaattttgcagttatcaaatttttcgaaacttcttcggcaaaaggatgagacccgatcaaagcaataattaacatgatgtgatctgatcatggaaccattttcctggtctgataatattttattgtcagtaacacataattctcctatttaactgtctgacaaatggcttgggtaatgaattatatacataattaattaattaattttttttcctttaattagcagttgcatcctcacaaggccggcaatcaacagcaacagcagctgatcaccactctcataaattagtgctgaacaaaaacagcatcgttccacagacagcaacaaccacggtagttgggcagcagtatgggaacggcaaaatgccaatttatggcatggcatcggcacaaatgggacgccgaaacacagtggcccatcctggacaacgtcatccgccccatcaaagaggtgggataatagtgcgatttaagtattggaaaagcttttatggactttgaaatcgagggaataataattggattgaaattatgtagctatttggcatgtcgattattcaatcagatgctcttaacatgccatcgcaacattcgattattcaatcagatgctcttaacacgccatcgcaacatttgccaaccgtggagaaaaatgatcaacggcttgaaagtcaaagatccgggccatcaaatcttgaggaacatactgaagacatggacaagctttggattgtctcatcagacgaagagaaacactgaacggaccaaatgagaaaatattggcactgataaatttgaattatctttaaaatgggtttttttaatagttttaatgatgaatagtcaaatgtatttaatatatggataaaaatgcataaacatggataaaaaaattacaaaatatgaaaacaaatgtaaaaataataaa

SEQ ID NO: 77681 - DNA, 274 bp, Heterodera glycines
atggcaccacagctgactgaagctgatggtcacaacgacgcgatcccgtgggcactcattcaatttcgcctgagaaaattcgggagtgagccgaaaatttatttaaaaaattgttggagtgtttgcactgggtttcgagcattttctatactcgataccaaaaaatggcttttccaacgatatttttaacgaaaaccctaaaatttttcgtaaatggatgtacgtctaccgatgtaataggcctaattccacgaagccgctcgatcgaaactga

SEQ ID NO: 77682 - DNA, 1034 bp, Heterodera glycines
atgcagaatttttttctcaatcgatatgcaaaatttggtgtggatttaacaaacagaaaaaaagttaaacaggatgaagtaaatgttgttctttacattattaagaatgaagagatagtacgtaaaagtgagagaaataaagataaaaagtaaatgtgacagaacgccaattttttcccataattatccataaaaagatttattgtcgcttttttttcttttttaccgtccatggccaggtttccatataaaaatttttcaattttcaagaacttcgaaatttttgagcacaagggttgttaaattcgggccagcaggacgttttcgcgtggccgttttcgcgtggttgtatataaaagagaagtgcaaaagcaactctaagcacacttattgatgtcaacagaaattcaactaatataagaaaaaaaatttacaaaagcctaaacttaggcctagtctaacaataagccattgttcgagttgcctgtgtataagttgtcatgataaccttaggtttaacaacgaaatttatagttaaaaactttactgaatacctgacaaaaaaagtttttctcttagttattaggacaactataataccatgagaccagggatggcacggaattccgatttccgaaaatttttggggtctcggaatgccatccgtgccatggacacaaaatgtcatgggacgcgtaaactgttgttgggacgcgtaaaatgtcatgggacgcgtaaaaccgactagaaccttttttaccctagaaaaaatgctttttgaaattttactattttttccgtcgggaccacaattccacaccattgccctagaatgggtgtcagtcaatcagaccctgaagacccaggaaaggcgtttgattttctaaaaaatttatttttttcagaaaataggagggacatgcagaggtattacccgcctgcctcaaatttaaaaaaatcaaatcactgtcaaactcctcacacgccaaggaataagattttcctaattactccaagcaattcataaaattaaa

SEQ ID NO: 77683 - DNA, 108 bp, Heterodera glycines
cttaagactcccttaagagagacccttctcttctcatgtacctttaactaaaatgttgttggcacaaaaagtaaagggggaaaaagaatacaaatcatccgatcaagg

SEQ ID NO: 77684 - DNA, 387 bp, Heterodera glycines
atgccatttccacccatttttgccttgcgcagggcgccggacttttcgacagtggatttttcgacagaggacttttcgacagaagttcttttcgacagcaaaggacatttcgacagaaatattataaaaatgggcgccggacttttcgacagtggatttttcgacagaggacttttcgacagaaggacttttcgacagcaaaggacatttcgacagaaatattataaaattcaggaggggacttttcgacagtagatttttcgacagtaaaaagtaattaaatttcacatttagttgtgtaaaagcgtaaaattttttccaaaaatcaacaattaagccaaatcagtattgagatacataatatttaaactcttaattaacaaaaaa

SEQ ID NO: 77685 - DNA, 369 bp, Heterodera glycines
attacatttttattcataaattttgagcaaaaacaaaaaaggtcaaaataggttttgttaaacttcttagggttcaaagaaaataaaaacgataaaataagtgctaataactcgaagagttgcttaacaatcaccaaaaaacatattttccatgctttagggccactggaagttcagaaaaaataagtaaaatctaaaaaacttatttctatgtagtaatattatttagcaatacacattaatatgttaattaaaaagaaatttagtaaaactgacaaacaataacttgtttttatgattactgtcgaaaagtccattattttttatttttctgtcgaaaaatccttcactgtcgaaatgtcctttgct

SEQ ID NO: 77686 - DNA, 371 bp, Heterodera glycines
atgactgaagtggtcacttctccgaacatagaaaaggaagctgtttctccatggcgaaggtgtgttcaaggggaatttgttttcgcatttccttttaggtttgctccttcagagaggacaatgaaaggagttgtgatcggagggattacgggaggcatcgaaatttgcatcacttaccccactgagtacgtcaaaacgcaacttcagttggatgaaaggtcggcaactccaaaatttaaggtgatgattaatgactaattgttctttttgaagttttgtccattccttttccagggccccgccgattgtgtcaaacaaacgtaccgaagtcacggactttccggcttttaccgcggactgtccgttctgct

SEQ ID NO: 77687 - DNA, 445 bp, Heterodera glycines
  unsure (1)..(445): unsure at all n locations
cttgctaataattccaacaattgcttgtattttgagactgccgcggatccgtcgtcattgaattcttcgaattccgctgccgttgaatcaatggattcggagggtgtttatctttttgctgaccgtacccaatcctccaactcgctcacccccgaacaggccttcgtccacatggtcaaggcaatgcttggcaccggacttctctctctcccttatgcgttttcccattctggtctttatgtgagccatttctccacactttaatcatttgcctcttttcagcttggtttaatccttttggtcttaatttgtcttgtttgtatgttttgcatgcggcaaattgtttttgcggcccattacatttgtacaaagttagtcttttttaaatacattcttgattaatgttttctncatttacaggaatggtcgtgagattattgactat

SEQ ID NO: 77688 - DNA, 2264 bp, Heterodera glycines
atggtcatcacacgccggagaagacaggcagaggaaacactacaaagcgccgaaggagacagacaaagaggaggcgaccaacgactgggggagtctgacagagaagaggaggaaatcaatgcagaggaaggcgaagcagcgacacagccgatcaattacgtattgggagttccattgctggacaccatcggcgagtctttccattgccgcttatgtgttccaattccaaaaattttcaaacggcatggtgatctgtcgaagcatttaaagcgttatcaccccaaccagcggattgtctttcaatgcaacacttgtcttatcgttttcgatacagtgaaaaagtgcaaagctcatcagcaaaagacgccagcatgccgaaatgcgagagctgtcccggaggaaatgccgcagcgtcctttggctgcccccggtgctgcaattgttcagcgcaatttcttcaacccgcgggcacgccaggttgagaatgttgaccggccacagccaattcaaaggcttgtcaccccagcgagtcagtcaccaccgcaattacaaataagagacgacagaaggcaagtgagtgtctctagtgattcctcttttgcttctgcagacagcgaatttgttgtcgatttaaatatggacagtcaaagtaccgcctcttctcacactcgataagcaaacagaaatgttagagaaagacacaatcggcgttccccggtggaacccgtccaaccacaacatctctccacgtcgtctgagtctgttgaacttggccaaaacaatgcacggccattaaatcatcctcaacattatccatcaccagtcaatgtcgaggccgccgaacacccaattcaccaaaatccgctgataattatcccgccaaaatcagaacatcaaaaacgttggataaggttgtttgaagcagtaaatgactcgaacgattttgaaacaaatttggtccaactattggcagaagttcggcaaaaggccaaaatcaacatccatccgcaacagcgtcgtcccccaaggggtaataatcgaaaccaattacaaaacccccatgggggaagacggaacgccatgaatgctgcccaagaaccggcatacgaccctgttgcggcttctcgaattcaaaaactttaccgccaaagtcgtcctcgtgcataccgagaaatcacagaacaatcatcaccattttgtcaaattgagggaaacgatctgcccaatccgacccaaatatcgacctgtcggttggcagtgctcaaaatcgtactgagcaaggcgatgaaagtggcgaacttggcgaagaggacgtagcccaccagtacgtccttggagtgccaattgccctgcctttgccatgtcggttttgcgctggccgatcattcaacacacatgccggactgtcaaagcatctaaagaaggaccacacaccgcaaaacacatggaatttggccttccgctgcaatggatgccgacaaacttttacacagctgaggacatgcaatgcccaccagaagaagtcggcacaatgccaaggcgcacagccgatccaagaagaacggcaccaaccacagcacgcgaatgttgttcgccaggtccgaccgcgggctcctcgcctccaggagcccgtttccccggctcaacccgctgctgcggatcagtccgggaccactcccagcggtacgggggcacggacagaccgcatgcagtgccggcgcgaatcggatgtaccgtctggtcgttcgaccccgcctgcattggttgcacaacggcactcggcaggcaccgcctcgcccaatggaagtgaccgaagcgctcgcacagcgcacagccgtaccgcccgtcaaaatcaaacgccaccgacacaattggtcgtcaatgcccaacctgaacagcacgatgatcaagccgttccagtggtcgctccacggcaacccaacgcacaacaacgcgaatgggttggacggttcaatgcggtgacaagcgcacagcagctcgacgacttactgaacgaattcatcaacgccgtccgacagcaggcgcaagtggcgttcacgcaaaggcccgctcagcaaaaacgtcggccaagaccaccaccgaaccaacatggccgacgccgaaaccaaatgaatgccgacgacggtccgccatttgacccggctgccgccgcacgtattcaaaagctgtaccgcgcttcacgcgcaagggcataccgggaaattacagagcagacatctccgctctgtcagctctcggctgaa

SEQ ID NO: 77689 - DNA, 1144 bp, Heterodera glycines
aaatccttttttgggatttcgaattgccaatgaatttgcgtatcggtttttaaaagattaaatgtgaaaatattttgagatttttttttggggggggggggggtttaatttaatccaagttttagggtgtgtatcagggaaaaaattttcggtttttatttttcggaaaaatgatcgtcgatcggaacttctatttcaaacaggtccgaaacaaaacaaggattttttacaaaagaaaaaaaatcaaaaaattttaatttaatttaattaaatcgtttgcttttaattttacaaaacaaataaaacaaagccatctcaaaattttaataaacaataatcgaaatcaatttacttcgctttttttctctaaattcaaaaaaagataaatttattttagattttaaagttttcctaaaatcccttagtttttgtgggatctgctaaaaaaactctcaaaaatttttttgccgcatatttttataaaattttttggtggaggaggggccgacgatgccgataacagttctgttgtgaatttttgggttgaaatttaaaattttttagggcactcgtggcattatagacaaaaggagcttaaaaaatcgaattggataccctaaaaatagttttaaaaaaatcggaaattgaggcccacgcaaattcaatcttctgctgctgatcattgcaatgaagtgagagataattaactaattaggaccaacagaagcccgaggtaataaataattcaattggttactgtaggatttttgaaagaacgttcagattgcttactgtatgcatgctgtatactgtagccttgcccatttaaatattttcgaaccattttttaatttaatttttattaattactccttttaatcatcaaagtctgccgcgaacataagtgttatttttcaaggcttttccaccgccgcccccgcaggggaatttcacagctaatttaatgacccccccccccccgcggggttttcccgccggtcgccccccggggctctaattgccaacaacttccgccactttcctcgcccctacagtatgccccatcttagtgacttcattagcaacagcagcacagttcgcaaattagtttttttcaaatgtaattttctctccccgccacaaa

SEQ ID NO: 77690 - DNA, 3209 bp, Heterodera glycines
  unsure (1)..(3209): unsure at all n locations
ggcgatggccgatctgttggtgggtctgttggtgatgccgttgacgctgatttacgaaattgtcggcgtttgggtgctgggtgagtttcattttacagtccaatttttagcggaatttatatataaatgcaaaccaaaaatagatttaacattaaaattgtcaagaatcgagactcttgacagttttatatgttctttaaaaaaatgtttagaaatttgaattcggttggatattcacagtttttcacaaccgttgattttgaatgtaagaaaaaaaaattgcattttgccaagtcgcaagactttgccaaaatcaaggctggactgaaaggtccttcgtaatatgacaagattggaccattggcactttctgccgaatgaagcctcgggactggggccactcttttcataataatgtcaagattcggggagctattgcagagattggcaaagccgattccagagaaatccaacgaagatgggattaattttgtaactcgaaaatccatcggaaagtgccgtcgtggtcgtctcccatagttttacattttagcattttttgaagtccctctcctggcattttgccaaaaaaaaaagattttgccaaattcaatccaaaatccttttccaggcagtgtgctgtgcgagctgtggctggcgctggacgtgctgttcgtcaccgcctccatcctgcacatttgcatcatttccctggaccgctattggtccgtcacgcagccgctcagttatccggccaagcgcacgccgagacggatcagcatcatgatcggttgggaatttcgagagtcccgacttttaaattgatcgaataatcccatttacccgttccccggactcttgatttctctgtctcgattcccggcaaaaatcattaaattttcgagaatccagtctctcaggggctctcgatttctctgtctcggtttccggctaaaaccaatactgatcagtccgggccgtgggatcagtgccaccgatttccgatcggttttgtacagccggagatttcctcaaatgatgatgtaatcgagtctgatcacagctatacagtgagtgatcagccagtttatagagagacagagtaccattgttcaattacagtagggtggacgctgacagtatgccctataaagtatttattggatttgcttttatctcgacttctggcacacaaaattcttgaattatttgcttggctttttttgttggtcggtgcctaacagcacctacagtaccctctaatgcactattttttgagaatatttatacggtaatgacgggcatttccagtaaccaaattaaccatttcaacagtaattattatcaatttgacagcatttttcccaatttttcaggtgtggcctggatggtctctctgctcatctgtttccccccattgcttggctggcgaccgaaaagggtgagtttatttgtagaaaaaaaacaattccaaaaacaaaacggcatttgccttttttaacggcatagaatttttgggattttcgtgcccctaaccttgacctggtgttttccttgattttttataggagttttattagggctcgacctggattttcctggaaattcccttacagctaatcattttttcaaaatttctgtctctactttttttaaaaatatttttgttttcaatcatttttttgttttgccaaatttcattaaaaatatattattattttttaaatgcaattttgtggcggggagagaaaattacatttgaaaaaaactaatttgcgaactgtgctgctgttgctaatgaagtcactaagatggggcatactgtaggggcgaggaaagtggcggaagttgttggcaattagagccccggggggcgaccggcgggaaaaccccgcgggggggggggggtcattaaattagctgtgaaattcccctgcgggggcggcggtggaaaagccttgaaaaataacacttatgttcgcggcagactttgatgattaaaaggagtaattaataaaaattaaattaaaaaatggttcgaaaatatttaaatgggcaaggctacagtatacagcatgcatacagtaagcaatctgaacgttctttcaaaaatcctacagtaaccaattgaattatttattacctcgggcttctgttggtcctaattagttaattatctctcacttcattgcaatgatcagcagcagaagattgaatttgcgtgggcctcaatttccgatttttttaaaactatttttagggtatccaattcgattttttaagctccttttgtctataatgccacgagtgccctaaaaaattttaaatttcaacccaaaaattcacaacagaactgttatcggcatcgtcggcccctcctccaccaaaaaattttataaaaatatgcggcaaaaaaatttttgagagtttttttagcagatcccacaaaaactaagggattttaggaaaactttaaaatctaaaataaatttatctttttttgaatttagagaaaaaaagcgaagtaaattgatttcgattattgtttattaaaattttgagatggctttgttttatttgttttgtaaaattaaaagcaaacgatttaattaaattaaattaaaattttttgattttttttcttttgtaaaaaatccttgttttgtttcggacctgtttgaaatagaagttccgatcgacgatcatttttccgaaaaataaaaaccgaaaattttttccctgatacacaccctaaaacttggattaaattaaaccccccccccccccaaaaaaaaatctcaaaatattttcacatttaatcttttaaaaaccgatacgcaaattcattggcaattcgaaatcccaaaaaaggatttgcttaaaatgactgggactcatattagctcaaagtgcttggtactcaattgtaccgtcattccttattttaccgtagggtggcaaattgtgccgctatttggaattttttggcaccaaatattacataattcccaaattttgttcagcgtcccggcgagtgtaccgtatcctcagagttggactacgtattgtactcctcgctgggctccttctacatcccggtggccattctcgtcgtggtgtacatgcgcatttatatgatcaccaagcnggcacagtcagcagcgactgaaggacacccaacggnatgggccaaacgctgtgccaactga

SEQ ID NO: 77691 - DNA, 858 bp, Heterodera glycines
ctgctgctccattgtcctcctcctcctcctcgatttttaccaacccaaacagcacattggtggtggtggtcaagcagtatcagcaacaacagcagctgaacaaccatcaccacaaccatcgcaacaaccatgccgcggcagcagctgctgctgttctgttgccattcaacaacaacaacaatttgacggatgaaataacagaattggcacacgcgacagtgcggggcgacggcgatcggcattctgattactttgctgatgggtaagcaaaattagtgatgatgaagatgatcagacggcaaaagtgtctgctttgataggtggttgaaagtgcaggaatggcgattcagtaaacatatcggattgaatcggcaccgaaacaaaatggcataacaaagccaattgcactgtttattcactgatcagactgattggtcaaaattacttttattcctttgccccattctccgtctgattgcttgtaaaagcaatacggtacatggtcttttgtcattcctaaagcctataattcgcacccaaaatgtcttaagccacctggtcatttagctctgtaaataatgccgttcattgatcaaaataaatggccataaatttcggttcctttcgagccgatctgatcagctttcaaggcgatttcaatcacataaggattttgatcactaaatttatccattcatattatcccgatcatttctacattctgtgttaagcaccatcattctgttccacggtgcggctgaatggtgcccgaacgtgtcgaatgccgtcgtgtggccctcgtgcattacgctggcagaagccttggccatggcattgtttctgctcatcgtcatgctg

SEQ ID NO: 77692 - DNA, 313 bp, Heterodera glycines
tagggatgcgatttttaggcaaatgcctaaaatttttgcgcatttaatacgtacagttaagcacgaaaaacgcattttccgcttgatttggcgtgtctacgatgacttttataatgcctaactttgcctattttggattttttgtgcttaatgcctatttgcctatttttgtgcctatttcgccatttttgacgaatttttcaggatttccggaaaattcgttaacaaaaaatgaaaaatacacccctaagaatcgacttgaaaattttttagaaaatacaccccctaagaattgaaaaaaaaaaattcacaa

SEQ ID NO: 77693 - DNA, 752 bp, Heterodera glycines
atgctagtttatggtttgataagcactctttccacattatttacaccaatgacagtaaaatttggtggttttttcccattgctttttctacaatttttgcaggtgtttttacctgaatttttttctaatttattttaaatatttttaagggtattgcaatttcaattggctggtcaggagctggtacgattaaaaaatattttaaaaaaaattttaaatcccattttttaggtgtaatcagttcatcttggagtccaccagatacctatggaatatttctttctgtgcttacactaaattttcaggcaagaaaaaaatattaattatacttaatttatttaaatttttttatttaattacagtttggccctgtcataacaatgccattagcagccgctttgtgtacctctgaaaaatttggatggccaacagtttactacgttttaggcaccagcacattattattttcggcaatttttttgcttttttaccgtgatacaccacgccaacaaaagtgatttgaataaataaatcactcaaaaaaacatatttttagaaatgtgtcgaaagcggaattggcattaattgaacaaacagaattagccttaaacaatgctgaaaaagtgcgacaaaaaattccatacaaagccattttcaccgatctgatgatttgggcacaaatttgtgtgcatgtcacaaggaatatgggctatatgatcccgttggtttatggagccatttattttaacaag

SEQ ID NO: 77694 - DNA, 593 bp, Heterodera glycines
atgaaaaaatggaaatcgcctcggctcgcggttggtatgttctgtcaccacacatcgtccaaccttttccagacagtcgcttacaaaagcaaagcaaacaaatcaattcggtcgggaaggatgcgctcggggaagaaaatgcttttcatttattagcatttgcagagagtggggacaaattccttgagaaatcttttccaatttttttatattatttttaatttgttttattttttaattcaattaaaagcgttggcatgtgcaaagttacaaaaattttgcctgacaatgagactaaaaatgattgtctaccattccaacattgttttggcatcacacgatatgttgtgctagtgttgagcacaatctgtttgtcgctgatcgccaggtcattttcataatttttatttatttatttaatttgatttaatttattaatttacatggaattttattttcagcagttggttggcttttaatttcaccgtcatttgcatggtaaaaggtggaaaaattattagaaaaaattatttacctatttatgtataattaaattaaatgttagtattttcaagcacaaaaatttaaataaa

SEQ ID NO: 77695 - DNA, 949 bp, Heterodera glycines
atgtcggtgccaacgccgaattggccaatttggctgtccagttccgagaacaagttggcacaattgacaccaactgtgctgcgctgggcattcatgttgggcaaatcagcttgggcactctcaagggtaattaaatttttattaaaagttaattaattttaataaattttttttttcaggagaccatccgcaagtgcatgactctgagagtgtgcttagtaaccctggcaccagcgggtctcacaagcgcatttaagtgcattgcgacgattccgatgatgtcatcatttgttgattgatatgctatagaaattattttattagataaaaaatgaatcgttgctattttttttttttttgcttaaaaatcccagcccaagtaattaacttataaggtagggcagcaagcactttttaaatttaatatggctcatttgactacaaaaaatgaccaattttactaatagcaaaagttggtcgagaaccatggcactatttattcgagtatgcggagaaatttgatcaaacaccaaaaattccaacttttcaattacattttctaatcaaaacctattttcgactttgtagccatggaaacaaagaaattctccatattaacttgtttataccacctaatttatttaagcagcaaaatattttcataaatatatttaaaaatatataataatgaaataatttaaatttttaaatatttaagaatgatagttaaataatttaaatttttaaaattttcttgaaaatgaagactcttttgaccagccagcagctgttgctcccatttttgttcttcatacacattaattttcgacagctgtgtaagcaatggagtattcttgttcactaaaatttaaaaaatcatctccttattttataccggttttctaaaattggttttttttaatttttctatccatgttacaccaataaa

SEQ ID NO: 77696 - DNA, 388 bp, Heterodera glycines
atggagatttttcgaaaaattatcatgacttcaatcccgcgggatcccgcgggattggtaaaatggtcgggagggatcccggttcgggatcccgatgaaatcccgatcccgatcaatcccgatgaatttaaaaaatccttctggacggatcccgaggtcgggatcccgaatttaatcccgcgggatcccgtagaaatcctgcgggatccctatcccgtccggtctctagttaataacaaaagtgcttaagattataatattaaaaaattaaaataattccatgatgcttaagtaattattaaagtttccttgcaaaaaaaagagcaaatgtaatttattcaggtaattaaacaaaattaaataagtattaaatgcaaacaacaaaata

SEQ ID NO: 77697 - DNA, 1687 bp, Heterodera glycines
atggcctataatttcgagacacaaatggattttggtgaagaaaagcctctgactgggcttcgagcactgaagtgggttatgtgctcaaattaagggcccatttcacatgtttaattatgcttttcaattatttaaatgcgtggaaaaaagaaattattcaatctaagcaaaaaataccgaatttccccccccccaattgttgttttacctttaattttcttttctttttgccagacatcccttcgttgtgttggcccatttgggctttcgaattggcgcaattgtcttttatgtgttggccgatttcttcttcagttcgttcatcattcagtttctgattttggtaaattattttacgatacgttttttttgacatcgacttgggctccgcttaattttatttggaatttgaatatcaaacgacactttttcggctgatgcctgtttttgtaacggccctcaattcataaaaaattgtagcgcgatttaaaaaatttaaaaataggcaccgctttgccaattttccaagttttcgactcacttttgaacgaaatttgccaaattcgtgaccattcccttttgatttagcgtattctttgcgttttcagttggcacttcattccgcggatttgtgggccgtcaaaaatgtgacgggtcgtctgttggccggccttcgctggtggagtttggtggacgcggacggcaaaaaccattggaaatttgaagtttcccaggttttttccactattttttccatattctctcattttcttcgtgttttaaatgccttaccacctcaaaaaatgagtgtcatcccataaattttctcctttccaaggaacccgacaattacgacacgtttgagcgcaaaattttctgggccggcctggtggtggccccattcttctggactctgttggtgtgcaccgctttcctcacgctccactggcaatggatggtggtcgcagcaattggagcaggtcagtgccaaaacagcaaccattttaacgttttcgggactttgtcggcccaaaaattttagggacagtttctatcttggtaatgatccgaccgtttggtttgatgtcctcgttttttctgtttgttggggagaaacaggcggcaaatacctatgtgttctaaattagcctgcaaaatctctaagttcgttggtttcccaacatttttgaccataacttctcgtttcggaaaaaatcagcgatttttcgtttttatcgccgaaaaaatcgtaatttacgctccaattctttaaacatttcccatttccatctttctccaggcatgaccttcaccaatctgtacgggtatttgcgatgcaaatggagcagtacgcaggagatgaccaaccacatcacgcgatgggcctttttctcggtgatttttctaaccattccaattgccatatttttaaaatccccccattttttgcagatgttgaagaggaattttgcgccgcaacaaaacgcggaaacggcggcagcagcgacaacaaatgttcaacagcagcgccaaccgtcaccacggcttcaagaaattgtgtaaagtgatcaaaattaccataaataattcaccaatggcggagtcatttgttttttgtgtgggctatgttttaattttttaggtggttgaccaccattctgatcataaacatggtcaaggaaataaa

SEQ ID NO: 77698 - DNA, 798 bp, Heterodera glycines
atgcctgagatcagtcaaatgtgcgaccggggcaatgtgatggtggagatatcgcaggcaatttctaggatcttttattaattcgtgttgcaaatttctgactggttagaatactctcccattggcggcagtaatttgaaacccacgaaaatttaaaaaaaactaaaatattgtaaggattgggccagtgaacgattaaacgcgttaaagcagaggcatagagaacaaaagggaatggtttgggtgataagccgattgctgttgaacaaaaaaggtctagggttcgcttccatctcaagtataaaaatgaaaaactttggaatttctctctgggattttaaaaagcctttatcttaaaaaattactaaaaaattttatttttggtttttccttctaattttctcttccttccaattcaacaaatgtactaattttataacgaatttgactaaattcttttttttttatattttaatatggttcgacccaaaaactcaaattcaataattttaatttttcgactttttgttcgagtttggatcagggatacggaactggttgaaatggatgctattttcgtgatcagcaatctctaaaacccttgaaatttattttcaataatttttaaaacataaaaaaatttctttaaaattatgtgaaattggccctgtaaactagacaatccctctcttatccctctgctcatgttcaattccgtctcatcgcgattaatattatatctccataagatttttgttaaaatctaaaaatttattttggataaaaactataaataaa

SEQ ID NO: 77699 - DNA, 1277 bp, Heterodera glycines
atgaatttgtggctttttaaaatacgcggaaaacataatgccaaaaatgtatacaaacaatctttagtcactcattggcaatccgtccttttttgggccagtttggccaactccttcgtggaagcactgcggctgggcgggctcattcatcccgtcatctccatgggtaaaatgtcaaattgttaattttaaaaataattatagcataaaaaaggaaaataaaactttggcaaattggagtgcaattgtaccaaatactgcttactgctaattagtgaatttttttcaggcgcccaggccgcgtgtcgtccagtgtaccagggccaagaaccgtcgctgaattgccaagtacgaatttaatagtagaacatttgattgcttctttctgttagccttagggccaattattaattttttgagaaaaatgcgcattcgtgggagagccagtcctggtacctagcattgttcaaactcggttcaattgcaactcgtataagacaattcgtacaaaaagcaactcgtagaatagtcaattcgtacaaaagtcaaaaggtacggttttatgagtccaatcgacttttatgatgtccaaaggtattttatgtgtccaatcaattgacaatacttggtttttatacaataatgttgttcatatccaacaagcccatctttttgatataattcgaaagcataaagcctaaagaagctaaaatatataaaagctcagcatttaggcaatagcaaatgtttaatcaagtaattgttgattattttcgtttgtaactttctttaaatgttagcattctcttaatttctcgtattatattaccttgttcagactttgttctttcgaatgataccaaaaattagggtttgttcaaacatgaacaaagttacggtataaaaatcaggtattgttatttgattggactcataaaatacttttggactcataaaagtcgcttgggctcctaaagtgcaatagagctaaatgtactgtaacaaattttacaaaaaaagcctaagcctagtaccaagcaggcctaaagctaattttgtggccggagtcagcaaaaaacagcggcaaacttttcggaaaatggtaacaaatgaattgaatctataatttttttttattcatggtaattaatttgaattacttttgctatatatgcaaaattttaaatctaaaattcacaaattaactttcaaatccttcaaattttaatcgtttggaatttgttgcgctttaattcagtttttttaagattaataaa

SEQ ID NO: 77700 - DNA, 1237 bp, Heterodera glycines
cagccgccccacaaatcggcctccgactcacgcgttgcagcactatccgccgacgcggcacagcaacaacaaaaccaacaaggacaggaaggcgcgacaaacggtggccgaacgggtggtggtaatggccgaagacgacaacaaagccaaccgcagcatggtttgcaaaaatgaatttatttaaaaattggcaattttacactgggggggggagtttgcttattaaaaaaaattgcggggtttttcggggtcgctgaaaatgaagaatttagatattttttttggaaatttcttattaaaaaatttctaataataagatttttcttaagattttttcttgaaaaattctaattttgaaaaatttttagaaaaaaatttggcggcaaaatttcgtcctgtttcgctgtgaaacacatttgggaaaaccaaaaattaaaaccaaaacgcgacccctatttttgaccactttttaattagcgccaaaaaacacgtttctatgggtttccaaagcctaaataaattcaacaaatttatgcataaataaaacaattgactcttaaaattttgtcttttcattttcaagaggaggaatacgcagcgctcaaatacggtgcttcccacgtcattctcctgttcgtgccgggtaagcacttttttggcacttccatgccatcgcatttttgcggcgtcctttttcggttttaattcccctttttatatgcccggttccctgattacgaatattacatccctttttggtaattctgaacccaaattctcggctttattgtagtttagacgcccaattgactttcggcatccaatcaatgactttctttagtttcatagatagttccataaattgttttcttttggtcaatgcctaacaatttcttggtatcaatcgaatggttaaatctcgagaatttataaatgcaagaaagagccaataatgacattaagaaagtgttacaatgagaaagaaattctgtagactaagatttcaattgataccaaaatttaggcatttaccaagtaagaaaaaaagttattgtctaagaaactgagaatgatcattgattggacgcctaaagcgcaatagagccaaaatcgttagggctgctgaaatattttcgttttacatccattttatatttttagtatccatttgtatggccgtggtcacaatgacagttgcgtcggttggcttctactccaaaaatgatggcctctactt

SEQ ID NO: 77701 - DNA, 736 bp, Heterodera glycines
atgtgcatgtctagaagcgtaagaatttctttgttgggctaacaaaactgaactaacgaaattttatgtttaaattgccaaaaaatccccccccccccctctctctttttagttctatttgatcgtcgtttccgctttgatggcattgcttttcatcaaatatttgccggattggaccgtttggacagtgttggcaattctgtcaatttgggtatttttttcactggcattttttggctgcatgacaataactcagtttttgtttggcaccatttaaaagttcaaattctgcatcgaaaaaccgagtgctgaatttaattaaaaaaaaaaaaaatttcgtttaattgcaggatttggtggccgtcctcagcccaaaaggtccgctgcgaattcttgtggagaccacgcaggagcgaaatgagccaattttgcccgctctcatttattcatgtaaaaatttttttcgtgttataaaaaaattactaggatttctgaaaaattttgtttgaaaattaacaaaaaaattcaaagggcggggggagcagtaatttatccaatgtaataaataaatatttaaatatataatatttttaataaaattcagcaaccgtcactgtcctctactcatatgtgctccatggcgttgtttcttccgcttttattgtcgccgccggggtgggcacaaatggcgatgatgaagacgaacagcaacaacggcaaccacaaccgaatgatg

SEQ ID NO: 77702 - DNA, 241 bp, Heterodera glycines
atggttgtcaattcggtgttgccaaatttgttaaatgtggcccaaattgtcaacattgtcacaccatcacaaaatcaagtcacaccatcacaaaatcaacaacaacaacaacaacaacaacaacaacaacaacaacccaatggcgaaatttttgttgaatttccatcccaaaatattatgccagcccaacaaatgccaattacagtagacaataatgaacagtttcaaaacacacattatg

SEQ ID NO: 77703 - DNA, 313 bp, Heterodera glycines
atggccaaattcctttctggcattatgttttgcgcattgttggcactgctggacaccaccagtgcatggaagcgcgagtttttgcgcatgccgaaaagcaatgaaatcggcacggcggacgacagcagcgaaagtggcaaaaatttgaaaagccaatcggaactgatcgcttcaatgctgccaaaaagaaaaagtaggaaaattggtaaaatataaattacttaaagaaatgaaaatgaaaatgggaaatattaatattaaattattattatttggaaataaaaataattttttagtattaatttttttttaa

SEQ ID NO: 77704 - DNA, 361 bp, Heterodera glycines
  unsure (1)..(361): unsure at all n locations
atgttccgcaccacacggggcactgaaggtggtgccttngaggaggtcaaatgcgatgacgaagactatgaccgctgtttaattggcaaatgcaagggtaaaaaaatggcaaaaaatatataaaaatttcaaaaaaaattccaggacaaaattttgtcgaggtccgcaaattctgtgccaccaaagatggatgtgccgcgtttggatgtgccgttgaggaggaacttgaatgcaaaacgtgctttggcgaactgtgcaacttgtaaaaatggatcgagaaattattttcggattttcaaagatttcatgacatttttcggaccaatttgttcatggacatacaattaattttgtatattta

SEQ ID NO: 77705 - DNA, 710 bp, Heterodera glycines
atgtttcccgcgggcccaaagaagaaattttgttcaatatgccgggccacaattgaagtgtttgatgaaaaagtgatgacagaaagacatataggttaatttttttaattatttttaaaattttgcgattttaatttaaattttgcggattttttatttatatttattaattaaaataaatttagtacacaaaaaatgcttcaactgcggcatttgtaacactccattgttgattggacgatgtgcaatggatgatgtgctttaccatcaatttggtcatatttttgcttattttgtgggattagaatggaaccccatggggttggaaatgtcggctcccggacaatccatcagtgatggacaatccgtcagtggacagacaattcgtcagtgaaaaagcgatattttatataaaattatgtgaaaatgaatttaaattgaaacaaaaaaacttcctccccccccccctcccccctcgaggggaagtgagtgagtgtaagtgaactcgttttcggagaggggaccccgcactgcattatcagcaagtttggcgcgcgccatgttccgcagctgtttccggcgcccccttcgactgggcaattttgtccatttttgatttgggtgggcaaaaaaggaaaactgttgaaaatttaaaaaaagaagttcttggcaaaatgtttaagttttaagagcattttaaaatgcgcaaa

SEQ ID NO: 77706 - DNA, 566 bp, Heterodera glycines
atgggcatgcccaccgcgttcaccgacaacgccaattttgagggcatttccggcaagaaaacgttgctgctcagcgaagtgatgcagaaggcggtcattgaggtacggtgattgcccacaattagtgcccttatttttgtggattccatttattttcgcacttattttgaacgaaaaatccaaatacaataatggtatcttttagcctattttaagtttgtaagatgcgtttctattcatccttttttgtccatcattaaacaaatttgccaccatcgatgtgcaaaatttaaaaaaagtcaccagccggtccagagaaaaattatacatttttgaccagttttagctcaattctcaaagaaaaaactaatttaaacaacgaaatttaggtgaatgaggagggcaccgtcgctgcggcagtcacagaaggagaagtgtcggattgtggttcgagcaaagaataccgttttgtcgccgaccgtccgttctgtgcctttctgattcgcgatgacactgtgcttttcagtgtgattttccgcaaatgattccatcccatttgtattaaa

SEQ ID NO: 77707 - DNA, 1554 bp, Heterodera glycines
gcacaggccgattttgcgttgaaattgctgcgcgaagtgtccacggacgaccgttcgtgcattgtttcgccgttttctgccgccgtcactttgtccatggtttacgcgggcgccaaggaaaagaccggcgaagaaatgggccaactgctggcaaatggtggaaagtttcgaaatttcataaactgaaaattatgtaaatcatttttagaatttcggttttttgttcgaatttgggtcttgaattcgaatttggccggaataaatggcagattcgttatcaaaaacttagaaaacccccagaaacattatcctcctacttttgaaaacaacaatttctcttcttttcagtgcccttgaaaaatgcctcacctaaagtaatgagggacaataatcatccccttccccttttaattaccctcccccaccaatcctccctattcctaattgcccccttattgctaattgccccctctctttttgtttaggtgcgcccgagtcggaggtgcacaaatacttcggcgctttgctcaaatcgatcacaagtggaacgaacagcagcaacactttggagacggccaacaaattgtacgtgaggaaaggcagcaaagtgaaggacgcgttcaaagagcaaattgagggaaattacgggggacagtttgagacggtggactttttggacggcaaagggacggcggaggtgggaaatgttttattggcgtaatgcgaaagcaggcccaaaaataggaaaatatcagctaaaaatgtcaaaaattgcttcatttttaagccattccattccgttagaataataactcttcataaaagtcaaattttggggttttttttcttaaaaagcatacggacagtggtgaatccttttggtgcaaaaattttttgtttcattaaaagttgggaaacattatttttcgccttcagaaaatcaacaagttcgtgaaagaagcgactcataagaaaatccgcgatttggtcacgcccgacaattttgacgggaacactcggtaaaagtttttaaattttgtttctaaaattctgtggcaaatctaatcttattcaatggataacatacttttggcccaaaaacgtcgccggacaaaacatcgttccgcaaaaaaatactaaaaaaaagaaaaaaacgtaaaaaaaaaatcataaagtttttgaattaggctgtcttcggccttttgcggcaatttcaaaagtccgaatatttatttttttttttaaatgttatttgatggaaatagcaaaaaaaaaaattgtaaaagtttgaaaatagttatttattttttgcagtttggtgctgatcaacgcgctttacttcaaaggcacatgggcggacaaattcgactcaaaattcaccaaaaaagcgaaatttcatgtggacgcgaaaaacttcaaagaggtggcggagacaaacacattttaaaatcctagcttcattttcattttgtccgtaaacgaccaattttttagctggaaatgatgcatttggaggcctatttcatttactacaagaacgatcaggtcgtttag

SEQ ID NO: 77708 - DNA, 477 bp, Heterodera glycines
atgccgttgccattgccaccatcaaatgccgaagtcgtcgccgaaccaaatgccacaacttcaataacaacagcagcaaaagtcatcgccagccgaaataccggctgctctacatcatccaccgcattgacaatggtcacgcgcagtgcacaacgacgtgcagcggaggaggaagcggttccggcacttgcaattcgtgagtttaatttttaaaaaattaataaaaaaattttaaaattgattataaattcattgtatttcctttattaaaattttttgaaatttaagcgccgccgccacctgccggctgctcatcatcatcatcaacagcagcaaatgttcctcagccgtcgtcgtcgtcactttccgccgaagaaatcacacgacaaaaaaagagggataaaaacaacaaaaacaaattcaacaaaaaacaggcaagctttaataaaaagtttaaatttcatagcatttaaataa

SEQ ID NO: 77709 - DNA, 86 bp, Heterodera glycines
ttctgccgccgtcactttgtccaaggtttacgcgggcgccaaggaaaagaccggcgaagaaatgggccaactgctggcaaatggtg

SEQ ID NO: 77710 - DNA, 1951 bp, Heterodera glycines
catacagagaattgaaatgcaaagttggccgtgctcaggcacagacaaacagtaaaaaattagaagaagtcaaaactggaaaatgcgcgtttgaacagtatttttgcctgatgatcacctgtgttgttggtaaattaattactaatttgaactcagcacggcaaaaaattatagactttatgtcatagaaatattactaattcaaaatttttatgatttatagagcaatttgaaaattttatttgacataataagaatttatcaaaaattccaaaatacattagttacgaaaatagtgagcgaaacgcaaaattattgacacattttttaaattaataaatgctataaatcgttaaaatgaagagtatccgagattaaaacattgctttcgtacttcccaaacaaaaaaaaattaataaaaatccctactcattagacataagccaagactgatctgaaaggtcttaacacattaaaatgccagaaaataggtttaaatttttgcagttggaaatccgtcgtacgctttcactgattggcaatgctcttacagcaacaatgccgaggtgtgtgccgaaagaactgaacaaaaattgcgagaactaaaccaattcaaaaacccgcgctgcaaatgcgaatttggcaaattcaacgaggaaatggccaatgaaaagccggcggcacaactcccgacaacgccattgccaagtgcacttttcactagaccttgtcgggactttacagaatactaggccgggtcaatacctagtacctctgttggggtcctagtatgcgtttttcaagattcccgccacgtttgggcatcacggttgggcaccaacatgtttttgcactataacttttttctttttcaactaaatctaacatttttggtatcattcgaaagcttaacatacttagacgctatttctaagctattgtttcgcggttagacaattgcaaaaaaaattataacatgaaaattgcaacaaaaaaagtctaattttctgaaattttttctaaaaaatttttgtaagactaattagagcacatccaaagagctttcgaatgataccaatcaatgttggatttggatgacaaagaaaaaagttatactgcaaaaacatgatggggcccaaccgtgccggctcaactgagtgaatccgaaccggcggcaatagataaactcagatattagctaattttaacgggttttttaaagacttgttctgcttgcggggagcatacgattacaaaggctatggcatcgttgaagaccgtgaatgtgcccgagaagatcggcattgctttatcgcaaattgcaagacaggtaaaatggttggaattgagtaataaaaaaatatatttaaacaaatatataataaaatatttaaaaatgtttaaacaaatatttaacaaaatatttaagcaaataccgtatttccttcaattatatgcccgtctccaattatctccccctttctgaggaggttgaaaaataatatacccgggcatacaattagagaaaataaggtattttaatggatttccagataaattatagaaaaaccttgaaactgctcgtaaccacaaaaagtttcatattatttaactgaatataatatatattttccattccatcagttccgtttgaattaaaatatgggattaaatgattttctgaataatttatttcccggcatttaattttggccaatgccgccgaacccctcatttttggcattctcccattttttcagcagacagtaaagatggcatcatggcttggggttgtgcggaaagcgataattgtacggcaattacggaaaagttgtccacaaacaagcacaaaaattacgaatgccgttgtgcatttggcggttttggcggcaatatgaccaacgaaaacatgacaattccgtcgtggattccaccgcccacgcttccgtaa

SEQ ID NO: 77711 - DNA, 471 bp, Heterodera glycines
atgtgcaaatttaatttctttttcaataaaaattatcgtaaatttcaggtattttgtcttttaaattgtttaaaatcaatggcccgtctcgaacctgaaccatatatatttgtgcgtttctgtttattaaccatttaatttttaggggtaatttctaaatttagatgataaaatcgattctgcatgatgcaggccgcttcaaaagcacgaactggttaaaaaaaaattggagacctacaaactgaattcgaaaaagcatgtaataatgacaatttttatatattttatttaaatattatttaatttgtttaggtcaatccccgagttaaaaagactctgcggacctacgttgggaatggtgagctcgcagtcgaagctggaagatattcggtggccgcatcgggcggtggtgataaatgatttgtttgatggttccgttttgtttttttctatttgttaattgttaataaa

SEQ ID NO: 77712 - DNA, 795 bp, Heterodera glycines
atgtttttgaaaattaaaatcgaatcgtcgggctggccggataatacgactactgaaaagcaaaaaaacgagtttatgagtatgtacaagcgtaaatatgatatagagcttgatcctaataatataaataaaaatccaggattacttttaatagcaaaattggtgagaatcaaattcatttaaatatgtatgtaaaattttagggtctaaactccttatggggtaaattttcaatgagaaactccctttgtcagaccaaagtgattgatagttcggctgagtggtataatcttttgcttgatgattctatagagctttctagcccaataataataaatgatgagatgattcgtgtgatctatagaaagaaggatagttttatcaaagaacacggagtctcgaacataatcatttctctatagtgagactgtaaattatacggtgttttattttatttttaggacaactagtgctgcatgtttagttttatataaaaatatggaaagggtatttaatacgccgggctgtcgtcttttttattgcgataccgatatgtcaaaatacaaatttagttgatttttattttgttcagattcattagttattgcccaccctccgaactcatgtcctcttaaagaaggaaaatttttggggaaaatgactagagaatatgcagattccgatattattgagtttagggtggtcctaaacagtatgcattgaaattaaaaagacgggaaactggagaaatttggtataaaaccaaaatacgcgggataactttagatcgtaata

SEQ ID NO: 77713 - DNA, 2027 bp, Heterodera glycines
atgagcacttttgccggtttccctggtggtggtagtgtcggtatcggcgtgccaattcggatagaaagcgcttcgcctcaccaagcaaccgctcaaccccaaaatgccaaccaccaacaacgccaaaacggtgctgcagcacaaccatcatcatcatcatcttcctcggtggtggaccgtctccaacggcttgaggcggagatggacgcggaagcggtggcgggcgccatccacttgccggatgaccgggagttgaccgcgcggctggccgccttcctggcggagcgctttccggacgcggatttgcagctgaccgtgagcagcgtgcggcgcacaatcaccaccaagcaacagtacgagacggagacgccgggcatggttggcctgccggtggatcagctgcaggagttgcagcgcaaactgatggccaagatcagtaagctgtgcttgtctctctgactgaacagggcaacaacacgtaaaaaaatgagaaaaatggtggcacaatgccaaaacgccataagacttgaaaatccctaaaaaattcaaatagtagggttaaagaatggcacaatgccaaatgatttgaaaatcccaaaaaattttatttgattaaagaatgaatgactcaatggcaaactcagttaacctgaaaattgctaacacttacaattaaagcatttatttaaacgcttaaaaataaatttaaaatgtattaaaattattttagtaaattttttggccgatggggccaaagaattaacaaaaataaattaattaataaatcaattatcattattttacatatgcacttgtactttttatcatgtttacttatttatttaattttttttttgcactgcacaattttatttttatttcaattttatttttatttcaattttatttttatttcaattttatttttattatcgattgcttttccttttttcttctccaagtgctttactttttattatgttagttttgtgtgtgttgctttttgcttctttttgttgtatttacaatttatgagtatttattattttaacattaagcgaaggcgacggcgttaattttaaaatttaacaacaaaaaaattctaacaaaaatgggtacgaattaggggtgtttcatgagacccaaaaatctctggaatccggaatttcgggtagaaaaagcctgaattatggaattatgatttgtaaccatccttggtatggttttttttagaaaaaatcctaagactggtgttccgtagcttattgttagcatttttttttcattttatgcaaaaagaatttgttccaggcgcccaaccattcgaacacgcaaaatccactgaaaagggtgaagaaagtgaggagaagcgagaggaatgggctcgtcgtgggcctgagggtgagttttccgaaaaattgtaaaaaatttcaggggcctagccttggttggggttagggtttaggcttcaccagttaaattaaatttgaaaaaatgggattctccaaatggaaaacgaaagcaaaaacttttaaaaaaatttcaattaaaatttttgtattttaaaaatttgtaaaatgttttttttacttttttaaaattctctaagcgtcgccatcgtttttttttttgaattttctgtgtctttgtcagatgtgcaacaaagtgagtcggtcgaggagggctttgggcctaccgacgacacgggcacaaccattgccaagaagcgcatgcacgtgctggccaccagccagtcccaagtgcaaggtgataaatatatctgtgaaaaattgtggtgaaaaaacccaattaattttgtgtggcgaagtgtcaattttttgtggttttttttttgtcttaaaaagggaaatcgaagtgtgaaggaaatttttcggaatttttattcttttctttttttttttttgtaaaactaattttttttattaatgcatattttattttatcccatttttcttgctacttgtgtgttagctgtgggcagattttcaaaaattttttttttgaga

SEQ ID NO: 77714 - DNA, 473 bp, Heterodera glycines
atgacagacagacaaacgaacggttggaaggacaagcaagaaacattttatttataaataaaataaaaatttttttttcttttttataaaattaatttatttttttattaattaatttttctaaaaaattttgtttcacggcaaattaaaaaaacaattaaaaattgcgttattaaaacaaaattaccgtcttcgcctcggtgttgctgctggaaaacaggaattccgctgggtgtgtgctgtggctggaaaccttcgaggccttaaaaatttttctaaattattttccattattcgaaagatggacgaaggcttcatcttttaatgaaaaaacatttattttcaatcagaatttaattataaattatggcaaagtgtcaattcaattacatttgtctgtttttatgatcatcctctgaatactgtaccgattattaagcgaatattaaagcgatagattagggataaataaa

SEQ ID NO: 77715 - DNA, 651 bp, Heterodera glycines
agctattaattttttatattgcttatgcttaattgagtttcactgttagactaatgaagacttccttaaaaaccaagaagaagcatctcataaatatttgggtacaaaagcggatctcaatcggtcatgaatttttagcgcaaaatatgaaaaatcatttactgtaattttaacataattaattaaattttaaataatgtaacttcggatcattaaaataattattttgcttttaatttgatcacttcacttttcgtacttcgccactaattgcactttttcgtacttcgtctcagtacgacacgaagcatttaaataccgtaaattttaaaaatatcattaaaaatggaaatgaattttcgaatattgaccatatatttataaaaatggaaagaggatcagataaaaatgaaacagtctgaaaaaaacaaaatgttagtgaacaacggaatcgaacccgcgctttaacacaatgcgtattacgctctaaccactgaactaccaacgctcaaaatttcgacagcttaattattacctaaatcgaaacacgtgaccatttcatacaaattaccttccagcttctcgctgcacaacttcgtccgcttcacgtcgcattgtgcgccgttcggcggtcgatggtcgccagccgaa

SEQ ID NO: 77716 - DNA, 3596 bp, Heterodera glycines
atgcgacgtgaagcggacgaagttgtgcagcgagaagctggaaggtaatttgtatgaaatggtcacgtgtttcgatttaggtaataattaagctgtcgaaattttgagcgttggtagttcagtggttagagcgtaatacgcattgtgttaaagcgcgggttcgattccgttgttcactaacattttgtttttttcagactgtttcatttttatctgatcctctttccatttttataaatatatggtcaatattcgaaaattcatttccatttttaatgatatttttaaaatttacggtatttaaatgcttcgtgtcgtactgagacgaagtacgaaaaagtgcaattagtggcgaagtacgaaaagtgaagtgatcaaattaaaagcaaaataattattttaatgatccgaagttacattatttaaaatttaattaattatgttaaaattacagtaaatgatttttcatattttgcgctaaaaattcatgaccgattgagatccgcttttgtacccaaatatttatgagatgcttcttcttggtttttaaggaagtcttcattagtctaacagtgaaactcaattaagcataagcaatataaaaaattaatagcttttaaagcttttgtttcaccatataatataaagtttattttgcttttaatttttaaataattatttttctttttaatttttaaataattatttgcttttaattttcaaataattatttttcttttaattttttaaataattattttgcttttaattttcaaataattatttttgctttaataatttgatcacttgcactttttcatacttcgtcatagcaccgtatgatgtcataaaatttatatattcaattgaaatcttggattatgattccttcctgattacattttttgctttaacatttaataatgaaattttttattttagacaactcaaagctgaagacgaatctccaattagccccatcaaaggaacagacgaacaaattgtaacaattgtaacgcaaccgattgagtcacacgcggaggaattagcgacacaagcacaagcagtaccagcacaacaccaacagcacagacatggagaggaagaagaccatcaagcagtacaagaagaagaaccaaaacccgaaaaaattcgcaatgaaattgaaataattcaacaagaagccattgaaacgcctggatcagttgaagtgaaggaaattgaatcaccaaaattgatcagcagaattgagccgatcattacggtggaaccgccatccggagtttttgaagaatcgcctccagaaagtccaacacgcgatgaaatgaaaactgtgcaagccgaacaagctgaacgccatgacacggaggttgaaaagtacgttcctgaagaagaagaagcatttgaaaagcgtgttcctgaagagacttttgaaaaacgccttccggaagagatgattgaaaggcgcgtcccggaagagaaagaagcatttgaaaagggcgttccggaagaggaagcggaagaagaaacattcgaaaggcgtcttctggaaggagaaccgaaagaggaagaagctgttgaaaggcgtattccggaagaggcgtttgaaaggcttattcacgaagaggacaaaccgtttgaaaggcacgttccggaagagaaaggagcatttgaaggacatcgtgtggatgaagcatttgaaaaacgcttcccggaagaggaagaaatatctgaaatgcctttaactaaaatggaaaagccaacagatttgagtgtaaaagaggaagtagaatccgaacttgaaacaaaaacgcaaaaggaagttgaagcagtacctgaagaaccacatgtgaaaagtgaggctgttattggcaaatacctcccatttggggctgaaacgcccggaagggatgaaaaagcattggtggaagaggaggaaattgaacaaaaaggcacggaggaaattacgttaaaaggagctgaacggggtacttttgaatacaaaacaaaaagttttttgataaatatttttcatgtacacttttgtttttataggtttttaattattttatttttacatttttgaaattaaatatattttagcagagaaataacagaattccgtaaatgccgcactttttcgtaccgcaattttttttttttatagataaaacccagagaaatttggaattttattttttttaaaatggaaatcttattttttacgttttaaaaactaaaaaattaatttttattagagttgttaaaccaatccataaatagcaatttaacgtaatccgaaccctaatttttcctcctgatgatgcttattgacactcgaccaaaatcttttctctgatattttaaagaaaatttgtttaaaaatcaaaaaaaaatatttaatcttgaaaactaattgaggcctccgcttaacccttattagtgaataggattatcattccaatgattaaatgaattttgttgaaaatttagtgaattttttcaaaatttttaattgcaaattaatcattaaacaaacaaataaaaattgcagaaaaaccaaacaaatccaatctcgttgttggagcaaggaagcggaagaaacatatttcttcatcattaattccaataaaacagtggaagaagggcgacaaaaagttggcaaaaatgccaaaaatcgacgctgcttttaaaggagcaaaaaaatcctttattccaaagccaaaaaaagtggcaaaaattcaaaaacccaaagtgatgtcatgtcgcataaaactcgctgtaattaaaggtatttaaaagaataaaatgatgtgtgactgacccccttttatgcttcattttcgggctttccttctttatacattatgggaatttcgactcaccctaaatggatttcagttttttcgggttatggaattttcagcagcgattaatttcattctttttaacgggaattaatttaaaattttttatttttttcaatttattattatttcttccacttttccttttaagttttttcaaaatataatttattttaattacctattatcttcacttccatttgaatttttattttttttataaataatatcaatattaaacaattattttttataaaactttcattagcgatttttaattttggaatttttcagctcgaataatttgaatcttttttaaatttttttccttttggataaattaacagtataattttctcaatttattatttgtttttcttcaacttttcttttattttttatttaaaatatatttattttttaattaatatcttctttaatattaagttgattttcatattggatttttatttagtttttataaataatatcaatattaaacaatttattttttataaacctttctttagcaatttttaattttttttttctaatttcaattctttattttgtttcttcaaattcctttgggattttcgtttttttcaattcaaatctttaaacaacttttttctctttggactttcgtttatatttcttctccaaattagttcaattccaaaaattgcagaagagtcgtcacttggaacagacgttgtgaagaaatga

SEQ ID NO: 77717 - DNA, 1231 bp, Heterodera glycines
atgactccggtggaacagcagattgagcaagaaatgccatcagttgttgagccatcgacaattgaacagcttcaacaaattcagggtcagcagcggttggatgaaacggaaaggtaggcataaatttagaattttattaattattattaaattgtttgtcgtttaaaattagaaaattttccagcaggacattattaggggaatttgttccaaaaatattcataatttttcattgttcgccaaaatatattcttataaataatgttaaaatgctttttttctccaatagtttataattttgaaaaaaattgattattttttttcaatttcatttagtccaatcactgaaattgctgaaaagaaggaagaagaagcaccgatgattcatgtgctgcatcaatcccaaactgaacataagccaattgtttggcttgaagaaacgccactggagcaggtgatagcattataaaaacgattttatattattctttttgaataaattttcattcgaatttcatgggttacttaatattaattagaaaaactggactaattttcagaaatttgctaaattttcgaaacacattttttttgggttaatcactcagttttccaaaaaacctaagatttccaacattaccacttgccaaatgtaattaaataaaaaaatgttctcttcaatttttgcattaaatacactatttaaatatctttaaattaaatatttattcggtttcaggcaccttatgaagctgaagatgttgcaaagctgcaagccctgcatggcgttcagagtgagtcagcagcacaacagccaaaggaggcgccagacgcaagcagttcaaccaaaccatggttttccgccgtaatcggcggaattgcgggcgctgtagctgcagtcggaatagcaaccgacaaagcaaaattgaatgaaaatggggaagaagaacaaattgaagcagtacaggaacggaatttggagttggaagacagtttggcatttgaggaccaacatcatccgactgaagaggaggtgaaatttccagaacacgtgaaaacggatgaggttccggaagacctgaggacagttgaggagtatccggaagacgtgagaactgaagaaataattccggaagagcatctggaaaacgtcgtttctattgcaaaccacccggaagaggagacaactccgaaacatgtgacagcagtgaaaagtttccggaagacgtga

SEQ ID NO: 77718 - DNA, 129 bp, Heterodera glycines
tatggcacggaaagacttccggtttccgacatttttggggtcggaattccgacttccgaaatttttgatgaaaagtcggaaatttttttaatttttttttcaaaaaactagtaagttttctacaatttc

SEQ ID NO: 77719 - DNA, 536 bp, Heterodera glycines
atgaacaacttcatcagtgccttttacgacgctgtgttgctgtatgcgattgcactgaacgaaacactggcggaggggttggacccgcgcaacggacaaagtatcacaaggtgtaacaatttcaactttttattttttaataattaaataaataatgaataagattctctattttttgtaacattttccaatttcagcaaaatgtggaaccgcacatttgtgggcatcaccggcaatgttagcattgataacaacggggaccgctactcggactactcattgttggacctggacccggatcaggacaaatttgtggtccgtttaatataaaatgattacacaatgacaatgattcatcctctattaaagcggcccttgacctctaagcactgaaaatttttcaaaaactttattttctgtgatattttctcgaaatattgctaaaaatgtactttttaagaattggaaatttatgccaaaaataagtcaaataatgaaaaattgttttcctttttactcagttttcttcaaaatga

SEQ ID NO: 77720 - DNA, 634 bp, Heterodera glycines
atgacatggaaggtaaatcttctgaaacaaaaacaaaaaaaattttctagtcatttctaaagaattctttcacatatttttccttttttacattttcaaagaaaaaatttttcaaaatctaaagctttatttattttttattttttgattttcctaaaaaacctaagaaattaggaagctaaaaatttcggtttattaaagaattttgtatatatattttaaaattatatataaatattttcaaaaatcattaaaataaaaaagatgcaaggtttacctaatcaaaaaggaacatttatatgaaaataaataaaacaaaataagaaataaataaaaaattaaaaaaaacttcactggcagatcaaatgggaagagcttgacggcgaagatgttcgacgggagaagaagaaaaagcgacaacagaacagctcgacaaagttggcccgcttcgatgccgcggaacagtccgaggcgttgctgcgctgcaacagtcgcatgtccgtcggctcggacaaggtacagtaccgtctcgcattggaacttacgataaaatgaaactgtatgcatactgacgaaacccaactcttactgcaccgactcatattttttaagacatttgtcaaagttgaccaaa

SEQ ID NO: 77721 - DNA, 997 bp, Heterodera glycines
atgaatttgttgtatttaatatttattcttattttctttatttttgtaattgactccgacaaaatgcgaccaaattttgatgaaatatttggcaacggatgggacaaaaaagaaagtgaacaaacagtgaaaattgaacaaaatgaacgaaatgagaattcacaatcagcagcagttgatcaaatgggtgaagaaatgggaaatgaccgaaatgatcaaatgaaaaatgatcacaaaaagagagaaataattcgaaaatttgaagcaattaaagaaaagttgaagcaaaaaggaaaatacgaaaacaaaaaccgaaccaaaattgagagaaaaattgcaaaattattaggagcaaagataacattaataagtaaatggaaaaatgaattaaatctaaataaaaataaaataaaaaaggaattttatgagatgaaaaagagtgaattcattgaacgatttgatgaatttaaagaattatatggccaaggcaaacagaaagaatttgcgaaggaattgggcatttctgaagacacatttcgaagatggaaaaaagaaatgctaccaaaataccataaaagtcaaagtaagaattattttagtgaaattaaattgtactttttctttaagaacaccataccaatgatgataaattgatgaagatgaagcaatattatgaaataaaagaagcaaacccaaaagtgactgacaaaataattgccaagaaattggggattggatggacaactctgaaaagatggaaaaaggaatgctctcatccaattgatcagtgatttttatttgatcatgattgttgatgaccatgaatagttttcgaaatttacaatatcatttagttgagactctaacctttttttagtttctttttatgtcatggtaaaaagattgtttttcaaaatgctggttcttacaaatgattaaacgatttgtgaaatcgaattaaaggaaaattattcttaaaattggttttcatttataa

SEQ ID NO: 77722 - DNA, 332 bp, Heterodera glycines
ccttctaagaatttcgcccagaatttccgccaaattttttcaggaatttcataaaccaaagtagaattagtatatattactaagtttaatggttttatttatttataaatgaaaaccaattttaagaataattttcctttaattcgatttcacaaatcgtttaatcatttgtaagaaccagcattttgaaaaacaatctttttaccatgacataaaaagaaactaaaaaaaggttagagtctcaactaaatgatattgtaaatttcgaaaactattcatggtcatcaacaatcatgatcaaataaaaatcactgatcaattggatgagagca

SEQ ID NO: 77723 - DNA, 718 bp, Heterodera glycines
atgataaaaattgaacaaaatgaaaacagtgaagttgatcaattgggtgaagaaatggcaaatggtccaattgatcaaatgagaaattataccgatcagaaccattcgaaaagtgatcagaatattatagaagaaccaaatgatcagcaaaagagagaaattgttcaaaaatttgatgcaattagagaaaagttaagagaaaaaagaaattatcaatggaaaaacagagtcaaaattgagagaaaatttggaaaattattaggcgtaaatcgcaaaaaaaatttacaaatggaaaaaggaattaaatttaaacaaaaagaaaacctatagaatgaaaaagagtttttatgatgaaaaaagagcgaattcaatgaacgtttagatgaatttaaaagattatatggccaaggcaaacagaaagaatttgtgaaggaattgggcatttctgaaaaaacatttattaaatggaaaaaagaattgatgccaaattaccacaaaagtaaaggaataaggaataattaaatttttaattagtttaatcatttttattatttaagcacctaataaatattccaatgaggaccaattagaaaagatgaagcattattttgaaataaaagaagccaacccaaaagtgactgacgaaataattgccaaggaattgagaattggaattacaacactgatcagatggaaaaagaaatgcttatccatttga

SEQ ID NO: 77724 - DNA, 230 bp, Heterodera glycines
atgccttccccctttgttggcacattcactcatttgtcacgtaactgctcagcgttgggatgccaaagggacggacaaccgtttgatacaacggcaccgctaaagtgccaagttttgttttggcgccaatccgatggaaaagtgccgagggacactggttgtaaagttcggcaagtacaacatcaaattgttctgcttgaagacggcggagcaactcatcgtcatttcga

SEQ ID NO: 77725 - DNA, 329 bp, Heterodera glycines
atggcatttttggaagcatttgcccgcttttcgtactatgaatttatatggaaagttaaattgtcttatgaagatgccaaagtgtttgccaagtacaaaaatgtgaacccggtcaaatggatggaccaaaaatcgttgctaagtgagttaaaaaacgaaaaagtttgaaaattcagttaatcattgatcacttagtaataagttcactaaaattaattacccttaatttcggaggctttaaattttttcatattcggtcaatgcccaaattcttggtatcaaacgaaagctcaaagtctacagaaattttttatttagcgaattgcgga

SEQ ID NO: 77726 - DNA, 491 bp, Heterodera glycines
atgcaaattctccaacaaaaaactgggcctgagcccgccaatgtcgagctggtgttgacggaagatctgagcaacggtgcggaaccgtgcaaagtgcgtgtgctcaaccaggtcaatgcggagcagccgaaaccgttcgagtacatcaccagcagggagaatgcttcggatttggtaaaaaaaaatgagtttattacagtaggattgggcaaattttaaactaaattttcctaaaaatttcaaattttaacatctgttcattcaaggaagacgattgtgcgcacaagctttccaacattgcacgtccagacagcttctttcaggtggtaaatcggacaagcgatgtcatcatttatcaaaaaattttcattaccattaatatgcaatcgtaaaataaattaaaataatttttcgataattaaataaccgtttcgccacaatttaaaaaaaagaaaataatcatttttttcaaataagcaaaaaaaatagaa

SEQ ID NO: 77727 - DNA, 454 bp, Heterodera glycines
  unsure (1)..(454): unsure at all n locations
aaatggcccacttggagctcaaacattcaacgctgggtttcagagtcaagcaaccctggcttcatacccatttagagtttgagaataggttaaggacatttcgtccncaagtcctctaatcattcgctttaccgagtataactgcttaacgagctccagctatcctgggggaaacttcggagggaaccagctactagatggttcgattagtctttcgcccctatacccaagtcagacgatcgatttgcacgtcagaatcgcttcggacttccaccagagtttcctctggcttcatcctgctcaggaatagttcaccatctttcgggtctcagcgcatacgctctgtctccgccccatcgcatgcgatcgagacgggactatgttgcgccccaacaccgcagtgccagggatcacacatcagctccgtaagaagccttcactttcattgcgcctt

SEQ ID NO: 77728 - DNA, 1316 bp, Heterodera glycines
aaaactgtgccaatttgttgtcagtcgcgtgatttggacctgtccgccgtcgatgccattttggtgtccaacacggcctctctcgtcgcgctgcctttttacaccgagggcaccggcttcactggcacagtttacgccaccgaccccacctaccaacttggcaaactggtcatggaagacttgtgcgacatgtttgagcgcgtcgaccgaccggctgaagacgtttcatgggcgtggaagacgctgtgccgatcgtttccaaacgcaccgctcagtgacccaaacgaatggaggacattttacacacgcgaaacgatggagaagagtttggcacgcattcggagagtgttcttccgcgaagaaattgtgcggctttgtttagtgcacatttggacatattgcccaattctccgttgaggtggtcaacggggagctgcgcgtgtccgccttcagcagcggctacgccatcggctccagcaattggctgttacagacggagcaccaccgcatcggctatttggcgccttcctctctgcgccattcgcacaccaaaccgatggaattgactgctttcggacagctcgactctctgctgatcacttccctgtctacggccgatcagacgcccgatttgaccgtattttgatcactttgagaccccttttagggctccgttctgcttaaaggtgtacaagttctcttctgcggtgattgaaacattgaaaatgggaggaaatgtgctgattccggtcactcccactgggttggtctacgacatgttcgaatgtgtgctgaaaacaatcgaattggtgagcgatggtcggggtttggttggcaattctatcattaattaaaacagcaaaatgtgtcccgcaacattcccatttacttcgtctccaccgtggccgaaagttcgctgcaatttgcgcagatttttcccgaatggttatccgaagacaaaagcagcagagtttacaagccggaagaacccttctttcactcagaggtggcaacactcgagacaatttccgtggcagtgaatcatttggccaaatttacgcactgcgcctccctaatatagccccccttgattaaatttgccatcgattgcttgtacatcttttattcacccgtttgccccttgtcagctcgcccgcactggtcgcattcgtgtctacgactctctccatgggcccttttcccgcgagtgtcgtcagccctgcgtggtgttcgccgtccatccgtcgttacgaattggcgaaattgtgcattgctcgatttgtggggtggatgtcgcgcatgccatcataatgatc

SEQ ID NO: 77729 - DNA, 1237 bp, Heterodera glycines
atgccggtgccattgatcgaaccccggctaaccaccgccaactcaggtagaacgggatgacagaccaacacgggtgtgctgcactatcactttacatttctcaaaaatttcgaaaatcaagggctaaagcgagtcgaaaaaaactaacaaaccgtaataattaggccactttttggtttagaaatgtcgtggtgggtactttcggttttgtggccggatttgaaatcgttaaaaaaagcaacaactctttcaaaaaatttatcaaataaatttcacaacttttgttacccccccccccccccctcccgtttcaggcaatgtctatgtgtggggtgattttgaccaaccgttgcccggcatgccgccccaggggacgcacgtgcgcattttgcgtgtccgtaacttgaacatgactgggccacccaaatacgaccagcaaccgcagcagcagatgccgatgggcggcggaggaggctacggatggcaagcgcctcccggcggcgcgagcggagcgcccccgtacccagcggcgggtaaaacaaataattaattatgccaattatcagtaattaccctttcctcctcctgtgtgtgttaatagggtgaaactgaagacttggcgagttgtcaccatttctagcaatttaaaaaaaattcaactgaaaatccatccaaaaaatccaataatatgaactatttaagtcttggggtagagcactcggcaaattttaaatgtgttattccctctagcaaggcaatttcaaaaattatagcctataaaaattaatggcgtaattttgatgtctccattgtatcggttttgtttaattaaagttttttgtaaaaatatttggcacatttccctgcaggagggccggcacccggcggcggctacggatacggacaaggagcagctggtggtgcaccaccaccgccgtactcataccaacagaaacaataataataataataataagcgtccatgtctccgaagaggcaaagatggcatttcaaacggtgtcagaatgcgttggatttccttccatcatcttatgtaaacctgtcagatattatgaccgattaatataattttgactgattccccccccccccccccaccatttccatatcccaagatatatcacttcaaaatcgcaaaaattataatattatttatcgtaatcttaaagatttaatggtaaattgtatttttcaattttgagaatttggaaataaa

SEQ ID NO: 77730 - DNA, 1481 bp, Heterodera glycines
  unsure (1)..(1481): unsure at all n locations
aaaaatgcgaaattcgaaaattgaattttcaactttttgttcgaattcgggtcccggtttcggaattgttcgatatgaatgtcatattcgtgatcagtgaccccgaaaccccccccccccccaaaaaaaaaatttttttttatgtggcgtaaagtgaaaaagtacccatttttgacctaacaataaggcacaaattttcattaaaaatgaatttccattgtgtaggacgtgtcaaatttttgttcgcgttgaaagtgcagagccaagccggcggaaccgcatttgcattggtctcccaatccgaggactacggccaatatgtggtgggtggctagataaaaaaataatttatccggggtaaattaatcgctttgtctcctcccctaaaattttaaattttttttataattactaaccctttcctaaaatttctgagttttttatttatgcttcatatacttgtcataaggtcaaaaacaagccccaaaaaacttaaaaatgaaaatgcaaaattctggtcgctcccataatttcttttcgtgcatggggcgaaacgaaattttttgttttttgtattttaataccgtatttctcaataattcacagatgcatgtgtggcggttgaatttgagcgcggatggaatgcaaatggcgtccgagccggcctcgctgctgcaggcaccgcttgtcattgacgaggaatggatttgcacgatgcgcgaggacgcgcccgagttggtggtgagccaaaaaaaagaagcattttttttctttatttttccctgaaatttttttggaacggaattccgagagcccaaaagtcgaaaaccacccctcccacctcaattttctaaaaaaaaacaaacttttgtgaggttgtccatggccccggactgaatgtggtgcgagtgcatgccgatgcctatgggccccaacaaccgattgaccgcttcagtgtgcccggatcgcagctgtcccatttttatgacggatttctcagccgagggtaattaaaaaaaattctttcatcacccggctttgtgttcagaagtatttactttgtgtccgcttcaccggacggccattttggccacagccgtatccatgcactgaacctggatnctcgtggtccgntcgctncgctctntttgcncccngnccctctgcgtggcttccctgccgcgcgctggcgggcggctctcgtctcggtttcgggtgcgggttttgcggggnggcgnccggttgcggncnctngttttccctnnnngccgggntcggggncccgnccgggtcccgttcccgttntgggggggttgtggtgccccnntttttcgttcggtttnggctttnttctgttggccggcggtgnnnttgnttncggctncggctncgtggctcgcctggtaagtattgccgctcgaccttaccaacttcacgtcctagtgtaagcccgcccaaatgccggtgccatagatcgaacc

SEQ ID NO: 77731 - DNA, 492 bp, Heterodera glycines
atgtctgaaaaaagcatagtgagaccaggccaaaaggctgaaaaaatttttaattttgaggccagggcgcctcatttttctcttagccaaaaaaatttgttatctcatcagcaaaacaatttaatacattttatcgtgaaattagacagaaaataggttccaatatttaaacaaaaaacgagaaatactcaacaaaattgttataccgatcttataggttgacgaaaataaaatttcgttttagatttttccaaaaaaaaaaaaaaattgatttttaactcaataatcttattatttcatatttcagttatattttgagttgattttatttcttatttttggctgattttcttgaattaattacccgagattaattattacccataaaagcaattaaaaaattgacctttatctgcaatgaatttaattgcgaaatgacagccggactttctcttattctcagcgaaagtgtgacagcgaagatcaaataaa

SEQ ID NO: 77732 - DNA, 408 bp, Heterodera glycines
atggtaagacattttaattttcaattaataattaaacaatttttttgcctccttcaaaaggatttccacctgtcatttatttggcccttaacaaaacgatacgcgacgattgtcgcttactgtacatgaaactgttccagcggcaccgtatcgaaaagaagaatggtgttactgtacttgttaaagctgttcctacttgtccacaaaacattgcttcttcaccattgtagtatacaaattttgtttttcactggtcataaagtcggagagaagagatgggacaaatttcgagttcgaaaatttttggatctcctgagttccggtttctgaaattttttaagctaacttcgggattttttggaattcgatttggtttatttatttttttaatttaaaagcactgccaaa

SEQ ID NO: 77733 - DNA, 394 bp, Heterodera glycines
atgctatacattactcgtgaattaaatggccagtgtaagcatatgattaataacaaattatagcaaattattgattgacttttttacatttacccttttacaatttttttctagataagagcattttataattagataatgtaaatagaaaaaacgtaaaaatgtaaaaatataaaatttgtaaatggaaatccgttcattatatataatatgcatatttttgaatgtctaaacggtggaatgttgtgccaacaaaataatggaaaaccaacccaggtttcactcggtctccaaatgtttttttttgtcatttcatacatcatttcacatattttttctgttgagaatattttgttcatttagattaaggcttgttgggcataaacctaataaa

SEQ ID NO: 77734 - DNA, 357 bp, Heterodera glycines
atgtttttattccaattttcgccaatcatcatgatatttatgtttttgttgtgcccaagtgatcaaatgatgcaaggacgtaacggaataaacggtattgatattttaatgaatgcattgcaattaaaagaataaatttaaatatttattaaagatagttatgatacgggcccggatttatcttttttaaatgtttttttttgagaatattttatatgtatgaaaaactcataaatagcattgttaccagttttattttgaatcaaagcaagttattcgcaaaaaaataataatttttttttagacttttgtcttatactaaactattttgatgtattttttgcgatttttttttaa

SEQ ID NO: 77735 - DNA, 846 bp, Heterodera glycines
atggaacgagcgatgcttccccggatggatcaatcggcgcctgcccgccagtgtcacggaggacttcaaccggtgccgcctctgcggtttggacgtacggcaaacatcgcggcacattgcggagtaccacctgaacatcccgctgcaccagtgtccattgtgcgagtacggcgcggccgaggcacggcttgtgcaacgacacatgcgcaacaatcacacgctgaaggaatgtgaggcaagagaacggacagacgaaagggtaaaaaagacaaagggacagacgaaatttaagggcatggaacccatcgccaacgtggagaagcacagagccgaattctcggagttgcacaaccaatgcttcccgggcagaccaaaacggttgtccaacattacaattgcggacgaaagcagaagggcaaagtgccgaggatgtgctcaggtgagagacagtgagggaggggggacaaattgccatttgatggggaaagggaaattggggcgtttccaaggaatgagaaaatggcatttccgtttccatccattcttttgagttcaaagcccccgccccgagactcatttttccaaattaaacttttgcccatctcagactatcagtaagaagcgtcgtctgctgcatttgctggagaagcatctgaagaagcccatctacaagtgcaagtactgcttgttcacctccacccacgacaaagcgacggtggacacccatcagaaggagaaacactcggggaaggcaccgcacgtgctgtccacgctgtccagacacaaagcggagctgaaaaggctggcgacggaatgcttcaacgagcccgacctcaagttggagga

SEQ ID NO: 77736 - DNA, 1308 bp, Heterodera glycines
  unsure (1)..(1308): unsure at all n locations
atggccctacgccgacgtgccgcgcttcgatggtcgactcaaaagcaattcgaaaggcgcactgtcaggtgagagacggagaaaacggcaaaatgaaaacgaaagggacaaacagacagcaaagttaaggtgtgcaatttggacatttgttcaaccgcacgacagcgacacgtttatatggtccatctgaagaagaaaggtgggccgggaaagtggcgaatgtggcacgggagggatttgttgtggggaaaagggttaactctgaactgctccatggggtggaagcatttttggattttgggaaaatagcaatttacagatttgttcaaatgcccccactgcgaatacacaaattcgaattccgtgtgggaagtgcaaaagcacagccgcgtgcagcacggcaaagacgcgcgaccgatcagtcaggaggagaagcacaagttggaaattcaggtgacaatgaagcgaatcaagcctcaatcgctgttttggtgtcccatcttaagatgtggagccaactttgtttccccgaatggaaacagaaacggaaaattgagcacggcgactcgacggaagaggagacagcgctgaaacggcgcagagagggcgaaggcggcgctgaagtggacgacttgttggagggatttggcgaactgttgnggcacattttgcagcagcaaaacgaagcgaaaaacacggaccaatagcggaggaggagggagaagaggaggacgaacagcagcaggaaagcggaacaacggaggagcagacggaggaggacgaatggcgggacaacgcgtcaccaagtgacaaagcgccgacaacggcggccgacgaatgcgctgcaggcaacgacagactttgccacctgtgcatgtgagtggtgccatggaaattgccgaccgaaacaaaacgccaaaatgggggatggcattttgaaagcgtgggaaagggaagaaaggaatttacgatgactcaaagcgaaaaccatcgaataattatgaaaaattgtgcagggaagagtccaaatacccgggacggcacattgcccagcgccatctgaagagaccgctctacgaatgcccaatttgtgccaaattcggcagctacgaaagttgcacagtgagcaaacacatcaacaaagtgcacccgaaggaggcgaagaatgcgatgccaataagcaatttggagaaatacgcggacgaaatcagagaattgcaggcactgactaaattaatggcatgccatttcctcacccattcacttgacactttctacagattcgctgcttccccaaccgacaaatga

SEQ ID NO: 77737 - DNA, 1127 bp, Heterodera glycines
atgaattctgaaaaatcagaaaaagctaataccattttggtggaagctgcaaaaaaagagacagagagagcatggagggatgtagcggcgttagcagaagaagttggcgattttgccaagtcttctcgggaaacacttaatcaggcaataaaatctagagaaaaagctccttatgctaacggtgttcgagaattatatcttaaaatgtccgattcaatttgggaaattttcaaaatcgaggaccaaatcaatttggagtctgtaaaggctgaatctgcatggcgcgagttcgagagatgcaaaacttttgaccaggcaacaaaattcgaggaacaagcgcaaaattcgttaatggaagcccggagattacatttcgagtcccgaagggttcagagccaaatgttaaattatgaaaataggctcaaaacaattgtttgggagcacgttggtatataagaacaaaaaaataacgatataccaaaatggaaaattgtgccataattgagtcattatgtcatgaggacttaaaatttggctttaaaaaatataaaaccaaattttattttaaaaatcctttcctaattaatgcggaggaaaattttaaaaatatcctcgcatcaataatcgtaaaaatttataaaaatgaacaaggaaaattcaaaagcattctgaagatttcttttggttttgaatcattttattgccctcttagatgccctagtgaaaacacagccgaggctttgttccaacatgtcctattaaaagaagaattatattcgcttttctatcctttggatgatgtcataacactagaagtaactataatcccagatgtcgacaatagaccaagaaattaattttataaaaaacaaaattacgagaaattggaaaatttctggaaaaatacttaaacgatcaattaatctcgaaatttttgcaaatatgctttttaaacgggtgaaaaatttctacataacagcatttagtgcacctggaatggaaaatttatatttttcattcttagaaatgctcgaaaaaattcaaaaactacctaaacttattatgcatgagtatagaaaccaagcattagctatgcaaaaaatagaaattggactcaaagaaataaa

SEQ ID NO: 77738 - DNA, 674 bp, Heterodera glycines
atgtactcgtttcaaaaatattttgaggaggctctcgaaaaagaagcgtttttttggccaaaaaacagagaggaagttgaggcattgttatttgactcatcagattataaaatagcaatacacagagactacgacagcgcttattcagattatataactatgtataatcgcacctcaattttttgtttcaccatggttgagagaaatgtgagatattttcatgactcgggaagagggacgcctatcggaaggtttacaactgtgctaaatgttacggtgcaggcgaattatacgggagaggggtacatggcaccagcgttttacttttggttctattgggaaggcagaagccaaacaaccaacgcatccttcaggagccgtttttttttatattgcgtttccgcgttgagagtgatgggcaaagcctggggcagagagctacttttgacccctgttgaggtcttaattgacatcttctaccaccgtatagataggtcagaacatagaaaaaacaaattttcaaaaaatattttagagagttggttggaacatgggcgctactctatagacttccaccttcactttttaacacttcacggcgggtggttgctgagaaggcaatggaagaatttttaaaattaccatcattttttcgcatgattttttataataaa

SEQ ID NO: 77739 - DNA, 468 bp, Heterodera glycines
atgtcaaagaaaaatttccaagaaacttcaaaagaaattcgccgctcgaaaaatacaaaaaattatttcaagaacagtgctaatttgggaaaatgttttgaagaagtggaaagtcacacaaacgaaaataaaaaatttgggataaaagaacatgtgactactttctattttaagtgcccagaaaacgaagaccccgaacaaatgtttaaaaaaatcctgaaaaaattaatgacggatgcgatgaaccgtgaagctgagccggactggaaaattgagaaaatttcagtcgatctgtattgcagtgccctgtcggacccagtgatcatccctgcccgccccttccaacattcgaacccagacattgttttcaatgagttcatgcacagacagcaatcatttggggaagtgaatttgttggaccagagaatttcgataattattgccacttattcctttcctgttaaataa

SEQ ID NO: 77740 - DNA, 3045 bp, Heterodera glycines
atggttttagaattgatggaaaaggcagggattagcatgggcgacaaaacatttggtatccaacaacttgaggctgtacaaaagttttgggacgcccaatacccggacaactttcgcatcgttgcttttgaaatggtaaataaattcgcttgaaaaaatataccggtacatcttttttagaagacccgacttaagccaattttcaaaggggaaggtgttcgaagaaatgaagtttgtgtgataagagaaggcaatcactgggatgggatcaaatcggcttcctggttttttggtgttcgcaatttttgtgtggcttgtgaggtgacatatgatcgaactgaacggcaccggatggaatgcaaggaccgctgtaagaagtgctgtcggatggggtttggctttccatgcgtggatgtctgtgatgagattcactgcggcgaatgtaatctcaagttctacaaccgggaatgctttgaagcgcacaagaagatggcttgtaaagagtacaagaaatgtgaaaaatgtggagaagtctaccaaacacgttcaaaacacgtctgtggggaaaaattttgtaaaatctgcaaagttaaccatcctggtcgtcaatgtttcatcaaaccgattaaagtgcggccgcagaaagcatatagaattgtggcatacgacctggaaacgacagtagatgggggagaacaccggcctaatcttgttagtgcctcacatacttgtagtatttgtgcgggagaagagcgggaatgtgagatttgcgaaggccccaagaaaatcacatggtcagtagcggatggttttgacccaatgagcgagtttgttgcctggataatgggttttcaacgatttgaaacggttgcttttgcgcattatgctgggaggttcgattcccactttgttttgtccgagctaacaaagaaggaaattgcgacggagctgatgatggcagatttgaagatttatcaaatcaaggctggaaaagtgtatttccgggatttctggatgcttagtcagaacaagttgggggatctcccaaagaccttgggactgaacatcgcggccaagttgtattttcctcacaaatacaacaaaaatgagaactttgggaagagattgtcacacctgccgccacttggagactattgccccgacagcatgaaagaggaggaagcggcaaaattggaagcatggcacaatgagaattttcaaacagaatttgaattaggtaaaactaaaaatatgggatttttaatttaaataggttttaggggagcagcttagggtgtattgcgaaaacgacgtggaaattctcatggcggctattttgaagttccggcagttgtttttggggataacaggagatttggatgtcatgaaggacagtgtcacaatcgcgggtgtctttatgaagatcttcagggcaaaattcttgaaggacaggcacattccgattatgcccgagggagggtacgagagagctgagaatcagagcaaaattgcagtgaaatattttgagtggctggcacaaagaaaaggagtaaaagtgcggcatgcgtgtaacggaggagaagtggaatttggggggctgaaagtggactgtgtgattggggcagagaaaaagattattgagtttcaggtgaaagaaaaagaattttttctttttaacaattcttaaggggtgtgcgtttcacggatgttcgagatgttttttgccctggacgatagcgccaaacggacggacaatggaagagaaccgcagtagaacggaaattcgcatggaaaatttgagggaaaaatgcaaaaatttttcaatcggagaagtttgggtaaaataaatatctagaaatattttatttatttttttgtttataggagtgtgacgtgagtgaggaattgaagaaaaataaggagatgaaaaaattctttgaaagtgtgccagacaagggaccgatcaatccaagggatgcttacgccggggggagaacgatgccgttttgtttgtacgcaaaggctacggaagaaatggaaatatcaatgttcgacatcatcagtttatacccctttgttaattacggtaaaaaaatctgattaattaaaaaaaatttcctcgcttaagacaccccataccccgtcggggtcccgaaaattgtagtcagcaggaatttcaatgtgaattggacggtgcccgacgatgttccctatgatggccttttgaaagtaaaagtcatcccaccgaaaaatcttttgtaccccctcctcccaatgcacatcgatgacatgctcctcttccccaattgttgggcttgtgcaaaaagggccaagaatgagtttgtgatggcaaaagatgtaaagaaatgcaaccaccggccagcgcagagagcatttttgggaacgttcacatcaattgagttgcggaaggctttagagctgggatatagggtcacaggcttctatcgggcctatcattttgagcagtttgaccgccaactgttcaaaggatatgtgcggatgtttttgaagataaaggtggaagcgtcggggtggccgacggaggtgaagagtgaggaggaaaagagagcattcctcgagatgtataaggcaaaatatgacattaatttggattacgataaaattggactcaatcctgggttaagaatgattgcgaaattggtgagaaattatcaaaaatatcgaaaaattgttcaattttagggattaaacagtttgtggggcaaattttcaatgcgtaataccctttcaaatacggaaattgtggggagtatggaacgttggatggaattgggaagagataatacaattgaatttgggcgcccagtaaaaataagcgaagagctatcccgggtggtttaccggaaaaaggaggcgttcatcaaagagcataaagtgtcaaatattgttttgtccttgtggaccactagtgcagcaaggataaagctgtacgagtacatggagcaagtctacagggaggaggggtctaagctgctgtattgtgatacaggtcggcaggaataa

SEQ ID NO: 77741 - DNA, 1187 bp, Heterodera glycines
atgcaacaaccactgccgctgagagctttgccgcaatttggcatccctccgccaaacgtgccggtaattagggactcgttttttgttgctttttctcaaattcccgagtgctttttcaggctgttcgtgtccaaccacagccgctgagagactttccgccaattcaccatccgccacgaaatgtgacatcaatttggatcaaattgtggttgcttttcctcagtctctgggtgtttcttcaggcaattcatgttcggcaaattcaacgcgaatacgccgtaccacaatttgcccatccgccgcgaaacgtgccgtatcatccacccgaaaacgttccggtaatgttgggtcttgttttcgtgcgtttctcatattttccggatgtttcttcaggacattcaaccagtacaaccatggcaacgaccgcggcagctgagagacgtgccactattcgtccaaccgttgccaaatggaccggtaatttccgaccctgtcttttacctaacaccaaaacatcttttcttaagccaattcatcccaaccctccgagagtgctggaagtgatccgacggctgggagagtggagaggaagaccaagggacccaagacgtccgcctcaatgaatgaatggaattctgataaaatttgttgtttttaaattttttgtaatgataagggtttaatcccattacctaactttttttttgaaaattaacaaaatttaagaaattagatgcaaaacctaacattagacaaagattacgagcaaatgaaaagaaatgacaaaattttcggaatgcttctttttgttatttatggactttactttttgtgttttatttttgcattaataaggtgttgtcgacacggttaattcttcatttgaaaatcatttaaaatttgctataaccccttttttgaaaattcaccaacattatgccctgtccgctccccgccgaattgatcaaggaaataattgatgctcttccccctccaaaaacacatcgactgctgtgcataaattttgttttggcatcctttgttaaatgtcggttttattccatgatgagaagattgtttcgctcagatcatattttaatgccaatggcccgaagaactggaatttatttatttttcgatgtttttattccccacacaactcatccaggatataaaatttaaataaa

SEQ ID NO: 77742 - DNA, 1063 bp, Heterodera glycines
  unsure (1)..(1063): unsure at all n locations
atgttccccgatgacgatgggtacgaatcggaagatgatgaaattctcttgccacctccgccgatccccccgcaacttggccaccctccgccaaatgtgccggtaatttcggttcgcttttcgttgctttttctcaaatttcagagtgcttttttcaggctgttcgtgttcagccaatacatgttgggcagcagcgtctgcctctgagagacttgccacaattcgattaccatccgcaaaatgtgccggtaattttgggtccattttagctgctttttctcaaatttctgagtgctttttttcaggctgttcgggtccaacaaccgataccactgagagacctgccgcaaatccaccaccctcccccaaatgtgccggtaattttggtctcgttttttttgttcttttcgtaaattcccgagtgtttgcaggtaattcgggtccaacaagtacatcaaccagtgccgctgagagctttgccgcaaatccatcaccctccaccaaacgtgccggtaatttgggactcggttttgtttctttttcgcaaatttgcgagtgctttttaggcaattcgggtgggaatgcaacaaccactgccgctgagagctttgccgcaatttggcatccctccgccaaacgtgccggtaattagggactcgttttttgttgctttttctcaaattcccgagtgctttttcaggctgttcgtgtccaaccacagccgctgagagactttccgccaattcaccatccgccacgaaatgtaacatcaatttggatcaaattgtggttgcttttcctcagtctctgggtgtttcttcaggcaattcatgttcggcaaattcaacgcgaatacgccgtaccacaatttgcccatccgccgcgaaacgtgccgtataatccacccgaaaacgttccggtaatgttgggtcttgttttcgtgcgtttctcatatnttccggatgtttcttcaggacattcaaccagtacaaccatggcaacgaccgcggcagctgagagacgtgccactattcgtccaaccgttgcccaatggnaccggtaa

SEQ ID NO: 77743 - DNA, 755 bp, Heterodera glycines
atggaaattgaaaatgtaggtgaaaagtatcctttcaacttaaataagtaccggatttaatgataatggtaattttattaaatatttatttattgtgcagaaaattggtcttgtaaaagttcggcaacacttcgaattgtttcacaaaagaatggcacggaggatttaattggaagaattggtgatcgcatttttaataaggaatggagcatttatggatttaattatttcattagttttgcggtgagtgggattcaaataaatttaataaacttcatattttaaaattaaaatttttaaaattttaaaaaagaaagtgacaaaaaattgaatagaattttttgaaattttttggttataactctttgtaaatttttttctagatcatcgtttaatttaatttaactaaatttaagctaagttatggtttcttattagcaataaattaaaactaataataaatttaaatgtttctatcattgacacttttgtaactttggctcaccatgattttatattacataattgatttaaaattaaagttataatcgtaaacattgctgattttcatgttaaaaaaaaataattacaatatttgtcaaatttttgcatctccaaataaatcactaaaaattaaggaattgttggatccgggcaaaggattttacgacaaagatgaggacaaagtcacattggccattgatgtcaacgatgcaacgccgatttggggttggaacgatttcatttcatttttg

SEQ ID NO: 77744 - DNA, 75 bp, Heterodera glycines
gaattaatggacccaagcaaagggttgtacaacaaagacgaggacaacgtcaccttggcaattgattttacatgt

SEQ ID NO: 77745 - DNA, 1898 bp, Heterodera glycines
atgaaccagcagcaacaaattaaaacaaaacgaaacaaagttaagttggaacatgacggcgcgctctatgttttcgaccaattgagcgcagatggacttaagaaattttggcgatgtgagtttcatggcccgtcagacaaatgcaagggtatgttaatatattattttgaattttgcaaatcttttaaaattcagggcgtttgcacacggatttaaataacgttgtgcagaagttggtcggagttcattcgagcgacatgaatgctgcgcatgtggaatgtcagcgacttgtaactggactcaagcgacgtgctgctgagacgtgcgaggcacctgcgactattcgtgctcaagtgctgcaaaacacatgcacacctgtgctagcagcttttccgagcaaaagcgccacaaaaaagtgggtttatatccaaaaacaattttgttatttttttgttttttaggtaatcaaacgattgcgccgtgatgaaaatgcaccgcggaccgaacctctcaatttggagcagttggaaattccaaatacctatcgtatttacaagcgaactgaaattgacgaggaacaatttctattggcggacaccggcgtttttcaaattcaaggacaaaatggacctcaacggtgagacatcatttatacattaaatgctgatcattgaaccggtattaaggattctcatttttggaagagtttctacggcggattgggcccatcagatgagtgacatttacgcggacggcacgttttcattgacgccaccgcttttcagccaaatttatgtgttgttggcaaagtaaagttaattgtgttatcacaatgttcaatctttttaggagagatggttgggtatttccaatttgctactgtcttttaacatcgaagtgtgccgcaatttatacgcgcatgttacagcttcttttggaacgatggccgaatttcgcgccgcagacaatttcgatggacttcgagttggcaatggtcggtgcggtccgcacagtgcttccggcatgcagtgtccgctactgtttttttcaccttgtccgcaacatgaagaggcagatcagaatccttggcctcacacatgtcaattgaatttttcagatgataaatttttttcttagtagtttaggcttacaacactgatcctgctttcgccgagaagtctaagatgatcacttcattggcctttctgcctgtgcaccaccttcaaaatggccttaatgttcttcgagcacaaattccaccacaacttaacggcgttttcaattggttaagtccgaaggcgaattttatgatttttttatttttctaggtttttggacaactacatgggccgaatgcgtttcaatgttccaatggcggcgcctctgttccacccgcacgaatggaatgttcatcagcgcaccttagatggtgctgatcgtaccaacaacttcgccgaggcattccatcgcaaacttcagcggcaatttagctgcactcatccaacaatttggcgcttcattgacacgatcagatgtgagcagaaggcaattgacgcggacatttcacgttgtgtcatgggagaatccgctccacaaaagaaaaagaagtatcgcgaagccgacgcacggattctccgactcgtccaccgttataacgaaatcaataacattcacctccctcaaaatgatcacaattatgccaatgccaatgtgaatcccgaaaacattatcaattttctcactggtgtttcccgaaactatgaaatgcgaccttagtttgttctgaaatttgttattttttgttatatttttataaaattttaattattttttccgtttgatgcacatccgaccaaactgacaaattattgtagaaaatactagccgcaagaaataaa

SEQ ID NO: 77746 - DNA, 1003 bp, Heterodera glycines
atgccgtttaaagtgcccgttatgccctcctccggccccggccgtcagccgaccattaaacgcggtccgtcgcctctcaaaaagcgttttatcagctcaaagaagcgtcacccgttggaatcggccaattccggcctttccgccgcccaaattgcgcgcactcaatcagtgcttgctccaatgagctcaagcgcttttatgcagcagttggaacagcaacaaatgagcgacagcggaggcattggccaaaggctttcattgggcacgggggaggagggggggccggtgctggacgatgtgcaggccatgcaagagatgggagaccaggtaaagcgaaggaggaggaggcaacagcggaggaagggataaagcgaaggggaaggcggtgccaaatgggcgggggaagggagggaactgatggacaaagaggggggggggggtgacgaaacaggcagatcggaaatggaaaatgggaacaatggggaaaagcaaccgaacaaagggcggggccaatatttcctgcaatttcagatcgacgagtattactacggcgtgcggattttccctggccaggacctttccaatgtttgggtcggttgggtgacgccccaattccacgcttatgacaaattattcgacgcaaatgcatcggtgcgcaagtgccggtacgcggaattggaccagcacggaatcacggcggaaaggtctaaaaatggcacaattagtgggggaagggcaaagtgttttttaattcggcacttttgggagtgaccaaaagaagaaaaatgaaaagggaaacaaaacatttttgctgttcagcaccgaatatcgcaactgttacatgcttaacgcggtggaactgctcaatgcggtggcggacgtgagcaacaccaaagtgtccgggctgcaggtgattgaatatcagtgggaatgcaatcagcccaatgataaaagccttttgcatgaaatgccaaaggcattccgccgtttggccatccattaa

SEQ ID NO: 77747 - DNA, 620 bp, Heterodera glycines
atgactttggccgccggccaacgcggcaaattcaattttggccaagactcaaactctctgaagttcttcaccacgtgcggccttcaggagggctatgagcccttttgcgtgaacatgttccgcacgatgcccttttggtacgccaaacgattgccacgcttcgaggaaatcgatgaacgatcgaaattggacgtgcagcgattgccggcaacggcgacgatgccgccatgtttaaaattgtgccaaaagacggggagcaacgatggcacggggggacaacaggaaaagacgcgcatggaattcattcggctgtcccttccggtgaactgcaacagagtgtttgtgaagaataagtgagtaaaggcaatttgagaaagcgaaatacgaggctaaaaagcaattaatcactcactgattgattgacaaattagagattaattgcttagtcattgatggcttaaccaattagtgattaattggttggtcaatcgattgatcacttcagggagaaggaggcattgcgttcacggatggaggaactccaacaacgccgaaatgcatctttgtcctcaattttaaaggggaaagagccggaggaagaacggccgagggttcgttag

SEQ ID NO: 77748 - DNA, 1348 bp, Heterodera glycines
atgaacgacccgcgcaacggacaacaatttgcactgctgatcgcaattatgaaaggacacacagaaattgctgcacttttggtgggcacaattttcgggaccaacaactcaacaataataaattttgcacatttttcagttggagaaaggcgcggacgtgcatcagaccaccgttcgccaagtgaaccatgtgaacatgggtgagaaatgcgttttgcggacccaattgttgctgatgcctaattcatccctttttcgccccattttcagccgttacgcccctgtgggttgctgtcaatatgcgccagttggagatgtgccgtgtgctgatcgctcatggtgccaacgtggacttgggaagtgacgcctccttgacgccgctactgctcgcatgtgacaaaggcagcacagaaatcggtgaatcaatcgtccggaataatttctcatcagcactttttcaccattttcagtcacccttctcgtggagaatggcgccgacgtcaatctcggggacagcgaaggaatgatgccgttaatggtcatttgccgtgccggaagggtgaaaaaaagcaaaacttggaaaaacttggcatttttcatttgttcagatcgaacttgcgcgcttcttactttctcacggtgcaaacgttgaacagatggataacagcggtgggtgcccgtttttaaataattattgcactaattaatatgtctttttcaatttcagggatgcgatttgctcttttgtacgccgcctctaagggccatttggaggtgtgccgtttactggtggaagaatgggcagctgacgtcaatcagcaagcgaccgacggcatcaccgctttgatgggcgcgtgcatccgcggacgcttggacattagtaagaagcaattggtacaaaagccgattcattctctctcccaattttcagccgtttttctcatcgaacatggcgcccacattgaccacgctgacatggacgggtacaacgcgttgatgtgggcagtgaagcaaaaaaagactgaagtggcgcgtcatttgctggcaatcggcgcgaacgcagaccaagtgggaattgacggtgggtgggcccaaaaagggcttaattgtgatgcttcaattgactgctctcccccgccccctttttaaggcaaaagagcgagggatttggcccgagaaagcagacgtgccgaattgattgacctttttcgcaccacagctaacaatgagcagcgggaggatggcaatgcgtaagaaaaaaaaggaatttctgttcaaaaattatttatgatttttcaggcagcaggacgagcaaccgcagcagcagaaagaaatgccatgtaattga

SEQ ID NO: 77749 - DNA, 981 bp, Heterodera glycines
  unsure (1)..(981): unsure at all n locations
taatagagataaaaaatgggaaaaagaaactgtttgaaaacaaaagaaagagaacagtgaaatatttaaagatcaatgacgtggacaaccccaaagagacaggtgcgaaaacggaaaattaagcaaatgtccaattaattaatttacataatttgaggtttttcttcattaaaaattgcagctccgttaattgccaataatcaaatgccaactcaatcaaagggaaagagttctttgttaaaacgttatttggagaacaaggaaaaatttccaagacgaactctgagaggacacgcgaaagatttgtgtgtgaaattgaaaacattgaaaaatgtgaggaataaattgaagaacaaaacgcactgtgagttaaaatatttgtcaaaaatcatttaattgtgctattaactgttttcactttcattaattagtcagggctcccattcgccaagaaattctaagtcgtcaagaaaaattgacctttttgctaaattcttcaaaatttctaggcagcatttgagtatcgcaggaaccaaaattttctgttttaataaatagatccaaaaatcctataataatcttttggccaaaatttcttagcaattgggcataaattttcaaaagtccggcggaacttgccggcaacgctctctgttcgcccttaaaacaaaaaaaaaagtgcggcaaaaatttaaaactctttgaaactaagaaaggttctaaatgcaaaatgtttgccacatatattttatganagcattacttcttctttaagcgactttttgagggtaaaaatgtttttattgggggccaaattcttagatttaaacccttttaatgcttatatatttttttaagaaacaacctttaattgttgcattattcagacacaaaagaagaaatttgcaaaaaagaggcatttgtgatagaggatttttgagagtgaaaaaggaatattttgaaaggaaaccgaatggcaca

SEQ ID NO: 77750 - DNA, 1913 bp, Heterodera glycines
atgtacaaggacaaggaggacccattgctgcacgtgtacacgtccacgcaggagaagctggacgcattggtgcagcaatacaaccaggagaagcagaaggtgggccaaacggacgaaaagacactaataaacatggaaaattatgaacatttattcaaaagcaaaatagcggaggactcctaaatttcgtctaaagatgccccataaaacatttaatgaaaaaaggagtagcaaagatttcaagaatggtttttgagaaaataagttcaggaggaggcgggatatttattttgtaccttatacaaaaaatggttaattacctttctcaaaaaggtgcaagcgttggaaagcgacatgcacgacctatccagcgagttcgagctgaacagactggactacttggagaccattcgcaagcaggaccagcagctgaaactgttccatcagattttggagagaattcagcccgccattcacaaggacagcaactacgcgaacattgagcgggtgaagcgcgaagcggcgtggaacatcgaggcggagcaatggacactgcccgagctgacgtttcgccaagcgctgccgagcgcaagcgcaggtgggacggaagagggcacaacaacggaagaaaaagcattggcacagcgaaaagggtgcgggtggctgactttgtgcttcttctcaagagtcttagcccgggaaactctcgggatttagactttggttttgaatctcggcaatttcttatcatcacaatatatcagcattctttgccattaattatttggagcataaaataattaaaattttattttagtgtcacaaaatgcaaaaaatgggctgaaaaatggacaaatggaaaagagtgaacttcagaacgaaccagaggaggaggaatcgaggctaaagaaggtaaaattgacaaaataaccaagaaatttgaaaaatattttttctttaaatttagcgattgaatgaaagcatggacaatgactttgtgcaaaggtactttaagccaatcagccgacaaaacattttggacaaatacgacccggagaagcaccggatgttaggtggaaggaattgcaataaaaatatcaattactattaataaggagatctatttggtcttttagcaactgtttttacagttttcgaaaatttgtaaaatcccaatttttaataagtttcataaaatatcgcccattattatagatctttctgaacttttacattttgaataaaaagctaattttttttaataagaaattttaaaacaaagaaaaatgtgcaagagagcacaacaccgataaaaaatattttaatattttgtcgagcattttagaagcgaagaaagttgccgaattcaaaaagcggaatcaatttgcgtcgggagttgtttacacagacgcactctacggaaatggtaaaaaaataaatatagtaaagcatttgctaaattagtaagaggaacagattgtttcctactcataaaaaattaaggctttaattgcaaaaaagtcataatttttacatattattttaatattttataattttttattaaatcggcttattttgctcaccgtcaatggacgattaatttcttgaaacctaagctataagccaaattatttatgtaaaatttaaagattaaaatattaaaaatgtaaattcttttaaatttgcatttcgcccaaaaatgcatttatttttaagagaattggcaacaacaaaatggcacaaaacagtccaaaatgccgagtaatcatcaaagaaatgggacttcaaaggccggcaccagcgatgcttcgcccgcggtgggcgtaaatcggccgatcagcggaatgcagcgcaagccaccaccacggcttgaagcaatccaagtggtgcgaaacaaatcgttcacatga

SEQ ID NO: 77751 - DNA, 467 bp, Heterodera glycines
atgtgtatttttgatgaattgaataaaacagtaagtgatttattgctctttttcaaaatttagtttttgaggcagaaaatcactaataaaaaacccccaatttccttgtaatacgatgtacaatatttcttttccaaaaatcttaatttttgttatattttaattgtaaatgaaattattaaatattttaaaagtttttttgaataaggacaaatttttatgaagaaaaaaatattttagggaatcatatttggaattttcttttcaattcttggggtgtattttctgaaatttttgggtcatttattaacgtaccaggtgttttcgacagtagttgattttgacagtgattggtttcgacagtagttttaaattcttttttctatataatttactgtacatatgaattaatatttaaatataatttgtataaacgaaatttataatttaagtaataatgaattaaa

SEQ ID NO: 77752 - DNA, 1474 bp, Heterodera glycines
tttcgtgacactgaacaatcagcaacttaatggactacaatttgtcacctcaaccacagtgttgcgtgactgtgccaacctgcgcggcatcgaatttcacagattgccttatctcggcgaaatcatggatgaatttgacagcgacattgagatgatggacggtgatggaggtggtggtgaacacatttatgtgattgaagacaataatgacgacgaattggcggaggaaattgatcagcaattcattggcattatggccaattttggcggcaacaattccggcggcgcatttggtgccgaaaattggattaatggattgggcgtaattgcaaatgatgatgatggtcatgaggatcaggaacacatggctgttgatcagtaccagccggtcgagatggatgaagatgaacccttgtggccgtgccgtgcattgtaccaatggttgcacaaggggcgcgaggacgggcagcctaaactgctcaaatatatcgaaaggggtcatgtaaccccggctgacttggctccactcaaggaggtcgcctcatttgaaccaatttgatccaaaattgattttcttgatatgacacataagtgccaggtgtattagataaggttgggccccggtccgatgcggggaattgtgaatttcgtctgtcgcactccaaatcggatgagaatttctttaaatgagttacttacctttttttgttttagatttgatattttctaaaaatttcctactcgatgagggacttgctcccctacattttattcagccattcccgacaaattttgtcgggaaatttcctccccgcttcttattttagcttttgaagtcgtcaggcatatttagaaaaataacggaatcggcacaaccatggctttttgtggctttttactgcgttttaacaaattttaatcaaaattttatatatttttaaatgtatttttaaggcctaaatgcctaaagaagatacattataatgcatatttaaacaacaaaaaaatgacaaccacaacccagaattcggaacaaaagtcgatattcgaaaaatttaaattactgcttttattttggatttcgaaattggtcaaattcataatcgtgatcacttatttaaactattttaatagttcaaaaaataaatccactgcattaattagtaattgattcaagtgcctgaattcacttattattataggcattcctcaacaatcgctcttctccgatcagttacattatccgtttggaggccactctggtggacattgagccgtttgagctggaaaaccgttggacccgtgaagtgttggtattgcgccgctttttcgaggatttgtggctgtttgagcgtggcccaatgggacgggcggagagtgcgtgcgattccgatcgggtggtgttgaaatgcggctgggaggaccaccaaaatgggatgatcaacgtggccctctacggagatcgagatgttgg

SEQ ID NO: 77753 - DNA, 99 bp, Heterodera glycines
atgttgcgtttcggattgcaacagccaaagaaagtatcgagttgggacccggacgagaaagcattgaccccgagactatctagcataacattaattgaa

SEQ ID NO: 77754 - DNA, 671 bp, Heterodera glycines
atggataatgctgacaataatatttgcgactatttgaacatcagcacgacaacaaaaagtgatgttggtaatttgaccggaaaatttgccattttggacgcatcgaaaaatttgacagtttttgaatggcttttcagttcaatgattcatcaattaattgtcgcaaaatgcgcgtatcagttcaaagtggcacaagttgcggtaaaaaattattttatttcttaattttaaatttggcaatttaagtccgattggtaccataacactgtgctcatgttctttgacaagttgaattgcatttcgcctgttctcccttggattgtcttcccaaatattttcactccgatttcgattctgttcaatttgtctctcatttgggtcacatgcacaaaaatgtgaattaaattcataattttaaatttaatttaattttgctccaggactgatcacaaagtgtgcaattggctgatcgcctttgattcgctgtgccaactttttgtggtggcgccgttcggcgtcaatttgcttggcgtcattttccaatacagtaccattgactaccgttgctgcctggccacccttatggcagctaccgtagcatcgtacgcctcaatcatggcaatgtatctgatctcactcgaacgcctgttgatcataatgtacccaatcaa

SEQ ID NO: 77755 - DNA, 858 bp, Heterodera glycines
atgcgcaaaatgttgcgctcggtgtttctgctgcttttggttttgctgatcggctggctgatcagttcggctgctcgcaatttgatcaccgtatttttcagagatagcatcactctgatcataaacagcctcttttctgatacggacactcagaaccgtcttattaccgatatcacttcgtgggtgatcggtattatcacttgtcttccaattttggcgtccgccagtggcgcgcccattcttttgctgaacaggcaaaaatgaaataaaaatgggcgaatttatttaaattatttttcagtaacgattatcggactgcgtacaaaaaagcgatgggccgaagaaacaattcgccgggagttgggccgctttttagcagcaaaattgttatgatttccaatgtgaaggaaggcaaagtgaaatagcgcagaacttttctgatttatttttatttaaactaagaacttttcaatctgtcccattatttaatttttacatcaattattcttagtttggcaaaatgagttttaacaatgatcattttcattcatttggattggataggaaggagtatcataagtagggcgtataattatggaaatccatatttttttcctggactgtggtgatcctgaaacgcacgaaaacatatttttagcttggtttgaagctttctatacccatatttttcataattttcaatattttgcgatttatgtccatatttatccatattttggcatttaagtccatattttatgtccatattttggcatttttccaaaaaccctctattagaacggccccttcagataacttggcctttttgaccccaaagaccggaaaattttccaaaaa

SEQ ID NO: 77756 - DNA, 351 bp, Heterodera glycines
atggtaaagaaattgacaacagtgggtacagagaatgccaatggaaaacggatgaaagaggacaaagaaaaagagagggaaaaagagcgaatggacgaggaacagagaggggaggacagagaagcagagggagggaaagagcggtgccaattctcggaacggtggctgaacaatttcaaaaggcggtatggtattcaaacaacgatggagggtactgtaaatgcggaaggagacgaagagacggaagacgacgaggcggagagagaacggcggggcggagacacaattttagtggaaggtacggaagagaaaaacagcgaaaatgagggaaagggaaaaggcgcccagtga

SEQ ID NO: 77757 - DNA, 1211 bp, Heterodera glycines
atggacagtttgtactgtactgtaccgtacatattggctggcatcgtagccccaggagaggaacagaacgcccgtgttgtacttctcccagtggctggcaatgaacacgagttggaccgcgatcagaacggagagcaaagtgagcggctcaacactgtggggaaaaatatagcatttttatacttagaaatgttgcagttatcaaaggcgtaggcagggggaggggctgagggggcttaagcctcctcccgaaatgaaaaatttaaatgaaaatgggaaactcctgaaaagcattttttaaattttacccaaaatcggcaatttttgaaaaaaccttaaaaagggcaaaattctaaaaaattttctggtggccttaccactctagaattaaaaaaaaaattattggaaatctggctaagaattttttttctatttcgtatcaaaacattccgttaacgatttcttgacagaaaaactctgggagaaaatgtttttgtgtttccaagttcatttaagatgcaaccatttttacttttcgaacttattgttaaaaatttttagggaaagaaattttctgattttttaaatcttttagatatttacaatttttttcctcgagattttcttataaaaagggcttgaatttttttttttttagtaccgtcggtcggcaatcagctaattagttgttacctgaattggccccgtccaaaaagtgagaaaatggtgatcgtaaatgggacggttgaccatgaatctgtggcgaggagagaccgaaaagtgcggggaacgcgttaaaaacaattggcaaaatgcgttttgttagcagacaaacgctcaccgaatccgtggtcaactcgaaatgttgggaaggcaaaaattaggtaaatctcagagaattaaataaatttatttagaaaatttcgtaaaaattccaggattttacgaaactccggtgaaaatcaattggatttttaagaaaaaatagatatttgtaaaaaaaagtgtcgggttaagccgccagagatttctgatctcgtggaatttcaaaaccgggccccctagccccatctgataccaatttggctttttcgagccgaatttttggcctcaatagcccggaaagtaattttaagtgccccgccggtctttggcattctataaatctctggcaaccacccaattttgtttcaggaagggcagcaatttta

SEQ ID NO: 77758 - DNA, 1660 bp, Heterodera glycines
atgccaaagaaattgatgtcgatgcggtggcaattgggggccgtgtgttggtcagtgccatctctgaacatgttgagaatgcgggtcggtggtcggcacatttttgaaaaaaacacctaattcaagcaaattttctaattggtttttaaaggcattcattcgggtgatgccacactgataacaccgccccaagacctgaacgccttcaccactcgaaaaattcacgaaattattcgtcacattgcgcgacgtttcaacgtcaccggaccgttcaatttgcaactgatcgcaaaggatgacaatttgttcgtcattgaatgcaatttgcggtgagcagtcatgatgaatgaatgagttgggtcaataacaaacaactcgtactttttgagaaatttttgcaaaacccgaaaaaattttcttgaaaaaggtacggggttgttcatgacacttcaaacttcagaaaaaaaattttatggatttttttttttaaatttattgacaaaataacccatccacccttcaaatttgtctgaaaaaattacattttatcaactaccaccataaaaatatcaaaaattccttactttatgattgcatgctcatggtttcagagtgtcacgcagtttcccgttcatctccaaaacgttggacatcgattttgtggcgttggcaactcgggcaatgatgtggacgcaagagccaaccaaattcatccaatccttcacccgtcctgaacagtccaacaacaaagtgggagtcaaagtgggtatttttttttgccaagttttttttttatgttttattttccatggttccaaatttatttttttaggtcccccaattttcattttctcgtctcaccggtgctgatgttgttatgggggtggaaatgctgtccaccggttggaacttttaatattattattttcaaattaatgaggccaagttttaattcaattttaggcgaggttgcttgtttcggccgcacacggagagaggtccaaaaattttatattttgggtttggtcatgcccccccctcctcatctgaatttttttctaaaattttttccaatgataattttaaacaatacgaaactcgctttaccgaatcccctaacatttgtttgcgtgaaacaacaaatcaaaattatagaattacatctaattttagcgcctaaattatgctagaaaaaaaacctagaaattttcaatgggaagcggagggtgggtgtaacgactttgaaacaccaaaatttttagtttttttaaatacaatgtatatattttttccccatttaaggcctatctgaaggcactcctatccaccgggttccaattgccaaaacgggtcatttttctctccattggctacaaacaacgggccgaaatgttggagagtgtgcgcatgttggaccgacttggcttcacactgtacggcagcaaaggcaccgccgattattacgcctccgaaaacaacattcgagtgaggggggggggtggaaatttttaaaaaatgtaaaatttttccccatttcttaaagattaagaatttggaatggccatttgaggagaaggacaattaccatgtgtacggtgccaaaatgaatacggtggacgaatttgtggagaagaaaatcatcgatttcatgatgggctga

SEQ ID NO: 77759 - DNA, 1089 bp, Heterodera glycines
atgaggcgagtgacttttgcaccaacagcagaaggtggtgcggatgggaaggcccccgaatttcgatcatttaaaatgcgacgaatgtctataatcagtaagagaagaagagcggtattagccaaaagggtactaatgcactttagcagacatgaaatttttttttttgtctttattcatgtaaactagcttccgggctttatagcatcattattaagaatctggcgttgaatcaactaattccgtacaccaaaacccgaaatcgaacttttggtcgaacatcgaaaatgcaagcattgattttcgttgatttttcattattaaatattgttggactttttttgaatagaaggattttgaagatttcgatgttcgaccaatagttcgatttcgggttctggtgtacagaattaattgaatcatcgatgctgaaaacccccggaagctattttacatgaattaagaccaaaaaaaaatgtatgtctgctaaagtgcattagtaccgccaaccttggaactgttttcacgactttttagaagaaaacaaaaatttattccaaaaaaggggggggggagggacaaagcacactattacccacaactataacatttttgttcagtacccaaggaaccacagtttggagacgcaatgaaagagaaaggcaacgcgttcataatctcaacagcggattcagccaattgcgcgaacaattaccgctaattgagcggtaatttttaatcgccatacaaaaccaattaaatgcaattgatttgcccttctgtcgccaatttgctctccaacattaagcgatcgacgcatgagcaaagtggacagcctgaggctggccatcgcttacatccgccaccttcaattgcttcttcagcacaatgagcactggacggagtgcaactgcttcaggcaaagttacggtggcggggacggacggagcagtggcgcggagagcacaccgcccccaaattaacgagcgaaagagcagagggacgcctttatgcacagaacgaacaacggcgattacacttttttttcaaattgaggacggattacatacgaaaagaatgacgaataaa

SEQ ID NO: 77760 - DNA, 1918 bp, Heterodera glycines
atggaattggcaccgtccgaagatggcacaaaagtgagtgccaaagaggaggaagaagaagagagtgaggaagacgaaccccaatgggacgaagaggccgaatttggcgaagacgaagcgccaaacgcagtggcgaaacgcaatgtgccctcgggcgacgactcaacgacgacgagacgaccgatagaacagcgacaatggcactccctcagaaagacacacagcgattcggaaacataacggacgggaaaacacagccaaaaacaaatgatcacgttgtaaaatgattgatccttttgaaaaataaaaatctaaaaaattacccaaataaattgctgcttttgtggtgtatggaagtgctgctcaccatttcaataataatctcttctcatccaccaattgtcagctgcacaaatccaacggccaaattctgttggccaatgcaaagggaagggaaagggatggagaggagggcgaattcgatactgtggtcggccggggcgaggacgagcggtgattggtgccaaaggggcagagggggagggatgaaagagggagccgacgaccaattcatcactcacaacaatcagtcgcatccacaaaataaaaatgggaggcaattaattagccgcttctcataaataattggccaaattaagcttttcgcttttaaatccaccacttttattaaaaattagaaatgatcgataatccaatacaatttaagtaaatttgtggcactttcattggactaaaatgataagtgccaatgcggccgatgtcgcccaactccaacaacaaaatcactcccaaaatgcgccgtctctctcctttctgttcagcgggccgtccgccgatggcaccgcaaattgtggtgcctttcaccaaaatcagccaaatggaggagccctttatcagcagcacaatcatccgcagcaccaccaccattcagtaattgtgcatacgcatcaaatgccaacggcggaagggacggagagagacaatggggagaagagagaacggaagagaaagggacggaagagaaagcgaagggagggggcggaagacggagaagagggagcggaggaggagcagcggtcgcagagcgaggaggaggcggacgagggggacgaccgcggcacgacggcacgtaccacggcaccgtcaccgcgggcgatcggagtgcgccgattcatcagtcccttcgaagacaccgtcaaaattccactgccccacgagttggaaatgaggcgagtgacttttgcaccaacagcagaaggtggtgcggatgggaaggcccccgaatttcgatcatttaaaatgcgacgaatgtctataatcagtaagagaagccttggcggtattagccaaaagggtactaatgcactttagcagacataaaattttttttgtcttaattcatgtaaactagcttccgggctttttagcatcattattaagaatctggcgttgaatcaactaattccgtacaccaaaacccgaaatcgaacttttggtcgaacatcgaaaatgcaagcattgattttcgttgatttttcattattaaatattgttggactttttttgaatagaaggattttgaaaatttcgatgttcgaccaatagttcgatttcgggttctggtgtacagaattaattgaatcatcgatgctgaaaagccccggatgctaaagtgcattagtaccgccaaccttggaactgttttcacgactttttagaagaaaacaaaaatttattccaaaaaggggggggggacaaagcacactattacccacaactataacatttttgttcagtacccaaggaaccacagtttggagacgcaatgaaagagaaaggcaacgcgttcataatctcaacagcggattcagccaattgcgcgaacaattaccgctaa

SEQ ID NO: 77761 - DNA, 670 bp, Heterodera glycines
atgtcgcgacttcggctgaacagcttgaactttggcctctgttcaactgatcgaagccgcgcgaacagcggcgtagaaggaaacagcgacaatctgaacggaagtccgctgaggacagccatgtcgccaacttcgctcagcggcccattgacacaaagcacgacagtgacaggcgaagaaacatcggatgggtcagtacatccaatccaagtgattattagttgatcaggagggagggagaggacaaatcccgtcgagagtgtcgagaaaggacattcatattccaattgacaaagtttaaaaaatatgtgtcccaatactgatttggcttcattttgttgctttgtgggtaaaattttacgcttttataccctaaattttagggttttagtgaaaattttccatttttagtgactatttttggttttttaggacataaaacctaccctttttgtctttttttagagaataaaattgcatcattaatcattatggttggtttatatagtatttcaatattattaagaattttttaaaagttaaaagaaaacaattgttttataaaaaaataatcttgcaggaaatcgtctcgaaaaataatccaaaaacccaattacggatcaaaattacggaaaaatcccaaaaatccgtaagccgtaatccgtcatga

SEQ ID NO: 77762 - DNA, 698 bp, Heterodera glycines
atgaacccattcatgatcactttgatctcggggatgccggaccctgaacaaaagcgggcgattgtaatgccaaaatggacggagcaaacgaccgatcgcttgggcggagacgtatttgcagaccaaagcggcggcaccgacaaaaacgacaagaaagccgacccaagagacgaatcccgacaaaggaaagcaaaaggcaattgggactaagggaatgccgaaagagacataccaacatcacatcgtaatcacgggcaaagtcgaacagaatggcacggtctgaaggtgaaaagggaaaaatgggggaagtgaaaatgggagggaacgatcagaaaattatggaagagaaagtgatcaaaaaagagagtgaaggagagagaaaaaacagtgaaaaacagagacactgacaaaaaaaagagagagtgaagaaaaaggatactttccagggatgggccgaggtttcgcttttcgcatttcgctttttggcgcgaaatgcgaaatttccaccctaagaaatgaatatatttgaaaatttaatttttaaaacgaatgcttcagtctaaaaaacccccaaaataggtgctaaaaatgggaaaataggagccaaaaagttccgaatttggggtgtaaaatcgaaaattttcttcaaaaagcaaaaatattatgccaaatcattaatgagatagataattttcaaa

SEQ ID NO: 77763 - DNA, 284 bp, Heterodera glycines
ctcgctctccgtgtctttgccgaccatgcgcatgagccggctgaacgtcgtcgactgttggaactgtgcagtgcccagggggccacggaatttaccaaatttgttcgacaggtttaattaaaaaacttttttttttgtcttttcgaaatttcattttttagcctaacaattccctggtggaattgctgtgcacattctcttcacttacaccgccgtttatttattcaagtaataaaagtccaaaagaagggacaaaggccgcttatactttcggaagagaatga

SEQ ID NO: 77764 - DNA, 3019 bp, Heterodera glycines
cccctcccttcaattttggactttgttttggccgacttcgttctgtttttaacacactttcagctaaacccgacctcctccaaaagtacgactccattatacaggaacagaaaaatatgggtattgttgaaattgtcaaaaatcccttcgaattttcgcctccattacattatttggcacatcacccggttatttcaccccttaaaaccaaagtgcgtattgtctacgacggttccgcacacgtcggaaaagaactatccctaaatgagtgtctttttcccggtcccataatcctgcctgatcttatcggtctcttgttacgttttcggattcccccaattgtcattacaactgacattgaaaaagccttcctccaagtcaatgtgcacccggcacatcgtgattgtaccctggctgaaaaatacctctcttcccccatcaaaagcaaatactcaaatccttcgatttacccgtgtttcttttgggctcacatgctccctttttttgcttgcggccacaattctccaccatttatcagcttttccctccaatttgtccaccgaaatttcccaaaatatttatgttgacaatatccttatttctgcctcaaattctaccgagggacagaagaaatcaacctccgccatttccttatttcaaaaggccggaatgccattacgtgaattcgcctgcaattatccggaagccatttcccatctcccaagccaattaaaacttcccgggaccgaacaaaagtttcttggacttaaatggaacactgaaaaggattttttaattttggaactttcggtccctccgcctgattttgtcccaaccaaacgctctgtcctttcctttattgcatcacattttgaccctcttggcctaatttcccctcttatcctccccttaaaattatttttacagtcactttttgaacttaaactcaattgggatgaacgatttcccacagaaataatcacaaattggcaaaaatcaattgaatcctggaaaaggacggacaaagtaaccatcccacgttcccccatttcgtctcctttatctgctcgtgaataccaattacattgctttacggacgcaagcaccttggcaatgtgcgcagccgttttcctccgagtttcacaccccaaattttcccaggcggaaacctttttaattttctcaaaaacaaaagttaaaccaattcacaaaggcgtcccattaaccatccccaaactcgaactaattgctgtagaaatgggaactcgtgctctgaaatttacccaagcccaatttccctctctaaatttagacccaaatttaaatctttggacagattctgcgatcgtcctttcatggcttaattgtcacaaattgcccacggaaatttttgtacaaaacctacttaaagccattaaatccgttgatcatttaactgtccgacatttgcctggcccggaaaaccccgcagacattggtactcgaggaatttcttccgcacctaccctttccgctctctctgcctggtggtcaggccctcaatggctttctctcccggcaaaccattggccaaataacccacaaataaaagagtattcatacggaaaatcagaacctataaacgccccttttcaagcaaaccctccccctttgttcacgttttttaccgaacagacacccgaattaacacatttaattgatttggcacgtttttctaggctaccaaaagccctcagagtgttaagttatgtgtttcgtttctcaaatggcacccgaaaaaattccaaatataaagcaccgaatccgatttcctttaatgagcaaagaaaggctctacaggaattaattttacgagagcaaaccctaaatccaccctctgatcaggtcacgaaaattttgggcctttactcagacccgcagaaaattattcgcgcaaagggtcgtctcggaaaaagccagcttccaccgtcggcaaaaaacccaattttcctccctcccaaatcgccattaaccaatttaattgttcacgaaatacacctaaacaatgtccattcgagcccattgttgaccctttcactattgcgcagaatttattggattccaaagggacgacaaattgtaaaaccgatcatttcgagatattgtctaacctgtcgacgttttaacacccgaccatttgaccttcccccctttcccccccttccggaagatagggtaaaaccttcgccccccttttcgaaagttggcttagactttactggtcccatttatgttgtcacaaacccccacgtaccaaaaaagcgtaaaatgtcgaaaaaacattggatagtcatttgggtttgccttccgacgcgtgccatttctctcgatttagtcgaagactagtcggcgcccgtctttacactcgcttttcgccgtttttcctcaaaatacggcatcccttcgacgatttactgtgataatgccccaacttttgtcgccctctcaaaatttttggctgtccaatttccaactcaatggaattttcgtgttccacacgcaccgtggcgtggtggacattatgagcgtttgatctcactggtcaaacatcatctacaagggcatttacctcatttcgtcctcgagcagttcccttagctcagttaatgacctccctctcggaaattgaaatgattgtcaactcacgtcccatcacttttcattccgcgaatcccatggatcctaacgccctaaggccaatcgatttcctgcgccctcttaatcccaaccaaaaccctctttcacatttgatcatccccataaatgccgagacagaattgcccgaaagtacccaaaaatcattacaaaatctatgggaaactgcttcccaacagacagaacgtttttggcaccaatggttcactgattatttaccgtccttgagagaacggtaccaaaaataggcccgacaataaaatcgtggcaaaattggagaacttgtccttgtcatcatccactgaacccgttcactatggaaaac

SEQ ID NO: 77765 - DNA, 1562 bp, Heterodera glycines
atgaattcactaattctgtcccacccatatcacttgctttatctgcttgctgtccctcataaattaacctcagaaggtcttccgccaaatgaaaacattgaaacggaccgggcgagttcaaaggaccaagcggacattgttgtggacaaattgtgcaagcgatggcgacagcctttttcttcgtccagccaattttcgctggcccggctcagcttcaaggcatacaaaggccaaatcactgtgcttttgggccaaaatggggccggcaaaacgacgacattttccattttgacgggactgctcaaatacaattcgggacgagtgctcatctgtggcatcgaccagaagaagcacatgcgcgaatgtcagaacaaaatcggtatttgttgttttaatcaatcaaattttgtgattgggtctgaaaacaaaaacagacacatttcgagctgtgactgcactggaggttcggttcctttccacgaaacaggataaacaatcattaaaacgcggaaaatttatgcaaaatatagtgaaattgtttgaatagaaaaaaaagttatatggagaaagtaaattctgtttttcctccattctctatttattggttcatctctaatgtttagagtcggtgtgtataaaaaaaattcagtgtttacattttaaattgttaaaatgaaaccccgaaatccaagaatttaccacagataacttcttttaggcttctgtcctcagtacaatccgttgttcgattaccttaccgtcagagagcatttggaattttatgctggcaccaaaactggccatttcaatggaccctatggcaagaaggcactgattcaggagattcatacggtggcgaatgaattgcacatcgaagccctgctggacatggtgggttcaattttttacacatgggtattgtaagtactcgttaggtgcagctctggaaatggttaaattgttaaggaaattgtaaattttgaaaaaattgaaaaatgatcaaaaatcaggataaattcggttatctaagaaattttaacatttttttgcagccagctcgtgctttgagtggtggccagaagcgaaagctttgcgttgcgatcgctttgatcgggaagagcagtgttgtgttgctggacgagcccagtgccgggatggatgctaaagcacggcgcgaccttggcgatctgttgaagaacattaagcaggacaggcaaggcattttatggcccagttatttgattcaaacaattgcaatgttgtgagatactcttaaaaagggctggtcaggtccatagccagaaaaaaaattccgatgggcgaatccgaagactttttttactcttcgggccgaaaacaaaatttcttttgaatataatttgtggcaaattaaagttttgcttctaaatgagatttgcatgattttgagctaattgtatgcgtcctggttcagaaccattcttctgacaacgcattacatggaggaggctgacactttggccgaccgaattgtgatcattgcgaacggacgtttgaagagcaacggatcgccacagttttga

SEQ ID NO: 77766 - DNA, 972 bp, Heterodera glycines
atgttcgtggacgcaccggcagaaaaatttgggcctaaggttcgcaagaaccctaagcagggaaaatatgaggtgcaggccattttggccacgacaacgtacaaaaaggatgggcaattacgacggatcttctatgttcagtgttaggtaaattaatttttaacaattttatacaattgttaataaaatgtattcaggctatagtcaaaaagactatagttgggtcttgaacgagtggatggacacgcaggagcttgtcacagagttcactgttaactctgtgatcagctgggtcttcaaggcaattcgtggcgaggaagtgccggaagaaattgccgaaaaactcaggacaaatcctgagtatatctcgcgtagtttttatggggaaattgatgaaataattaataaatttaattgtttgatgaatgagttgaggcgcaatgtcgacattaggacgacgccaattgggttctcgtcaaccctggcgggcgatgtgagacagcaaagaattgtaagttttgaaaattaaaaatcatcattttcatcttctctctcattttatttgtgtgtttgttaagcctactttcttagaattgtgggccccaaattcaccgtctttaggggaccaatagagtaaaccgcacagtctcgaatgtgtggcctctattgttcttctatttcttttttaattcctactataaatatttgtttttaaccttggaaaattattgaaaaaattttttttcaggctgcggagaggctgaaggaattcttaaaaaagaaaaaatcgtgatggatgcataaaaatttttaaaaaaaatgaaaccaaaaatattaataattaaaacccaaaaaaatctttaaaattaaaaaatcaaaaaaaaattttaaactaaaattcaaaaattttaaatattaaaatccaaaaaaactttaatactaaaaaattccacacacattgttcttcgtata

SEQ ID NO: 77767 - DNA, 2568 bp, Heterodera glycines
atgccaaggagaagagcaggcaaaaggtacagacaaagccacccgaaaacggaggacgcaatccatttgattgagaagcgatgcaaaacgattgaaattgttgaaattgaagaaccaacaacagccaccgacgttcagcaaattgtggcacaaattgaagaaccgacaacatccgctgacgttgagcgaattgtggcactttttacaacgaaaaaactcgtcattttacaggttatctatggaaaaatagtacatttacatcaatttttaacaaattttgaaaaaatcgaacccaaatctttgctattttcgttgctaaattttcgttttcaggggcctcatggatgtggtaaaacgcacacagcaaattgcgttgcaaaacaacggaacgtaccgctcaaagtgttgcagatcaacgaacaatacgactcaaaggtttttactgaacaatgattttattgcctttttggcagtgagtaaattttttggaattttttctggtagtgcatacttttgcatttgtggcacaatccaaaataaaaagggagaccttggcgatattctatccgaaaatactggggaaaaaattgtatctttcccatcaaattggtgtttttacgtccaagcctcgtctctttagtccgatttagacgaaaatggtaggttcaaatttttcacacaaatttttcaaaaaaattttttcttcggtgtttggggattggcccgacactctaaattaattaatttttaggtgttatacggcagttacagttgttctgaagttcccggcgaatttttttggcagccttccaaatttgctcaggtttgtttttataaaattcaaaaacccactctttttaaatagcgccatgcattttttcaaatattttttagtttttgcaacgggactgtgtgattttgtgggagaattgggaccatggtgggtcggatttggcctcggcaatcgttggcttggccgagcgtggccatgccgtgttggccaacggacggcacattccgatgggctcgcaatgccgtattttgggcacaatttcacgggaagagcaccaacaccatacggcaatggttagtctttaagaggtgtttacgaattcaaaacaattttttgttgcattttggtactgtcagtcagttttatttaaaaaactaaaaaaatttttttttttgagggggtggctgaacgttcacagagcggaatgaaacattttgtttctagatttggcgagactacccattcactgtccgaatggcaccgatccaaccggcacagatggactcaattttggcacaaatgaccaaatcgcatcatggtttgtgtttgaaaatgattaaaacagacgaaagttccatcccactcgaaaaattaaaaaaatttttttttttttaaagaattaatttaattgtacgtctttgtttgcaatttcagaattgttcaacattcggtccaaacttttgcaaacatttgtcaccgtttctgcactgatcaaccatcggaaggcctccatggaccgggcactgaatgccaaggatttgttccgagtgatcagccatctcgtgaattcaactgatcagcagcatagcccgaattctctcgtttctgatcggaatgcattgtttggcgaactgtttgacgcgtgggccgcccatttgagcggcgatgaacttcgccgttgtgttgcaggtttaaaaaagaattatgtcggaaatggaaattatttaaaaatttttttttttttggttaattgacaactgcattacattggtacgaaaaatttctaaaaacattgacattcaatatttccctagtttatagcttaatttgcttaataacgagtctgattatgtcaatatgttacagttttactgtaaacattgctgatttcgtgaattttcgggccacaatttttgcatttttttaaatggacaaattttcctcttttttaagccgtcattggtgaagcgttgtcattgtcgcctgaacagcagcagtgccacatcgacgtacggtttccggatgtgtccattctggagaacaacaacaatgagaacatccgcagcagtcggaggattcctaaacaggcgcagcaccaacagaaacgggtccaattccaatttggtcgggtggtgttggaacagcggacggatgcggcgcaacaggaacaacagcaaagcaacaacgacaacaggagtggaaaaaggttcaaattttcgtaaaaatgaatgaaaaatgggattttttgaatctttccttgccgtttttagtggttttccgtgtgattacaaaaaaaaaaattaattttaataaaatactgacaattgtagttgcgctggtgctgtggcaccgtttgtgctcacccgggacgctgcccagctgttggaacgggtggccgcatgtgtgtcccgctcgccgcccgagcccgtgctgctcaccggtgacacgggcgttggcaagacggccaccgtgcagcacatggcccgcctgttgcgggtcccattgcatgtggtcaacctcagccaggaatcggagttcagcgacctcgtcggcgg

SEQ ID NO: 77768 - DNA, 807 bp, Heterodera glycines
atgatacaaaaatttatcattgctattcaaatgaatcccaacgtaaagttttagaaacagctctaatttcagtctttaattgggctgaaacatggggcttaaatttttcagtaaaaaatcttccgtcttatatctaggtaaaaataacaaaaaaataccgtacacaattaaaaattcaactttccctgaatcaaaaattattcgtgatctaggtattttaatcgacaacaaactcaaattcaacgaacaggtttcaataattctccaaaaagcttatctcaaaagcagaattctttttaaaaaaattaaaaccaagtcaaccaagacttggattacagtttataaaagttatattcgaccccttttagaatacgcaaccgaaatttggaatcctcgaaacaaaagaaataaaccgcctggaaaaatttcagaaaaactttacaaaaaatgttttcagaaaatgctgtctcccctacatctcatacagcgaaaggctaaaatttctaaaactttccaagcttgaaaccaggagaaaatatcttgatatcataacagcctttaaaattatcaaaaatactattcaccttaacccaaaaaacctttataatttttcagataggaaaagatcaccttttcctattttggtaaatccttaattttatatagtaaaaatttgcccttgcccatggactgaatttggtccaatctgtggaaaacaatcaccggcgagttcactcactggctaaatcccactggcgaaatcacctgccatcagcaaaatatttgctggagtttgaaaattaatca

SEQ ID NO: 77769 - DNA, 1617 bp, Heterodera glycines
acctcacaacccattcgcgtgttggtcactggtgctgccggacaaattggctattccctggttagttttgtattttgtaactgctatccattttgttttgtccgttttttgacctttaggttctgcaaatcgccaaaggggatgtttttggcaaagaccaggtgtgttccttttggtctcttcggctgtaaatgttttcccttttcgcccattgtcctcgtccttctcgacgtccctcctcttgctgcagtgctcaccggcgtccattacgaattggttgactgtgcgcttcccaacctcgtcggtacgtacgttggctaatctttctttcattcatttgtttctgcttttctgaatgggtgtcactttttgcgttttttcgctcattttttctttttttaaggcgttgagacagtgaccactgaagaggcggccttccaagacattgactacgcttttctggtcggagcgatgccccgcaaagaagggatggagcggaaggaccttctcgcggccaatgtcaaaattttcaaatcgcagggcgaagctttggccaaattttccaagccaacagtcaaagtgtgcatttgttggttaccgatcatttatcatccttaaaaataaacttttaggtgctcgtggtgggaaatccggccaacacaagcgcattcatttgcgccaaatacgcggccaacaaaattccggctaataattttaggttagtctttttttatggttcgtttgtaatttggtttcaattctagtgccatgacgcgccttgaccacaaccgtgccatggctcaggtggcgcaaaagtgcgcagatggaaccaccgttgggatggtgaaaaatgtgatcatttggggcaatcattcgagcactcagttcccggatattcgacatgccaaaattgtcaaaggtttgagctattcaatcggaacagcaaaaatacaatcaaataatccaaattacaggtggttccgaaactttggcctatgatgcggtcaaagacaccgcgtggattcaggaccaattcatcaaggttattgtgaatttaaaccatttcaatccattttctccccaaaaagaccgtgcaaaaacgtggcgctgtgatcatcgaaaagcgcaaattgtccagcgcaatgtccgcatcaaaagccgcatggtaagcaaatctttctgtatttctctctgattttttaaaccgtctttctgacagtgaccacatgcgcgattggtttttcggcactccgtccgacggtcgttgggtgtccatggctgtgccatcggatgggtcttacggcatccccgagggattggtgttttccttccccgtcaccatcgatgcacagaaagagtggaaaattgtgcagggtcttgacctcgacgactttgccaaacagaagattgacatcaccaaaaaagtgtgattgaatgaactgggataataacaaattgggaattgtaaaagaggatatctggaccgaatgtatcacccgttcaatccatgcattagccagaaaaaaatacgagggggaacccaaattgcccttttccccgcaggaattgttggccgagcgcgacgaagcactcgcggcatgcaaataatgcaaaagg

SEQ ID NO: 77770 - DNA, 379 bp, Heterodera glycines
  unsure (1)..(379): unsure at all n locations
atgtttttaagtcccaccgtgaggcgggacagttccaaaatttgtgccacattttactgtggaaagtccaagtaccttattggacaactacgtgtcaatgagcacagtcgcctttggccagttgtggaacggaaaaatgggaatatcagatggggtgcgtcccttcctaaaaatttctcttttcgtctaaccatcccccctttttgtgcactatttcattttcaaaattgggaacattttttgtttgtttttttgaaactaaaattaaaaaatttaataaaattatttctnattttatataatncttctctttcnaatcttttcactctaaggaattaacctgtaatttttagaacaaataattctcctaggagattaa

SEQ ID NO: 77771 - DNA, 323 bp, Heterodera glycines
atggtcaatttggcgataaaattcatttggttggtcgatcaaaaatcagtagggattctttttttaggcacaaaaaatcgcgaaatagcacctaaaaaggcagaaaaaaatcgcaaaataggcattaaatcggcacaaaaatcctcaataggcacaaaataagcaaataaaaattttttattaacacttttaggtagcaaaaaatataaaattttaaaaattcacaagtaaatgaaattattaaatattttaaagcttttttcgaataaagacaatttttgaaccaaaaatttttatcaagaaaaatgtattaaattagtgga

SEQ ID NO: 77772 - DNA, 983 bp, Heterodera glycines
atgttgagaaggataattctcgaaataagagacgaattcccaaaaataatgtgattattatatacgcgagttatccgatccgcttcttccactacccaaattttgaaagtttttcaaaaaatatgtaaccttttctcaaaaactccccatgtgccaattcaaaaatcatttttcccaaagaatgaagaagtttgtttatgaaattttttcgttcaaaattattcttctaactttgctatttcagaaaaacatttattttagacaattgaaaaattatggccttacaaaaaagtagtgtcctccatgtgagggttttttggaagaacttggccaattcacggggccataattttgtgatgccaaagtaaaaaccctaatcaattggtcaaaagtaggggttaaaataagggaataatatggccaagtttgattaaatttactttattacttgaattgttatgatgttttgtgtgtaaaccagtgatggcattccgaggcccaaaaatttttcggaaatcaaaccccaaaaaatgtcgcaagtcggaaagccctgcggtttaaatttaaaataatcgaaatcgatccaatcagcagcaggtagtttccaatttggtcattgtccgtgcgcattgtaaaattgcaaatccaaacatcataacaaatccaactaaatacgtgaataccagcaggggtgggacacgcctctcacctcttttttgggacgagaagtgaaaatgcaccccctaaagattgaacttttgagcagtcagaaaaatatttaaatttacgcgaaaaaacccataataattctctttctcttcttcctcgagtcatatttggtgtaaatctgttaacaaattgcattcaaattttaaaattttcccgacggcggcatcgccggaccctcccgccggtcccaaaattgtttcttggaaaacctgccacaaaataacctttttatttgattttttatttgtaataaa

SEQ ID NO: 77773 - DNA, 1597 bp, Heterodera glycines; identical to SEQ ID NO: 13833
  unsure (1)..(1597): unsure at all n locations

SEQ ID NO: 77774 - DNA, 1030 bp, Heterodera glycines
atgccgcgcgaagagttcacccaaatgcgtcaggcgatcatcgacatggttttggccacggacatgagccgtcactttgagcacttggccaagttccaacagctgatggccataatgccggacaacacggaggaggagcgggacgccaattcgttgatcatttgccgaatggtcggcggagggattgggcacgcataaacagggccaaggaaaagacggcatttcttcagatggtcaaatgcgcggacattgccaatccgacgagggagtggcgcttgtgccacgagtgggccatgcgaattgtgcaggaatactttgaccagacggcggaggaaacggagcgcaagttgcccgtcacaatgaagggctttgaccgcgagacgtgcaatgtgccgttgacgcaggtcattcattcattcatttaatcgacgtgcttttggcatttcgttttggttttgatcacccaattttgctcccatatgatcagccaatcatttggccaattgtgcctttgtccgatcattcattcgtccatttcccctttcagtgcactttcgtcgacatgttcgcccgcgaggcgttcacactttggtgcgaatttgccgacctgccccatctgccggttcagttggaggagaactacgcccagtggaagacgagatccgccgaatgggacccgaaaaaggacaacgacaatttgttgaagcggacggaacggtgagagcggacaaagcacagaaaggaggggaagcggcgccgtttgtgccgtggcaatggacccaccacccaattggacggcactttggctgtcgcggcgactcgtccaattcctttcccaaaattaaattctcaacaccaataattattatttatctgctgttcttctgtcttcgttttcatgtgcaattgtctttttgttgctttttgcctctttttcgtcccaattttcaatttgtttttccttttcctttctttagcgtcgctcattttgaatcttttaagttatatttcgcatttttctgtcatttaa

SEQ ID NO: 77775 - DNA, 1647 bp, Heterodera glycines
atgggacaccaaaattgcggtaaatccgaattcacccccaaacagacgctgattttcccggacggaaagccgctgaatatgattttggacgacggaggtgagtcacttctgctgcattggactggaaaagcaccccctccccaggcgacctgaccaaccttgtgcaccaccaacacgccgaacttctgcccggcatcatcggactgtccgaggagaccacgacgggggtgcacaatttggccaaaatgttggcggccggactgctgaaaacggcggccatcaacgtgaatgactcggtgaccaagtccaagtttgacaatatgtacggcatccgcgaatcgttgccggacggaatcaaaagggcgaccgatgtgagtcattcccccccctttaattccggttgatcgtttctcaaattgcctttcccctcaggtgatgttggcgggcaaagtcgccgtcgtctgcggctacggcgacgtgggaaaaggttcggccgcggggctgcgcaattttggcgcgcgagtgatcgtcacaggtgcgctctgtccttgacaccgatgtacaaaacgccaaacgtttcagaaatcgacccaatcaacgcccttcaggcggccatggagggtaaggcaaaatatttgaaaaaaatgaaatttttggatattttaataattcgggtaggtatcgtccgtttatgttccgtcggcactcatttgtcacttgtccctccacgccgcttttcaggttaccaagtgagtacgctggacgaagttgctgacattgctcaactcgtggtcaccaccaccggctgcaagaacattgtgaggggtgaacacatcgaacggcttccggaggatgccatcgtttgcaatgtgagcggtggtggttggaatggcactttagggctctcatatttgctaattactcctaattgccaccatttattcttccatttcattgcccccttttttgaggttgggcatttcgactgcgaaattaacgttacctatatgaacgagaattgcgtgtccatggagcaggtgaagccccaggtggaccgctatttgatgcgcagcggtcggcacgtcattctgttggccgagggccgactggtcaatttgggctgtgccaccggacattcgtccttcgtcatgtccgctagtttcaccaaccaagtgatcgcccagctcggtctgcccgtttatctccctttttctcattttctgcttttcctcgtttagaattgtacacgaaatacggcactccggacgcttacaaaacgggactgtaccttttgccgaaacagttggacgaggaggtggcacggctgcacctggacaagttgggcgccaagctgaccaaattgagcaaggaccaagccgagtgaggaggggttgggggttgaacgaatactgattggcattgcttctctcagatatttgggcattccccaagagggaccattcaaaccaggccattaccgttattgaaaagcagcggatggaaggagaaaagcggaaagaagacctttctatttgtcaatttcactttttgcaattttttttttgtaatcattggcatgttgacacgacattttgttggtttgccgttgtgggttcgtaaatcggttttgttattacttagaataaa

SEQ ID NO: 77776 - DNA, 2728 bp, Heterodera glycines
atgacactgaacaatggcatttggaaagtccaactttcggttggccaattacgccaatttgatgctgcaatgatttgtacgggccatcactgcgagccattaatgccgcaaattacaggttaaaaaataataatttaatttgaaatttcatattatttttattttggcttacttcttttttgttagatatttcgtcgagttaattagcatgttaaatgacttgtcagaatggccaccttaaaatcagcgcattaaatcagcatatttgtgaattctttgcttccaggataacatttttaatgcttattttttcattttcatgcctctttttctttttcagaaacttctaatttttaaacttgttttttactttttcgaatatttccaattcttcacttttttcgtccacaattgaagcaaaaaagaaaaaaagtcgcctttcagatggaattttcgacaattttccttgaaattgcaaaaaattttccgctttttttactgcttttattcaattttttgattttttcctaattattgcgtaaaaatctcaaatttaatttaggccttgagaatttcaaaggccaaattttgcatgccaaacagtaccgcgactataagggatttgaagacaaaaatgtattcattgttggcattggcaattccgcgttggacattggcgtcgaattggcaaaaatcgcgaaaaatgtgggaattttgaattttttaaatttagaaactgaaattgaaaaattcgaataataatttaataaaaaaaattatcataattagccgtaaaatatgtaatgtctttaaaaataggtcaccatttccacccgacgcggcacttgggtgttcaatcgggtcatccaaaatgggctaccgtacgatgttgtttatcagagtcggttttacgattggctgatgcgcactttgccatggacaattgccaacgattttcatgagcatcgaatgcaacagagaatgttaatgcataagaataataatttaaaaacagtagtgacagcaataagaaaattcaaaaattttattcaataaagaaattattttaaaaaatgataaaattgataatagtttgaaaataaagatgttaaattgagttattttagagatttttattaaggcaaaaagtctagaaccttcaaaatcagaactttcagcctaaaagcaaaaatagatattacaataataagtttttcaaatgatccaataaaaaatattattttcttaccaattaccatattttaatggatttttttaaataaattttgaagaaaaataattttatttttttattctatttgtgaaaaattcttttttgaattcaaataaataagaagatgagaaaaaaaaattggtatttaataattttccagaataagatttcgagaaaacataataacatcgaaatccagggaccatgacatatacgggcttcgtccagcacatcgcttcttccaacagcacccagcagtgaacgactgtttggccaatctgttggccagtggccgtattacaattaccgtatgaaattaattataatattattattaataataataaaaatagaaatatttaataggacgacatttccaccattggcgaacactcaatttgtgtaaaagatggacgtgaattcagtgcagatgtgatcattttgtgcaccggatacactttcggatttccattcattaggccggcagaattaattcccatcagagtaaacattttaatagagttttaatgctgaaaatatgaataatattgctccggggcttcgggtataactacgcctatttgtccaaattgaatgcaatttgatatcattcaatagcactaaatattctaaattagcttgcaaaattaaaaaagcgtttaaacagtttttgaacttacattttttggtttttctttcgttttttttaacctttaagaaaattataaaaaatcgttttgtgttttttggctcttgggtaccacctgatcaatattaagctaaattttaatgttcttaaacgctccatttcagaaacaaaatgaaattgacttgtacaaatatgttttcccgccctcaaattatgtggcaaaacgtctggcggttattggtttggtgcagccaattgggagtgtggtaagcaaaaaaaaaattgaaagtttttgaggtaaaatcccataatttgttttttaatttttttaaattcatcaaaaataactttgtttgaagcttcagagtgtttctttttttgtttttcttttttttaaccttacttatggattattttctgtatgattgggcatataattgctctcttttgtgtttttgtgccttttatttttggcatttttgccgaaaaattcgcctcaagcatcggcttatttgattttttaaaagaatttataatttttattttattctcaggcacccattgccgagatgcaatcccgctgggcggccgcagtttttgctggtcgtcttcaacttcccgacaatggcacaatgtgtgaggacatagcacagacgcgggcacaaatgcgtcgtcaatatttcgagtcggccaaacacactgtccaagtgccgttcatcccttacatggacgaactggccgaactcgtgggatgcaagccgaacctggcaaaggtggttggcactttataattgggagtgaatttggcacaattacacattccatgggacaatttaatgaataaa

SEQ ID NO: 77777 - DNA, 171 bp, Heterodera glycines
atggcaagagaggaatactgcttcgatgcaacggcggcggcagcggcggagcagtctcggccttcggcaacgacttcaacacttgtgcaaggagatggcctgtcaagcagcttcgtggacgcgatcatcaggaaggtcaggcagtcgcctgtccaacgcttcacggatgag

SEQ ID NO: 77778 - DNA, 1514 bp, Heterodera glycines
atgaatcgtaaaaaaattgaaaatcttcaaaaatgtcgtaagcgcaagtttttggataacaatgacagtgaaaacgaaacgctatctgctgatcaccgtgaacaaaatgagaacaacaacgaccgcgacgatgattttgaagaacacgccatcgtaaacttcgaacttggagaaacgaaaagaggaggtgtctgcatttggtttaatggtgagaaaaattttttcaagaaatattttcgtttttaagggttccgatttacgcacaaacaaaatgagttgtggagatgcagtgtgcgtgactgccctgcacgcgtaaaaattgtcagcaaaagtgacaacggaatgtccggttaccaaatgcaaaaagatcacagtcacttgccggagccgcaaaaacaacaagtttggatggttaatattgaatcagccaaagaaattcaggccgaaaaacgacgacaacaaatactcgagcgcgtgagagacaaaccccgagtcaagccgacacggcttttggcggagatgaggcgttcagccgccgatgaaacttatgtggctatgggatctgacaatgcgctcagctgcatgatgcgacggcagaagaaaaaaattttgggcaacggactgtgcagacccattggcattcacaattccggacaaattgcggctgaaggatggcgaggacatagtgctctacgacagtcgcacggtcagaattggagaaaaggacgttgtgcttgtttttgggagcgaacgggtaatcatcaggggcgaaaacagaatttaaatttaaattttttagactttggacattttgagcaaaaacagtgcaacttggcatttggacgggacattcaaggcagcaccaaacatgtgggagcagtgctttgttgtgggcgcgtctgtcaaccaccgaatgtgcattggagtctggggtcttctgcccgggaaacatcgacgctactacgaggaagtgctgaactttctacgtaaccgaatttcaccggtcgcaccgagaaaaggtgaaaactaacacataaatttatgtgaaaatctagttttcttttagtcatttgcgattttgagaaagccgaaatgaacgccgtatctgctgttttccctgcaacaaacatcctctgttgcatgttccactacgggcaaaacctcttccgaaaaatgaaggggcttaaactggtgcaaatgtatggggaacagtctgtgcgtggtgaagcggtccgacactctttcaggtaaaacaattcaaaaattgacctgacttcataatttttttagaaatgtcctatctttgccattgttgccgaaattcccaaaattgttgatttaaaaaattttaagcccgtccttgggaagaacccgtcgttcgtcgcgcactgttcccaattccatattggaacgtgcacttgcatgcggcttctgccctcgctcggaccaacaatggcctcgaagcaacccatcttcatttctctgtatttattacttataaaaccccaaataaa

SEQ ID NO: 77779 - DNA, 1002 bp, Heterodera glycines
atggccacccttttaaggaaagcaattttcaattttatgcactgcccgaaggatgtttcggtgttattaatattttcaattgttcgccaaatttcaaaaaatttagctaattgtaagttcccaaaaatgttcgaaaaacctgttttgtttttttttggttcctctagccataactttttgaaagttaacgaacatttttgaaaatttgcaggctaataaagaacacttaaagctatcgaatgataccaagagtttttaaaaatttggttacccttaagcaaggtaatgaagagttttttgtcaaaaattttccatttgatggttttctgaacaatgccctttttgatggtttttgagtaatgtccaagcaccgaatgggacgaaaatttttaatttagtttttcgcttttcaggtcccccctcccattcctcggctcgttttgctcatcatttgtcaactctcaccacgtatgtatcgctgagaatcaagtgtccggcgtcggtcatccgctgctccttggccgtctgtttgttggggaaaatgatgttgctgcgctgcgcctgcaccatcagcaacgcctcgcacagtgtgccggaccctttgcgcaacacctgcgatgggtgccaaaacaacagtgttgccgcaagggaagagacaaaaaaaattcgggatttggatgtgaaaaatgcaggaattcgggatttggatgtgaaaaatgcaggaattcgggatttggatgtgaaaaatgcaggaatcggaggagaaaaatgtcgaaactatggatttggatgagaaaatgccccaatttgggatttgtatgagaaaaatgggtactttttaagtttacagggtattttaaacatacattttcagattcctataaatgtgttttagaaattaatgaaaataagttttaaggggttttcaaggtcgctgatcacgaatatagcacccatttttgccaatatcgaacccctgacccgaactcgaacaaaaataaa

SEQ ID NO: 77780 - DNA, 1410 bp, Heterodera glycines
atgcccgaaatcgctttgactttgacagtgccggccagccgtggcgagtacgagatgatgatgctgcagttggagaaggaacggtttggcaaggagcgcaagccgtacaacgctctggcgcaggaggagcgggagaaaattgccaaggagcggattaagggtgggcatgatggcgaaacaatttggcgcaaattattgtatactgtaatcaagggttacggttgtccgtccatttttgatggtttcaaattttaaaggcattagggactgtcccagagttttgaaaatgacttttccgaatttgttttccccattcattttttgtttgctttgccattttgcaaaattcatttgtttgacatgccattatttttgccacagaatattgtcggaatgcgtacaaacggttgcacgacacgcaagaagttcagcggacaaccaccgtttgccaacgggagaaccccttttacgtgaacactgtgcgcgcatttcgcgaccgtcgctacgagtacaaacaaatgctgaaggtggttgtgttgcaacgggtgcaaaatcaatctagcgattttttcaaaattttatgatgtattcactcattattttatttttttatgaagaatttcctaagttttcagcgttttttggagaaattttcgagaaataacccaaaaaattttggaaaatcgccagaaactttttcaaattttttttcctttgaagttttcttataaaaaattcgaagattttttgaatttttttttttcatttttcggggggcggagaaaacttattgttagtgtacccccctcgatgtgtactgtatttattctactgtattttgtctgtagaaagccaagtcggcgctggaggcggtgccgtcggacgatttggccacccggaaacaggcccagcaacgcgtggtgctctacgactcgctgcagttggcgcacaagtgcattctgaactccttctacggctacgtgatgcgcaagggctcccgctggttctccatggaaatggtcgaattttttaatttaatttaaattttagtgattttttagttttattgtttcaaaatttaatttttatttatttttgctcaataatttagaatacttaaacttaaatttatttttattttactatagcaaattgttattttttagttattctaatagaaaatcattcggttaattaaatttttgttttccttttttttattttaatcgtccatttctttgtttatactttttatattatacctatttaattttatttgaaattggtattgtacatttttactatttttcagttaactaaaaatatcagaaaatcgaaaacttcactaatcacacagaaattttaaaaaaaaatatttttaattctttttaaacatgtttttacacaata

SEQ ID NO: 77781 - DNA, 956 bp, Heterodera glycines
atgccactgccacctgagctattgtttgaaattgttgaagcccttccttcctcaaaattgtctacagtcttcttgagcaatcatctcatgtcaacatgggctaaaaagcgtatcagagggactttcaattcgctgatgtcacagaaacaagaatggagaaatctgttaaaaatatctcgtttggtttttgaaagtcacaatggattaaatgtacaataattggtttttagtttttcgtggttttatgccattttattgttaaatctcaatgcgtttttaattagtttttgcagcaaaaatgtcagaatttctcattttccttttgggtttctcttttgccatgcttctcatgttgtgtttgctggtttcgctggtgctctttgttctttgtgcagcatggaattattggacaaaagaagaacaaccagaagaatttgatgattttccagaatacccaccgccttattaatgaaataatttttttgttgaaatgtgtcatgaaaaaacttggtttaagccatgtacattttttctgctttaaaatttccatttcaaatatctaagttttgaaaaatgttcaactcatcctttttttgctgatgtcaaagaactagggcgtattccaacaccaaagggaaaatttagtgagaagaaaaatgaaactcaatttatgaaaatatttaggtatattttatgcacttgagttcgctaagctttatcaaacgattggacgtgaaatttctcgtaataaattccgccatatcatgcaaacagggaaaaaacaacacgaattagcattggttttgatggaaaaggctgggataaacacccaggagaaagcttttgggcttaaacacctcgaatttgtgcaaaacttttgggacaaggaattcccagatatatttcgtatcgttgcgtttgatatggtaaacgaagatttcctaaactgcctgtga

SEQ ID NO: 77782 - DNA, 108 bp, Heterodera glycines
atgacgacagttacaccgcaacaaacagctgcaacagcagcaggtggaaattgtgataaagacccggtcgacctgatgttcatcattgacacgtcaacgagtgttcaa

SEQ ID NO: 77783 - DNA, 171 bp, Heterodera glycines
aaaatccaacgcataattaaagtacaggctatagggaagctattccggaaggattcggtctccccataaatctgggcgcatcggttcggggggactgccccgaaaacaaaaaaatcgattttttcaagtgctcgtttgtggtactcaaacaattatggggagcaaaaatcc

SEQ ID NO: 77784 - DNA, 1270 bp, Heterodera glycines
atgtcatcacaggtggatttgatgttcatcatcgacacttcccaaagtgtgcaggaagcatttgaacaacagctccaatttgccgtggatttggtgggctttaaaaaatatgcaaatatctttaaaaaatgattttttccaatttaataataggtcaaacgcttgccggaccaagattttgcacaacgtgtccaagttggagcagtatcgttcaacaaaaaagcccaactgcaattcacgatgggccaattgaaagaaaagccggtcatccttgacgcattattgcacattaatcacacaggcggcggcacttcggtaaaagaatgaaatatttatattaaatattttttaattaatataaattcattttataaaaaatctctcaacaaacagcgccattaataatttaaaaaatgatttggaatgattttatagctcattttaaagcgaatagtcagagcttgtaattggtatattcaatacatatttacattaattatttttttgtatgctactataaaaaaaaagaaaagagaaacagcagtgggtgaatttgcttcaaaacgacctagtaataaattaaaaattaaaattttaaaaattacaggttgtcagtggtgtgaatttggcaatggaccaggtggccaaacatcgacgaaaaggcacccgattgatggttgtgctaatctcggacggtaatttctttttttgaatgatttgtccaagcatcgccaagggatagaaaatttttgttgaatttttattaatttcctagctaattgcgcagaaatttatcgaaaatatctttgtttattttcataggcaccagtcaagatccatgggcagatgtgatacgttctgcggtccgacttcgagcagctgaagcggatgtttacgcagttactgtcagccatgactatttcttcaggtgtctgtctataaaatttttttattatttggattatttatattttaatttttggatagtttttataacataaaattttttcgtgctggcgcgtttgttaaaaactgccagcgcgtttgttaaacctgccaatgggtttgaaaacaaaaaatgggtaaaataattaaattaatagcttggctcaaattcaaccaaattaatatttcgtggtatcattcaatagctttaattgttctctttcagaatataattttcctaaatttttaacttaagtataaaagaagttataaagcattgaacaggctatgttttttgcaatggtaatgcatatataataataaa

SEQ ID NO: 77785 - DNA, 265 bp, Heterodera glycines
atgattctattttgctgttttatcaaaaagaaaaagatagattttttaactttgctgagacggaattggctcgacgagttcgcccctaccgcgataggcgccgcgttagaaaaaaaagaattttgaatatttttcatttgatttcactaataaatgggaaattttaggtccaagttttgaaatcttaaaggatttgtggcatggagccgataggtgccgccgggaaaaattttataaaaatcccaagtttttcattttaaataaa

SEQ ID NO: 77786 - DNA, 1045 bp, Heterodera glycines
atgctcttctcaaatcctttcatcctgtgccttctgctgaattttctgatcattggcccgtcccaattcatcggccaattcattacattattggtgaagtaattagcatgtcgaccattatgaaatttttttattcttttcacgacactttttgcgccgcattttttcaaaaaaaaaaaaacttttgaggaatgggtgggggtgagaaaaactttaatcgcttaacagatttttcaaaaaatgaccaaattttgcgttttgaggactgttttggagtagttaagcatccaccccaattttgaaaaaaaatttaatttatcagaattaagctatgatgtatttttcaagttttcttgtgaaattaaaaattttaaaataaaacaaaagtgataaaaaggaaatatcaataaaaaatgtaaaattatttttaaaatcattaatttaattgccaaaagtatttagactaattaaacttattgtttagtaaagagttcattagtaatcaaagtaaattcaaattaatatatggaaacaacaaaaatctttttgttcgtccatgagtaactaaaaaagtgttaattaaaaaataattaataaaatattaatttaatgataaaacaaatttaattcatacttcaataggaaattataaaaaagacaaaatttggtttttaagccagttttaagaaaattcacaggcggcgccgacaggcgccagcggtaaaaattgggtttttttgtgcgtaataactgattttagacaaaaaggcttttttatagaaaaatataagttgaatgatacggtgctaggtcaaacctaaaaaagtatcagtgtataataaaaataaataaatttaaatgttataaagtgagtaaatcctataaaattctaatttttagcgttttttgcagccattttagcattatgtttacgcaacatttcttctcgtatttcaattcaaacatcgatatcaatttttatcagaaagtattagctagctagaaacttaaaaaatgaatgaatatatgtaaaaaaaataataaa

SEQ ID NO: 77787 - DNA, 1358 bp, Heterodera glycines
  unsure (1)..(1358): unsure at all n locations
atggccactttcaatgtggcccatctcatcactttaattggcgttggggtacaaaaatttaaattaaattttattcctattttttataatatttgattttgttttagtcaattgcttcatcggttgttgctgatgagcaacaaaatcaaaacaaaactcaaaatggagcaggaggcttaaagcatttgtttggatcagatggtaaaaatgatatttttttatttgaaatttatttaaatttaattaaataaatgttgaacaatattttaagggttaatttttgcttttagttttcactgagcttcgggacaaacaaaatgcgatggccgagaaaatgtcgggaactgaggccaaattggaaaagcaaaatgaaaatggtaagaatttttttaattgaatttttatattttattntaggaatgcgcgaaacccaaactttgttgtccaccaaattggaaaaacaaattgaaaatggtaagtatttttatttaaacataaattaatttatttaattaataaaataatttaaaaattttgtttagtatttactgaactgcgcaacaatcaccaggggctgaccaccaaaatagaaaacggtagaaaatattatttattttcttattttggaaatgcgctttaggaatgcgcgacagccaaaatttgttgtccaacaaattggaaaaccaaattgaaaatggcaagttttattctttatttgcctatataaattttggttttgatttaaaattaaataattttttatttaaaaaaattatattttttatattctatttgaatttgttttttatatttttttttacaaatttataccgttcaattcctaaataatttccaattaattgccagtattcacatataattggagctttttagagaatatggtgtggtatttctattcatttgtatttaggaatacgagagaatcaaaatgcattggccgagaaagtgtcggaaactgaggccaaattggaaaatggtggaaaattaatattttttctaaatttaatatttttattttaatcatctgcaggaattcaaaacaaccaaaaggcgttgtctctgatgaagaatatggcaacattagcggtttttacaatttaaaaaaattaaaaataaatgccaaattttatttttataaattaatctataatttatttagttgttatttaaaaattaatatgaatttgattttacagttctttcacttccctcttccaatttatcatcgatggaatgcctcggattgtcacccaaaaattgtgatcaatgaaagcacaaatgccattcagcgcaacggaacagaaagtgaccagaaatcattgaaattgaatgcataa

SEQ ID NO: 77788 - DNA, 2451 bp, Heterodera glycines
atgttcactgaccgttttgacatgtggatgcgtgtatggtgcagcaaaattgctgttttccaccaggagctctatgaaaagagtttcttcggaacaatccttggctcaggcgagtcaatggagttccaagggcgtggtggcccacacgcacacattgtagcccagactgacctggacgcagtcccagaagtcatccaggaatacatatgggctcatattccacctttgccagacaaagatgatgactccccaattgcacaaatgcatcgcgaagtacgagattatatgcatatgcaactgcacagatgcagtgatagttggtgcggtccacgtgaccccaactttgggcggtgtaaaaaaggcttcccagccccgtactcgaaatgtacgattctgcacccggacaggcccgcgttgtattaccggcctagcccaaccgatggtggtgccaaaattgaggtgaacggcttaatatacgacaactcacaggtcgtgccgtacaacccatacattttgctgcgttaccgagtgcactacaatgtgttattcgcttatggtaacaaagcgaacatcaaatatgcactcaaataccctttcaaagggcctggacattgttatgtcgagtgcaaagaggagtccggcagcaaaatcggtatcgatgagccggctcaatatgccaaaatgaacttccgtggtgctacggaagcttttgcagttgtgcattcaatgcaatttgcaaaactctcacatcacgttgttcagttgtccattcatttgccaaaccagcagcccgttgtatacagggccttccaactggtgagcaaagctgaggaaattcagcgaggcgagctcccagagacgccatgctctgcctattggaagcaatggcaaaacgaatggcagcatgttccttcgctcaaggacatgctttttgaaaaagtcccagagcaatttagatgggcaaaagatcgatgggtcccatataaaaggaagcctaccaagaggcccccaatcggtcgtgttgtacctgtcgctccaaaggacattgaaagatttgcactttatgtgctgatgcgtcactttcctggtgatcccgaccacttaaaactggtcaatgggcagcagtacagcaccttccaggaggctgctttacagcatggtcttcttgaagatgaccaaatttggcacaaaacgctcggcgaggcagccttgcatcgctggccggatcagatgagatggctcttcgtgagcatcctcgtttttgggcagccaagcaattccctggaactgtggaacaagtacaaagaccaaatgtacaatccgcagggcattatcagtgcggctatacgccaagcacgggagcaggaagcgctagccgacattgattggcgattgcacttctttaactcaagctgcatgcactgtggcctcccagatccaccaaattcaaaagccaaaaatatcaatttggcaattgaagaatatttctatggtgatgatggtctgaatatgccgcctggccagccaaaacaaaggccacaacaaaacaccccacctccactcaacagcgaccagcaaaaggtctttgatgctgttgtgagggcaatacagtcggacccgaaggaccagactgtgcctcgccgtttcttcattttcggcgatggaggtacaggaaaaacattcctgtttggccaaattatcaagcgcttgcgcaagcccccatacacctataaagtgcttgctacggcatccactggctgtgcggctattttgctgccatatgggaaaacagctcattccacgttccgtctcggcagagaagtctcgctagacaagcttccaagcattccgcttgaaagcttctttgcccgacggatacgtgaggcccaactcatcatcattgatgagatcaccatgcttcataacacggtgattgcggtaatcgaccgagtgtgcaaagaaatggcaattcgccagcacaaggacctcctcttcggaggaaaaacggtcatttttagcggtgacttcaaacagtcactgccggtcgtgcctcatgaaggcttaaccgctcaggtgacagcctgttttcaaacatctccgttgtttgggcagttcagcacgatgaaattgaccatcaaccagagattgggccaaggtcagcaagcgtacttgcaaatgtgccgccaaatcggcctcggagagaccggagaacacttctggattcctccgcagttcctcgtaaagagcagggaagagttgatagactttgtctattccgacttccaaaaactccttggaaatgacatggaactgctcaatcgtctgatcctcgcacctcacattgacacgtgcgatgagatcaacgaaatcatgatggcgaatgtgcctggtcaagtgcgcgaatatttgtcttcggacagccgcttgacgagcgtcactggacatcgatga

SEQ ID NO: 77789 - DNA, 684 bp, Heterodera glycines
atgatcggccaccttatttattgtatgtaaatagttaaagcagaaagatttttgcttttgataagtttttcccaaattttaactctttttgaaaattttaacggcgccaaatacacatgccaaatttaccacgacaccatttttgggattttcgtctttaccaatccattctttagtcataaaattattaatttttctattttttttaatgtacaattcttgatcaaatttcattaattatacatatagtctatttagctatttacccaaccgcgcacaacactgttttttaggtgctggctctaagtaaattaacccctgcaaattgggtgttttcaacataaatttgccatttaaaaaaattattttctttcaaataaagttgtgacaaattttatatgttaattaaaataagccaaccagcaggcggtttttgcgaaacgaccaagcacaaaatttggacccaattgtgaaacaagcgtacttaaaaatgtccttttttcagtacaccatgaacaccaaattaatactccttctaatttttgtcctcctcaccaattctgttgcaaaaatacaagacgacgttaattctgtcgctcttatctccacattgaacccggtgctaagctttctaatgacctctaatcatcattaaaaataattacgaagtgcgaaaaacaaaaa

SEQ ID NO: 77790 - DNA, 317 bp, Heterodera glycines; identical to SEQ ID NO: 58927

SEQ ID NO: 77791 - DNA, 781 bp, Heterodera glycines
atggctttgggaaattcctcaggaattaattttcgttgtctaaagaaatgcgctagtgtcgggcattcatctgctgcaccggccgaagaagcgatggagccgccgccaccaactccaggaccagtgccaacgccagaaatggacgaggaaattttggaattttgcttttcgctgccatcggcatctgtcacaccaatcggcgatttggtgccgttttcgacaacaccaactgcgccaatggacaccggagagacgaccccgccaccgctggccattgacgagcgatcagagcgcatcgaacaactggagaagcagctcaaggaccgggacgacaccatcaaatttctgcgcaagcaggtccgaaaccgagaagcgctgatcagtgatctgcgtcgtcagctggagcaatgtgcggcaccaccaacggcgacaccaacccattcaatgaaaaattcattacggaacatggacattgaatcatcaaaattctcgaaatccttcaattttcctgaatgttcttcaatttgaagaccgatccccgtcaccaggccatggatttatttcaccattgttgttgcatttcgcgtccgccaaaattctcataatgacggcgtcctggaggatgtatcgtttgtgtcgcttgtgaatgaaatggcgagcagatcgggcagcgtccacctgtctgtcgatgctttcattgactccacagatgaagtcagagagtgccgggtggtgacagagacctttctaaatatatttttaaaaatttgcccgtagtaaa

SEQ ID NO: 77792 - DNA, 1465 bp, Heterodera glycines
aatagttgtatatccgaaagggacaaaaagaataaaaagaaatttacgcattagataaatgtgttgatccaatgtgttatcctttgctttatccgtcaaatatcgaaggatataatgttaacattaaagagacatcaggaaaaaaggtgtcgttatgtgactacagtaaattttttgttttttcgagaaaatgaaaagtttttccctcatttttatgcaagcaaactatttcgacaatggttagtagatcaagcagctaaaatcgagtgggaccgtttagaatatataagaacacatcaagccaaactatggagtagcaattatttaaatgttgaggattttcttaaaaatagagcttcaaaaaccggggcagaaataaggaagaaagttatacttccgtcaactttttctggaggaccccgcagtatgcatgaacattttatgaatgcgatggctatagtaaacgaatctggcaaaccagatttatttattacgtttacatgtaacccgaatgacccggatattttaaaatgtcttttaccaggtcaaactccatctgatagacccgacattgtaacacgagttttttatttaaagaaaacacatttattagacttaattttgaataagcatatttttggagaagttatagccaattgctgggtaatagaatatcaaaaaagaggtcttccacatttacatttattagttacgttgcatccaaaaaataagtggcattcgaccgcagatatagataaatttagttgcgctgaaataccaagcgaaaaagaagatcctgttctttttaaaataattacaaactgcatgatgcatggaccatgcaatgaaaaatcaatgtgttggaataaactaaagaaaaaatgtggtaaaaaatttccaaaaacttttcgtgaaaatactgagcttaatgaagatggttatccactctacaaaaggcctgataatggacgttttatttatagaaaaggacaaaaattaacaaatcaatatgttgttccgtataatccttttttgagtaaaacatttaatgctcatataaatatagagagaatgattctgcgaccgttgaatgtattcaaatcgaagaaaatggcacaaaaaaaatattaaaatatgatgaagtgggagcctatcttgaggcgcgttatttaagcccatgtgaagcctgctggcgaattttaaaatatccaatgcaaggaaaatctcattctgtcgacttattagatgtacacctcgaaaatatgcaaagaattttttataaaaaatgcttctgaagaacaaatagaagaagcatcagtaaaagatacaacattaacggcttattttaagttttgccaacaaaatccaacattaaaattcaagtacatagacatgccaaaatactgcacttggttaaaaagggaaagaaaatggaagtatccaagacaaaacaatcaaaaaaaga

SEQ ID NO: 77793 - DNA, 1063 bp, Heterodera glycines
atggtccgcactaaacaaaattttccaaaagattctgcctgttgctcttcttctctccagtatttagacgccgaaccggttcaaagctccggaaaacaaaagcggattgaaccggttcaaagctccggaaaacaaaagcggtcagaaacgaacttaacaaatgaaaaaaatggtaacaaagaaagcataaatctcgatgaaatgaatgatttttcttatacttctgatgaagaacatactatgaaatcatatgtggcgcaaagaaaagcaaaacaaagaaagctaatggataacgatgaaaaagaaaaagaactttttgaaaatagatttagaattggactaaaaagggctaaaatgactgaagaagaaatttcttatgtgagaaaaaatggccgtgttaggcatgccttaaagcgaatgcaaatgactgatcaagaattaaaaaaccaaaaaacaacaaatttagctttacaagaaaataccagaaaacgcaaaagggaattttgttcgttacactatctcgccgcgacagaacatcaaaataccgaattttatcaacttggcaagtttaatattaaatgtctggaataatcctttttataagaattttattaaaaatattagaaggtataatagtatttttgcctgtgcatctattagttgctttaaatttaaatttccaacaccgggtccgccctgttataaaattcaagggcaaatttaccataaattcaatccaagtgcgatgccaaaaaatgaaaaagatcttcctacaaacggccaactttatttcattgattcggaagaggctataaatatacgttgtgaaattgataaggaatgtctcccggatttattggaatatattgaaaaatatttacgaaaaaataatccattcgcacagtcatatttaatgatgaaagaagtgtatgagcaagaagaaaaaaagtgtaaagaaagaggccataaaatgcctaacataaagttactttttagcttaaaggagaattatgaccaaaggaggtataatataccactgagtaacgaagtttgcgctataatg

SEQ ID NO: 77794 - DNA, 852 bp, Heterodera glycines
atgtcggaaaacagtaaaataaatgaaaatagttcactgtcgaaatcggtcactgtcgaaatcagccactgtcgaaatccactgtcgaaatcggtcactgtcgaaatcagccactgtcgaaatgttacagcaccgtcattccgtatgtcacattttaaacggaatatttattgaaacgaaaacttttattaaatttttgcgagagaaaaggtaaagattagagagcaaaaacggagaaagggcagcagtttaatgtgttgaaaacaaaatagaaagtaatgatggctgctttgtgaaaaaaacaaacattgtgaaatttgatccttttctttttgctttcatattcttaattaaactatggttttttatgtttagaaacaacaattaattttaacttttgtaatagtaagaatcacttttgttttaaattcccatataaactttttagttttttcaacatttaatttaattacatttttttaaaaaacagttgattgttgcgcctttatcatattaccccttttagaaaagttttaataattttttttacttattaattatttcaataacaattaaatttattgatattgttaatgttaatggacaatccataatattcggacaattttcaatgataatccgtcgacatttaccagtggctaatccgtcagcggaaaaaccttcaatggacaattcaacagtaattttatttttttggtgaattaatcaataatttttcgaacacataatttgtagctgagttttaggaaataagaaaacttttcctaaaatggtaataggaattaaattcaaatttttttttatttcagccgggacctgaatatgaataaa

SEQ ID NO: 77795 - DNA, 459 bp, Heterodera glycines
atgcaaaatgaagaagttttggttcacgatgcaggcggagtaggtgataattggattcgagggagaattgaggcgcttaatttggcacagactcgacgctctttttccaattgaattgtggaatgtggtggacagagtagcagaagggcttggaagaacaaacaattcgcttgaagtgtggtgggatgtgaccattttttcatgtcttttcttcagggttggcattcaacttggaatgtgcaccttagggggaaccaacgaccgagttcatttgctcggaaaatgatcgaggaagatgaactgtggagaattcgggttgcagattatcagattgcaccggctgacggcattaaagggcctcatcgtcaagaccaaaacttggaagcacttgtgcaggattttttcaatcgtgatccgatccaatttcttcgcgcttgcgcttatcatctgcacttttaa

SEQ ID NO: 77796 - DNA, 1848 bp, Heterodera glycines
atggctctactccgattcgcagagaccaaaacaaatcgtgggaaaattcttctatctcgtagcggatatgactacactttcgaggttaaaaggctaatttaatttcgtgaaaatgttaaacgaaaaattctaaggctgtttcgaaaactgaagacggaatggagtattggcgttgcccaaaccgtccaccttattgcccagggcgtgcttgtgtacagtgccgttgggaagtcgatgccgatggatcgcgatataaaattggacgcactaccggacagcataaccatccacccgttttggggggtcatatggtagaaatttaaaatgtaacgggtgttaagtagctaattaggtgagacaagcatctgaacgtctccgacaagaggcgcaaagcgaattcccgaccacaagccgtaacatcatcagagaagttcggtcgaaccttagtgatgagattcgggcaatcagtgcaccctctgcagctgatatgaggcgaacatataattatcagaaacggaagcatcaggaagaggcaaatgataattagataattaaaaatataaatttaataagcaaaaataattttaaaaataaatggttaggtcggcgatgttggattggatgtcttacccgcatctcaaatcatcataccggacagattgcgtgatcgtacgatttatgatcaaactgttaatggagaaaaaatgatcattttttgttctcgttttggccttgatcttttggcgaattatcagaatgaagtggcaatcgatggcacttttgaggtgaataactaaagggcacttttagctgatagtggcgagaggcatataaaatgtgccgctaccaatataccacaaaataagtaaaattgtttttatcttagacatgcccaaggggatttactcaagtctacacaatggcagttgtcatcgatcattgtgcagttccggcagtttatggtttactgcccagcaaaactctcgccacatacacaagattcttcgaaacaattcgtcagtctgttggcaataattggttcccgtaccgtattatgagcgatttcgaatcgggagcgatcactgcagctggcaacgtctttccaaattccataagaaccggatgcttgtttcactttggacaagcaatttggcgaagaattcagcgattgccaaatttgctcacgcgatatcgtgacgatgaagttgtcagaacatccttgcggtctctacaagcgctggcttttgtccccgtcgactttgtctacaactatttttgcattgccatgtcaattcttgagccgactcctgagcttcaagagctgatcatctatttcattaacacgtggatcgggcctcgccgaatcatgcaaaatgaagaagttttggttcacgatgcaggcggagtagctgataattggattcgagggagaattgaggcgcttaatttggcacagactgacgctctttttccaattgaattgtggaatgtggtggacagagtagcagaagggcttggaagaacaaacaattcgcttgaagtgtggtgggatgtgaccattttttcatgtcttttcttcagggttggcattcaacttggaatgtgcaccttagggggaaccaacgaccgagtttatttgctcggaaaatgatcgaggaagatgaactgtggagaattcgggttgcagattatcagattgcaccggctgacggcattaaagggcctcatgaaacgagaaaggccaaatacattcgtcaagaccaaaacttggaagcacttgtgcaggattttttcaatcgtgatccgatccaatttcttcgcgcttgcgcttatcatctgcacttttaa

SEQ ID NO: 77797 - DNA, 633 bp, Heterodera glycines
  unsure (1)..(633): unsure at all n locations
gcactgtcgaatattaaagaggcgaaagaattcacagtatcgtttctaatagggaaatattgacaggatattcggctaaaaacgggtttgatcatttttagcgcatttttaggtatacatttgagacaattgggcaggacaagaaaagaatgaagttgatgcctcatgaaactcggaattggttatgtttagtcgaaaatatgcttacataatactcataaaaaatacaaataattcaacccacctattctatgaccacattctgaaaaaaatcccagaaatacgaggaaagatatgcttggtcacaataaaataaaaaatggctagtatgtaaaaatttgcggtcactaataaaataaaaaatggctaatatgtaaaattggcgtccagaaatttttagactaatccgaagcaaagcacgaatgaattaaagaggcgaaagaattcacagtatcgtttctaatagggaaatattgacagtatattcggctaaaaacgggtttgatcatttttagcgcatttttaggtatacatttgagacaattgggcaggacaagaaaagaatgaagttgatgcctcatgaaactcggaattggttatgttttgtcgaaaatatccttanncnataatact

SEQ ID NO: 77798 - DNA, 216 bp, Heterodera glycines
atgaaaggatgtaaaaaagcaattttgggcaaaaacattgctaaaaaatatttgggtaattttttatgaaaaaattaataatcattcaatcattcagatatattcttatctgtcaaatggttaatttagggaaaatacaaatgcgacttattattcaatttgtaatattagatttttatttttcaaaattttttcattttcaaatttttaaataaa

SEQ ID NO: 77799 - DNA, 747 bp, Heterodera glycines
ttaccgaaagaattgaaaaatggaaaaaatcgaagtaaaagaaacaggtttattataattcattactttttggacatgcgaactttttcagatatgaagtcaaatctgatcgaccaaaccattgaaattgtgcgcgatggcctgcaaaaatatggccaagataaattaagagaattattttatttaaaaatttgaaaatgaaaaaattttgaaaaataaaaatctaatattacaaattgaataataagtcgcatttgtattttccctaaattaaccatttgacagataagaatatatctgaatgattgaatgattattaattttttcataaaaaattacccaaatattttttagcaatgtttttgcccaaaattgcttttttacatcctttcatgcggaacaaaatgctaaaattcttttttttaaattcattaaaaagatttattgtaaattaattggattaccaaattgcccccccccccccgccctgcaggacattgccagcttcgtcaaagacacaatggagcagcgcttcgccggcacttggcattgtgtcgtggggcgcagtttcggctcacgcgtgtcctatgaattggagtcattcgcgcttttcaaggtcaaccaacacaccgtgctgattttcaagtgcggataatgggagaggaaaacaaattatatcaaatgctaatacaaatattcattttgtatatttgtaaaatacatttaaaaatagctgtttcaaaatca

SEQ ID NO: 77800 - DNA, 519 bp, Heterodera glycines
atgggagtgccggcggagaaggaacgcgccacacacagaaccatgggagtgccggtcgagaaggaacgcgccacacacagaaccaggggagtgccggtggagaaggaacgcgccacacacagaaccaggggagtgccggcggagaaggaacgcggcgccacacacagaaccacgggagtgccggcggagaaggaacgcgccacacacagaaccatgggagtgccggcggagaaggaacgcgccacacacagaaccatgggagtgccggtcgagaaggaacgcgccacacacagaaccaggggagtgccggtggagaaggaacgcgccacacacagaaccatgggagtgccggtcgagaaggaacgcgccacacacagaaccaggggagtgccggtggagaaggaacgcgccacacacagaaccaggggagtgccggtggagaaggaacgcgccacacacagaaccatgggagtgccggcggagaaggaacgcgccatacacagaaccaggggaatgccg

SEQ ID NO: 77801 - DNA, 989 bp, Heterodera glycines
atgcagcggaagcaaaccaataatgtaataatcattattcaaaattgtttgttttttaaatttggtcttgttacaagatttgctgaacgtcagagacaaccatgggagtgccggcggagaaggaacgcgccacacacagaaccaggggagtgccggagaaggaacgcgccgcgaacaattgcaagagcgtggcattttcgggacgccaaaagaggaggtaggaggaaaagtgtaatttacttttaaaaggctttcttcatctttcaggcgatggcattggcaatcaaggacctgacgttggcgacgaatcaactcacgatgacgatgcagacgttttcgttggatgtgcgccaaatgaaggagacgacttaaatcgacatccaaacgaagcggcaactgatccgttcggtggacactctggcccgtgacctgaacaactacaacacacgtggtggagaagcacaaggagttgcgcttggccttctgaaccgaatcgacccgcagacgttgttgcttgagttgcttcgtattttgcttcgtcagtgatctgtcgcaatttcaccccgtcctatatattgtcatgtgttctcttttgtggatcaaatgttccctttatattgtaacaacgattacccaccatatatgttgtgtgtgtgtgtattgtatatactaatgttgataaaggaatcgaagctttttaccccagaaaaattcagaaactgattttagccccaaaaataggggtaatagttcagtttgtgtttttgacttttgaaaacataaaaaaattttcgaaaaaggggggggcgacaaactgaactattaccaaaatagggaccacaattctttatcattactgcaatattaaaaatacctaattttgatttgcttaatttatgcttcctgttcttcagccgaccaattgcttacaaattagcattccctcccacccaaacattccacgccaacatgtgcgcaacaattattta

SEQ ID NO: 77802 - DNA, 1184 bp, Heterodera glycines
atggcgctggcgtgccactaccggatcgcggtcagctcgcccaagacgcaattcgcactgcccgaggtgatgctcggccttttgccgggcgccggcggcacccagcggttgcccaggctgatttcgctgcagaacgccctcgacatgatgttgaccggttggtgggcacgggacgagaacaggataaatcgtcgctgcaaaaaatagagaaaaaattcaaaaataaatttctgaaaactggattatttacagttagataccaacatgcaataaattccaatttttttatgaaaccgttttttcctgttgttttttacaccctcccattttcaggcaaagtcattcgaccggacaaagcgaagaagatgggcctggttgaccaacttgttcaggtgaacacggagttacatttaactacaatttcgcattcttatttttacaattttcacaaattcttaacaaaatcgaaaatcaacaatgattttttaaccccttttttgctagaaaaaaaatcagaaaataaaaagaaatttcttaaaacattttaaaaaagtttgtcgcttgtttatttatttttatttgttgtctaaatatggatcaatttcagccactgggcccggggctgagtgacccgatcagcggcacacatcgctacttggaagaggtgcccgcaatgagttggaaattcaaccaattataattaattggttttttcaaaaaaaaacatttaaattttaccgaatttttaaaatttttatttgaataacttttactgttttttattttgcacttcgcaggtcgccatttccgcctgtgagcagctcgcggccggcacgctgaaaatcaaccgcgagcgaccgctgatggagcgcattcagaacgtgttgctgacacgaaaaccgttgctggacgcggtattaacgattttcattaaaatttgcaaaaaccaaaaattcgaacactttcccattttccaacccctctccctcattctcacgggcatagcctttatatctgtctgtattccccgctctgttctcgtttcacaggtggtgatgcgaatggcacgggacaaagtgatgaagcaaacccatggcaattacccggcaccgttgcgcattttggacgttgtccgcaccgggctggtggacggccagcaggagggctacgaggaggagacaaag

SEQ ID NO: 77803 - DNA, 62 bp, Heterodera glycines
atggcgacattctatgggctcgagtttgggacccaaacgatggtttacgcccgggagacgtc

SEQ ID NO: 77804 - DNA, 446 bp, Heterodera glycines
atgactcgacctctgatgccccaactcaatgagctgatggccccgatgtacaacattgtggtctccgacgtgtacaacccggattacttctgtgtgactctcattagcaaagtgagtgtctttccttcccacactttgtctacctttttctaacatttcagaacatcaaaatcaatcactccgaagtcattcgcttccccaacactcaaatgggtcgttccatgacagtcatccaaggccaatggcaacgcctccgtctcgcgctggtcaacacccatttggaaagcactcgtgaagtcggcgaagagcgcaagacgcaattcaaattgtgtatggaaaaaattcgctcaatgtccgggaccgacagcgaagagacattggcggtattcggtctgtttttggtggtattccgttttgaaggcaactcccgtttccacaggcggtga

SEQ ID NO: 77805 - DNA, 386 bp, Heterodera glycines
atgaaccgacggtaagcaatttgaaaagtcacacaaattcttcatttatttaactaaactttttcccatttcagttggatttgcaacgacgtttggatggacattttcccctcttttgaccgtgctcaactcggcctcaaattggcacttctttcgccacgtttcaatgcgttggtggacaaacatttcaatggcaaaagtgaattgactatttggagaccaatcgaaattcgtcgcaaggacaaaggaccagaaccgaacctatctgtgcggatggatgacagatttgtgccatttccatggcctgaggaccgtccgttgcccagcaaaattcgctttaaagaccttcggattgagtaatttaaaatcagagttatggcaataaa

SEQ ID NO: 77806 - DNA, 451 bp, Heterodera glycines
atgaaccgacggtaagcacaaattcgtcatttatttacctaacaaaacttttttcagttggatttgcaacgacgtttggatggacattttcccatcctttgaccgtcctcaactcggcctcaaattggcacttctttcgccacgtttcgatgcattggtggacaaacatttcgatggcaaaagcgaattgacaatttggagaccaatcgaaattcgcaaggacaaaggaccagaaccgaagctgtctgtacaaatggatgacgaatttgtgccatttccattgcccgaccgtccgttgcccagcaaaatcctttttaagcgccttcagattgagtacttaaaagcggctctattgcagttcacaggccataaaaaaagacacgaccataaattatttttgtcaactttagtgcaccctttttcaagaagcatccaaattaaacattattag

SEQ ID NO: 77807 - DNA, 2027 bp, Heterodera glycines
atgcaactcggacagccgagccgcgcattagtaaatgcgaacaccggtgagttcttttattttttgtttgtgtttcattttcccaattccatgccactgtcaaaaggaatcgaaaattgagttgtttttaagtcgaaaaccctttaaatttttcataaaaattagacaaaatattttccaaattttatcattaaatttaatcaatatattggttcacaaatattctttaggtgaacaccaaaccagtttccaactgttcactccattcagcgatttgcttcatccgattgatagtgtagaggagggaaacattgtcgtaatcactggcctaaacaacaccaaaacgggcgacacactcgtcaattggtaccaattttgatttattttgccaataagaattggtctcatcgtaatcatttgcacttcgaattggcagcactcacgtcaaacacagcgcaaagaggacggaacacatcgattttgaggcatttgctccttcaaacaaccgggggcttcacaagaaaatcaaacatttggcacttgaaggttgagtattttaaattccattgtttctgtttttaaccaaaatttgagattatttaggcattgactcccctccggcagtgttttcttgtaccatcgaaccaccaaatttgaaaaatgaacgggactttcgggcagctcttgcgcaacttagtccattttattctcccgaattgtcagttttttttcgtttcagcggttgaggacccatcaattcgcgtcatcgaagaagaggagacgggacagaccattctcgaggggatgggcgaattgcacatcgaagtgatgcgagaacgactgctgcgtgaatttgatctgaacgccttttttggccctcttcgggtaatgcaaaatgcaaacggaaaaaacgaaaataattttaaaaaaatctcttttgccccatttctgcataacattttgcagtttaggtcaattacaaagagatcccacagaaacgagcagttagcactgaacatatggaaaatgtaatcgacaaaaggcaatggtgcacaatgaaattggaaatcgagccaattcccttcgtgaacacggggacagtggtccaccaattcagaaaagtgcttggattctctcataagcgttgctttattcctttttttaggtttccattgatttggacagggaggaggacgtcgaaatggcggaccaggcattgaagaaccttttatttcacccggactggttgaagtcgatcaacgccgggtgttccgttgcggtgcacggcggtccaatttcgggctctcccgtggtcaatttgcacgtgaaactacggcaagtgacaaccgaacgtatttttacatttccattagcttccacaacattcaatttaaaccctttcaatttttcatattcagcgctctttcgaccagtggacacaaaattccggtgactttgctcaacgcttgtgccagccgatgtctctcaaaggcacttgagcaggcgaatttggtgctttacgagccgatgatgctagtcgaagtggtggttttgtcggaaagtgccggtaagcggaagggcaagtgaaaatggaacggtgggattcctcgtctacttctgttcatttcaacaaatgcagaaatgcccgacccggacactgtcgtcagagcattgagtgagagacgggcgacaattttggatgtttcaatggacggcgcgaagggtttgttttaggaaataaaccacggatttatatgatcgctccccccacatgagaaaaagtttacaatttgtgagactcgtagacaaaggaaaaatattccatgaaacagaaatgttttaagcttaaattatggggtatttttttttgtttttttgcaaaatcggctccgttttaggccgaatcgcagttgtgcaggcgaacattccgctggcggaaacccagggattgtcccgcattcttcggacagtgtcttcagggatggcctctttccacttacagcccaacggataccagcagatggacg

SEQ ID NO: 77808 - DNA, 1824 bp, Heterodera glycines
atggcagcaaaggaactgttccttgcccagcagcccgacctgttcaagccgattcaatccgtaagtcactctctcctaaaagcccgacctgttcaagccggtctcccccccccctcccattattttctgtcgcttctcccctatttttcccaattgtgatgccatcaaatgcctctccttcccagatcaatgccgtgctcatactgatctgtctcggctcctccaccgccgtgccgggcattggcgtcctttggttcatcggcctttgctctctgatcgtctcagtcaccgccacggtgatctttctgctgaaccgtgaaaatggcttgtccggcgtcaccatttccggcgcttttctcccctggggcgtcattgtggggacaatttgatgaccacccaattaaagccttcttaattaaaatcgcaggaatttgtctattcgtctgtcctcacgctgctctgcggggtgggcttttggctttcattcggcttcgcctcccacgtgccggacaatggccattcggccggctatattttcgcgggggtaattaagctttaagtgaagaattgaaatttacttcaaattgtgattggaatataacgatacgaataaccactgggggataacaaaaatgccaactaaaatgccgaaatcttggggatggaattgcgaaagcaaaccgtccttccttcccaactgttaatatgctctgagagtcttggttttgtctaattgatgtgccgtgggtcaaacgctaaacataatatgccgtaggaaataccaaaattgacagagtcgcgagaatctcgatgcttcttctcattttcacttcacccactcttttaagattttcctggtggcccaagtggcctgctatgccatccctgtgctgatcatttacgatcggagccgaacggacggtccggcagccgccggacacgaacaaatcgccaacgtacatccgtttggggtcaccacggacggatgtgagcagcactaccagtcaatgcaacatgaacgtcccattgtctgacattgccaaagttccgttcgcattgactcctcccattttttggcccaatttcaccattttttgtttattaattattaaacagtaattgcaattgtttaattatttttattttttgcaaatgtcaaaattattactattgtatatccttcaatcactctttatgatacacactgagccaacaaatttgaatttaaaccaacggttataggactaaaaatgaacacagaaaacagtgttatgtggttacggtatacaatggttggggtgatcaataatattacggtgggcatgtaaaaaggggaaaattatgccaaattaaagggggaggggagaagacagaacagagatgagatcagtgggagaatgttttgcccatccctttgacaaaaacgtgaaacagagaagagaaacaacataaaataataatacagtaggaattaattttgaattatgtaaaaaatacaaattttgaagggatttgcttaaattgctgaaatttggccaaccaaaatggcccaaaaagagtgtgccgctttttccgcagcattaattcgtgccgttccgtttctttctctcccgtgccactttctttcgctgctcatctgtccgctttttcgatcagtgccgggggcggaagccccgcggcgggggcctctgcccaactccaagcggtcgtcgtcgctgcgccggtcgctgctgctgctgctgtactcgtcgctggagcgacggctccgttccggcgagtcgggaatttccaaattgtgttcttgagaaaggaataattaataaa

SEQ ID NO: 77809 - DNA, 917 bp, Heterodera glycines
cctctccctccttttgtgctttgcttttccatttttaatttgctttacctcctcccacagcctgtcgagttggtccggcccaattcggtgaacatcctctggcaaatgccccaagtcttcgtgatgactgtcggcgaaattctactgtccgtcaccggattggagttttcctactcccaggcggcgccgagcatgaaaagtgttgtccaggtgccaacaattaagcatatccgctaattagtttaattacacattttcctccaatgttattaaggccctttggctgctgaccgttttcttcggcaatatcatcgacattgtaaataaaactataattattgcagctaattaatattattatgattatgcttttattgcatattttaatatttataatatatttttacgattaaattaattttttttttaattctctaattttaaattttgggccattaataaatttattctattatttttttatacggttaatctctccgttccttttaatcaggtcatttcgcaagtccaaatctccgacccggtggaggagttcttcatctatgccgctttgatgttcgccgtcatcggtctgttcgttctgttggcgatgcgttacaaatatgtggacggtaattaatataattagacgcctactttattactgtaaacacttaatacccgtatcattgcacagtaattaattaatttattaattattcctttctcaagaacacaatttggaaattcccgactcgccggaacggagccgtcgctccagcgacgagtacagcagcagcagcagcgaccggcgcagcgacgacgaccgcttggagttgggcagaggcccccgccgcggggcttccgcccccggcactgatcgaaaaagcggacagatgagcagcgaaagaaagtgg

SEQ ID NO: 77810 - DNA, 800 bp, Heterodera glycines
  unsure (1)..(800): unsure at all n locations
atggcattcgctgaagccttttcattttttgcttctcacggcatggcattccgccgttggatgaatgatgatcaaacagcattttcggaccgtaaacaaaaagtgtgtgacacgcagcggcgggcggtagcagtacttcgtgtcgtgttccccctcctcctcctcttttgtgctctgtggtgccccctttccctctgataagggaaaatggtggcgaattttgtcggtccgtcccgtccgtcttttctaatcgttcattctctcaacaatttttctcctccattgattaagcaaataataaaaagattgtgtaagaatatatgaaaaataataaattcattggaattgaccaacaaaagttgcttaaactgtgaaaatgccaaccaatccgaattgccttttaatcactttgatcttctgattgtgaatttagctttatttcttccaacaaaacattattattcagggtagccagattacaattttncaaagcctcagttggcatccaaaaaacctcattttggggtcaaaaagcctcatttttacgaaatttattcaaaacacgtttaaaatattcaaatgttacatttgtgatgtccatgatcaatttgggcaattttttattagaaataagcattttatgaaattctaagcatgaaaaatcgaagctgatttttttgcgtcgctttttccaaatacttttggggaacaaggggggggggcagtgccgataggcacctccgggaaaattttggcaaaattaagaattttgaccacattttaagcatattttcattaaa

SEQ ID NO: 77811 - DNA, 139 bp, Heterodera glycines
  unsure (1)..(139): unsure at all n locations
atggatgtaaacgccgaactcccgccggacttcgagtttgactcaattttaaggcccattaataatagccctttcttttcccctcattatggcagatggtatcanaatcaaatagcgggtcatctttcctctgttatac

SEQ ID NO: 77812 - DNA, 319 bp, Heterodera glycines
gaagtgtgccatctttctggtcgttctccttttctaccgacttccgctgttcgcgccgactgctgagtttttcggccaattcactgatccccagcgggtgatcagttgggcagcgtttgccatgttcttcctccgctacctctacattttcctccatgttttagtggccattaaccgggcaaccgccatttggattcccttaaaatatgacaaggtcattagcgtggtccaaccaactggaacgaaagagaatttatttactctgtccaaaatgaaatcatccaaattttgtgcggatatttcctcaccaatgccataa

SEQ ID NO: 77813 - DNA, 312 bp, Heterodera glycines
atgatctggaataccgtaatagctaacagaatacaatacttcaaactttacatcatgtaaaaaattttaaaaatcaattttattaaaactcagttaaattttgcttatatatttaatagggaaatgggaatttaagtcatatgaaattcacaaagtttgaaaaatattcagttattggtcaaatgacttgaatatccccagccttatttcgagttaggacacaaattttaagttttaatatttcgatctgcatttttatgaaaaatttaaatgattttttttttttgtaaaatataccatagaaatcgagaa

SEQ ID NO: 77814 - DNA, 2068 bp, Heterodera glycines
atgtctgaagcggtgaatgaaattgatagtggatttgaagcggaaggagggacaaatgaaacggaggaggaaaaggacgtttcggaagtggtcaaagaaagcaatgaaacggagacgaaggaaaaaaaggctcaaaaaggggaggagggaaagaagcagaagggcactgctggcgacgatcttttggtcgaaattgaatatgttggggaagggcccgagctcgaccagatggacccgaacttttcttacttttcgaggattttcgatgcattcaaggcaaggaaaaaaatactaggaacgaatacacccaaatacttttgcagataaaaacagaagaggaattaaagcgagaagaacaattccgacaagttcggaccgaaatccccgaggatactctcagcaaagctgcgatttccgaacaaattcttcaggaggagttgaaccagagacgggtgaagagtcctcgcgtcgttttgtcctaattttcattttagaaagaagctgaagaggcaggtgaggcgcataaaatgagtcgtaagaagttgcgtctggcgctacaaccatcgatggccgacctaaaggcggtaacgcgaaaaagtcacaatgctttattaatgcttttttatggttttcaagagcacacctcgggccgacgtcgtcgaatgggccgatgtgacctcccgtgacccatttcttctcgtcgagcttaagtcctatcgaaacacagtcatggtcccacgccattggaacgcaaaaaggaaatatttggccggcaaaagaggatttgagcgaccaccatttgaattgccggagtttattaagaggacggggataatggagatgcgtgagacaatgtgggaaaaggaggagcaccaatcgctgaaaaacaaaatgcgcgaacgaacccggccaaaactgggcagaatcgacattgactatcagaaacttcacgacgccttcttcaaatggcagacaaaaccacagatgacgaagatgggcgaactttactacgaggggaaggaattggaagcgcaaatgcgagaaaagaagccgggcactttgtcggatgaacttcgaattgcactgggaatgccagttggaccggtcacccgccaacaaattgttccgagagtaaattccagtgaattttagaactccaacaaatttccgcctccgtggctcattgcgatgcagcgttatgggccgcctccttcgtacccgaatttgaagattcaaggcctcaactgtccgatcccagaagggtgtgccttcggatatcacggcaatttcctgctctttttttacaattgcaatattatttttttagctgggggctggggaaaaccaccggttgacgaatacggaaagcctttgtatggagacgtttttggactgactgtaagtattcggaatcgaattcgataatgtacatttgcagtataaagtccctaactcaaggcgtatcaggggggggaaaaaatccccctcccccccccctcccgaaatgaaaattttaaaaaattttctagcaaataatggaaacttttttcgattccccccccccccaaaaaaaactaaaattttatgggtacatttttgattttacagtcaattttcgtaacaaatagcactcaagtgttcaaaaatttttcattttacactattttttacaatttttccccttaaaacggccaaaattgggttgtttttagtaaaaaaatgcagttttaacccagcaagtaaaaaaaaatttttttattccgtgaattgcaaaaaaacaggtcttcagttgaagagaaaaaaaaatcttcgggtccggtcccccccccccgaaaaatttttctagatacacccctgccctaacttgttcatttctcaggttcctcaagtggctgacgacgttgacgagtcgaggattgaacgtcgccattggggggaaattggaagtgacgaggaagagagtgaggaggaaagcgaagccgaagaggacgacgaggagggcaccggcgcattgccaccgccacccccggagggcggatacgtaacacctgcgccgacagaagggtaa

SEQ ID NO: 77815 - DNA, 878 bp, Heterodera glycines
atgagcgacgatgaacgggtgggcgtcgacgaactgttggtcaacatcaaatcaacgaggtagcattttaccacacaaatcttagttttctgtttccgttactgaaacatgggaattgggtttggacaaattcgaaattgggtccaacttgtgttttatttgaactccccgtttttaattcaccgtccaaaattaaggaatgtgaatgccgtaaaggagcaattggaccgcaatcggaggaaaaagacggcggtggcacagcagcagaaaaagcgcacagcgacgccccgccgggtgacgaagcggacggaggcggaagccgagttggaggcggcgctggaggcgcagcagagtgaacggcgcgacaacaaagtgctggccgcaccgctgcacagacaggcgacgattcgcatcgaaagtcggctggcctatcgacagacgaagtgggcaaatattggggtgggaaaaacggatgaacattttgccaaatggttcatttgtaaagactgttttcccaattgtgaagaaaaattcagccaatgtgtatctctttttgaaggggttcattggggcctcatttttaactatcaagaaatacaaatttctttataactcgagagtcactgtccttattttgatttgtataggaactaatttaaacaatgtccaagttctattagttacctgcctattattatagagaagaattgcaaccatgggacccaattgtggagggccttcgtgtcgctgaacaacttcaatttccgcacgacgaacgtcgtgatgatccgctgcgcactttgacagcggaagagcgtgccaaaacgcacacggtaaattttgtttgtttttttttctggaagatttttatcaataaa

SEQ ID NO: 77816 - DNA, 960 bp, Heterodera glycines
atggtgcaaatcacacagggatttgcctatcaaaatcaaccaatggtgcaatgttgtggtaagatttgctttattttcccataaaaaatgcaaattattcttttccatttaagcgatgggaattcaaacatccgactccatttttgcggacccgggaatttttgtggcaggaaggtggtttcaaaagcatcatgaaataaagtgtaagacaattctttttcctcaaaattaaggacacacagcctacgcgacaaaagaggaggctgaggaggaagtgtacgacattctgaatttgtatgctcgcgtctacacggatttattggccattccggtggtgaaagggcgcaaatctgaaaaggagaaatttgctggcgcagattttaccacgacggttgaggcgtatgtgccggtcaatggccgaggcattcaggtggaaagagagtcggcattttgttacaaactttacaaaaaaattagcgaattcattgaaccaaatagtctatttataggtgtttccttggttttccagttcagttttttcgacaattctgcaattttcagggcgggacttcgcaccatttgggccaaaacttctccaaaatgttcaacatcgaatttgactcactcgtcaaagggcaagtggagttcgtccaccaaaacagttggggtctttccacgcgaaccatcggtgccatggtgatgatccacggggacgacaccgggttggtgttgccaccacgcgttgcggacattcaggcagggatttgttcattttggagactctttcaaaacgacttcaaatcttactaatttgcttttcaggtcgttgttatccccgtcggaattaccgttaaattgtcggatgaaaagcgggtcgaactgattgaaaagtcagaagcacttgtcaaaatgctgaaagaggagcatggagttcgggcaggtttggaccaacgtgacaat

SEQ ID NO: 77817 - DNA, 501 bp, Heterodera glycines
atggctgggggatttgaaaaattaaatccttccaaagcccaaaaagctgtgtttttggaactctggggaccggattttgagttttttcctatcaatgcactccatgcactgtttttggcctgggtattcctttttttagacgtttacggtatgctgtgatcagcctaagcttgataattctgtagcctaaaattgagtgataatttagaatttttatttaaataaactgatcatatttcagtgggcttggttgaatgaatgacacattaaaaaaattctataaattcttaggtacgtcgagctacggtgcgcgtctccctgcttcggcgattcaacggattttgtgtgctgttcgactacgtggagagtgcaattggacccgttactcagcgatcactttacgagacagtgaaaggacaaaggcaacgactgactgcggactgtacaactacggacatttacatcgaggacttggcacttttgagtgcagatcgggacaaa

SEQ ID NO: 77818 - DNA, 475 bp, Heterodera glycines
gacgataattgatcgatcacatttcatttttcacgtgtatttaatgttcgccatttcaagcgaagtatcttcagtctctccggaataaagccacttatcccagtgtgtccatcaaaggcgggatgggatctctgggcttgatcatcccatggggcccttccttcgggagtttataagttccttcccaatgttccccatctgccctcccaaattgcccagtcccaacgccagcacgtccaccgcgcacggccgcgctactggtagcaccggatggttctgcaatttgtagacttttcatcggcctgggcggacaaaggagcagtagaacggaggtgagtcaaagagggagactgaggatgcgcctgctgacagaggaaaaagcgcttcggcggtataaaaggcccccggggaggactcaaaaaataccccaaaaatgggatgccccgaaaatagggaaggaaataaataccccaaa

SEQ ID NO: 77819 - DNA, 2758 bp, Heterodera glycines
ctgaaagtcggagttttcgtcaacaaaaagaaaacaaaatttgttgccgacagcggcacggaagtgaacataatcgacgaagaggcctatgacaaaattggccgtccaaaaattcaggaatgcgaagaaaaagggaaactcttcgacggaacaaaggtcgcattcatcggcaaaggaattgccacattccaatttggcgacattgccatcgaccaggagttttacgtcgcaaaaagagggtctttaaatttgctgagcatttcaacgatggacgcatttggcctgctggacgatttaaaaaggaaaatcagcaattccgcgattaatttgtgtgcaaacattaattcaagtgcaacatttacgaccgaggccgccgataaatttattcgggaattaaaggcaactttctccaccacttttgaggaaggactcggactctgcaccaaggaattggcacaccttcaattaaaggatggtgccactccaatttacagaaaggcacgaccaatgccacatcattcaaaggaaatcgtcgaaatggaattggaccgattggaacagctgggaattatccgtaaagccgaacatttgacttgggctgccccgattttggtggtcaagaaaggagacggatcagcacgattgtgcatcgattattccacgggattaaatgatgcactgctggattttcaacacccgctgccaattcctgacgacatctttgcgactttgaacggaggaaaattgttctcccaaattgacctcaaggacgcatatttccaaattcaattggatgacgattcaaagaaaatttgcggcatctccacccacaagggcaattatttaatggagcgcctgcctttcggagtcaaatcagcgcccggcattttccaatcaatcatggacaaaatgctcgcctacaagccatcatagttgacatgcccgcgccgaccaacatttcgtcattgcgctcatttttgggtatggtcaaccattaccagcaattcgtcaggaacatgcgcttcattcgcaagccgctggacgatctgctcaagcacgaagcaaaatggaattggtgcgacaattgtcgcaaatcatttcaaaagttgaaaaacattttgacttcggatttattattgacacattatgatccaaaattggaaataattgtgtccgccgatgcttcggagcttggaatcggcgccgtcatttcccatcgattcgcaaatgggacaattaaggccatcgcacacgcgtcaaagtcactcgcgcccgccgaaaagaattactctcaaattgagaaggaagggctggccttgatcttcgctgtgcagaaattccacaaaatgatttatggtcggaaatttattctccaaaccgatcataagccgttgctctccattttcggaaataaaaagggcattcggcagtgcagcgtcaaccgattgttacgctggtcactcattttgttggcatatgacttcaaaattgaatatgtcaaaaccacggattttggacaggcagacgcactctcccgtctcattgcaaaaggcggagaagaggaaaacgaacgagtcattgccttgatcaccgccgaaccaattttggaagaaattctccattcagcctcgaaaaatttgccgatcaaattcgaagatttggtcatcgccagcaaaaatgactacaacattcagaaagtcatcaaattcattcgccaaggctggccaaatgaaaagaaaattgagaaagaatcggataccatcaaactcttccatcggcgcaaaagtgatctgacaattttgaaaggctgcctcatgtatggcgaaagagtggtcattccgaggatttttcaggccaaaattctccgactttttcacaagggccatccaggaatgaaacggatgaagcagctcgcccgacaatacatattttggccaaaattggacaaagaaattgaggattatgtccaaaactgtgagccgtgccaattggctgcaaaggcaccgataaaaaccgatctccattcatggccaaaaccaactggcccgtggcaacgaattcacatcgactttgctgggccattcttcggcaaaacatttttaattgtcgttgattcattttccaaatacccggaagtatttgagatggcaaattcaacagcatcggccacaatcgaaaaattgcgttatttatttacgcgccatggcatcccagaaacaattgtttctgacaatggcacgcaattttccagttcggaatatgccaaattcgttgcggccaacggcatcacacacttattttcggccccatataatccaatgtcaaatggacaagtggagagatttgtcgacacattaagagaacattcagaaaattaaaaggggaggggaagcctaacaaggagatcatcgacacttttctgatcacctaccggacgaccccaaacgattcacttccggacttgaagtgccccgctgaactgctgctctgtcgaaggccaaggacaacaattgatctgcttcggccaccaccacaccaaccatttgaaattgatttggagatggaaaggcaattcaacaagaaatttggcaccaaaaatcgaagatttattttgaatgagaaagtcttcgctcgccatcgctcctcgcaacattggaagacaggagtgatcagcggcacatctggagtgatttttgaagtcaaatttcccgacggatcattcggccgttttcacgccaatcaattgcgcaacaggaaa

SEQ ID NO: 77820 - DNA, 3437 bp, Heterodera glycines
  unsure (1)..(3437): unsure at all n locations
atacagaaactttataataaaaatatgcttaggatacnccaaaaaaaccttaatgaacgggaataattaaattgaaaaaatgtaataactgttaattacgtcactattttggcgccttgctaatcactattaagtcttttttgtaaaacaaatgcaattaaaataaaaagggtgaaaagacaccgcggggaattcaaaaagtcaaaagaaaattcaagctttcatgtttaatttattccatataaagcacacttttttaaatttcatatcacttttttgccctttttcgccaccgttcgcaatttttgctggtatttagtaaaaatatttttgaatttttcgccattacctaaaaatatcagccttcatttttttgggttaaaaatttcgaaataaattcttaaaatgccattctcaaatttaacgtgccaaactgagtgtccgctgttcagaagccggtcagtcagctgaaaaaaatgttcgacggaggcgaggcgccgattcagcagcaccaccggccgagcacttcgtcctcccaaccgcagcagcaccgcgccagcacttcttcgtccttccgccggcgcaaagaatcgcccgaagcggcgcctcccgagggaatgaatgactaatcaatgggcttggccaagcgtttttttgcgcgcgaattttaaatgctttatttttattttaattattccttttttgtatatttttttgaaaatttacttacgtgttgtgattaaaggagaataaaatgttttattgtttattttttgtctgtcgagcaaataaatggccaatatttttaaggagaataattaatatttgaattaattttatctcaaattgtgcctccctcctttggcacaaattctctcttaataaggccatttttatctaatttacttgatgaccgataagttttggcattctcatattctacatttatccactgaaggatattttaaaaatcaaattgaatttaatttttgttttttttttaaatttaattacgaacaattcgccgtgttaaccgcagattcgccagtttcgcactcaccgagtgttgtcagaatgccaaagccgtagaggatggcatttcggaagttccatgtttggcgccgccggccctccgccgggtcgacgattccgaacagacaatgctcagtgatacgttccgctgctgagatgagagtcggcgcttttgctgctgattcgttacttctgtcttggccattgaaaatgccatcgctgaaatttaagccaatttaattatttcttttttctattttttatatcccgtggctaatttaagaaactacccagcaagcagcttctttgactttaagacaatatttattgcaataaaaattgcaaatgctaatttaattttattaaaaaagtgcctttggtagcgcaaaaagtgccgaatgcattccgttttgcgccgtattaattcgtctttcgcccgctccgattggccacgctcaaaacgcagcagcagaagcccaccgaacatcacgtagagcagcaaaaggccaaaacagcacgcgttagccatcattcgcttgacaaacaacgaagtggccatttggggcaatgatttaaaagttaatttattaattgtggcaattagttaaaacgaagcaatttttatccaatatagtaaagacgaaaaggggaagaatgccgaattaagggaatttaaatggaatcacaaaatttttaattatttaataaatctttttttttggaagttaactaattaccaaattatgcaatttgtattgataaaatattaaatataacataaatatgtggaccctaaaaaatggaaaaactcaaaatgctaaaaattatttggttagtatttttaattatggaatttatttaacaaattaatttaaaatgaaattctttcaaaaaatcttttcaattattattttatttatagattgtgtcaaatttttctttttgtttttcttataaaatctgaattttcggttaccgtatttcttcgattatatcccccccctcgattagaacccccctctcgaataaagccccccttttgaggggggttgaacaatagagcccccgggggctataatcgaagaaatacggtaactcaaaaaaaatcaaaagcctttcttaatcaattagacagaattattggtctacggaacattcaaaatttttaacatttttgaagagcggatttaaattccaaaatattgtttgtcctcgttattttattttttgcattttagggtctccaacggtacatccgcgagcatgtgcgattggccaaatattttgtatcattgatgtctgctgacccgactttcgaaattgttggcgatgtgatcatggcattggtctgttttcggattaaggtgagaaaattaaattacctccgtttctgaattatacgaataaaataatctggggttaaataacgcagaattttcattgtttttttttgctggcattttgtcagtttcacttttctaagcatttttcaaaagtttattccaaaaattcaaaaaatattttatttattttttgctgcaaaatgtgttaagaaattgggccatttttttcttaggcgactaacggcaccgtagaacctcaaaaatgtagaatatttcacaaaaccaattctaattcttatgtgtcaatgatctgctcaaattttataattatccttcttctctgctgaatgtaaattagtttttttttaaatgacatttaattattgcaaagaatttttgtttctaaaaatattgcttacaagttcctctttatttatacattttacatgggttcagattagtgaaatttttttccgcaattttttgtttaactttgaaatttaaagcgataattttatcaaattgaaaatatgtatttttttaatagattttattgcggaaaagcgccttaaaatcatttttctgtttgatattcaattgaagttttaagcattttctattaaagtttttaacatatatttgggaagaggggtttttgcatacatttaatttaaattaatgaattacagtgatttcaatttgtgcaactaattgcggatcccgctgcaattagaactcaaaattttttgcaggaccggatcccgcgggattaatcccacaaatcacgcattttctccaaaaaaaaaaaatcggacttggattccgcaaaaccccgtgccctgctctattttaaattgttttccttccattttgcacaggatggttcggaagaggtgaacgaaaacttgttgaaagaattgagactcagtagtcacattcacgtgatcgccgctgcaccggacaatcgtacgaccatccgtttttgtgtgaacaaagaggacgccaacgaacaggacgttctgtttgccttcaaagtgatcaaggaaacggcactttacgtat

SEQ ID NO: 77821 - DNA, 791 bp, Heterodera glycines
atggctaacgcgtgctgttttggccttttgctgctctacgtgatgttcggtgggcttctgctgctgcgttttgagcgtggccaatcggagcgggcgaaagacgaattaatacggcgcaaaacggaatgcattcggcactttttgcgctaccaaaggcacttttttaataaaattaaattagcatttgcaatttttattgcaataaatattgtcttaaagtcaaagaagctgcttgctgggtagtttcttaaattagccacgggatataaaaaatagaaaaaagaaataattaaattggcttaaatttcagcgatggcattttcaatggccaagacagaagtaacgaatcagcagcaaaagcgccgactctcatctcagcagcggaacgtatcactgagcattgtctgttcggaatcgtcgacccggcggagggccggcggcgccaaacatggaacttccgaaatgccatcctctacggctttggcattctgacaacactcggtgagtgcgaaactggcgaatctgcggttaacacggcgaattgttcgtaattaaatttaaaaaaaaaacaaaaattaaattcaatttgatttttaaaatatccttcagtggataaatgtagaatatgagaatgccaaaacttatcggtcatcaagtaaattagataaaaatggccttattaagagagaatttgtgccaaaggagggaggcacaatttgagataaaattaattcaaatattaattattctccttaaaaatattggccatttatttgctcgacagacaaaaa

SEQ ID NO: 77822 - DNA, 1029 bp, Heterodera glycines
atgaagaagcattttggcttttcactgttctccgttggtatttcggctgtgctaattataatgcttatgctgataacgatcctgccgccatctattgctgatgattatttggaaatttttgcaaagccgcctattgccgatgccaaccctaaaagcgttaggctgaagaaaacggattctgtggaaactttgaaaaaggaaataggaaaaaaacttggcattactccaagaacactgacacataacagcccatatgcccttcaacttgatgacaaaaaaacaatgcaagattatagcattgaagaaggtgatatcatttattatttcttgtatggtgtgattaaaattccggagggtgaatttgaagtgttcgtgaaaaacggagagaaaaaatacagtattaaggtgaagatcactgatactgtggaaattttgaagaaaaaggtccaaaaagcgactgacattccggcagaaaatcaaacatttgcgcactacccagtacgtggccgtgtgcttgatgaagacaataaaacaatgcaagattacggaattttggaagaggcaactgttcaaatggtgttcccatttgaaattgccgtgtgctgtgctggcaaaacgtacagcgttaaagtgaaagaaacggatactgttgtaacagtgaaggaaaagatcgaaacaattattggcattccgcccaaacgacaattgatgagcaagcaacagagtgatgtgcttgatgacaaaaaaacaatggcttattatggcattgtaaaaggcaaaactgtcgatgtgtgctgggatcaatttgaaatttacgtgcaaaatggagatgaagttatcacagttaatgtgcaggccatcgacactgtggcaactgtgaaggagaagattcaaaaaaagactggcattctaacagaaaaacaaacactgagacccaagcattcgcgtgcactgagcaaagacaactaccgatatggtgagataaatccgaatgctattcttgcgcttggtgagaacacaaaacaatga

SEQ ID NO: 77823 - DNA, 627 bp, Heterodera glycines
atggcaccgttaattaccttttgacactttgttattttttgaaattcttaccaatttgaccattttttgttcgtttatatctcattttaaattatttcacagtttcaaatttaacttcgatgtttttcaccggtattgaccgactgatcgtattagtttttggtgaaagtgtactgtaattatccttaaagaattaattcaattaatatttataggcataataaattcaaaattcgtttgtatttggcaattgttacaattatttctgcgttctatggctgctttaacagttttaaggggcttaatgatggaaactttcacgctaattttagcttctgtcaatcttccgttttattatatgttttttggtaatcataatgactttttaattatctatttgcttgttggaatggtgataaaatttaaatcagcactggtgattaaggtttaataacatcattaattacccctaattgaggtttggcctaggccaattcgattaacaatcgcgcttttcgagcactttgtttgatcatcactgtaaacattgggggctatttaatcagtgtgctttttcttgcttgatcatgtaagagtccatgcgcagtaatttaaaattgcaataaa

SEQ ID NO: 77824 - DNA, 474 bp, Heterodera glycines
atgcaaaatgatggacaaaaaattaaagcgcacacattcatcacagcagacgcggcgaagagtgttgaacaaatttgttttaatttcaaactgtttatttgcaccaattttcttgttacggtgaaagcgtttaaatgggaaattgtgccaaagccggataatgatgatgaagatgatggtgatgacttatggggctatcaaattaaattgaaatatgattttccaccggttggttggtttaattatgaaaaaatgcatcaaaagtaaaaaaatatataaatggaaatatttatggaagaaaaaaaattttctatgggcatcattcttggtatgatgatggacaattaaaataatttatatagggttttttatataaattatgacgataaattttgcaaaattagtggaaaactaaaaatattttagataaaaaaacaaacacttttttttgcggaaatacaagaaggtggataa

SEQ ID NO: 77825 - DNA, 704 bp, Heterodera glycines
atggccaacgaggcaccgtacacgcacatcgtaactgaacaaatgcatgaatatgtaagtgatggatttttttaggtgcacaaaattgacaaaaagaaaatcgagaagaattgttttggaaaatgaaaattttccaaccctttccaaaaaaaaatatctgaatttggcatgttttatggtgctaggttgtttcgtaaaatcccccattttagcgatttttttcgacaaaacatggtataactttgcttataggcaatgaaattttacattctcggtaccattcgatagccaagctttttctctattagcctggcaaaacttcaaataaaattatccaatttaacatacgttatggcagaagtagtacttattttcatagaactttttctaaaatttatcaattaaattttgaatggtaatagagaaaaagcttggctatcgaatggcaccaagaatgtaaaatttgataatttatgccatgttttgtcaaaaaatctttaaaatggcggattttacgaaacgaccagcacgatttttatgtatggttgttttttaataaatcaattacttttaggtaaaaataatcgttccaccagcagtgattttgtctccagcctctgtttcttgtcagttaaaaatttcaaaaacttgttaaatttatgaaaaaacatttttggggggttataaaacataaatgcaaaaaa

SEQ ID NO: 77826 - DNA, 653 bp, Heterodera glycines
atggcaaacggttcggacaaattcagcaaattgccgcagttggccagcccgtcgctgtaccaaatttgcctcagcgttgacgtggacacgtgtaaattcaagggcaaagagaccatccatcttgaggttagttgacactaaaattttggggcaatccttcggaattagtgtcccccggcggtaaaaaaaattgagacccgaattttgaaaaaagcctggacctggatttcctggacacgaattcaggtccagaaaaacccaagtttaccgataatggccttgacctgctcgtatttacataaacattgattccatctatgattttgcatcaagcaaatgattttttcaaaaaaaaaaattaattttgtaaaatttattggcgttaaaacgtacgtctgaatagtgtagaaatgattagcacattttcttactttaaaaaattaaagaaaatttttatctctttttttgggcaccaattccgaaggatttacctaccccaccaattttggggcaaatttcactttcctcccccctcaccaacctaatttttccctctctccattttcagattacaaagccaacaaatttcctgacactccacgcgggtgcattggaggtggaaaaggcgtcgctgaagttggaggatgggacgg

SEQ ID NO: 77827 - DNA, 544 bp, Heterodera glycines
atgataaatcgactggctcggccgcttcgcggcctcgcatccttttcttggctttttctccaatcgccgagactcaacccaccaacatttcaatcactggaactcaacccaccagcattccaatcactgggactcaattctcctgcatttcaatcactggcactcaacgcaccaacatttcaatcactggaactcactcaacccaccagcattccaatcactgggactcaattctcctgcatttcaatcactggcactcaacccaccaacatttcaatcactggaactcaacccaccagcattccaatcactgggactcaattctgcatttcaatcactgggactcaacccaccagcattccaatcgccaggactcaacccaccagaatcaatcaccgagactcaattctctggcatttcaagcaacgcgactcaaattaagcaattctccgatattcttccggtctctcaatcaccagacaaaaaattgtgccaaattcatcactgcaatataatatcgtgtaattttaggtctatataaaaa

SEQ ID NO: 77828 - DNA, 59 bp, Heterodera glycines
atggaaaatttgaattttcgactttttgttcggaattgtttgaaatgggtgccggattc

SEQ ID NO: 77829 - DNA, 546 bp, Heterodera glycines
atgattgttggtgaggaacctgcgccggctcaagcaggcgctgctgcggaggatgccgccaacaaatcggcaaaacgcgcagcacttgccgctcagaaacgacagttggccctggatagggtatattcttagacgaacgttattatttggagatgttagaatggaaattttattaaagaaaaccccgaacaattattagacagccattatagtcctcatttttaagtagataaataaacctctaattctaagaaagtcagaaatgaaaatttaaatttttcgaacggcgggtggggagcaactgcttcccgtcactatgcccaaatttaataatccgttaaagaaaaaataactaaaaattatcaaaacatttttcttttccattagatgaaaaaactgcagtcgtcgttcaagtctcaacaccctgacttggcagaaggctcttcaaccgccagtggaggcagtggcacaccaaaaactgggcaacaacagcaaccggtggacatggcaagtggcggtgcgcttgacgagtgcgagccggcgtaa

SEQ ID NO: 77830 - DNA, 505 bp, Heterodera glycines
atgttaaggtacaaaaaaaatattttataaattgaaccaaaagcaatcgataaacaaataattaaaaaatattttaattttgtttaattaatttactttttttagtgctattgactttggatttgccgtcagagaacagaccaaattggatggattaattatgaagggcgcttccatatattcgagcagcggttctttttggtgtaacggttcatcaacagctggcaaatcttacggtgccggcgctaccgtaggaattggcttttcatttactaatcgacaaatcatttttacaaaaaatggagtccttttgggtttgttcgtaaattatttgtttttttataaagtttttcattttttacagatttcttcactctgttagacgattcttcattttccacaaattctttgtttccattcgtttctttgtgtattatggtaaaattgaggcgaattttgggccgaagttcaaattcgatttgacgactctctgttaaaggaagaa

SEQ ID NO: 77831 - DNA, 417 bp, Heterodera glycines
atggctggtcaacagaagattggacccgacttcgttggccaaaaatgcctggtccaaattcaaacagtacaagggtatcaaaatggggtcggggtcgttttcgcgtgggccgttttcgcgtggggcgagtttttgaactataacttttttctttgtcaaccaaatccaataatcttggtatctttcgatagccctaagtgttctctattagcgtacaaaatttggaaaaatttcgttaaggttcaaaaaagttatggtcagaagagttcaacaaaccaaattttccaatttttttggctcgaactttttttatactgaacgaaattttttggaattttgcaggctaatagtgcatctgaagggctttcgaaggatatcaagaatattggatttggttggcaaagaaaaaagttatag

SEQ ID NO: 77832 - DNA, 1278 bp, Heterodera glycines
atgaaaaagattatttattattttgttcttcaatgctgcttaatcagcacattattagcggattttgttgagagaggcaaaggtgaacaatcattaattaataaataattaaaatttgaacataataactaaattatattttgaaacacaaaaatttgaaattttaaaataacagaaaaaattccgttgtattatgctcgtcaatccaatccaaaaagttcaattgcaccaatcgagaaagagtttttggcggattctagcgaaatggacaaaaatgaacaaactatggctgatctgatcactttatatctcaacgaaaagaaaaagccatcaactgaaagtaatgggaaaacaatggccgaattattcaacatggaaagcattgaaaagaaggaatttaatgaatttttgaatgaaataacggaaaatgagcatttgattgacattgtatttgagcctcatcaaactgggcaatcaaacaaagtaattagcaggggaaaatgaaaaaatgttaaagcaaaaattttcggcgtaatttacaaaatgatcgttttattaatttcaaaggaggtttatggttttcatcaggggacaatgaaaaaagaacaaaacatttgctaacaaaaaatttatgcaaatttccatggccttatttgattaaaatatatgaaaaatttaattaattagggaaaaatttatttattatttttttagctagaaactcagcaaaaaataaacgaaaaaatgactgaaaaattgcgaaaattatcagcaatcaaagagaatgacccagtaatgagccaaataattgaaaaattatcaatctttataaaggaagtaaaatcaggttaaaattaattatattggtaaaatatttaaaataaattattttctaatcacattatagggaatgttttgaattcattgaaagaatatctcttattcgtcatcaaaatttgtataatgagagaacaaattccactgtcagaaattataacgaataaaaaatttgaaacaaaattaatggccaaattagtcaaattattattggaggaaaaacggaaaaataatcaacacaaaaaggaaaagaatgacgaaagaacgaataaatccaatggaaaacaaattttgggacttatgcactcggcagtggaaaatttaaacattgcggcaaacatcaaatatgaatgtaaaaataattgataataatatgcgtttgtaagtttaagcaaaattccaaaaccggaaaaaaaaccccaaacgttaattaaaaataaa

SEQ ID NO: 77833 - DNA, 975 bp, Heterodera glycines
atgaaattaaagaaaatcgcccaaatttttcagaatttttcctctttttacctactacatccacctcttttacaccggcccccctacgacaagggggggggggtaagtgtaggcaccaaaaagtttatatacaatatatttcattacatgccaaacaaaatgacccatcctcggtcaatcccctttttttgatttggcatttttcaacacggtattataatgactgatttgttttttctgtatagatgatgagtttttccgaccgcgcgattcgggcatcagcacaacgacgacgggggaggcggacgatgatgggacggaggagcgggagcagtacatggacaaaaacaacggattggttcagcaaccgcagcaatcactttttgaccaattgtggccattcagcagcaacaaaccgggcgaggaggagttggagcagtacagcaacgacaaagcgagggaggagttggagcagtacagcaacaacaaatcggggacggagttggagcagtacagcaacgacaaatcggggaaggagttggagcagtacagcaacaacgaaccgtcggagggggagttagagcagtacagcaacaacaaatcggggaaggagttggagcagtacagcaacaacgaaccgtcggaggaggggttggagcagtacagcaacgacgaaccgtcggagggggagttagagcagtacagcaacaacaaatcggggaaggagttggagcagtacagcaacaacgaaccgtcggaggaggggttggagcagtacagcaacgacgaaccgtcggagggggagttagagcagtacagcaacggcaaaccggtggagaagtccctttttgaagagttgagggagacggaggagcagcaacagaacatgattgacaggtggttggagggaagagaagcggcgcgcttttccaaaaaaaattttgggagcaagggggttgcaaaatttacataaca

SEQ ID NO: 77834 - DNA, 3274 bp, Heterodera glycines
atgagcaaaaatattgggcaaaacggacgaaatcgcacggaacaactgacggtcggggaagaagccgccgccgcgccgatgggcggaaattgggcccaaaggaaaacaacgccccccggggtgtggagggaaagcggcgaggggccggagagtgtccgacggacgctgaaaaaagaagtggggacaggcggtggcccatcagctggccaagaaatcactggctggttccaacgacattctgtggaggcaaatcgatccgaacaacaaccccgaaagggaaaagcattggaagagtttgactattgctggaggggagacaaagcaaaacggacggaaagcgacgacggcatgggaaacgaatgggtggggagggacagcaaagggcgggggggggggggaaacggcgggggcatttaaagcagcgacatcacgaacctaatcaaccccaccatctcaacagccaaaaaacagcagtgccatcgccactgcttgccgccgttcggccaccctctcccaacttgggcattcaacttccaatcgatatcgactctcgacatcccgactaggagcagtagaagcaaggcagcagagagtggggtcagagagcccatcaatcaacggattggctacggggggtcaaggtaggatcaggaggagaggatcattagggagcgtggtgcagcaacacactcgaggaggacgagctgtcaataatcgaggtacgcgagaactgatcagaggagagataaactgatcagaagagagaggaactgatcaggagagagtgggactgatcaaaggagaggacttatcagaggggagagagaatgatcagaagagagagagaccgatcagaggggagagagagagaagaggtcgaccagaggagagagggatcgatcggataccgtcactatccaacaaacgcttatgctcatagttttgatattattctttcagatactacacgtgccgaaccaattaaatgggacgacgccgaaataaaacaacgccataatcaaacagcgcaaaacaattttccactaattaatcgttcaaaaacgctcccgagcatcaaatttgacgccgatttgcagctgaaaaggcaattcgccgcagaaaatattcgcaaacgcgaaaacgaacaaaaaacggaaataatcgaaaggcaaagagaacgctgtgaaaacggagaagaaaaaggaaatccgtgggattatttgggcagaaaaaacgaaacaaacggagagaaaaagttggaagaggaaattgataagctgttcgaacagctcggacttctcgacagaaagcatttgatgaacaacggagaatttaaaagtattttcgagtcaatgcgaaagcatttgccgacaaaagaaacgcaacaaaaacaacaacagcagagcattggccaggggcagcagagcttttgctttacgaccaatggggcgcaaaagacagaaagacagcaaaatgcgtacaaaaagggacggagggaaactcttttgggacggagcgcatcgaacaatgcattagccgaaaggtatggacgaatcactcactgatcaacagaagtgatttgagacgaattaatgggtcattaaaagtggccaaactaacaattgaccccgaaagtgattgatcaaaccaatgaacagatcaaacattttgcagagcaaatggaacaacaacaacacaatcatcatcatcagcatcagcatctttattattgtcatcactttcaaatggggagaaacgacagcagcagagaaggcaatcacttccaaaaaatcagccgaaatacggcggaaatttggaaaatttttggcaatcggttggcgtgagttttacctccttttaccccaatcactcgcagatggtaaaaacgcgtgcggcggagacttcgccaagcaaacaaaggcttccgctgggattaagttccgtcgaaaaactgcagggcatttgccaatttacgaatcaaacggtggaagaaccaaatcagccaattaatgtgtacccgcgaaggtacggtggagtaattgagacggtggcaatgcggcggaacaattatctgatggaagcggcgaggacggcgagtccgtcgggcacgagcacaccgacgaccaattcgggcagagccacgcccaacttcagctgcggcaggttcggtcccaaccggttaaacggtcaaaatgtgcgtatttcaattcaacagagcattcaaatcggcctctccgtcgatcgccgatcaatcaaacacggactatttggactgggggactccgtccgcaaaagaatgagcaaagaaagagagaatcggaaggggtgcggtcgctttccgaccgtaacggaggaagagaaaggagaagcggtggaagcattggctaatcaaaatgggacaattatcatctcgattggtcagccacaaaagattggcaatgggaaccttagaatggacagccaaaggcagcagaggacaagtcgaagtccggacaatgtttgttgggtgggggagaatggcactaatcactcgggggggggggaagtcgggtcgaggcactaatcactcgccaaaggtcagcgagtgctcccagcagtcgcagtgttcagcagcgaaaccaacgactttgccccagccaacgccaaagcacaatttacgcgataagctgatcagtgccggctttccgatcagttgccagacaacgagtttttttggtggaaacgcaaagaacccattttatgggcagaagcagccggatgatcaccaaaagcagaaacagcagtcaaattcagcgccgaatttcccgctgacaaacactgtgatttcgcgagtgaatctgttcgagagtcagcaacaggtggacaaaagcgccacagacacagaacgggttcccattaagccgacttcggttgcttctgaggttggcaatctgtcgcaacactcactggaaacgaatcgtcagcacttggacattgtgaatggaaccaccagcggaaatggccaattgtcgccacgttcgtcggtgttccgtacaaaatcagtgatcgttttcgattttgacaatttgggcggcactcccacaaaagcaatggccaaagagcaggcggaagaaaacaaaaggaaaagcggaggaaagaccaaagaacagccgaaagcgaagcagcagaaaaaggaggagcagagaaggacaaccgcaaagggagaagagcaaaacgccaaaaaggtgaaattaataaaacaaattgaaaagggaagcaaagaaaagagaaagcg

SEQ ID NO: 77835 - DNA, 1738 bp, Heterodera glycines
atgataacggcaggaggcagcattcaaacagaaatgcagaacccgaacaacttcatcagcaaaatgtccaatcaaatcaacagaatgccacaagtacaaataaccaagaaataatttttttttgttataaaaggcatgcgctgtgaattgatgtgccggcttaggaccgcttttttctccgatatttaccaaataaatacattatataaaagtgaaaaatgaaatttctaggtcttcagaaaaagcatgggatgatttagtctctctcttacaatattaatttaattttaaaaaataaaatttcttttttaatttatattgactcgttagttaaatttaaaaatttaagccaaaattttcttaaaagaattctttagcttttgctgatgaaaatcataatccgaatttgaacaatgaaaatacgccgccaaataccaggacaaataccagcagcagtgaacaaaatggcagaccgggaagaacaaggagaggtacaatcaataaaaatatttattgaaaattttaaataattaaatttctttacaaatttaatctcctccgtccctcaaaaaagaagttaatcttttaatataaattttaatttttaactgaaaccgagggaatttatttgggttaggacgggaagcacgcttttgaaccggaagccggtacaaaatttaaaaattatcttccagttttatcagcaaatgtataaatgcaattttttcttttcaaattaccaattttttattttatgacatatcaaaatatttttgttattttatttattaaatttaaaaaaaacatttaatttaaagtaacacctgttgcttctccattacgaccaattaatgctaataatgatggtggtaatgatgctgttcatcagccacgtcaatcaacaaatattggcaacctgtcgaacaataacaataattatattgaagaaattgtacaacattatatgcgtaacaatatggaatacatgatcaccacatattccggcctcaatgatcaaacattacaatcagcaatgaatgagcagcaacagcagcagcagcgatcagtcgcaaccacaacaggttggtcgcccagaaatatatgaaatgataggctactgtacttttggtactgtaaaaattgtaaaattaaacggggagaaattgttagtgatttatgctgtaagaaaaatttattaatgaaaatattgttattattattattatttatgtaatgattttgattactgaaatccgttagttttgataaagtgttccttactgtatttttggaaaacttttttggcaaaaaattgccaatttttccaagtctttggatttatgcctttttgaaaaataagagggacaaaaatctttggctttaggccttttttgaaaaatgtttcatgcctcaaaataaggacagtacttaaaataaagacaaccagggaattttccatttttaggaagtgctgacagttcaaattcgattgaatatttaaagcaacagatgcaggataatgagtgttgtgattcggaaaacaatgacggcgagacgaactgtacaatttgcttagaaaaaatcacaccaacatcacatgctaagcaattgacttcatgccaagtctttaaaatatggaaaaaattatttataaaggaaaattaatttttgagaaaaataattgttttcccaaatttagcacacttttcatcgcgattgtgttgacacatggtaatta

SEQ ID NO: 77836 - DNA, 324 bp, Heterodera glycines
atgcaacaacattggaacaactcatcaaagcaaaaagacattggaaaattgaaaaagaaaaccaagaagaagaaagaaaaaatggaggagaattgggaaaggaaatcgaagaaaaaaaggaaaaagaaattgaaaaaggaaatcgaagaagagaaaaacaaaattggaaatttggaaacaaaaatcaaaacgaacaaagaaaaagcaaaaagagagacgaaaagcatttgggaaaagttcaaagaaatgaaaaagcattttgccaataaattggaggcaaacaattcgaatgttggtgaaggcggcgccaaagaaatcgcttga

SEQ ID NO: 77837 - DNA, 179 bp, Heterodera glycines
aattggagcccatttcaacatcacttctggggcttttctgcaacttttggtcccttctccattcattttgttcattccttttcctttgtttgtttctttcagtcgcttgaccgcaaagaacaaacctcgaccgcccaaattagagaaattgacaaagccaaactcgctctctcagtctg

SEQ ID NO: 77838 - DNA, 120 bp, Heterodera glycines
ttagccttcgatgcttcgctcattcgtctttttgtgtcgtacttttccgtctttgagttttggtgcgcagttcaacaaaaatctgttcgccgcttcacaaaaaaatgctgctctaacgaa

SEQ ID NO: 77839 - DNA, 492 bp, Heterodera glycines
atggattcttatattcttcaagatcagttctcctttccagtcaacctctacagtttttatcactttaagagagctgaaaatgccaatgccaaaagcgtcctcaccgatgaagcggcgaccaccgccatgcattgtcaggcgcactcattctgctgcaatgagggcgcgtcggttgcgcacaaattggtgatcggagtgagcgcaaattcatttgaggatgagaaaaaaatggcgcacaaaaaattggaggaggaaaacaacgaaaatcgaacaaatggaaaaggagtggtggggacagcaaaagcggaggaaacggcaaaagaggaaaagggggaggaaaagcagtgccaaacggaggaagcagcaaagtgccaacaaacgcagcagcagcggcagcagccattttgcataagattgaacagttcgccaatgtcgccaaaattggaggcaaagaacggtcagagattcaagaaagcaatcagtgatttttag

SEQ ID NO: 77840 - DNA, 520 bp, Heterodera glycines
atgccaaaatcggcggcaaaggaagcgccagtcggaggacggcaacagcacgtgcgtttttaaaccaaatattgccaaattataattgaatttaattgggttttagtcaaaaacccccgaaaattcaatcgaatcaattaatattaaggcctcttgcaaatgcctcccattcctccacaaccgacgcatcactttgctcaccatcagcagccacaggcaacaattaccgtaagccaattgagagagagggggatacgcaatactataatagggaataaaccaccgtacacaattaccgtaagccattgagacagagagggagacatgcaatactgtaatataataaccaaccatacatttgcatttgcgtcattcgatcataatattattgataaaatttttcaaatgatgaattgcttttaagaaaacaatgaatgccaaaaatggaagcggcggcggaagcaccgaattaatgcgattcattttggacgacaaattggagacatcgtaagaaaaagaa

SEQ ID NO: 77841 - DNA, 313 bp, Heterodera glycines
atgaaaacaagatcgtttgattgggagccggaaaatccgacactggaaaatccgacactggaaaatccgacaccggaaaatccgacactggaaaatccgacattggaaaatccgacacaagcggaaaatccgacaccggtggaaaatccgacaccggaaaatccgacattggaaaaaccgacactggaaaatccgacacaagcggaaaatccgacaccggaaaatccgacattggaaaaaccgaccccaactaaattttaaaaataatttttgattgtttgagttagtaaatatttaaaatacatataataaa

SEQ ID NO: 77842 - DNA, 354 bp, Heterodera glycines
atgacgtttttggtaagaaaaaaaagtaatcttattgaagaatttattttagtgtgaaaactgcgagtttgtgtgtgctgtgcattaatttcgatcccacattcccgcacattattttactgatttttttatcatttaattactgattttaattattaatctgtagagtctaaattatatggactaaaaagctaatgaatcaatcccaaaaaataaaaaatatatactcctaaaaattgaccaaacttcagaaatattcactaaggaatgaaaaattctcaaaaattcgtctcaaaaatttatttatttattttcttgaccagttgcacttgtgttgtcgaaattgataataaa

SEQ ID NO: 77843 - DNA, 66 bp, Heterodera glycines
atgggtgctctatccacccaccaaatttcatttggaaatcccacggacacctggggaccttccttt

SEQ ID NO: 77844 - DNA, 1524 bp, Heterodera glycines
cgttggcttgattccgattgtgcgagttcggatggaaatggctttcacatcatttgcattgcattgcaagtaagaacaatgaaagaccgcttttccaatttaatccgttgactctttctctcttttaggaattgccttttgcccaatttttacgtgtgactgacattaacaacacttggtctcttcacatcacttcttggatgaatgcacacaatttggctctcgcaagtgaactttacgtcgcttccaacgcccttttgatttatttttcgtggaatatgctaaacatggtgctgcatataattgaattctattactataaatatttatatagtactaatactgattttcccccaaaggttgacagcattgaagaccgatggatcagagacagtattttcggtaaaggcacaatgtctaccaaaatcgcttttcgcaacaaaactgtgctcgtgttcgttaccagtcacttttttgcggatacaaaattccacatggagcgcatcaaacaataccaagtcggacgccgctgcacattccccgaggaaaagtcggcgaaaaaattcgtcatttggcagggcgacctcaattcgaggtgattgaacagtttgaaattgataaaagcagatacgaaaagtactacggtattgtttattttcagtaaagttcagaatagaaggcattgccaacgcaacagaactgatccaaagattgaattccatggaagagggcgacgaaatgaaagcggaaattgcgaaactgctccaatcccatgaccaactcacaaaggcacgagcgaaacgggaggcattcggcgaatttaccgaagcagaaattggattcaagccgacttatcggacattggtaaagtgcaacaatttaaaaactaaaactccaaaagtccattcactgttttaatcccaatgcctctttttctatccgttttccttttctttcaggtccgttctggtgcctacgactcactccgtgtcccttcctggtgcgaccgaattctgtgcgaaggtgacatggacgcacttcgcatcacaaaatactcgtcctgtccttccataactttgtctgaccattttcccgtgtcggctcaatttgaattgcactttcaaaaagaaaagcggcaccagctaagcgaagttgaacaaagacttcaaacattatctcttatggaagctgaacacagacaatcttcgccttggctcatccgagttgagcacattccaacttgggaggaattcataccgctcgtgtgccgaattgcgattccaaatgacatctgggcagatttgtgttcttatcgtgattgggtcagttaaatctctccttctccaccttttcactcattccagacattttcagatcggcatttaccacaactcgttgaattcgattacgaaaccgttggaatggatgtacactttctcatgtccaaccgacgacgaacgtaggattgatactgagcggactttgattgtcgaattccaaccattgaaaagtggtttctacaga

SEQ ID NO: 77845 - DNA, 1610 bp, Heterodera glycines
atgatactgatcattgcattgcgggacgaattcaccgatctgaggcaaaaatgccttcagcgcttggaagacagtcgaacgagcggacggtcaacctcactgcaagagcttggagaggagtgccgaaaatatcaaatcctaaaggaaagcgcgctctccctcggctcaaatccctgcagcaccagtgccatccgagccaaaccgcagcaaatccgggacaagcagaagtccaaatcaaggccacagcaaagccagaaaggacatttccagccgaataattcaacggctattgaaaaggaagtggacctgcctgatcagccctgctattcatgcggaggcaaaaatcattggcaaaaagactgttggttcaaaaattcgaagtgcgaaaagtgcggacgaatcggccatatcgcaaaaagatgcaaaaacggcacagaaacccgacgtgttcgtgccgtggccacaaattctgggaatgacatgcacattcacaccgtttcacttcagccaacatgtaaggctattgaaggaagtagtaacaaatggtggagaattgtcaccgaaatcaatgggatggaaaacccaatgaatgtcgacaccgctgcacaaatcacggtgatcacaactgattcgtggcaaaagcttggcaagccaaagctgggcaagaccaccatcgcagtcaaaaactgcaacgaaaaggcattcgcaattaaaggaaaattcaattgccaagtttcgtacaacggacgaacagcgaaactgattgcgtacgtcagcgacgaaatccatcaggatttgctcggcatgccttggatcgaagagttggaaatcattccgaaggagcttatgtttccaaattcttcgcaaatcaccaattcggtgccaatgaagcatcagaaaatgccgccagtcaatttcaaaaattttggtaaatttcaacagaaacaccaaaagatgaaacggcaattcaacgacaaaaacggcgccaaaaccatcactttccaaaatggagaaccagttttcatttggaatttgaaaggcaataaggcaaattggttgccggcgacgattatcgagagagttggcaactctccgacttatcgagtcgacgttccgacgctccgttgcgcagtccaccgccttgtcaaccaaattcgccgccgtttcccaatggaaatggagacatcgcaaattggccaagcaaatggaaatattttggctgggaaccaaccaaatcggaccccccattaaggagattgaaaaagccaaatccccaattggccaaaatcaaaatgcgccgcgaagatcagcacgcgccaagagggcacctcagcagctgaacatggacccgtcgaagcggaagtacgatgtattccggccatgatctcgcgcagagggatttttccaaagaagggaggtgttggataagggaacaactctattgattatattttccctttcactccctctcttattgactctcgccccgccccttgaccagccccataaatatgtctccctttccctcactccgggcattctccctttcattccaccatttcattattttatttatttattccctgctgtcctccatatttatttgttta

SEQ ID NO: 77846 - DNA, 2146 bp, Heterodera glycines
ttgaacaacataagctctcgtcacttccacttgagcttctgttccatttgttcgattcggcaaccggtcctttttcactttacaaacttttgtgaacaatttccatttcattttcagttgccgacttgcagaatataagccttatcagccacagtcatctgttcaaaatgctcggctatttgacttccatcaatttcagcaaacgatttgcatctttgctgaatgcatcatttgtctccagcggaggcactgacaattccaaaaagcattgcgaccgtatcgagaaaagtgtcagcgaatatggtccttttttatttaaatttattaatttttaacttactattaattggattgtcgtcctttttcagcacgtctcatccgaatttgtcatatttttcgaacacgcgaagaatgcatttgttttaccgttaatttgttctcaaaacttaactatgtcatcaaccgtaagggatttgaatgctttggagcgatttggggaatactcataacagaagtgaatggattggggggaggatttcgactgagttgccctttggtttcgcagatatccgccaattggtctcagaaggagttcttcactttgatgcaaactctgatcaactctttcgggttggctgaacgagttgaccccgttttgcgttctgaggtggatttgattaaatttccaatgtgttcaattgtttctttctcaaaggacactctgtggggggaggagttgctcctccgccgtttgctccgtggccttttcttcgaccatcgctgtccctcgtcgtcagtgtccgtcccctgccaaactccgcgtcgtttctccccccataacgcgtcattccgtctctctgcgcttctccgtttgttggcgcctgattctctgctcactgcccaccgtttgctgctcattgtcggtgctccaattggcgtcagtgttgcgcatggacaaataaacgacacggaaaacaacgaaatcagtgcagggaaaggtaaacggaccataagtggacaagagggaagttaagaggggggattctgtatttcgtacgggggtccgaagaatttcataaggttttcgaagaaaagcgaaaaaacaaatattctttgtcaataaattgctgaataatttataattttcaaaggtaattaattattattttttaaaatgcattcaaagcaaacggaacccataattaaactttgttatttgtgttgtattacattagtgcattcaatcacttttcattttcactttgttctcagaattcgtggattaccaacgcatttacacggaaccaattggcgatttggacagtgctcatgcaattcttggtgaattgccatcgatggtctctttgctgttggaaacatctgatgccgttgaatctgaggagttgcgctggaacgacttggaagtgttcaactgtttggagatgcttacaagtgaaaaagcaaaaatattgtttttgttgcccaatactttagtcatttttttaattttaaagcattttatttatcgctagaaatggacattttacctgctaattttatcaaatttctcccttccattagcatttcccgagccttgggtgcttcgcaattttgccgctttgctcataatggcccctggcctcgcccgtgtggcggtgcaaacgcgcgcaatgcatggaaatcctggcgaagcgggcagcacatttgtcagttgcattgaggtaattgggtacaattctttaacaaaattttgattcgttcttccataaaataaggcattcgaaatgttgacataatataattagttggcggcgcttctttaggccagcattctgctcaaataccaagcgtccattctgttgcgtgacactctccactctttgctgaccaattgcgagccgtccgtctgtttggtggtggtgcgtgaggccgtctcctgcatgtaccaacacacattggagattctgcccaccaacgaacaaaactgtgtgtaccctttcccttgttttttctcttttaggcaataaccgaacgattttcagtggccggccaactctttgacatggatttgttgcgaattgcgctggaaatcagtcgtcaggtcgccgagatgtttctctcccatttgcacttcattttggtctga

SEQ ID NO: 77847 - DNA, 393 bp, Heterodera glycines
ctgtttcctacggcatttgtgccgcacttttcctctggcaattcttcactcggtttcgccacaatgtgcttttgtccgaacatatttccgctggtttctcatcggagggatgcgtccggtaaattgggcgatgggaaagggcacttttttgataattcatttacttagtatgtgaactgtcaaattcccaataatcccttctccccatcttttccaggttgggcttttccttttggcttttgataagcgcagttttggcacaattcgccccttgcgttttgttattttgggcattaaaggggagaaaaaagcaaacgaatgaagaacaaaaatcgaaagagcaagacaccgttttcctttattaacgaaaaatataaaacagaaaaccgagta

SEQ ID NO: 77848 - DNA, 393 bp, Heterodera glycines
atggccatcagcagagcctacttcatggcacgacaaatttgccagaatgaggagttttttctccggcacgaaatcaaaatagggttgaacccggatatttctctcacgggaaattccatcggggcggctgccatgttagcaaccgtatcgttagcaaaaaaacgaccggtgcgcatggacacaattgtaaccggcgctgttgaacataatggcgacattgatggcgtcggggaaataataccgaaagtggagggggccgtccagcatggattgagccggattgttgtcccgctgctgaatggccatgaagtcgccgatttggccggcattgaaatcatccccatagtggactgtcaagaagttgtggacgaaatgatgtgttgaggcatatta

SEQ ID NO: 77849 - DNA, 1163 bp, Heterodera glycines
atgtcgggatcaacaaggttgggatcgggttgggagccgggactaggattttaattgtttccttatcgcgaatttaaattttcgcagtcgcgaatcgtggatcgcggcaaacacggaaatttcactaatttaaaatctcgttgcgtcttaaaaagcgaacattttcttgccagctgaccaaacctttaattacgctttcgatgcccctgcaaaaggcattattctcgacgtcaatcccgctcttggcaccaccagctccggcactgatcagttgacagatcaatcaaccccggagaaaagacccacccattcttccgccggttattcggctgttgttcttgcctatcattgctgatcagtagggatgggaatttttgggatctttctacatattacatatgtacatatttttatacatattttggactttttcgtacatattttcattttttttacatattttgaggatttttgagaatttatagaaattttttgtgaaaaataaaaaataaattttttgaaaatgtatccctcctaaaatcgatttttttttcaaaaaatgatatatcaaaaattaatttttgaaataatataatgtgattataagcctattttgctcatttttatggcattttgtgcctatttcactttttacgaagaatttttttccaaaaaataatcatttaaaaaatttttatttacatattttagtacatatttggggatttttgtgcatatttcataaatatttcaccattttttatacatattttatttacatatttcgcgattttaaagttgtcttgccagcgacgacgttccaacgttttgcactggcacaatgggggcgcaaccggacggaactgaaacagcgtgtcggttggcagcgactgctcgtcaggccctccttgacgaaggaagaattggcggctgagcgggagacacgtgaacaaaggcggatgaattatgaagaaagcaaaaagaacgaaatggtgacgacgcggcgtggaggcaaaatggaaaaaaacttttgaggtcacaaaactttctcaattgtttttactttaactcaagaagttttgtaaacaaaatggatgagtttaggcttttacttttagaaaataggtataaaattatcgcaataaccgaaagctggttgaaca

SEQ ID NO: 77850 - DNA, 480 bp, Heterodera glycines
atgatttatcgtcggcaactttggaaagacattaaaaaagaaaaaactagagaaaaatttatagaaacctctaaaaaacttgaatatgaaataaagaaataccttacaaatcgtgaaaataaatttttaagtggtttagaccctaaacaacggtgccatgtgatttcgtcagaagtgatttcgccagtgattgatttcgccagtgagtgatttcgccccgggaaatattttgaaaatttcggcgtctgtatttgatttcagattatgtcaaaaaattgtacacattttggggtccggtggtgccgataggcaccgccgtggaaaattttgaaaatctaagtgacattacgctataaaattacaaattttctgaagaatttttaaaaataagaacaattgcccgaaatcagagcagcgcttaggcggtgccatttgttagtaccattaaaggtgctaaattaaaaacaaaagagaaaaaca

SEQ ID NO: 77851 - DNA, 900 bp, Heterodera glycines
tttctcacaatcagtgcccgaagcttctttcttcgaggctaggcctcacctctcgaatttcgttgtaccggccaaggaatgtagtcgagccagccacgggcaaaaaagactcgcaagccataaaccggttgtcagattcagcaaaattgaactgatgagcaaaaaatggccaactatttctaactggtgtgtttcacgatatcttagaactcaattcaatcatttcaaaaaatgtaaatgaaccaatctgcattttttattatcattagtctttcatttttcaataatccgtttgtcatgtttttgggtgtctgttataatatttcttgtaaataattctttttttcaggagctcaaggacatgatgcgcagatacgctgaagtaacttacgccgatgcgcacaaaaaaccgaacgaaggcttcgtttgctttgctaatcgtgatgacatgcgtcgcgcaatagacaaatttcagggtatttttttttatttgttaaatatcttggtcaattgcattgctttaggaaaagacatcaatggacgtcgcataaaactcgtggatgaaagcgaaggaggagggggaggagggcgccgaactcggaggtaaatgcatagcatttagatgagaataattgtggtaactacggttaaaagtgtggtttattgtcatgaaggtgcattcccatgggcactctttccagcttccattcctttagacacgcaaagggaaggcctaaatccagaaaaaactcgagggatgaaggaactaacggacaaaacgaacatcttttttcagccgttctcgttcgccgcgttctcgttctcgctcacctcgttcccgctcgcctcgttctcgctcccgctcttctccaccttctcgccgtgactcgcgttcgcccg

SEQ ID NO: 77852 - DNA, 1777 bp, Heterodera glycines
  unsure (1)..(1777): unsure at all n locations
atggcggacgtttcgcaggacgacattttggtggtggagggtgccattgacaacgaccaagtcaactccattaattggcacactctaatgacttgcacaattaagaccctgaaaaatttggtcgaacggacgtacaataaatttggccaaatcgatgttttggtgagaaaattgccaaaaatggcggaattttaaaaataaaagtaaatgccaaggtgaacaacgccggcagcattcttcagcaccaacgatcgcggcagaacagcaacagcaataacagcaccagcagcaataattacggctacgactacacaaatgggcaaaacggagccgaggaggaggacggaggacgcgggaggtgcccttgggggaaggacccaatgttggcacggattgggaaagtgccgatgccaaatccatggaagtcgtcggaatttaatgccttctaaaatcggaattcttaatcccatcccctaccccgggcaatttctccattgatgccgtccaatcaaagcaaattaattgcttaaaacgatcagagagcagcagctgatcactttgatcggatcactcggagatttgatttaattgggcctttgcgatgcttttgctgtgaatttgccctctctttttcggtaccacggcttccgcggctttcgaaggacttcttcctcagcaacggcaatgaccagtcgccgcacttgctcaatttttggagctttggacaacgattttgactttttgtttaacataaatttgaagaggtttttattttttgcaaaaataaaataaaattgttttttttctcattataatttaaatattttatttttttaatttatcgttttcattattttcgctttctctctccccacagtatcgccaaattgacccgtttgtgcgcgccttatctcgaagaaacaaagggtgccgtagtgaacatcagcagtttcggcacacagcgttccgtaatgtttttgaatttaaaataatttattttatattattttttaattttccttttttcagctgtccgactacacttattacagcaccataaaaaatgctttaggttgcgaaaagcgtaaaatggtgtgattttgtccactgacaatgaatgaattcagacaattattgccgctcaatcgctgttaaatttgcaaagcgcgacattcgagtgaacaacattaagtaaaatacctaacaaattggccaatcgattagtcattaattaattagttaattaattggtctgattaagccccggttttatcatcggcgaaactttggacgaagacgacaacagagcgaacaaagtgagtgagtgaacactccactcaatnttgatcatgcaattgttgaagttcgagttgaattggatcaaaaatcacgtgccgatgggtcgcggagggacggcggaggaaattggcaaagtcgtggcatttttggccagcgacgacgcctcttacatcaccgggggtgttttggcatttgaataatttaatcgttttatttattccatttttaaatttcaaattcgcactaaaaatattaattacttttttacgatttttttaacatttgccaatttcagcaacgataactgtggacggtgccgtctcaatctcttcaaaaccgaccgattttttctaatccctcttttctgtcaattgtttactcacaaaaaccgtgtttttttaatttttcaactattttgaattaattaattaaaagctttgctccatttattttcaaaaagattcagacaaaaaataaa

SEQ ID NO: 77853 - DNA, 770 bp, Heterodera glycines
tccgagttggacttgaagattccgattgtgtgccgtctgcaggggacgcgcgtggaagacgcaaaagcgctgattgcaaactcgaaaatgcggatattggcatgcgactcgctgcaggaggcggccaaaatggccgtaaaggtaggcatcagctcgttttcctcccagacagtccccccccccagaaaattaaataaaatttaccaattttattaagaaaaaatcttagtttttttacaagaaaattccagaaaaaaaataaacttcatgatgaatcaatcactaagatttttcgaaattttttcaaaaaatcgctgaaaaaattttcaagaatttttttcttcgaatttccttacaaaaaattttctaagatttttttctttggacaaattcttagttgataaatttttcaacaatattttccccacattcactgtgcttcttcccctcccccttttcagctcagttcgattgtgacgctggccaaagaagcggcggtcgacgtgaaatttgaactgtcaatttgattaggctttatttgaccgactgacgacgtgtagaaagaaatggacacagagaaagaaagagatgtagaaattcgtaaatttgtaagataaaaaaagcaattattcgatcattagcattaatgatcgccggtatttcctagtgcaaatgaaatgtaacaaccaatcaatcaatccatacggcatacatatgtataaaacgatggacacgctcaattattattattattttattagcaattaaaa

SEQ ID NO: 77854 - DNA, 1033 bp, Heterodera glycines
atgaactgctcgaatttgtggagaaaccgttggcactttgggtgcgcttttgccatgtgttcccaaaagcgatcactccgtccagcgaggaatgttccgccaaaaaggggtaaaaatcattttcacgcaatataaaataaataaataaacattttcaatccttattaaagagagaaattaatatggcaattaaataaactttttattgcatttttatgaattttcaacggacagacagacccccaggggatgcgattcccatggaaaaagcgctttgagttttgtcccaaaaaagttttattatacgtcccaccatcgacattttttacatcgggtcttaaaattaagacttcttaatagggtttgagtcaaaatggctaattttcgagggcgcttttggattaaattctgaagaattattagggagaaaagccagtcgacggtgccaatgagcgaatccagttgaaattttgattaattttcaatagagattttgccaatttatattaaaaaaaaactttatgaaattcttctaatttaaactttaactttttaagtaatggcagcggaaacgcactttgtacgaggctatggcttgtgggcattgaattggagccaaaaaggccgaataactcatttaaaggcaaaatgaaggccaatttgaaaaagaaatttgacgaaagggttaaaagtgactttcaaaacggactttttcaaaatgtttggctaaaatcggaaatcgccgagcgcaaagatttgcaaaaatggtgggcaaaagcgtaaataagcacataataatcgtttaatttagcaaaaattcaatttttacaaaaaattattattatatatttattgagtaagaaaaactttgaatttttacgaaaagttttatttttacaggggaattgacccaaaactatgaagaaaacaaccataaaagaaggtcaacattgtttttgtacaattcaatgttcttaaatgtttgatacttttaataatgaacaataattgttttttatctatgtataataaa

SEQ ID NO: 77855 - DNA, 1113 bp, Heterodera glycines
ctacttcgatcattccgtcatcacttttctcaatgccaacaagcaaatttttgacagaattggcaccaaattggaattgtgtgttacaaatgcccagcaaagtttggatgctttttcccgtgaagttttgcccatttttgcgccgaccattcgccatttcattttcaacgatgttcatgatttggtcaatttgcgcagtctcatttcgccaacaattctcaccaatttcactcggctgagtttcatcgaatcgatttgtctgtgccccgcgggtgtttttgccgatgattttggtgggccaaatgcaacttctgctggccaaattctgtcgaaatggttgcacacgccgagcaaagatggtcagccgaagcgaatgcgttgcagtgattatttggatggatcaaagcttgcatgggtcaacaatttcaaggaggtggacggcatggacggtcccaggattacggcctgggggctttaccccacccgggagacgaccttttcttttttcatattccaaaaaacttttggtgaatccggcggtgccgatagacgccgccgggaaaatttttgtaattttaatgcgatttgttaacagattttgtccaaaaaaagacaaaatttgcatgtttttccatcaaaaattgcctattttgtacattttcagaaaatttttgcgaaatatatgtcttggagggagacaaacaaaaaaaaagtgaaatttatctgacaaatgagtggggaattcgtttgcttaaagggaaaaatgggtttcgactggatcaaatccctgacaattgatttggaaagccaaaaataatgacatccgtttattttttcattgtttaggcatttcgccgtgccaccacttctgtcagttacaatattcaaattactgtttataaggaaacaacgccaattgaacaatttaaattgatgaacgaacggaccaaagagaagctgacactgagcaaagaatcatcagaaaataattggatgttgaaacgatgccaaaatattgggaagacgaatcagaaacagcagcagaagaaagacgaaaatttggagcatttgaaccgagtctacatccgtctttatgaaaattgcattgggtga

SEQ ID NO: 77856 - DNA, 1133 bp, Heterodera glycines
  unsure (1)..(1133): unsure at all n locations
caaaagaaagctaaagagccgctgaaagcaatgcctactcagaaagcggaagaggcatctacaggtggaacgaattgaatggacaagaaatatttattgagcaattttaagggagcgagaaaacgggtcaaagcgttgtttctgttaggccacccaatgtgccgacaactgctccaggtggactactgttataatgttattttatatctaacctttttagtcgcttcaaacccacccatcagcgcggaacagaatattgcttctattacacttacaccttcagatgtgaagacacctgcaccaggtaaattaaatcaacaagaaattatttattaagcaattttaagtgggcgggaaaacgggtcaaagcgttgtttctgatacgccaccaaatgtgccgacaactggtccatgtctactgattattttttgtttttttagtttatacaacctttttagtgacttcaaaaacgccgatcaaagcaggacagaatgctgcttctgttaggccaccagtgcctgcaaacacatcaagtagaacaatttttgaatgccgtcaaataatactcgttttagcaagttcaaagcatgtcaaagctcagggcactgtttctaaaaaaccttcgaaagcatcgtcatcacatacctcacgtattgatttctcagatttagcaaaataaaccttttggtttttagtgaaggtacccgacgacctggtttctgcaataaaatcgcatgtgccctcgtttctccatgatctagcatcacaaattactggaaggatggaccaaagcagtgcttctgccatgtcaagtgattcggaatcctcaacagaagagtcgtcgtcttcaggtggagcgaaattgtattatcggttggcctcgtcttttcaatttagcatcagaaatgactgaaaggactgatcggagtgctatttccgtgaggcattcgagtgtgaagaaatctgtaccgggtaatttattttttttgagtaccggtttaataaattattttttgttttagtgcctccaagacctccggtcaaagcaggacagaatgctgtttctgttaggcccccgaatgtgaagacaactacgccaggtcgactgaatcaacaagaaattatttantaa

SEQ ID NO: 77857 - DNA, 710 bp, Heterodera glycines
atgccaccaaaaaaggaccattcagtagttcaaaagcctgtcaaaacggatcaaagcgttgcttatcgttctacaactgcatcgagtttaataatatttttgcgcgaaagaaatagaatcatttcagcagttcaaaaggccggcccttcggacctcagcgcggtttttattcagaattctctgcaggtgtcggattcggacggctcgcgtagagagaaaggtataaatagaggttggacttacgttcatagccggcgccgaaaacctgtatttttgcttctgggtccggtgttattgtaagtcgggtgactaaaaatatgtcaaaaaaacaaccttaaaaacaaagatttttagtttttttcactattaatttattccttttgatttatagtaaacgaccctaactatgagacacttgaactaattgaccatggcatttttatgggggagaatacgaatgataccgaccttaaggcagttggaggtatgtgactagaaattgtggatgttctaaccaattaattttcattttaagcacaaaatccaaactacgcaactcttagaaacttggatctgaacatttttgtgcgtggaccgactccgagtaaaccgaaatgagggaaagactaaaatgtgaagaatatcagggacatttatatattgatgctaatactcattctttgttgttgtatttaatacactaaagtgca

SEQ ID NO: 77858 - DNA, 1115 bp, Heterodera glycines
atgcttcttgctttgacttctgtggacactcgcaacgcacttttgtgcgccgccgttccttccattggcgccttcgtgggctcgacgatggccatcaaagatcaggaattggttcaattcctcaaggtttgctgacaccagagatggggaatttaactccattcagcttttagaaacaaaattttccttctttcgcacgttgttgcaaatacaattatttgctggccaacactgccgtcaccattccgttcggttacgcttcttatttggtctacaaaattggaggaggtgtcaggttttttgacagttaatggatggaaaggaatgattcaggattcagttgcaccgactcaaaaatcgcattgggactgtacggtgcgacgctgctcagcggctgttttttggtgcccactctcaaaaagcatgacattaaggcggtaggcaacctacaagttcatcttcctcaggtccaagtccaaccctttaagctgactgccaacgctgttgtccttgccggactttccgtcgctacttcagtggctttctacaacatcgataagatttccgcttattggacgtgagtttatttgagagtcgtgccggttatatttgccaattcagcatgcccttcactctttgggccattttttgcgctggacttacggtgaaggcgaactgctgcgccgggacgaactcaaagcttatgaccaatgaggcggcttcgtgtgcttctgaaaaagggacgaactcaaagcttacgaactatgaggcggcttcgtgtgcttctgaaaaatctgagaataagaatgagggctcctgctatgtttagatacgatgatgatcaatatttctctttttgatcgattgtttttgctaaatcatcgcttgtttgattaggaataatgttaatggtaaaaatccaactcttactagggtaagtactgccccaactcgtatttttcgacaaaaaattcgtcataacttttgttgaaggcgaccaaattaaatattcttgttatcattcaatagcccttaagattcgtacgagttgggtttcatccgtatttgatagcaagaaaaattgtcttgtcatctgtttatttcgttgtaatgta

SEQ ID NO: 77859 - DNA, 383 bp, Heterodera glycines
atgaataaaaatgatagcaatttcggatggacaaaaagtaaatagacagaatcaaaggtgaaaaataatttataattacaatatgaattaaaaaattgcttttcgttttttacctctttattctttttgttcccgggacaagagcctccctcataaccttcgtgtatgtttacatgttaatttgctatcctccgtgcaacttcggaaatcaaatcattactaaaatattataaattattgtttggaaaaaataacaaaatttacttcatcttcaaaaccattatacatattgagaaaaacaaatataatatatagaagaattcactgcaaaatttaaactaaatgaaactctttacaaaggagcaatttattaactaaataaa

SEQ ID NO: 77860 - DNA, 437 bp, Heterodera glycines
tgaaccatgaagacgggagaagtgaacgtattgagctcgaggcactaaaggtatttgaagaagtgttttgcggcacattggaggagtttgatgggttgaatcgggagttgaatgtggatgaactggcaaaagcatttgaagaattgctctgtggcacgttgaaggaatttgatgggtttaatcgggagttgaatgttgatgaactggcaaaagcatttgaagaagtactctgtggcaatgggaaggtgcctgatgagttaaacccggcggaagttctcgaaggatttgacctcaaaaaggtgtttctggattggaatggtctacttgatgaaccagaagccatcgacggttgttggtccaaaaatgctaacctcattggcatagagcctacgttttgtttcaatgtattactgctagagttgagcggtaatcggtaa

SEQ ID NO: 77861 - DNA, 681 bp, Heterodera glycines
atgtaccatcagtgccctcctttttgcgcttctcatctttttgacatcatttgccacctttgccactgcgcgaaagatgggaaagataaacagaagggagaaaaaatcgatgttgaaatgttgaaaaagttaatggacgataatgaataccttcgactctcggtagaacaacaatatagtgtatataaatccgcaaaaagtggtaacattatgagcagtaattagggttgagcggtaccggtaccggtactggccggtattcgtcatatcaatcacaaattcaacttcaattagcttcttacaaggcacatggaagaaccactattgagactgatattttcgtgtggtggaaagaagttggggctcaattccctgatttgtttttactggcccggattattcattcaattcccgccacatctgtgtcatcggaaaggctgttctcgaaagcggggctcatttatggcaactcattaagaaatcggtattttcgatttctgatttctgtaaaaccaaggaatttaagcctgagcggagaaatggcacaaaaaattttactcatcaaagcaaatatggaccagttgtttttggcaccatctactgagcccgatgcagaaggaaaagaattagaaattgattatttggaaataaatgatgatgatttttgttaaaagtaataaa

SEQ ID NO: 77862 - DNA, 283 bp, Heterodera glycines
atgtcggctattatatgtattaaagcacacgaaattgaaaaagctgattttcctattcatttggtaagttcgaaaaaatgttacgttagattttaaagttataaaaacttcttaaaaaatgtacaatgtgtgaaattttttcaaattttcagacaaatttctattaaagtattttcatgcaagttttcatgtcattctgtcaactacggaatgaacaggaaaaacggctttttaatttggttaattttaatttcattggcattttctgcgccagttttgacaa

SEQ ID NO: 77863 - DNA, 2079 bp, Heterodera glycines
atgggtgccaatgagagtgtgccaattcctggcggaggttcagaaggttaccatgttctacgggtaattgtttttttctttctttattttttaattgttatttgtttaggtccaggaaaattcaccaggacaaatggctggtttagaacctttttttgactttattgtggccatcgggaacacaagactggtaaaataactccattaataaaaaaaatttatgagtaaaaaatcattaaaattatttttaggataaggacaacgattctttgaaggaaattttgaagcaaaatatcaacaaaccattggaattaacggtttataataggtgagtaaattcggacaataattcgagcaggtgctcatattttaatttttgcatttttggttaaaatgttttaattagctttactggataacgatgaatttcagttagtttcaatgtatttaagcatgttttttaactaataccacccaactcattcagtaagacacaaacggttcgcgagactcaaattgtgccttcgcagaattggggcggccaaggagtgttgggcgtttccatccgtttttgctcttttgagggggccaaccaaaatgtttggcatattatttcggtttctccgaattctcccgctgagttggccgggcttcacgccaacagtgattatgtgctcggtgctgagtcagtgctgcaacaagcggacgatctcatcgcttttgtgcaggccaacattggaaagccattaaaagttagtcttaaccgtcgtaacattccgtacgcctttaaacgagttttggtttattagtgcaatatttttgcactatgtaaattaattctcaattttagctgtacgtttataatgtggacagcgacagtgtgcgcgaagtgattctgactccgaatggctcttggggaggcgaaggctgcttgggatgtgacattggctacggttatctccatcgcatcccaatttccgttgatcggtccaaaccgtgtggcgatatgcagccactgcttccttcgcaccaaatggaaatgccgaagcaatcgtcatcgtcactgcctccgccacaaactgggattccgcaaatggaccaactgatcagcgtaagttgcgagcagtaattaaattgggacgatgggcatataatttaaagatttcaatttaattatattttttgttccccatttttatactttaggcttctcaatttgttgtctcttcttcgactgatgttaagcgttttccggacccaaatgaatttgcgcttcctcagcagtcactcaatggggtttctgtgccaacaattcccagcagcagtgtccctcttccaccccaatcgcaacaattggtttccccgcctcttgttcctgtcgattattcgtctccacaacatcaacaagttgtttatcagtatattcgacaaatatttttgctgcaaattttcagagtcagtcctacgactcgggtaatgccgccaaatttgagcttcatggcttgccacctcatcagccgacacctcggcaggtcgacgaacccattggtcctccttcgtttggccaattgagagagacaccaatttcggctccgaccccctctgtcatgtcaatggttcagccacaactccactcttcctcattggactctgtcccactgtcggttccgccggtgacgcaccaccagcaccaagaacagcaacagccacaaattcaaccacttcatcaaacaccaccgccgccaattcacaccagcacttatcaaccgtatttggcatacggtgcgccaccgatgcatgcctttcagccacctcagcaacaacagcaataccaagtaggtattttgagaaacattttagttgttttctatttttaatttaggctgtgaatcaaacgtctgcttcgccttttatgtttccggcgcaaaatgtgcaacagcacattcaattgggacagcaacaatttcatgcgccaaatcagccgtcttccttttaccatccttcatatccgccccaaccgcaacagaaactgatgtcttcaagtgccttttatcaatatctacttaattcatttttcaa

SEQ ID NO: 77864 - DNA, 1673 bp, Heterodera glycines
atgagttccattgaaattgaggcggctgatgttgttcgacttgtgcaacagtatctgaaggagaacaacttggtacgtactctacagactttgcaggacgagacgaacattactcttaacacgggtgggttcggatgcttttgaaagcccatatttttggaagtgaatgcgtttagttgacagcatcgaccaattctgccaggacatcaccagcggtcattgggacactgtgctcaaatgcattcagccattgaagttgccggccaagaaactgattgacctttatgagcaagtaaaatgttggcgatggtctctcggggggtcgccgcaaaaatttttttagattttttttctaagtttgaatttttattttttttgaaattttttcggcagattttgtctcggcgagattttggggtgtacccctctcacgggggcatcgtttaatccacaaaaaatgcattaaatttacgctattattacccatttgaacagatcatcgtcgaattggccgagttgcgtgagttgggctccgctcgtttaattcttcgccaaaccgatccgatggccttgctaaaacaggccgaccccgagcgttacacccggcttgagaatttgttggccaaaacatatttcgatccgcgtgaagtatatcctgaagggggctccaaagaaaagcgtcgcgcggccgttgcccaatcgctgtctgctgaagttcacgtggtgccaccatcgcgacttctgtctctgttggcgcaggcactgaaatggcaacaacatcaaggacttttgccgccagttgggtgacaaacccatttatatcatccaattttgtttccgtttattcgagtattttcagatgatcatttttaggcacccaaattgatcttttccgtggcaaagcggcaatacgagagcaggaggacgagcgtcacccgaccactttgacacggacaatcaaatttggggccaagagtcatcccgaatcggcccagttcagcccggacggtcaatatttggtcaccggatcagtggacggttttatcgaagtttggaatttcaccaccggaaaattgcgcaaagacttgaaataccaggtcggaataatcaacaagtcatttaaacatatgctagcctaattaaggcacaagacaatttcatgatgatggaaacaacggtgcggttttgccaaaccatactcattgtcaattcgtatttcggcactgttttaggtcctctgtttggcatttagtcgcgattcggaaatgttgataacgggctccaaagatggcaaaatcaaagtggggttaaaaacaatcatcttttttattcagaaacgaattttatttttaggtatggaaaatccaaactggccaatgtttgcggcgttttgaaattgctcattcggagggtaaaagcggatggaacgatgggaattttatccatttctttttatgtgtgaccagtgtttcgttttcgcgtgaccacagtttcgtcctttcctcctccttcgacaaattggtcaaagtgcacggcatgaaaagtgggaaatgtctgaaggaattgcgtggacacaattcatatgtcaccgatgtcaaatacacggaggactgtcaccaatgtgtgagcggatgtgcggacggaacggtgaaagtccgcgcgcggggcatata

SEQ ID NO: 77865 - DNA, 828 bp, Heterodera glycines
gtccaatctcagttttgggagagttggaaggagtttgaagtcaagcatggcaatgaggacacaattcgtgaaatgttgcgcgtcaaacggtccgtccaggccacgtacaacaccaacgtgaactacatgagcggtgagggaaattgacggggagggtgttactggacaaacgtgcaaatttgtctttaaattaacttgctaactaatgggtctatggcaactcgtacaaacaattagtacaataggcaactcgtgcaaaaataaataatataaaattctaaaaaatacgaaagcaacgacttttcgttattatgggttgtcacgaatttattaaaaatattttatcttaatctgactgttttctatttttttttaatcacaaatttgtatttttaagtgttttatttacctttactctctttagcccaaatgatggccacattaggcagccagactgaaatggccggtgaactcagtgctgccgactcaatggcacaattggaggcgcgcgcagcacaaattgcgcaggaagaggcattgattgcagcaaaaaaagtgttgccggcgacgggtaagcagtttgatagtaatttgaccacttaaaactttaaaaattgctaattcacagacggacgaatttcgtttgtacgtggcgaaggtcgcacaacgacagaagcacgggctgaaaatccggaagaaattgacattgatcaaattgttgatgatgagggcggggaggaagaggacgatgaaaacgccatggatcacggggatggcacagcggcgaaaagtgcagacgatggacagagggaaacggcggaggcgtaa

SEQ ID NO: 77866 - DNA, 125 bp, Heterodera glycines
atggaatacgtgcttaaactccgtggattgacactcaattatgatgtgatcaacaaccaaggctttagatataaaaacagcaagtcaaacgttatgctcaaacaggagagattgaaccaattaat

SEQ ID NO: 77867 - DNA, 367 bp, Heterodera glycines
atggctgagcaatctgcatttcaatcgaaattaatgttactacggttgaagaaggttacccatttaccaattgatactgacataaaaggaaatggtgagaaggaagctgaatttgtaagagagtgcaaagagaaattagagatcttaaccaaacaaagatagctgtgaaccaagaagagtaggattgttaaactatgcttgaacaatttgtgcgacatatttctttacgaaattacagcctttaacagactttacttcaataatgatgtacttgattttggagaatatttgggataatagttcaatagacgtaatggccatcgaggattgaaaggtgtatcatgttttgatcacctacgaaaataaa

SEQ ID NO: 77868 - DNA, 714 bp, Heterodera glycines
atgctaaacatatccgcttacttctattgcagttctctctgtttccaactattcatccacagaataatgatcaatttgccaagtgttcagttgaaaagttattgatctagaaatatcacaaacaggccttatactagtcatacattcctttagtacatcaatgggtactaaaagacgctgccttctttaataatgccttagttcctttgagacatcaaataattccctcctaaacgataccagcgctgtcattaaaattttcaatgtcattacattttttctcattaattgcctctgtaaatacaaattttccagttgagaagatagttgtggtagaatttgtacctagacccttcattatatttgaaagatttatgtggttgtttttagtggatggggatattaaataaattgaggagaaaagttttactatttattgtcagtaacaccataaattgaatttaattttaggtataatttacttaattttaatcaatactattgtatttattatttttattatattttaatacaactttaatttaattttttaatttagttttatttatttttatttttatttaacatttattttcttttaattttaatcttatttttatttttattttactttttatttgaattaatttgaattttattttactttatttattattcagttaatttaaaggagttgttcagaacctctatcca

SEQ ID NO: 77869 - DNA, 2020 bp, Heterodera glycines
atggtcctacaacaaaagattaaccctacggaggaactcttggggggtgagattgtccgagatgttggagaactcctgacggattccattttcttggacaagtgatctaagcatttttcacgaatttgaatcagcctgaaaaggggcaagcgcacacctaattctatttttcaaacccatttcgaaccttcttacatcgattctgtccgtttttaagcatttttgagtttggggcctatgatcaatatttatttacctatttgacaaatgccaatgattcaggacgtggaaaagcaaagaattgccaaaattttttgggcacttctatttgatggagacactggcgggaatgtgctttttctaaattaatagtcaaaggaagctaaatctttgaatttatatacctatttttcattttgaatgacaacaaacaaagtggactttttctgactgcagagtcggcatataaaagcactcattttgcccatattttacattccttgtcaattgtgtatccgtcaacaatgcccttttcccccgtcttaaatcagcagaagggagcgccaaatgcaaacgaaatcgcgggacgtggcaacgcaaaaggagagaattccgtcagaggtggagccgagcaacattcattttgataaaagcttatttttactctttttcagtgaaccgttcagtgcaatcaaacggagacgaaggaatggaaatggttggaatgaccggtaagaatggacgaagcattgaaaccgttgaaaaacgattgacaattttcattttcagagattcgctacgaacagaagcaacaggtcgccgccgggggtctctgctgctgctgcataccgtgtggctttttcaaagaatcgtcgcacgaggaaccgccgaaaatcttcaaattcttcatgacaaaaaagaagactccacaaccgcctccagcagcagaagtcgtgcaaccgcaaaactccgttccatcgccgccaaaggcccttcctgtcgaaaactacacactcaacgcgacgtttacgaaggaagcggcgcgtggatacgcaaaaagtgaaaaaaataatgtctaaattgaatgtttcccaattattattttcagtgacttttaagaagagcaaaaagcgtgcagcaccgaccaaacagccgaaactcgtcagaatttcaattttcttcgcttttcccctcgcaaaatttccacttcttttaggtttcgtcctccagtcagcccagcgaaacttcggtgttgggtacggctttccgtatttgcagcaggtgtcgttgctccgcataaaaaacaacaaatattgtttttttttcagcaagcatcagaagccctcagtcaatggcaagccatgtcggttcgtcgaaaagcaaacacgaaatggattctccctccgtaagacactcactacccacttatcgtccgctattatatttaaaattgtttagaatccgacttcaaagggcagcgcatacttttaagaaggaaggcccatcccatttcaactgtgagagatgatcaaagaaagcgcgaagaattgccgataattattttgaagatgatgatattatatatatatatgtatgtgttcgatcaaatatgttgttccttcgaaaattaatctgtgtgtctgtttcacgtcccagcgaaaatgaatttttgcatttgtttttatgccaaaatgctaaaacatatgctgaattgtttttttttcttcatcgtcaatgaattcagtataactgctgctcctccggcggtttatcgtcgtccccctccgcccaattctctccttcgtcgtttgccctcctttccctttgctcctccatcctccgtcggattttgttccgcttcagctgatcatcattcttaatgcccttaattagcatttttactttgcctattttggactttttgtgcttaatgccgatttgcctatttttgtgcctatttcgccattttttacgccttttttaggattttcggaaaaatagttaacaaaaatgcaataaa

SEQ ID NO: 77870 - DNA, 144 bp, Heterodera glycines
ggcattaagaatgatgatcagctgaagcggaacaaaatccgacggaggatggaggagcaaagggaaaggagggcaaacgacgaaggagagaattgggcggagggggacgacgataaaccgccggaggagcagcagttatactga

SEQ ID NO: 77871 - DNA, 696 bp, Heterodera glycines
atattcggaaatgccgacaaaattttgactggaaaacttgggcgaaggaatggacaaagcgacgatgagaaagaggaggaagaggaaaagcaggaggctgaaggagaggagtttgttggagaagagaatgaggacgaagaagaagaggaggatagaatggaggcacttttggaggaattggaagggacaacggatgaaatggaagaagagggagaggaggaggagctatttgacagtgaggaggaggagaagcggacgacggaagaggaggaggcattgggaggaaagaagggcacaattttgttgagcaataataaaaccacaatgttgccaatggccaaaaattaaaaatgccaatggccaaattatggccctatttttccagcagcgactgacggcacaaccgaaaatggcaaacggaaaacgcttttcatgcactctttgcacaaagagctttgaccggccttcatgcttgaaaagacatatgctcatccacacgggcgaaaagcctttgggctaaacaaagatatagcccaaagtgtaagcgatggattaaaattttgggatttttttcacatcacttttttgtggcgcactttttcaaaaaaatttgtgaaagtggacggggtccgcgccggaaaatttcacaaattttgaatgaaatctgcatgaaaaaataagtttaactttaataaa

SEQ ID NO: 77872 - DNA, 742 bp, Heterodera glycines
atgaaaatattattattatattttcttttattttcaattttccaattaaatcaaagtgaatccgaaaataaaaaattgcaacaacaaaagtcatttgacgaaatatttggagaaaaatgggaagaaaaagaagaagaaaaacgaaatgaactcaaaaaaagagaaataattggaaaattttataaaataaaagaaaaaatcaagcaaaaaggaagaaaatattcaagaaaagaatggaataaaattgaagaaaaaatagcgaaaaaattggagacaaatcgaaagaaaatttatgaatggattaaagaattgggattaaatcaaaaaatacagaaaagctacaaaagaaaaactgatgaagaaaaattagaaattgtgcaaaaatttattggaatgtcaaatgaatataagcaaaaagaaagaaattattcgccaaaagaatggcaaaaaatttatgccgaaatttgcaagaaaattggagttagcctttcagtaattaagaaatggaagaaacaatttggaatgagtaaatttataacggagaaggaaaaattggaaaaaatgaaaatttactggaaaataaaaagagaaaatccgaaaatgagtgacaaagaaattgcaaaaatattgaaaattgatagaacgacaatttcaaaatggaagaaacaatttggagaagaattgttctaagaacagtagaagaattttttttcccgccatttttccttcaattattttacaa

SEQ ID NO: 77873 - DNA, 308 bp, Heterodera glycines
caaaagaatggcaccaaaattatgcggaaatttgtaagaaaattggagtaagcaaagggacaattatcaaatggaagaaacaatttggaatgagtaaatttataacgcagaaggaaaaattggaaaaaatgaaaatttactggaaaataaaaagagaaaatccgaaaatgagtgacaaagaaattgcaaaaatattgaaaattgatagaacgacaatttcaaaatggaagaaacaatttggagaagaattgttctaagaaagtagaagaattttttttcccgccatttttccttcaattattttacga

SEQ ID NO: 77874 - DNA, 126 bp, Heterodera glycines
atggcaccacgtgatgactccagtaacaataccaatggtcagccagtcattcaatttgatcaacaaattcgccaggaccctggactaaatgccgtttttgactttgttcgggaacagggcgcacgg

SEQ ID NO: 77875 - DNA, 803 bp, Heterodera glycines
atggcggcttcatcgtccctttttttggctgttgctttggcatgcttggtgacctcggcttacagtgagtaattatagcaaatacagagagtttggatcaataaaattaggaaataatactcttaattattgtattaattttttttttttgcaaaatgttcaaaataaaattattttaattttcaaatttaactttttaaaatgaaaaattttaagcatatgactccaaatacgtttaaattttggttgtttctaaaaaatggtgaatttttttgttgttgaaaaaaatggtattttaaataattagacagtaccctgatttagcactgaagtgttggcgcagtcatcctgattatttcacgacagcagaacagtgccttcctgggactgtcctctgcaatactgtgtactgccaggataaaggtatcaagaaagtacttaaatattccatccttttaaaagtctcttttgtggtagtgcttgctactcgagaatctcggtctcaagaaaagtctcgtgttttttatttgtctcgagtctcgacttttctcggttgcgtggtcggttgccggaaaatgcgtcagtgaaagttttaaagtcataaaaatttttcgaggtcactgatcacgaattctgtatccatttcggccaattccgaacccctggcaatacttatgctactgtactttattttaaagtacatatttgtatcactgacgcatcttccactgacgcattaagttgcgtgggtttcgttagatcaattcctccccctccaaatacatagtattttttttaataaa

SEQ ID NO: 77876 - DNA, 324 bp, Heterodera glycines
atgggaggcgatgaacagcagcaaaaacagcgattgggagaaggacaaaaaatgatcgagacaaaaaaggaggaagaaataggacaaaaggaagaggaagagaaaaaggagcaaagtgaagagaaaaaggaggaacaaagggaagagaaaagggaagaagagggagaaaaagaggagaacagagagaaggaagaaccgaaggaggaggaggagaaggaggcacaaaaggaacaatgggaagagaggcagcagaagaggcgcttcgtcaagcaaagaaaatgccaaaattcggtgccacttgcgaactgggcatttaacatttaa

SEQ ID NO: 77877 - DNA, 486 bp, Heterodera glycines
atgtccgccccgggctcattggcctgtgccaaaatgctttaccccgagacggagcagtcgcaattggtcaatgtggacgaattggagttgccagcggggtcgttctattcaacaaattgattttcccacggatgccaatgtgttcagagaagaaagcagtgccctcgagtgcatcagcaacggtgccatcatggcagtggaattggtgctggccattgtggccaatatcattgtgttcctggccctgcttgctctgctcaactctgtcctgtcctggcttggccatttggtgggccagtcagattggacttttgaggtgatcagagtggccattggcactgatcactgctgattttgtgctgtcgttttggtgtgattcctcccgttcagctgattctcggctatttgttcttcccgttggcctttgtgatgggcatcactaatcccgaggagacatttcgagtggcccaactgatgggcacaaag

SEQ ID NO: 77878 - DNA, 822 bp, Heterodera glycines
atgacttccgccggttttcttcaaattttgcgcttgctgctcgctgtttcgctcctcgtcacctgttgccatggtcagaaggagagaaagtgagttgtttcatcgctcttttttgctattgttaaatttgtaccatttttttcccaatttcaggcctaaaacgggaacgaccaaaacgagcacaacaacgacgactaccaccaccaccactacgaccactttgccaaaaatgactacgccgaacaacaccgctgcaaacggaggcggcggcagcggcaacactctcctgttcattttgttaggagttgggtgcgttttgttccgaattctgtcaactttttgttgaataaatgatgaagtctgcaataacttttgtctccctgtttcagcgtatttgtggccttggcggttgctgtggttgtggcggtcgttgtgtggcgtcggcgacaagcgcgcactgattcctacgccgtcgatggtggtgatgcagcgaagggggcgccggcggccgctggtgccaatggagcgaagaaagatgcggcaaagggcggatcatcttcatcacaaacggcgagtgtcgagaagttttcggcggtgtcgagcgtgccgtccagtctgaagtcgacgacagcggaggacaagaaatgatgccattggagggatgtcaagcgccattttgatgtaatcgtattgtcacatatatatgtatttgtgtgtatgtcaagccttttgttgttgtgattgtagccattcttgcctgtttttcgtttttatcattattctctgtgtaattatatataatttttcttcatatcaaataaa

SEQ ID NO: 77879 - DNA, 761 bp, Heterodera glycines
atggttagagttgagcgggaccgggaatttgggcaaaaccgggacctcggaggaccgggaatttgggcaaaaccgagacctcggaggaccgggaatttgggcaaaaccgagacctcggaggaccgggaatttgggcaaaaccgggacctcggaggaccgggaatttgggcaaaaccgggacctcggaggaccgggaatttgggcaaaaccgagacctcggaggaccgggaatttgggcaaaaccgagacctcggaggaccgggaatttgggcaaaaccgggacctcggaggaccgggaatttgggcaaaaccgggacctcggaggaccgggaatttgggcaaaaccgggacctcggaggaccgggaatttgggcaaaaccgggacctcggaggaccgggaatttgggcaaaaccgggacctcggaggaccgggaatttgggcaaaaccgggacctcggaggaccgggaatttgggcaaaaccgggacctcggaggaccgggaatttgggcaaaaccgggacctcggaggaccgggaatttgggcaaaaccgggacctcggaggaccgggaatttgggcaaaaccgggacctcggaggaccgggaattcccgtcccggtcccgctcaactctacttatggtgataaaaactgtttataaaaatacaataataataattttgtaaaatataatgatttttatttttttaattaaaatgtctaattccttgcaattcaaattcaaattcataaacttaatgaaa

SEQ ID NO: 77880 - DNA, 1544 bp, Heterodera glycines
atggcggctgacacggagaacgaagtgctggccgcgtgcccgcaaattgtgtttgccaagctgctctatgtggacaattgccgtttcctttttgccgaccatttggacggcgtttcggcactgcccgaggcgcaattgcgcacaaaattggccaaaattcaatggcccacccgcacattttggaacattgaccgccagagacgactcactgaaaatggtgtgagagagcgaaattttagggcattttgagtaaaaaccgaaaatttctcgaggccgagacttggcactcgagacggggactccaaaaattggggaacgatgcctaaaaaattcgagatttctcgagtctaggctcgagaccaagacctgacccgagacaagatacccaaaaaagtttactgagtctcttgacaccgggacttagtgcatgattgaggcctcaaaaaattaaagtttttccagtcttggtactatatatatagattaagacttggccaggagaggttccgacaaatttttcgagacttgtcaccaagacaagacagtactgagcaacccaatgattgtttggccccgacaataaacgctaatttgtaagacggaaaagcgccgttctcagttgaaaatcgaacagcaaatgccgaatatttgaattacttcatttctatgttttgcacaacacattcaggcaaaattgacgagcattttttgcgccaatttgtcctctcggaatatcgtggtcaaatttcgttgcaaaaatttctcgagaaacgtttcggcattgtggccgattcggacgaaatccggcacagcacattgcgctcgttgggcattggggtcagtttcagtcaggttacggtaggaagtcaatgccattataccatcaagtttagaaacttaagtttaaaaaaataaacaaaaaaatgaaaaattgtcatgaaaataccgtattttgaaataatgcacccgagggtgtttattttcaacccccctcagaagaagggcttttttcaagggggctctaattcaggggggtgtaaatcaaatttaaaaataaaatctgattactttcttagtattaaaaaaattattttttttttgcataatgacgtcacaatctcaagcttttccatatactttttcactatatttgaaaacgcattttaaaatgtacaagttatttaagtcacttgaagctgccgagctcgcctttttgttgcaacacaacaaacgccgccgcaccacactaattgcccctaatgatgatcataatgaggatgatgatgacgataattatgcggttgcaacgtttcgtttcttgttggacgaacggcatacattggaccaatttttgtgccaattttcactaatgatcgatgaaatgccgcaaacggaggcggagatggtcaaaatgccgttaatgatggaggcggtggtcatgatgatttgcagttgcaaatttcgtcaacaaaattcgacattgatgagaaatgggcccaacatttggcaaatgcattgacggaacgccgatttgccatgacggg

SEQ ID NO: 77881 - DNA, 909 bp, Heterodera glycines
atgtccccggttggcgttgccgccgtgccatcattattgtactgctcgaaattgatggcacaacgccggccatggaccaacagaatgccgtcggcgccaatttcgagccgagtgcccatcaacggctggccaatgggcaccaaattgtgcgggtatttacttgaaaaacaaaaaatattttatttgaaattgcccataattattaggcatgagaatttaggcaaaaatctcaaaagatcgccactcaaaaacgtagcctaaacatggttaaaccttagtaaatccgctgtttatcaaaataattttaaataaattacaaacattttgttttatttttcaacaaaaaactttcagattccgttacggtcttgatgttgtaactttaaaagacaagaaatttgaaaatgaacattaaacaattaaatttttaaaaataatttaactaaatttttacgagtgtcatttatgtaaaatgaatttagaattggttttgaccgggaatttacggtattttttggcaaaaagtttacaaaaaatccccatttttgtttggtttttgaaaaaaaatgagggttgaaaaataaagcacctcccccctaaattagaacccccccccccctctaaaataaagcccctcttttgagggaggttgaaaaatagagccaccggaggctctattttaggaaatacgataatatttaggtcctcaaatatttgttcacactttatgtcggcgcgttcaaagcgatgaacggatgcccagcagctgacttcggtcagtccgtacacattgaacaccgccatgggacacgtcttcgtcaagtgatttttgaccaaattcaacgggaaattgtcgccgccgatcagcagcgattggatgggcgaatttggcccgaaaatgtgccgtaa

SEQ ID NO: 77882 - DNA, 98 bp, Heterodera glycines
aggtgcgctgttttacgatccggcaaccgaccaaattgtggccgacggcacgacgacggcacaatttgaggcgcctgcggcggcagcgaacccacggc

SEQ ID NO: 77883 - DNA, 388 bp, Heterodera glycines
atgaaaaaagttataccgtatccaaccccgacctcgggggtacaaccctttgagctcaaacgtgagggcccaactgacggagtccgatcgattcatatgtattttgtagcattttttgcatttaaggcattggatggttcagtcccaaaggcatttggccacttccgttccgggtctgtaactcttcaaggattggtttccgcaaaaatattttttcggattcttcaattacagaccgagcgctatcaaatgatatatatgtcggccattttggcctcaggggcatatgattgatatttagcgaaaaaactttaaaataattgaaatataaacaaaatcaagttttttgataagtttttacgtgatttgcttcctaagcgttaataaa

SEQ ID NO: 77884 - DNA, 1345 bp, Heterodera glycines; identical to SEQ ID NO: 13930
  unsure (1)..(1345): unsure at all n locations

SEQ ID NO: 77885 - DNA, 2445 bp, Heterodera glycines; identical to SEQ ID NO: 13931
  unsure (1)..(2445): unsure at all n locations

SEQ ID NO: 77886 - DNA, 289 bp, Heterodera glycines
aaattttcgtttcatttttatttttagaaaagataaatttgacttctttacaatgactgcttcatcccgtcgtttgcaaaaggttgactaattacgggcttttaactttattaccatatgggatcagaacttgaatctcttggctgacctaaaatctcacttcagtgcttttttaaaaattctttttcatgattgaaactattcttctaccttactaaaatatttaactatatttactaacaggaactttccgaaatgcgtgggaacaattcgggcgctgttcgagttc

SEQ ID NO: 77887 - DNA, 716 bp, Heterodera glycines
atgagacacaaacggcagaaatttgcgaattcaattctacacatgaaatacggtgggacctgcacattttaccaaaaaatttaatatttttttagtgaatctgaaaccttggctcgttaaatagtcgctttgtcagaaacgaaatattgccatgagacaattagtgactgactgattaatgtagaaatgtaaaaattaacaagtcagtgacactcttaaacatccaaaacaatactttaaaaaaaataaaattatcattctccttaccactttgaacccaatcaaccatataaataatttattctcaaaaaaaaattttttttaatctggacacagataatacataagtaccgaatttttttatgtacaaaaacgaaattaagaatttgattatttgagtaacaactggccggaaatttttgagaaaaactcgaaatgggacttaccgggcactgaaaagccagggcaagaaaagacggagccagaaaaactgggatccgaaaaaccggctccgaaaagtcgggaccgtcttgaagccgggaccgaaaagtcggggccagaaaagctgtaacaaaaaagtgccggggcccgagaagtcgggatcaagacaggattttcaatcggaagttaggaaatttaaatttttacattgaaaaaatttacaaaatggtgaaaaattttccaaagcataattgctttaaaaattatttaataaa

SEQ ID NO: 77888 - DNA, 1891 bp, Heterodera glycines
gccggccaaagacgcggcaaagtcgcagctacgagacagtctcagttcggtaaagagacggacaaaacggaaaatgaacggaaaaagaaaatggcaataaatggaaaaaatggaaaaacggcaaaggcgattctttgtccttcttcgttttagtcgccggagttatttccctttttttctgttcagtcgtacgttgaacatcatctgaccctcgacgaacttcgcgacgttcaccccgattcgttcattgacgtaaccagcccggagaagagcgacggactgtccagcgaggaggccaagtcagacacactttttataccgtaccctttcgttacggtaggaagcgccttttggacggaggggcaaatgttctggcgccgcccaagcgcatttccaacttgcagttgtttgccaaacagtttctgtacaagttttggcttctcctgatgggtaattagctttttctcatccctccctaattaattcctattaattgctcattaattatttgtcaggtgccgctctgtgcaccattttcacttattttatcaatttgtaccacgggacggaagagttgctcaatttgtactgtgccttcattctgatcgtcatcgtcgtggtgatgtcgttcatgtcattttggcaggaacgcaaggccattcaggtgaaaaagagacgaacggaattggaaattcgaaattcaaatgcacaattattctcagattctttatgattttgggcttcacatgccatccaatataagtgccatttattagcaattaatccattcattaatcaactaattatttgttcactttactgctcggtgattcgagactgtgaggagaagagtctgcagccggacaatctcgtcgtgggtgacgtcataatcatacggtaagcggagaagcacagtccgtatacggtggatgaccccgggaggacggacatttcgccattgaaacaaaattaaacaaaatgtaaatgttttttcaaacagatcaggacaacaagtgcctgctgatattcggtaaggcttctctttatcttaaattatctttcattttgtatataatttaaatttccctaaattgaaattcttaagcattctccagtccacaggggtcaaaattgaatcctccgcaattaccggcgaaccccaacccgtcgactacactcacgaacccgctgctgctcacatttcgctgtttgatgcacggaatgtcgcactgaggggatgttactgtacggaaggagaagctgtgggattggtgatacgagcgggaaagtatacggtgggcaactgtaatcctcctgtctgatcacttctcacttctgctcaccaatttggttttacctctctctttgcattactttttcctgatctctcacttttttttgtccgatcattcttttctttctgttcactccttctcctctttttccctttctgatcactctttctcttcttttttcctttctgatcacttcttcttctcctctgctgctgatcattccttctcttctcagatgctcggcaatttcactcacctccaatcgaccgttaagctgaccgagactcttctgcagaaggaaattgccaagttcgtgcagttcgtttccatcgtcgccttgtcaatgggtgtcattttctttctgatcggttgcatcgttacaaagttagcagtcatttcgcttttcttactcagtcattgctcaatttttggtttgaaaatgtgctctaccatttcgtcaccggctttctcatcattatgtaaattgatggctgattgaaagaaggcaaacccaaactttcctccttcgacagagttgccaatgtcccccaggggcttccggcgatgctaatctcccaaatggcaatcatcgcaag

SEQ ID NO: 77889 - DNA, 1199 bp, Heterodera glycines
atgtctgggccaatacaaaaagggatcatcaatgcactcaaagctctggataacgccaaaagcgccacctcactcattctacaccccgacccggacctatcaaactgggaaaatgccgtcaacttggaggctcaatttgatcgcgtcgtcaaggaaatccgtacaatggaaatgcagatggacagtctacgagactcatccaacgcttggattgaacttctcgcccgcctgaccggagacgacaaagacaacggcgaaaaagaatacatcaaattcgacaaaaatgagaaaatcgccgaacgatacgacgcagcatcaaccaaacttcgggatttgcgagatctcgaagcaacactcagtgccgcagccaaactgcacagaggcagagccgacagagaagcaaaggcggatcaattggccaatccacagcaacaaccgcccatgccaccagcaatggcagcaccaatgacaatgccaacattcacagcaccgctctaccaattccagccaattcaactggataaattttttggccaaaagcgaaaatggcccgaattctacgaatccttcaaatcggcaatcggcagccaatcaatcagcaaagcgcagaagctgaacttgctccgcaatctgctgggcggagaagcgcgagaactcatagcgggcttccggctggaagacgcaaactacgagacggtccttcagctgttaaaggacacgtacggagctccggaggaacacatcagaagtcttcacttcgaactggccaatctcaagccgtgccgaagcctccgtgagaccaaagactttctgcttcaacttgagcggcttacaagggagctgaacaatgccggagaggacatcgagggaccgcaggtgttcctcatgctggagaagaagctgactccaccattcctacgaagcatcctcacaaagaaaggagaggatccggcaaactggacgacaaccaaattccgggatgtgctaaccgaagcagtccggaaagaagtccaaatccaagaagtgatgggagaatatggccatcactacgtccaaccaaaagcagaagtcgtctcagcagcacctgtacaagcaccgagaacaccaaaccaaaggtcacgaaggcctaaccaaccaatggcactgcgtgatatgacatttatcgcctcatcactggacgagggtcacagacatcaagg

SEQ ID NO: 77890 - DNA, 505 bp, Heterodera glycines
caaaagttttttacaaccacatattgccaatctaatttcttgcagattgaaagccatccattgcctgccggttctcggcacagcaaagcactaatagggtgtttgactcacttcaaaaaataattcattacccaaaagttttttacaaccacttattgccaatctaatttcttgcagatttaaagctatccattgcctgccggttctcggcacagcaaagcactaatacggtgtttgactcacttcaaaaaataattcatcacccaaaagttttttacaaccacatattgccaatctaatttcttgcagattgaaagccatccattgcctgccggttctcggcacagcaaagcactaatagggtgtttgactcacttcaaaaaataattccatacccaaaagttttttacaaccacatattgccaatctaatttcttgcagattgaaagccatccattgcctgccggttctcggcacagcaaagcactaatagggtgtttgactc

SEQ ID NO: 77891 - DNA, 610 bp, Heterodera glycines
ctttgatggcgccgacgaattgtgccgtcccatcgatggcactccgttccacgagcattgccggcactcggcggtggtcaaacataagggttttgtgccgcgccatttgcgttcgccatggcttaattcgccgctttttgacgacaatgaactgagcagcggagaaaacacgtgctacgcatgttataagggaacaaaagcgagcaatggcatggcaccgggggaagagtactgtgcttgtacggtaggcatttgatacggtaaaactgttaagctgtgccatcttttagtacaaaggtcaagtgccgaacgagaaattcggcattgtttttggcacattcaaccgaagtcggccgatttgtctgagggaattgcaaaaatttgcatttgtaaaaaataataaaaataataattgtatttaaattttattttttgtacagatgccaggctgcggtaacaaatattatgaccatgtgaagcattgtgccatggtatgccaatatcatataatttgtttatttatttatttttacaattttaggtcaatttctatgaaaatgaaccggacaaaaatcctaaagaagatcctccaaatgaacgtcgtaattaa

SEQ ID NO: 77892 - DNA, 267 bp, Heterodera glycines
agtagcgcggccgtgcgcggtggacgtgctggcgttgggactgggcaatttgggagggcagatggggagatggggaacattgggaaggaactcataaactcccgaaggaaaggccccatgggatgatcaagcccagggatcccatcccgcctttgatggacacactgggataagtggctttattccggagagactgaagatacttcgcttgaaatggcgaacattaaatacacgtgaaaaataaaatgtgatcgatcaattatcgtc

SEQ ID NO: 77893 - DNA, 934 bp, Heterodera glycines
  unsure (1)..(934): unsure at all n locations
atgagacttttcaattgtccaaatgctattggggagaaagtcgccaaacagcttttgagggcacgtaagtcgtaaaaacccagttttaattaccgtaaatactctaattatctcccccctccacgagtgggagatttttcgaaatcctcagaaaaacttttttatataaactttttataattaaagattttcgagttttatatcattgattacaggttgtccttaatcaaatcagttttttagggaaatgtaattcggagaaattgaaggttttgataattaagagattccttaagttgcaggggatgaacgttacatgattntagttcgaactacccgaaaaatttggagggcataccataattctggttaaaccaatttttttatttttacagtatccaaatcaaagcatccgttgatgggtacggtatgagtggcgcttcaccgttcacttttcccgtggtttttgaaaaccgacacttgctgggacccgattaattactacacttcaccttttttcgcgaatataacgatcacattgagtggcgagtaagtctataaaattgaaaaatgaagacattttaaagaatggaccttgactcggcaaatgatttgttttctgaactatgatcaggaatgaccagcagagtctctgatacataaaaaattttgaaaattcagtggacatggattaaggaaacgaatccataaaatggttttctcctgctgatccgagttcattttcaaaaaaaaaaatccagacaaacccataggtctttattggcaatttttgatgatggttttttaaatagatgcggcacagcaaaatacgagctaacgtggcttgacgctaatcgggttggttcaaattagagagaagaaaaaaaacactttttgaattctgagattaaaaaatccaacatttaattgaaaa

SEQ ID NO: 77894 - DNA, 3782 bp, Heterodera glycines
atggatgaaatcctgccccttcgtccagtggacttccttcaaccggaagtccaaattaactgggacacgaatggtgaagaattcgatccatcggatcgaaatctttcatcccaccaaaaattagttgccctttttcaggcaactaaagaatcccatgaatttttctgggaaatgtggcaaaaagaatacctcctccttctgcgggagagaggtaaatgggaccacaagagtccccgtcttcaggacaaaacagaaccaaaggagggaatgatcgtcctcattcatgaggagttcactccccgaaaccaatggtctttgggaaagatcattgagcttaatggccgaccaggggccattagaagcgttcagttggaactcccaattcatgggataaaatcaaagaggtatggaaccatgcctcggaaaatcattatcacccgtccggtgaataagattttcccattggaagtaggattagataatcctatagaaaatgaagaaaaatttgaagagagttcaaatgaaactcctcaaataacaaatgagaaagaaatctctcatttggaagctccaatggatgaaaaggagactgaaactcttcaattggttgatcaaccaattgaccaaaaccggcatggcatgatcactcgcagcaaagcaaagatggggacagttttgaactgtctttccatcctttttgctatgtttgcgttggtaggagcttatccaaccaatcattgcaatgaatgcaaacttctttgctttaacaaaggcgttaaagcaaagatccaaaagaaatcaataaagttgagctctgctgtgcagagaactgttacattcatgagaatgtaaagaagctcacttacgagctgcccaaggagatcctcctaaatgacttcaaatgcgaaggtcatttctggatggattcgaaacacatgttcaaaaaagacattttatgtccagcagttgatgagtgtgaactcatcgaatgctatttttgcattgaacagttagcgaatccaacctgttatccattgatttcatcaatgttagcagggggactttgcttatcattcatgagcataagctttgtggctttttccatattaaaagtcctgttttcaggactttatatggtcatttggctgataattcaatttatcaggccaataatttatttagctggcccaaatcgccctccgaaagagaggaggccaagggcaacagcttctcaaaattggacatcacgccgtgtttacagaacaatggcgtttgtggtccttatggctaactctctccaggatttgactggagcagagaccatcgcagtaatggccaaatcggaaaaatgcattaaaaatgcgacaagcatgagatgcattgtcgaaaactcggcaacgctgacgttgctgccagttggccaaacaaacactcttcttctgaaaacagaggaaggtgttctccttggctcaataaatgttgtgcttaaggctttagctttggaatgccaaagctttactaaagcctggctgcgttcatacgcaattaatgtgttggccggcaaaaggtgccctaaaatgggctcctgcgaaggaaagtattgtggagaagttcgccacaatacttcaattcctgagctaaaagatgccaacgattatcctggcaattcattttgcctggacagcacagccttttggggcaacaaatgcctcttaggcggcagtgcctgcctattttatcgttggtttgctcgaaaaaaatccaagacagtctatgaaatcatgggctgtaattcctgggaatttattgtctatacaataattcgcctggaaactttgggcgaaaaacccaagtcaactcaggtgtttctttatccaggaagaaccctgagatggaacaacatcagccttactccgatcggagtaacttttccgcccgcccccgtcttaaactcagattttgtttttgatgggagcaacatggctctaaccagagagccattaacaattgactttaactgtaaaagtcgacaagaagcaattgatttcaattgcagtcttggcgttcaggcatgcactgattgcatacctgaccattcatcaggtttagtgaactgcaattgccgttcacataaccttgaaaagttaatggaaagtcctgagaggagacttccattaaacatcaaaaattaccaactcagaaatactgggagaaaggtaattgccttgacaggatttagtcctgtccaattaaaccttcaaatagaaggtctccaaatggctttggaacttcaccaaagcctttgcacaattttgccgttgaacatatctgggtgttacagatgttcaacgggagcacaattccgttatgtgtgctcgacaaattttggcaattctcttgccgaaattaattgcgacgatggaacacatttttcaacaaaatgtgattccaatgcatcaatttaccaaacaattttggcttttgataaagccagaattgagacaaaatgccaaacaaagtgtttggctggaaacacttcttttgttctcagggggacattacactatgtccaacccgaacaaatagaagattacagtccaaatcactctgaaagagtgataaacagccaatccagttggcctaactggaattttgattggaaggcgaccctttggtctttgattggcctccaatcatcactcatcttcataatgattatttgtgtaggcattgtttgcctaacaattttcatgaaactttctcctttctatagactttggaaatttatttcctggtctataacgagaaaggggtacggtaatgtgcctatagtattggcaatactgtacttggccgggggaggatccttcggatgtggtgttgaatcacgtcctatcctctcggcagtcaaaaaattttgtgagtcatcccttgttgtggggaatgattcatcgcttccatcgaatggtggtataaaagggtggcggatttgccacccaaacacactcttcaaatcatccttccacggaatgcctattcccataagagaagggccgtacttctcggctagccgggttgtcatacccgaaaatgccgagattctcaatgatcgcctttttggcgatgagaatccccaccgggacccatggtttgaggaagactgggagccagtcttaccattggttcccgatcatgttgatcgccggctacgcgatccaagattggaagaggaggaagaagagagagcgaatgacgctcatctccggcgtgaacgtcgagttcatggccggattgagcctctgagttcgtggattgagcgataccatgaacccagatggtacgagacagcacttgaccgccgtgctgtcgaagagcgacttcgtggagaactccgcgaaggggccacattgttttcagagcatgttggtccaattcgtgacatccattttgatggattcacatgttatggaccggaaaatctctacctcttccgaggtagatcggtaatggatcattaccaacgaatgggtcacgaaatagacccattcatgccttgcctacaagaatatgtaggcttcagccctcacgaaggagggatgctcgtcgacctctacctggtcgaattggtcaacatccgaaaccgagtcggagttgcctggagagcgcctgcagtggtggaggaaccgcatcttcctccacctgaccaagcacagctaccagatggacgtttggagaatcgtcctccaagggtggctcgtcgacttcagatgaaccgacgatga

SEQ ID NO: 77895 - DNA, 633 bp, Heterodera glycines
gtaacacccagatatgttcaacggcaaaattgtgcaaaggctttggtgaagttccaaagccatttggagaccttctatttgaaggtttaattggacaggactaaatcctgtcaaggcaattacctttctcccagtatttctgagttggtaatttttgatgtttaatggaagtctcctctcaggactttccattaacttttcaaggttatgtgaacggcaattgcagttcactaaacctgatgaatggtcaggtatgcaatcagtgcatgcctgaacgccaagactgcaattgaaatcaattgcttcttgtcgacttttacagttaaagtcaattgttaatggctctctggttagagccatgttgctcccatcaaaaacaaaatctgagtttaagacgggggcgggcggaaaagttactccgatcggagtaaggctgatgttgttccatctcagggttcttcctggataaagaaacacctgagttgacttgggtttttcgcccaaagtttccaggcgaattattgtatagacaataaattcccaggaattacagcccatgatttcatagactgtcttggatttttttcgagcaaaccaacgataaaataggcaggcactgccgcctaagaggca

SEQ ID NO: 77896 - DNA, 1403 bp, Heterodera glycines
atggatttaaaatgctttatccatctcccatgtggtctagtggttaggatttgtggttttcacccacacggcccgggttcgattcccggcatgggaagagattttttcaaaaaaaattaatttaattttttttataaagctaatttcaatttttattttggcattaagatcttagtaaaataattttaaaataaaacttaaccatatataaaagtaaatctcaaagaatttttcaaaaccttaggccaaaaattcaaaaaaattcctctacccctccaacatttttaattaaattaaaaattattttatatttgaaatctttggcgaaaaaattcctcgacaccaccagcattttaaattctattaaaaattattttacatttaaaatctttgtcaaaaaaaaatttaaaaaattcctcgacaccaccaacatttttcattataataaaaattagttttagcgtatttattatttcgatattattatttaatttcatatatcaaaaatattttcccacatacatactgatgatgatgcaattttttgttttgcctttttactccgtaatgagggtgaatgaatgaatgttttgtttgtttgtgcaaaataacaacaattcccatccgtccgtcaaaacaggttttatgtaacacaattttcgtgtgccaatttcgcctcattctccgctttatagtgcacacataaatcgaaaacaaacaacaatttaacgaacaaaagaaaaacagtggaaaacggacggacggacaaatggacgacggacaaatggcggaaaatttgtgggacaaaacaattttttttaatgttaaaacacaaaatgccaacaacaacaatgtttcgaaagtgtattgatgttgatattgttaaataagaaaagaataaaaattattaaattattatttttttgtaaaatcggacaaaaagcgaaccaaaaaaatcagtttttttcaagtgccatcggcctcgtgctgggacgtttcctaaattccgccatggagtaattgaaaatcaaaaataaaaatcataaaattgcttttatgccatagaaatgacggaaataaaaaaaactatttaaaaaggaccgttcaaacttttaaaataacggaaccataagcttatttttgtcaatgcacctgatttgttcctcatttttcagcttggctgctccatcaacaaaaagcctaagggcacgactattaattgatggcctgagggggtaattaattaattggaaaactgtagtaatttacagtacaggacagggaggcgcaaattttgtgcccaaattgtaaacacaaaattgttgtttttgttcagcgaacccaaaattgccagcacactgtgtgagtgtgtgggcggggagaaaatcgagaaatacctcaca

SEQ ID NO: 77897 - DNA, 799 bp, Heterodera glycines
atgtctcctttccgcttcctgatgatgttgctggttgcgctggtcgctgccatggccatgggcagtggtgttgaggccgctgcgccagccaaaggaaaagcgccggcggcagcagcaaaagctgctccggccaagggagccaagaagccctaggcaggcaccagcagcaggtagggaggcgtgggtaagggatttacatttttggactcaacgagaatttcgaattttccccagaatttattttgaatcgtaaaacgaaatcgcactaaaatccttgaaaatttcggctccaattaaatagtttttctaattattactgggtttaagggctgttcgagagtcggattttttctccaaaaatttaagtcgaactcaaaaaagagaccaccaaaaaaaaccaaatttgtcggttcgagaattgaaaaagctcggcaacctaggcattcgctaactgttactatgctctggagtccccatgaattattgcttccgcatttttggtcactcacgaatacagtaaccatactggtcaaaaagagagataataaccgtatgggaaagattttccgtttgagaaatttcgtttttttttaatctttatttctaatttaggtgtagcagaacaactgcggacatgtgtgaagaatgatttagaatagatgaatgttgatgaaaaattcggtgattgttttttagaaagaacaaaggcattggaaattttttgggttttgcggaagtaaagaattcattcaaattcggattgattaattttgaaaataattaaggaattaattaaaaa

SEQ ID NO: 77898 - DNA, 138 bp, Heterodera glycines
atgacatataaaactgagcaaattcaaaactttcaacaatttttgcaaaaaaaagaaaaacaatggactaaggtgtgttttaatttctatgcaccctccaaatagataaaattcttacaaattcagcgttcaacataa

SEQ ID NO: 77899 - DNA, 1334 bp, Heterodera glycines
agggatcctgctgtgatcaatttgaaatgggtgcttcagatgatcagcgcggtatatttgaaaatattatattaataaaagtgtaaaaacaaattcagagattggctgccacatctgcacaggtgagagaaagagacttggttctattttggcatttttagtgaaatttttaaatttgaaatgggccaagaaaattcgaaaatccgaggtctaaaaacggcggacctagccgaaaatcggattttcggggctaaaaagcgaaaaccaacagcagacaggtgttagaaaaggcaccgaaatgagacgggtacctagatttttgcttggaaaagcacctactggagtttcttaattagaggtactaacagtgaaatttcaattttccggttacggtatggttacggtacaaataaacagtatgaaaaacggacccacggattttttaattttcagccgcttaagcctcaacacctgccgaaaaatatttatttattttaatttaaaatttgtataaatttttcttttcgctcgcagcgctttatggtggacattgtgccagaattgtctttcattttcaaatcgaatgccttcaaagcgggtgatcattgtcaacgattggaggaatttgatcggaaggtgaagcccaaaaaaaaaatattaaattggcacaaattaaattaaaattgaaacaataaaaatgcatttagcacaatgttttattcgccttagaactgttcatttctcaggaacatcagctgctcggtgaacccttctcaaatttatattcaaaaaattatataaattaaaaaaaataataattttgaattaaattttactaccgaagccctccctgaattttcaaagccaccctcttttgaagggcttgttgaaaaactaggcccccaacaggaattttttaaggaaatacgaatttttttttttttttgaaaatcaggtccataacatggacgcattggatgccgatttccgaaatttttgaaaactctaatttatgatttccaaaattttttgggccgttggaaaaatttcgtagaattttaaaaatttcacataacgatacctttaaaaagaatttctaataaaaattttgtttgcgattgaaatggggtggtcaaaaggggggcttaaaaattttgctaaaatatatttttgtttaatattttaatttaaaaaaggaaaaaatattttccatttttcagaaggcagttcctccggtagctcattttcttcaccctcatcttcttcttcctcaaaagccaaggaaaaggaagaagcgaacaacatttcacgcggatttgtacgaaaataaatga

SEQ ID NO: 77900 - DNA, 1109 bp, Heterodera glycines
atgcggttggggcgagtgcgtcccggcgcaaggccgttcgccaagcccatgttgcgcccagcactacgctttcaagtgttgcgaaaaagtaaaatggatattttatttgaactttttctcttatgccggccctcctaaataattagggtcttctttccatcaatcaaatacatttttcaagagtatttttgcggtgcttaaagaaatgccacaaaaggataaaaagctgagatgttgtctatgattttttgtcatttaaaaattttagtctttaatttctgctctaattatcagggctgcaaaaaatatgcaaataggtttcactgaatttaaaaatctgatttttgtgttcgctccgtagtgtcagaattagttgaatttttgcaggaaaatagcttactataagggctttctgcatgccaaatttcaaaggattttatacattcaaattttttatacgtatcatttcaaacaacctatttgattatattttttgcagccctgctaattatatatattataaatttagcattggaaattttcgttgaaacattatcattttttagcctccaccggtgcgtcgacagtatgaaacgtttggcatatatgtactgtaaacgcatttacttaaaggtgaaaccagcgcaactcatccaaattgatgattgcgaaaaagccgcgaaaagttgtgactgtggctggtacagctgcatcccgcacccgggccaatcgtcaactccatgttgtgctgagcactacaatttcacgtgctgcgtgaaggtaaggcggttgtttttgccattgtatagtgtttcagcgggtcggggtcgttttcgtacgggccgttttcgtaggagcccaagtttttggctataacttttttctttgtcaaccaaatccaacattgttggtatcattcgatagccctaagtgttctctattagcctgtaaaatttggaaaaatttcgttaaggtccaaaaaaattatggtcagaagagttcaaaaaaccaaattttccagctttttttggcttgaacttttttttaaattgacgaaattttttggaattttgcaggctaatagagcatctgaaagagctttcgaatga

SEQ ID NO: 77901 - DNA, 940 bp, Heterodera glycines
atggttaatttggttgactttgacaaaagttatggacagttttttgttgaaaatttccatttgatggttttttatttaatttgcccaacgaatggtgccatttgaaaacccaaaaaaatagacatatgacaatgactggatgtggaagacataatacttttttttctttatttatttttttattaaggagggcccaactcacgggataagcgtcagggagaacctggaggaaacactggcggagacggaaagaaaacggatggaaagggagggaagaatccgaaaaaagcgggaaaaggaaagggtggagatggagcatctttttcacttggtaataaaaattagattcaaaattttttatttcttcaaggctataagcttttttattctgagtttcgaatctataaagtctttgttctcgggtatcacttaacacgaatacaccatctcatacacaggtgatgccagcgtctttttgccggacggaaagcttggcgatactatgtgcaattatcatttgtccaagggcaagagcatgcttcttggaccatttgagaatgcaccttttattggcactgcttttgattttgtagtcagcgctgcactaccacaaatgccacacagtggtgatgagaatgacaaagacaaacttgctgggccaatgtgcaaagcagaccatggctgtgattggggaaaatgccatccaagcgctggcaaaacggcaagcacttgctgtgcagatggctttgtgttcatctgctgcaaggatgtaggtggagataaggacacgtgtggataaaagcacctcacttcataattttggtctttagactgtaaacttccaaagcattttttcaaaaatatttcgtgcaaatccatgggctaaacgacatcacagaaatttgtcactgaatattttcatggattttgaaataataaa

SEQ ID NO: 77902 - DNA, 764 bp, Heterodera glycines
atggccaaaattaactcgctgtccactttcagtctgttgatcgccctgatcagcgcgctggacagcgctgttgtgcgacaacagcgcgccgccgacgctgccgcatcgaaaccggaaccgaacaacgaaaagccaggtaaactaaaagactttattaaacaattaaattaatttaataatttgatttaggaactgtcgactcggacaaagcaaagccggacaaaagccagggagcggacacggaagaaaaggaccccgaaaagccaaaggaaagccaggaagtggaagaggatggaccagatccgaagaagccaaaggaaagccaggaagtggaagaggatggaccagatccggaggatccaaacaagcaggaaagccaggaggtggaagatacaggaaatgatcccgaaaacccaaaaattctgaattaggaggaagcggaaccgaaaaaatcgagtctgacagagccaaacaagctggaaaactccgaagtggaacagtcggaagcgaagccgcaagggcaagagaaacaggagacacaggatgtggaagaaccggcaccggaaggctcaaatctgccactattgaagcccgacacggatgcactggcaaacggtcagcaaatgttttggatgctgatcaaaaatctggaaattttgagtgggcctattagaaaatgcacaaaatgctctacaatatgcaaatgaccacaattccatacgattatacccactgagcagggatgggccaaattgaaaaataaa

SEQ ID NO: 77903 - DNA, 331 bp, Heterodera glycines
atgaccaaagattgcataccagggatgacatccgagcagggattcacgcaactggatttcaattacggaaatccgtcatccataaaattggttaagagtaatttatgatcagaataaaagctttgaatgattttttgaggcgtaaaacctcaatatattggccgaaatcaagagaaaaatagcaaaaatagggcaaaaaatgagcagattcagagttgcggtcgaaaagttcaatttttttaaaattaattttcaataatctcaaacttttagaagcccttttaaaataaaattaaaaagattgtcctggtttggcggtgccgaaaggcaa

SEQ ID NO: 77904 - DNA, 309 bp, Heterodera glycines
atgtcagagttagttcagtgcaaatgtcgtaaatcatttttaagtgccctccatatcagctatttttagtgtatgcaccagggatggcatgaaattccgacaattttaggagcctcggaatcaggtctgcacgcaattacggattacgggttccggattacggaaattacggggttttttgagtaacggattacgggttactgatttttgggatttttccgtaattttgttccgtaactgggacttgtggattatttttcgagacgatttcttgttaaattatttttttataaaactagttttattaaa

SEQ ID NO: 77905 - DNA, 364 bp, Heterodera glycines
atgggctttatgattgctaatgttttcatttttgttctaacgtcgtcgttctatgaccattctgtcaacgccgaacggtaaattgtttttgaagaattgcttttttaaaaagtgatttaaagtttctatctgacaaatggcacagacggaatgaagctaattcaatttcgagcttttgaaaaatgtagtgcaaaaaattgtacggatgaagccacggaagagcactttaaattaattaaaaataattatgatttttattttaaatgcatttgtttgacttgaatttgagttatttagtgatttgaaattggttgaaatggatgttacattcgtaattagtgacccccacgaccctcgtgaataa

SEQ ID NO: 77906 - DNA, 268 bp, Heterodera glycines
atgcagatagtttggattacggtatgaattttccgtaatttaatccatcactccaatttaagttgatttccattaatcattggaaaagttaattacggacggagtgagaaattgattttgcaggtcgaggccatgactattaaagcatgtaaatgaaggaaattaattgttaattcgtgacatttgtaacacagttttcagagagtctctgcctttttatgccaaacatttgacagtaaaatattccgataaaatttttcacagttca

SEQ ID NO: 77907 - DNA, 1788 bp, Heterodera glycines
atgaaaatgaggcacgcaagtgcgaagcaaagcattatgagtaagttttatatataattatgcacaataatatttatgtaaaaatgaaacgaaattttatcagtcagtttaattactttcttctattttagctgctactcaacgtgtggcaggcaacaagcaagcagattgtgatgcggaaaatcgcatttgctggaatgtatttaattgatattatattattttaaaaatttcacttttttccatttgagtggtttgcgaaaataataactaatttaaaaataaattaaaattaaacaatcaaaaaaactttttaagaaaagcccacccaagcccgataataattgccccttcaacacaacatatgtttttgtaccatcggagggatacgagaaaatgcaggtaaatttttctcaaatttctctattaaatctcacttataaacaaacaagaaacaagatttattgattggcttaaaacatatttaacgaaacagcagtagtaaatcgttagaattttctcaaaatctttctttttcaaaatttactcttttccatttaaaggaaaaagcctgcaaaaagcagaagaagaccttcaaacaaattccagccgatgatgaattggttggttttcaattagaaaattaattatataaacataattaattcatttgttaaccacaattgccaatgtttttttgccggctggaaattctgttcaatttacagtaattttaatctccgccgacagttcccgattatttcaccggcggcgcttataactaatttattaagaaaattgaattttttttttgaaaatttttaatttttatttcgggagtgattcctcctctttcccccactaaaggcggggctggatgaggtataattttaatttgactttttccttgaaagcctcattttaaaaaattaagaaattgttaaaataataatgttaaaaaaacattcatttttttattcaaaacatttacttatgtaggagaagcccgaaaatggtcagatggagaagagtgttggagtgaattcctctgctgatggtgaatttaaattcatttaaaaaatcaatgttaaaattttaaattagtcattttaaaattggaaattagctttgcatataaaataaccaaaattagcgattaaaataaaaataaataataaacatatattttaaattcgttttcagtgtcgccaaatgccacaactgattcatgatgcaattccgttcccctgaagcttaagaagaatgaagaaaagggacaacaaatccaagtcaccaaagccataatcaaatccaaatccgccataaccaaatcccgagtccgccataatcaaatcccgagtccgccataatcaaatcccgagtccgccataatcaaatcccgagtcagccataatcaaatccctgtccgccataaccaaatcccgagtccgccataatcaaatcccgagtccgccataatcaaatcccgagtcagccataatcaaatccctgtccgccataatcaaatcccgagtccgccataatcaaatcccgagtccgccataatcaaatccaaatcccccaatcatttatatcctattttaattattattttttatttattatattcagaattattttacgtttttaatttcatttgtcttttattgtaaattttttttcattcaagttttgatcttattagcttagtcattattcatttaatcaatttatgcaactaatctttctttattatatgtttttctttcggatatttttttaaataaa

SEQ ID NO: 77908 - DNA, 289 bp, Heterodera glycines
atgaattcaaaaactgctgaaaaccaaaaggttttgatttttttacacgcattttactaagagagtttagccttcgtcgctgataatgcgtttacatccttgtgcgaaatccggcggctacaaaattgttcaatcggtaaatttatttacagttaattgtttaaaatttttttaggtaaatgggcggccgaatggcaagagcaagaaaataaataggccgaaaaggaatgcaattggaaaagaaaatatcgagccaaatggagacacaaatcggtaaaaaacaaaatga

SEQ ID NO: 77909 - DNA, 557 bp, Heterodera glycines
atggcaacgcggcattttcttggttagcttggcacccagaaaaattcgtactgcaaaccccaacaacagtttgcgcatttgtggctccttggttcctatttcagcgcacggtggatacatcatgaggaattggtcaaccaacgcccgtgccgtcgtccaaccattgataattgcatttttgtcacggtttgcagcgtaccaaaactctttcaagatcgaccttgccatgatgtcggtgtaagaccttcggaatatcagaaatagaaactgctttaagacaaatattttgtcatagtatagtaaagcagcttcgtcgggtttcaatttctattccatggtttatgtctaattcgatgtcaagcaaatttggatgatactatcctaagcccataaaaaggctacaagaagccacaatttttgatcatttacgatcgtctaaacttttcaatcaaaatttcactgaaaggacgtggtcgtaaatatctaaacatattcgcatgaatatgtttaatttttaagcacattgcggcttgaactcctttgtttaaacaattaaa

SEQ ID NO: 77910 - DNA, 423 bp, Heterodera glycines
atgtctactaccgatggcgtctttacacaattttacaaggcgatgaccgtcaaaaatggcggctggagaagttcaaaatgtttgaaggagggagttggtggcaggttgtagtaacataactttccttatgagacacatatttacagccaccaccgcactcgctttttgagcagggaatgccgccacaactgtacgacacggcgtatgtgccaaagagacgtcgtgacaaaccctatgaaaagagggttggcacctttgtgtttccattggacatcatagaaccttgcaggtcattgctccccgacgccgttcacgcagacggagtgacgggccgagcagtgaagaagaggaaaaccgaagagtggaccgaaggcggagtcgcatggaaagagagagggaacgagagcaaaagcgaaaggaaat

SEQ ID NO: 77911 - DNA, 886 bp, Heterodera glycines
atggacatcgatggagagccaatggcggacactggcaaaaaatacaatccgtcggaagaaaacatagggatatttgcaggacgagaagacattgatggcataccgatggacggagcggaggaagccgcagcggaggaggacatcgacggagtgccgatggaggagggcgaagcggcgatgtccaaaagcgaggcaaccaaagtgaatttggagagcgacgatcgcttcactgttcgatcgtggaacacagtaacgcattttctttgtcaaagataattcaacgttattttaaggttgaaattgaagcgggcactactgctgatacaaatttagccgttggtggagagattggcagcggttcggacgtaaagtcaaagtgggagtccatcgacctgcacagtcgctgggaacgccacgagggagtggcacgcgaatttgtgcagcagcagcagcgggaagatgaagacggggagaactcgccgagaaggaagagacacaggtggaagagcaaaacattgttttgaattatatatgcactctttgaagactgtctcgtttgtctcccgacgacgagcattcaaagccaaatggagcaacagctgctgattctgtcacgtcatcagctgtctcaactgatgacgaggatcgccgaaggattttgcgtgaaattgaagtcaatgggtggaaaatcggcgaaatttaatgactcttgttaaggtgaaagtgatgaagctgcaggaccaattggagacggagggcgaaatgccatcctcagagattaacgcggaattggcaaaataccgacaacgacttatggcgaaattggacgaaaagacaacaaaaaccaaaggagaacggaaaaaggcaactgaacagaaggaaaacg

SEQ ID NO: 77912 - DNA, 693 bp, Heterodera glycines
agtaacgctacggcaattttcacaaattcgggcaccaaaagtgaagtggaaagcaaacggacgtcggaattttgtgccaccaaaagcggccatcggccaagttttcgtcaaaagtggaagaaggttgaatggacaccaaagaacatcccgcccaatgtggagaaccaaattatcagaaattgtgatgagaaagggcacaaaaagttcagcccaaaggaacaactgggaaagaattttgaagtgagaaagggtggtggtgaaaattcggaaaaatgtggacgaatttttcttggcaaaaaatcggaagttcaattagggacaattgaaattttggaaggtggggaggagttgaagagaaaaaggatgaatttggacagaaagaatcagcaagaaaaagtcagactaaatgtctccagtggcggatctcaatcgaattttggggaaaatggcaaaaatttgaattcgtttcgacgaaaatgtgttttctggccaatgagagcggaagcggaccagatgagccgtgaaactttgccatttgatcggggttgggtcgagttgaccgcctcgtgtccggattcaacttcgacttctgctgatcgacaaccaatgatgcgcggacttcggtgcaatggcagtgagctgatcccaaacggacctcacctttcgacagccggatgcgggatgtgcagctga

SEQ ID NO: 77913 - DNA, 98 bp, Heterodera glycines
gcctctggatccaggtctcgaggagcctggatttttcctggacctggatttttgtccaggaaatcaaggtccaggtccaacatggaatccaggtccag

SEQ ID NO: 77914 - DNA, 929 bp, Heterodera glycines
atgaacggagttggacagagaaacggggcgacatttgccaaggcattcgccctttgtgaattagcgcgtccccaggtccgtgaccaggggggggcaaagggtgcagttcccccccccccccccgaaatgaaaaaataaataattttccagtaaaaattggcaatcttaaaaacttgttcaacctattttcttaacaaagtaaatgtacaaaaatcccgggggcgcctatcggcaccgaccccacttaacctgatacaaattcctgttttttgctctctggcgctcacattttaattaacatcggagaaaaaaagctattcggttgcccctcccggaatttgtttctggctacgggcctgcgcgtcaaggtccatcttccatgtcccgggtacaattaccccagacaatttcaaaaataataatttcgaaatttttaagacaaaaactcacgggttggaaaaacagtcgttttaatggtcggtgccgcggaagaaaccattgccacaggacaaacactgacagtcggcgaagtgacgtcagacggagcgacgacggaagtgtcggacaaatgatccgaaggagtggcgacttgcgactgtgagggtttggaggagacagaaaccgaagaaagggcattttgtgggtcaaattccgacggattatttacagcttcggccaaagtggcggcggaattctgaagaccgaaatgagagtttcaaagaaggagttagggacgatcccaggatttcggctgggagattaacgacaaccctttttaatttgaagaaatgaattctacaaaatttgtggccaggggtcttggaggagatacgaaaaagaaaaatccaaatttgtaacaaaaaaaatgcttctcttaaaaattttgggtggggggggccttaaaaccaagattaatttttacatcgaca

SEQ ID NO: 77915 - DNA, 315 bp, Heterodera glycines
atgccttggcaaatgtcgccccgtttctctgtccaactccgttcattgtggacaggtccgtcctcgccacttcttcagcccacgcccattctttgcgccgtctccgacgaccgtcagcagcagcagcagcagccccaacagcgttcactttcctcctgctcccccacgcacttcggcaacaaacaatcgccgcatttgccaccggatgagcagccgaacttcattagtcgggctgagttcgaccagtacaaagaggagcaggagcgcaaattggcggcacttcaagacgagctaaaggaactccgtgataaaatg

SEQ ID NO: 77916 - DNA, 442 bp, Heterodera glycines
atgggtaagcaaaaaggcgccaaatactctaacatcttttatttgcgttccaaattaaataaaattgttattaaaaatgatctttaaacaatttactattttggattataaattttgagagaaaaaacataattattttatacattattatttttaattaataaatgtatcttaaatttaaatgtaaaattaattaagcgccatgtttctttcataattgttcaatataaaagtctcatggaattttggcattcgaaagttttacattttattttattattccctgcttcttttatggacaaatcaggctaaattttaaattaaataaaaataaaagtctaatttattttttattaaattattattgtacagtaagccatagagccaatgattttcttgctaatttgtttgtgctctcaatttaatttttctctcaaataaa

SEQ ID NO: 77917 - DNA, 2346 bp, Heterodera glycines
atgtcaaacttaaatcctggtaattggtggtattattttgagcgtcaaggcaaatcaactgctaaatgtaaagccgatggatgttcctactcaaagacattaaatgcttctctcagtacaacagttcttgcttctcatctcaaaaatcaccacccacaactttacaaacagcgtgaagattttgttcaagaagaaaagcaaaaaaccgaaaagaagggacaaagtggaataaacccattaaaaagggcttttgcaaatgcattttgtggttcaagtcaacaaattactgatgatgaagaaaaggaagagccaatttcatcaaaatcacctattttaattgggctaaatgcaaaaagtatgatctgatttttctatccgttattacattttgattaaggccagtggagcacggacggagatgcaacaattggcgcaaatcgcgcactaatggaaatgctggccactcaattactgccatttaatctcgttgacggtgttggatttcgacaattcgttggaaaattacagccaaaatacaaaattcctaggcgcaatcatttcgctcaatatgaattgccaaattgttttaaagcgatgaaagtaataatcaaatttgcgctttcataattctaaaatttagaaaatagtcactgatgaacttctgccagttaacaaaatcgctttgactgctgatgggtggacttcaaaggataatcgccattccttgatttccgttactgggcattttttggaccaaaaattcaagccaaaattttttgtattgagcacaaaaccaataagaggtaattactaaatctggagtcgaaaaaactaaatttttaggacgacacacagctgaagcaattgtgtcatttattagagaagcattaaatgattttcaaattcaagaggagaaaatttcggccttgacgcgagatacagaaaatacgatgaaaaaggttggaaaggacttgggttttgtgtcggtggattgtgcagcgcacgttttgcaattggtctgacaaaataatataattaaatattaaaaacaaaaattttagtgcattaaagagggactgaggtcaattgaagaggaagaacgtttaaaaaatcttttggaaaatgtcaaaagatttgtaagaaaagtgcgaaagtcaagagtgttgacggaacaactcgctgaactccaacaaaaggaggaagtaccaccaacagttttgattaaaaatgtcgaggtgcttttcttctatatttcactattctcataaaggcaattaatttcaggtgcgctggaatagttcatacaaaatgattgaacgttttatcagaaacagatctgcggtgaatttgctgtcaattgaacattaccagcttccaaaatttaacgctgatgattggttgcttttgtcatcaattagcgtactttcaccaatttacgaggccactgttcttttacaagatagaaattcttcttgttcaactataattccgctttttaaagtcagcattaattttttccccaatttattttaaaatttaggcaatttcattcggtttacgtgaggacaaggacaatcgtttttcaaatattaagaaaacaattgcgaatgccatcgaattgcggcttaaacaagccgaagaacaaaaaaacttagttcttgcgactattttggacccacgttttaagaccatttaccttgacagcagtcggctaaatcagtacaaagactggttgataagtgaagttgagagttaccacgcaaagacagatgtgattttattttttctatttctgtaaactatttttttaggaaattgatttacaaaatgacgtaagagactgcagtggttcaagttcgggggacattttttctcgctttgaaaaggacgcagaatttgatcaactaattaataatgtaaaaaactttatttactgctcaaatgattaatttaaggcaacatcccccagtccatctgcattggagacaagacaaaaagccgaagttgaagtgaatgaatatttacgagatcaaaaaatcaaatccagggccgatccatcattatactgggaaattaattcacaaaaatggccaatgattggtgccgttgtacggaaatttctttctccgcctgcaacaagttcagaaactgagaggcttttctcaacggccggtctaatttcagatgacttgcgaaagagtttattaccagaaaatcttgcaaaacttttgtttcttcatcacaatttgcttttaaccggtttctcaattgaatgattttgcttttataaatttgctttttaatatgcttttaaattgctttaaaagatttataggattttttaaa

SEQ ID NO: 77918 - DNA, 666 bp, Heterodera glycines
atggagcacgacttgaccagctattcggcaaccaaccgcggacaaacacgcacagtgatggaacttttggagttgttggacaaatttcccggcagcattcgcatcatttccttgtatgccggtcaagcggcacaaattggaatcgagctgaaagagcgtggtctcgagtccaaaattgcatcaatggcgtctgatgcaatgcaggcgcacgatgccgacctcaccatcattatagctacagtctcgagacacttggaccgattggcagctatctaaccatgctaaggaccgtaaaagcgaattttgggtgattcccagagggttaatgttgcattaagtcggggcaaacatggaatgatcgtgataggaaatctgcttcagcttggtaacagtgaaatttggtctagattcttggagaaggctctcaattcacagtcgtgacttccccagaggtcattagatcattgaaaaccccaaaatcaaggtatatgcgcggtgtgctggttgacaactttggtgaaattccgtcagtgggcaatccgtcagtgaaggacaatccgtcaataatggacaatccgtcagtggataatccgtcagttggacaattcgtcagcaaattttttttgagcaatgatcaaaaatctacaaaaatgattgttaaattta

SEQ ID NO: 77919 - DNA, 1662 bp, Heterodera glycines
atgctcagagagatggaagaggagcgcgaagaggacgaagcgcaagagattgtgctggtggaggagggcacggctcggagacggaggcgccgcaggcaggcacagacggggcacgactttccgcacaaccaatgggatccggcacgaccggtgtcattcgtattcgatgccaaaatcggtgggtaaaccgatgaaaaatgcaaaacggaaacaaattaagaaaaatgaatcaattaattttaattgggggaaatactttaaaatgtttaatgtgccaaaatgaaagggaattcggcacgaaaagccgtgagacaagctgttcgcttttggactgaccacacttgcctaactttcgtcgaaaacggcggcggttttccgcgcgtgcgcattttttccggcggcggatgcttcaggcggagaaactaattaatttcaaaaaattttttttataaattttatcaaatggaattattaaaattcttttcaatttcagtcaagtgggaaaagtttttcaccaaagagagcaagtaagtgagcacaaaaagtatttattgtttaaagttttaattcgcttgaaaggttatttcgctgggccgtggctgtgagcaggtgattttgtggaagaaacgaaacacaatttgctgctgatcagagcagtgatcaagcccttgtgcctgattctgagctgatcaaaggattgatcaatgctttatctctgaattttatttttctcacgcgcatttctgatcagcgatcaattcacctgtctcatttctttggtcactttcattgtcttttagtttggaattgcggctcatgagcttggccatacgcttggctttttccatggccaagcccgtgccgaccgtgaccaatttgtgaacattgtctattccaacttaaggcaaatttggctgaaaattcctcggtcactttttcacatttaaagcccacaaatggcgggacaattcgtcaaacaaagcaacgaaaacaacgacaattttggcgtaaaatatgactacggaagtgtaagagggaaaagcgaattcaaagcgaatttaattgatcagataatgcattattcggacacggactcggccacgagtcgagtgacaatgttggccaaggaagtgagtgaaagaggcggacattttcataatggatgagtcatgcccatttgtcactcgcctttccctaattaccctaattaccctcattaattattaattaattacctcccgccttccaattttggccgcctaccaacacacaatgggcaacaatgtgtcgccctcttttctcgacgttttggaggtttggcagagtggccaaatgtgcaaaatgaccaattttcagatgaatctctactacaagtgcacggacaaatgcaaactaagcggggcccagtgccaaaatggcggatatcggtgggaaaagtgccaaattaatgccgaaatacccctctcctcgcccgttccgcttgacagtcatccgcgcaactgttccaagtgcttgtgcccctccggcttcggtgcctttgactgttccggccgcggaccacctgaaaatggcgcaccagcggactgcggagagaccgtacaggtgaaggagaaaccatcggcaaaaggcaagggggtggctgggcaacatttaggcccatga

SEQ ID NO: 77920 - DNA, 1167 bp, Heterodera glycines
atgcagcggatttttggatcttcaaaaccaaaagctccgccacccaatctcgctgatgcgattacaactattgatgctcgtggcgaatctgtcgaaaagaaaatagagaaattggacggtgaattggtgaaattgcgtgttcaactcaaaaagatgagagatggaccagcaaagaatatggtcacgcaaaaggcattcaggtaaaatctgagcaaaagtttatgagagtcattttcattttagaattatgaagcagaaaaggatctttgagaatcaacgcgaccaactcgccgcacaatcgtttaatatggagcagagcaatttcgcaattcagggcatgaaagacaaccaagtaagttacctagatgcaatttcaaaactccgttttgaaaactaggactacctattaaaaaaaagggaaaacatcggtaccttttcaatgcaacatttagtatttttattctttttttatttcaccggtttttaggtgaccgtcgccgcaatgaaagagggtctcaaatcgatgaaacaggaatacaaaaagctggacattgacaagatcgatactcttcaggatgaaatggaagaaatgctcgagatgaattctgagattcaggatgcactttctcgccaatatgacactcccgacgtgagtttttttaaaatttataaatggagaaaaatatttctaaaagatttttcttggctttaattttttataaattataaaacaaaaaataacaaaagacatgtgaggaggggcttggcaggaatacttgacagtttcaacaggcatcggaaaaattgacaaaattttggtctctttccctcttaaacacacacattcaatacggacgggggtaaacgtcggttgtactccttgcaaagtagggataattctaaagtttttatattgaagatcgatgaagctgaacttgaggctgagcttgaggcattgggcgacgacctgcaattcgatgcggacacaagttatcttgacgaagcaatcagtgcccccagcgtgccgactcgtgacccggccagcgcttctgtgactatctttatttatttattttcatttgcttttttctcttcaattttcagactgtcactgatcagggagttgccgttgatgaatttggtcttccgaaaattccagcgcagtga

SEQ ID NO: 77921 - DNA, 1148 bp, Heterodera glycines
atgttcatttatttgggcataacaaagaaaatattatgcagtgaccgaacgtggagaaggtcaatggtattttatgcaaatgtcaaaagagacaaatcagaaagggattaaaacatatgtttatacttttgcactaattgtgtttgattctcatatttttgctggttttcaacgacaatttttcagtaaaaggcatttaatcgttaaaattcaaatttcaataatattttttgaaatgggatttgtccttttttgcctttaacaatattttcgatttgaactcttcctttggtcacaatgcttcttcaattcgcctttcgataattttaaattattcgtttttcaaaggctttctttaaatttaaattattctaagtttgattaattgcgaacattaaaaatttatgtaaaaaatacgatggaattggctgatttggcacataaatttcagaaatatcatttttccgtcatttgaatgactgaaaaataaaatttacatttaatttggtatgtttaatttgcgtttttttaatttaaattaaaaatgattgccctgaattaaaatttatttgaacagcttcactgtaattatgctgaattttttttttttttttgctattttggtaatgaaaaccatccaatcttttggtaagtccaaaaattaaaatttaattggaatttgtctattttactatttttttaataaataattaatttaattaattaatgttttgccatttgcaaatgtccataatgagaatcatttgccatttttttatgttccgccattttttgctgtacaattgtcggcacatccatcagcttcaaaagggaaacaaggtgtcattaattaattaactaagtataattattctgttaataaataattaattaattaattacttttctatctttattaccccttttaagctttatgccattgttcgcgtgaagcgctttgagccgtcacaattggcgggctcacaacttggccagcaaatggcatccaaaatgggccaacagatggccacacatattagacaacaattggccacaaaagcgggacaacaaatggctgccgaaatgggcaaaaaaattggcacaaatttgggcaaaaatatagtgaaaaaaggcacttaaaattgaaa

SEQ ID NO: 77922 - DNA, 2173 bp, Heterodera glycines
atgaccaaaatgtacttgacaataaacaccatagagacaatagtcaaattgaggtgaaactgtaaattttgtgccaattaaaaaaaaaatttaaaaggaggattacgatagtgttgtgagagagcgcaatggttaccgtaaccgtcgcagaaaatcgcttaaaaatcggagaaataaaaatttacgtccaaaaaagcgacgaaaacctcgaaaaagccgcagaagaaacggaagtggagaagaagaaaaatacaacgaagaaaagaaaagaaacagaaaaaagagaggacaaaagcagaaaaaggaaaagaaagggtaaaataataaataataattaaaataaataaattaattaaggaggaaaaatgtatggataaataaataattaggaagaatttttcagcagaactcatcggaaagctcggcatggcaccaatacagatgaagaaagcgatggcacagaagagggagaaaacagtggaagagaaaagaacttgaacaatttacggaataaaaaacggtgagtcgaaaaggtcaataaatactaatcattggttaaaataaataataattacgaataataaattaaattagaaaccatttagagatgaagaggaggaggaagaaacggaaggggaaaaggaagaggatggtgatgaaaatgatgaggaagatgatgaaagtgatgaggaggaggaagatgatgaggaggaggagcatcgccggaagcgtcggccaccagccctttccgacaaagaggaggacaacaggtcatttgatgagtttaattggtgggagggaatgaaatagcattgggaaatgaccagaaaacaaatggactaattgatttaagcatttaaatgaaaccaaaattattaatgcgaattgcatgaatgtttaaattttttggttttagtgcgccggcaagtgccccaaatgctgacaaaagcgaagtgatggacaatgaatttgaggaggacaaaagtggaggagaagaggaggaggaagaggtgggaagaaaagtggaaaacaaattaattagaagtaattttcaatttagagccccaaaagaaaaggcaaacgtcgacaatcgtccaaaaacggtaaatttgttggagaatgaggaaaggttttgtagggataagttgcttaagataattcgggtggtgaatcgaagccggcggaagaagaagaggaggaggaggaggaagacgaggatgaagaggaagaggaagaagtgggaaacattaaaaataattaaaaaataatttgaaaatttagcgccccaaaaggaaaggcaaacggcgaccatcgtccaaaaaaggtaaatttggagtgaaaaacaaaacaaaaagaccgtcgcggaggaagatcaattataaatatttgataagcatttgaataaatcttgacacaaaaagagcaaatcccggcagtcgcgcgggaccccgaaaaaaagcctcgggattgaccgggatttggacgggatcccaactcggttatccctccggtctcagttgtccggtttctattgtacatgtgcttaagatgattcgggtggcgaatcgaagccggcggaagaagaggaaaaagaagaggaggaggaagaggaggaaagtgaagagcaattcaaaagcatttaaattatttattaatttatttgatttatttaatcaaaatttattttcagagcccaaaaaggaaaagcaaaaagaaaacgacggaggaaggtgcatactgtaacaattgccctactgtatgcatttaattttgtattgtaaatcgaagattcgaacggagaatcggagccagaagaagaacaatcggaagaagaagaggaggaggtggacaagaaattaaataattaagtaatttaactttatgtaattaaatttaattgtttagagtctaaaaaggaaaagcaaaaagaaagcgtcagcggcggaaggtgaactttatctattttagctataattaatatatattatgttttttgataagatgattcgaatggcgaatcggggccagaagaggaaccatcggaagaagaggaggaggaagaggaggaggaggtgaaaagtgtgacaattaggggttaattgaattttaattaattgtttagagcgaggaaaggaaaagcaaaaagagaccgccggacaaaggtaattttgaa

SEQ ID NO: 77923 - DNA, 254 bp, Heterodera glycines
ctttaaaaaatttatcaatcatttaaaaaataaaatcttgatgcgttttttaaaataatttttggttcgaaatatctattttaatctgatttcacggttcctcattttccacttggtcttcttgagaataatccgaaggctttccttaagttagcgggcccctcccaatagccattgagcaaaaacatccaataaagagaaggcatccaatagcgcttcatcagataggcaaatctgaattaaaaaaaaaaaaa

SEQ ID NO: 77924 - DNA, 1257 bp, Heterodera glycines
atgttcaattgtcaaatttgcatcagtgagtgcgttgccaatgcctccaattcgccggtaagtttccgctgtcagttggccatttttgcttggtcttttagcgattttcttcgtttgatcagttggaagcgcatcttgcggctgatcacttcagtctgttgccctatgagtgcgaacattgccaattcgcaaagtttcccaccgaattcgctgtgatgaaacacaatgaattggaccacgacagtcgtaattattctgtaatttttggcttcaatcgctcaataattaacttttgtttagtttcggtgtcgaattacgccagaagtgaaggaaaaacgcagcaaaatgcgagaatttttgaccagggaaaaacatttaaatgagaggtgaggaaacgaaaattgtggggggagggaggggctttgaggcgagaattacgctttttaaataagtcagccccataaaacttcagtaattttcaaagtttcagagcggaaaaagaacagttcgcttcttcaccaatggaagtggaaaagaagcgaaaagcaaaagatgggcagacaaaaaatgcccaaatcaaaggcaatgacggaaaggaggaggaaaagccaaagcgtaggcaatgccaagcaaacggcgaaccttatgaatcagcaaaaaaataaattaaataaattgcccttgcgcattgttgttcctttcctcaatgtgtttggattatggttttggtcaagattaattttaggaatgtgccttcgtccgcgtccattcaattctgatggtaatacgacagcgaagaatttcgaaagtgcgaatgaaacgaccgtcgtttcatttggaggggaagaggaggaggacgacgaggatgaggacatggagggcgaggggagcagtctaacggacgagctgaaggaacaacaggcaattggagacggacagaccgaaaaccgaaccaaaattcaggccaacgtccaagagattctcagggccactgcggcggcggtgtcccaatttggtggacctaaaaagcaaatcattcccccgacaaataagcgacgatctgccaacaatgtttgtccctttgctcgccaatttatgtgcgctttccttcccgttcagagttattctcttcgtcccaaccgcttcaaaccgtacgctttgcttcacaatggtattcccattctcactgattgtgagaatgacgtcctccaaaatgctgaagactcgcccgaaatggaaccatcgccggtcaattaa

SEQ ID NO: 77925 - DNA, 526 bp, Heterodera glycines
attgaaggtcttccatccgggacagaatctgttcttctttctccttccatcagttccatttattttcccgatggagcaaaaaagacattagaagagctcaaaaatttttcaaccggcgaggcagtttttacctttccatcaacgcatataaaatgcgctggagctccactgaagatttgctttttggcggaagaagtatgagtaattactgtcttttaaaggggaaaatgaattgaatttcagattttacgaaggaagggagtccggtcgaattgttccgtgcattattacaccgcacttggtcggatattcggcgtaccaaagtaaagcgacgaacaacacttatcagcaaatcaaccaaatgcctttcagatatgccgcttcccttgagcgcattgtgaaagaacgtggggttgggcttcacccgcgccacaatttagtgaaagtgaaccccgaaaaacacgaggcggagttcgaattgctcgacgaaaaagggaaaggcacggggcaacggcaaattgtcgag

SEQ ID NO: 77926 - DNA, 2450 bp, Heterodera glycines
atggcactgctgatcatgctcatcagcattgtcggaacgttcggctgccaaccatccattcgagcatcgggaatggacccgaaccttccatttcgagagggcccaagagttccatgcaccacggagtgtgcagaacgaggagtcacaaatgtgagtgggcgggaatttaacaaaatcgagattcgttgcgatgacggatgctgggcaacaatgccaaagtcgacggatgtgaactacggactgccagcgaaaaagctgatgcatggctatccttgccatgacaaatcctggtgggggagcaatgcccctttcaacacaacgaggcgcaatgccaatcggaaaacgggttcgaaaacccgttgctacaattcatggacacacgcttcggagcttcaactgtcaaggggcgccgcgggcaatgtcgccaattttttcattggcgacgagaaggcgggtcaatccccgcctattgcacaaatgaacgggacgggactcaatcgaagcaaaaagaatgagggatgttcttggagaagatcggggcgagtcccgattcatcaattcattcaaaattgatcattcctaatttttgccccttttccatccaatttctcatatgcatttctccatttcgtaccattcacatttgtccgttcctttgtcccatttttgccacatcgcatcccttcacaattcaaatcttttctcatcggttggctcatcttcggccaactttgtgctcagatttcctttcacaatttctcactttttacatctgccaattcacattcaatttttgtgcgcccatttcctttgttcgcaattcgcttctagaattttctgtccattttttgtctctctcacaatttgtccacgtgcatggccttttgcccgcccccttcgaaaattgtctatttaagcgcccccggccaaggggtcgctctcttctcttccttccactcccctccgcttcatattcggtctgcctgtgaccactcttcctccttttcttccgcttcattctttgccaagggatctgtcccttcgcttcatattcggtctgcctgtgaccaattcctccaattcccccgtcccatcgcccaattcgatcaattcgtcgcttttattcattattcgttttgctttaataaattcgtgctgaaacggcttggaggactcggaaaggagggaaaagcaccctccacactccatcacattcggcaaattctcgtgcggggccaaacggaggcgcccattcacgtcttgaccccctccctttcctggcagccctcgtcgttctcccccaatcctcccgatcccagttcctttccctttggcattggagaatccgggagttggcccggagcgtcagcgaatttcaagcagttcagactcccgcagccggagtctcgcggatcggtgtcagtctcccgccagccggagcagccgtagggacggggcgaattcccgtcgtcgacgaaaccaagcagggcagagaaggaaggaagagccgagcggtgccaaaccgtccaccgaagggcaggcccgttcgtcgccgctaatcccaccagccggagaagcgcgcatcgccggagtcagtctcccgccagccggagcatccacaggaggagacgggagtcgaaacccgtgctcatcaagtcgagagcgaacgtcacgaagttcgagcagttcagattcccgcagccggagtctcgcggttcggtctcagtctcccgccagccggagcatccgccgcaggaaacgggagtcaaaacccgtttcatcgagtcaagagcgaagagcaactctcgcccgttcggagcagctcaaagggtcggacaagcccccttcacaaccaatcttgtcgagcaactcccgcccgttcggagctgctcaaaggggtccgacaagcccttcaccaaaatcttgtcggtggtgccgttaagcaagcagcaaatcgctgtataacatccaacagtaccagttcaattttgtcacccctcccccctcccattctcgtccccctttggcgctgatcggatcggtcagcagcatcagacccatcaggacgaacggcgaaagagggggccattccctttacggcacagcgagcggagtgagcagaggaaaaagggacgagagcggtgaagaggagcgggaaccaatcccgcctcagctgggccaagccacacacttggcccgcccgagtaaaagattggcgacaaactggtgccgctaacagggggcaactgcagccaccaacaatcggtctacgagcgaccaatcggtctacgagcgaccaacgagcacgaattcgagaagctaacggcaaactggtgccgttagcagggggcaactgcagccaccaacaatcggtctacgagcgaccaatcggtctacgagcgaccaacgagcacgaattcgagaagctaacggcaaactggtgccgttag

SEQ ID NO: 77927 - DNA, 609 bp, Heterodera glycines
atggaagaccttagaatgaggcataaacttcagttacattatttggacacaatcgttgaagaattggagtaagaaaagaaatgaataattaaaattagattttacaaattcattttaggaggcataaaattgagtggaaaattgtccggcgtcggcagtattcggatgcacttgctcaatgggctgatttaatcatttccgcgggtggcgatggcacttttctcaccgcgtccaaacgaatttcggatggccggaagccggtgattggcatcaacacggaccctgtcgggtattctttttcggttttgattttaaattcaataaaaacttatagatcctttcagttcctttacttttcttgtaaacgagtttttaatcaactgctgtaaaatgtttgtattttcttaggtccgagggttttctttgtcttacgggcaaatcgcgtcggccggcggacgaagtgatcagacaatttctcgaggagagttcaaaaccgaacttccaatggatgcatcgccagcgcatccgggtgaccattttgaaatcgatgggagcccacgacgaacggtcactttcctcctcatccatcaaccagcaggtgaactcacg

SEQ ID NO: 77928 - DNA, 1100 bp, Heterodera glycines
atggcacagtgtgagcaaatggaattgccaaggaaagattcgatttgtgatgaccagggagaccaaacggatgacgacgaggtgtcgaacatgtccaaaaaatcaaaattcaggtaattgaaaattgttgggtgtttgatgtaatacgtgtttgtgctttattttagttctgacgatgaagaacaattgaacgaaagagccgacgcttacataaatggggaaacttcgcacagattggcactgaacgaagtattcatcggtgaaagccatgcggcccgagtcagctattacgatgttcaggtaattttccaaaattaattgttaaaataaaatttaaaaaacttagaaggcaatgaaataagcgaaaggcttttattttgcattaccattttatagattctgtttcagtttacataatcaaaattaatgactgcttaaaactgtgcaaagccataataggaaagaggctcttactgattgtgaaaataggccattattaaagcaaaattcgatttgttttcagggggggggagcacactcattgtcgataaataggacggttttcggacaagtaatttgatgaaaatgccaagggcatacacattaaaaagcagaaagaaccatctccaccccttttcaggttgacaacggaccactgacaaagcagaaaagttcggggatgacaatttgtaccggcaccggctcaacttcttggtctgcgattttacgtaaattatttcaaaaaactccgttcataaacacaggcattacaacataaatcggctgaccgaacaaactttgggtgaaattttcacggagatgtcactgatgggcatttcactggacagagaagtggacaatgaaatggtcgaggagatttgtcgccattttaatgccaaactcaaattcggccctgagcagaacagttcggactttatcatatttattattactctaattggatcaatcgctcaatttgttgctaaatgggttcgtttatcccattttcagagatggcgttcagtgttcgtgaccccgtgttcaatgccactttcccaaagacacttatccgtggatttgctcacaaaatttttttaaag

SEQ ID NO: 77929 - DNA, 155 bp, Heterodera glycines
atgattgcacgtaattgccgaaaaaattcgagaccaatttccgaatgttgaccgactaattgcaagacgaaagccgtctttgtcaaagcgccttaccgagtcaaaaaatttggaaatgtatctcatatgcaatttcaaccaataaatttgaagaa

SEQ ID NO: 77930 - DNA, 315 bp, Heterodera glycines
atggcattgaaatgccataatttgttttttaaatgtcatctctggcactttgagggccttttggaagtggcatacggacttggctatgtgcttgggcctccgttgggcagcgctttgtttgaattcggtggcttcggactgccgctgtactcagttggcctttcattcgttgtcgtgctcgtcccgtccatcattttgttctctaatcgacggcggcattatctctccattggcatgtgtttatccataattatgggatgggaaggccaaaaaatgcaaggatatgaaaatctggcgacaaaaatgccgggataa

SEQ ID NO: 77931 - DNA, 300 bp, Heterodera glycines
atggcacgggtgcctttgccatgccaattaacggaggcattccatgccgaggcggaggcgaaatcggagagaaaagcagtgattttggctgcgaaagaggcggctgagggaacaaaggctcggagtcgaggagagaagcgggctgagagccgttggagtggcaggcactgccgtggatttggccaacgattggcctcaatcgcgtggggatgggccgttggatctgtgagtgatcttttcatctttggacttccgactttctttgtgctccttggcattctcatcggcactttggcttga

SEQ ID NO: 77932 - DNA, 790 bp, Heterodera glycines
  unsure (1)..(790): unsure at all n locations
gtnncatgaggaaatgggaccntgaaaccaaaacaaaaagccattcattcgtacagaaaattgcggcattgagcagcacttccaactgcaaccctttgtttttccaacggagtgcagctgcgctggagttgcaccattggctggacgagtgtatggagcagtaccgcctgttggagaaggagcgcaagaagacggaggccgagttggcccgtcaccacctgggcaagcggatcagttcggccaattctcttccaatccctcggcttccgcccgccccttcgcgcgtcgaccgcctcatcgtcgactttttccgtgagcacgcacgcgtggtaacgcttctcgccaaaatggaacagttgagaggcgctccgatgtgcgaagaagtgcaccgtgtgagtggcgtttgcccgcggcgtttccttcactccgtccctccctcagatccatcgccaattcctcgactcaattcgcatgctccagcagagtcgtctcaacgaacgcacggccattctgcagcaattgcgcggcgaagtcggccgatactccgaggacagaggcgagcacaatccaacggggtgaagaagttcaaaatgtgttttcagaaactgccaatctgaccaatgcgttggtttgcgtgtgtaaggccgtgttgcgcagtcgcagtgccaattggtgctctttggcgtggacagtcgaggcgaacggtgccgagcagcaggtgcagttgcagcggattgtggccagcggctttgagttggcaccgccggagattaaacttcggcccatttga

SEQ ID NO: 77933 - DNA, 2028 bp, Heterodera glycines; identical to SEQ ID NO: 13975

SEQ ID NO: 77934 - DNA, 276 bp, Heterodera glycines
atggccaactcggcacttaagccgtcgagagaaagggtcaaaagggagtgggagagacggagacgcacttggccccaatggccaggacaaatgatcaatggaggaagtgaagaggacgaggaggagagagaagaggaggagagagatgggggggaagagagagaggaagaggagagagaggacagagagagggactcattcgacggagtggagccgtcgaagagaaagtcgaaatggacacgccatttgaccagatggatggacagtgacagctga

SEQ ID NO: 77935 - DNA, 897 bp, Heterodera glycines
gtttccggtgttgtgctcttcagttttgctttgtggcttcaatttgaccctgcccgtgaatttcttctccgtctcgtccacttctccgagtccactccctttttcgagatcgctgtttacttaatgttgggcacatcgctcttcatttttattgccgtcgggattggattctcgggaatttggaagttggagcggtgtttgcttagcggagtgatttttttattgcataattaacaattgccataaatttgagttaattgtgttgcctttgctgagaagttgggctttgataacactaaaatcactcttctgaattcagttctctgtgcttcttctgctgttgatacattgcaaattgctcatcctttttcttttggttgcctatcgttttaaggtgactttgtctctttgaatctcaatttttggtttttagttccctgatgacactgtaatgactgagtacctcagtaaaatggcccaacatcactaccatcgcgacaaatgggtgaactcggcaattcacacaaatgcattcccacaaaatgttattttaggcgacacctctgatggattccatccaattctatgtaaattttgtttatccatttcaaagcatattttcatgcacagcacaaatgttgcggaggaaacggtgcgcaagactattcggagtcattttggtacaaagcgaacgcccaaatgggaatgccaacaaacggtgagttcttaacatttactagagttgtttttttcttcagttctcacttattttaagtgccttattcttgctgtctccaggcgcaggacgcccgggcttggcacttgcagcccattgactcgatgtgcaatcagtacaaatacggaagtcgcccattcaacgactcagtgaattggacg

SEQ ID NO: 77936 - DNA, 978 bp, Heterodera glycines
atgaccgtcacatccaacaccgaattccgactcatcgaatgtgtgccaatccttgaggaagttgctcgtgaatttggctgtattacgccactaccaaaccttgggtatgtttctttcgttttacaacactaactccagcatacagtagccatcgtgactatcgtgtaagcggatgtatgatgattcgcacgctgacatcgttgaatcgactctacattttcgatgctgaagactgtattgaggttaatggaaaatatgtttcatattttattgctattttaggtgaagggtttttaaggtaagaggacggcacgagctaaaaagtggtcaacgaatattatgaaaaatatgatggactaaacggatttgctgaatttattcggaattgggcctttacttttttctgtttccatgcctttgatgatgatgacacatctgatgaagactaatttcgttaatatttattctatgctctttgttacaaaccgataaacaaatccatcagggttatttgaacgattcaaaatttgcataatattttcgaaacccaatccgacggacataaaataaacgaaagtaattacatagtgaccacaaacattggacaacaccgattgaaaccgcctcttattatagtaaatctttttaaaattatcggataaatattttttgatcaagctgataggcatctctccataagagtcaaagaagtaggcaacagcaggagactgtgcccatatcgcacaccaatgagttcccggcatacctgcagggtcctgaatggaaatacgatgagcgaatgaagcaaaaaataagcgtaccaggttaacaatcagactgcacggaaatcttgaacaccttggcaacccatctgcgggatatgtgccgctgaagtaccttttcgtcgcaggattctcaaagagaagtctgtcgatgaatctgttgtccattacgaattcttctctctcgcaggaataa

SEQ ID NO: 77937 - DNA, 278 bp, Heterodera glycines
tacgctcaaatgcttctcaacaattttagcgcatccaattccttctacaatcgcctttatacatcccattatgaacgctaaaattatcagagtgccgaaaatcgcatgtgatctaagcctagcaaaaaatggtgtaagtaaaaatcgtaattacgctcaaaaagcttctcaaacaattttaacgcttccaattccttctacaatcgcctttatacatcccattatgagcgctaaaattatcagagtgccgaaaatcgcatgtgatctaagcctagaaa

SEQ ID NO: 77938 - DNA, 1008 bp, Heterodera glycines
atgtctggaagtgaaccagtgtctaatgagatcctaaacaagtcagtaataacagttgacagagaagaatggcaaatttttaaaattttataactaatattatcgggagaagtgccatttttattcggaagttttttcagaagattttgggtctcgatgatgttaaaatttatatccgatataaagcattgatcaatttctataatattacccaagcatggattgcttgggtcggtttcactattattaaatgaattggcaaataaggtggcaaataattcacatttctcagcactgttatgatagcatttattttcataaattagattaggtatttcaaagggattgacattgaatttttgtatatatttataaattgaatttcttccctttgaaatagcctttttctcaatttggctatggtatttatttgtttgtatttttatatgtaaagaaatgctatcgtatagtgcttttttggatgggtcagttttagctagcctgaataatttagccttatcacatcgaatactgcaataacacccttctataaataatttatgtaataaaataataaatttggtaaaataccaaatatttaaagcactttttgcgctgactacggaaacactcgaattggtaacaaacaggaccgattggagtccgcttcacattggcaaataggcagactaatggcacgaaactgatcagctcgttgttcaattcagccggcaggagtcgacgaagttttggctttttctcactcattggaaggttcaaaggattagagcgtttcatttttccagaaattgaattaagaatgatttcgatttcttgctgggaataattttggtgcgcaagtgggcgtggccaaagtgcgcgtatcgtacaccctgtcattttccagattcattttaaaaattttgcactttttttttgcacatctgctgtttttctgcgctttatgggcaccgtattatttaattgggaatttagggaaccgtataa

SEQ ID NO: 77939 - DNA, 3226 bp, Heterodera glycines
gaccgcttgcagaagcctgacagcaggtgatgctggtagcagccgttgttggtgaattttttgttgcactctttacactttttgatgaagccggcagatgatggacatggaaacagcggtccaacacgtgagcacagcatacagcgcgctttacatgttttgttgtgtgttgacattttgtcgtatggccgttcacactccaaacagtacggttttccgaacaaaccgccctgcttctgcacaccatcgaaatggtcttcattgaagtacaacagcagcggagtgtcgtaggtgttgtcaatgtacttgtagattggtttatactgtcccaacgatccaaagatgaacacagcaaagcggtgttgtcgctgcgcgttgttccagtagtcaacgacttgaggcacaaatgtgtccgcgtcgtagccaaccaaatccattggtgcattaacctgctgcattagctgaactgcatcatgtgaagttgtccctgctgtcattttctgtcgttcacatagtcgaaaaacttccagcgaggccaattgcacgttttggcgaccattgttgcctgcagcgcgtagaacaggcagtattggttgtcgttattacgaattttaatcaggcattggtcgttaattcggtgatggacagccgttttgatagggcgacgagctcccccgttgactcgacgtttggatggtagtccattacggtcgagagtcgtgatggtgacggtaaatggctccccccataatgacacatttttctgttgtttggactgcgccacttttttgaactggttgagaatggtgtcgagagtgttgttagtcatctgtcgcactggagttgggatgtcgccgccttccaacataggactgctgatcatacagccgaggtgtgtaggttcgatgttgcgctcacgactgtcagcaaatgcctcctcgatataatgtttgaaagtccaggtccacattgcctcaggcgtgctcggcaagtcggtaatgatgaattttgacttgactttgacatagtggaatttggccatatgctcgatgtttttctccaattttttaacgtagtctttgaccactttcgatgctccttcggcttggaagtgtactatgccatgttcattgatcagcaagctttgtcggggttttttgggctcggagagaatatggtcaatggaaaagttagtgaagcgctttcggggatgattgtccatatttttaaatctgtgcagggattgaggaggagtgaacaaaatttcggtatttatatgcgcaaagcatggaaatagtgtgaagaataaaggaggtgaaagacggaagatgaataaacatttaggcatgctcatataattttaataaaatttaattatacggttccctaaattcccaattaaataatacggtgcccataaagcgcagaaaaacagcagatgtgcaaaaaaaaagtgcaaaatttttaaaatgaatctggaaaatgacagggtgtacgatacgcgcactttggccacgcccacttgcgcaccaaaattattcccagcaagaaatcgaaatcattcttaattcaatttctggaaaaatgaaacgctctaatcctttgaaccttccaatgagtgagaaaaagccaaaacttcgtcgactcctgccggctgaattgaacaacgagctgatcagtttcgtgccattagtctgcctatttgccaatgtgaagcggactccaatcggtcctgtttgttaccaattcgagtgtttccgtagtcagcgcaaaaagtgctttaaatatttggtattttaccaaatttattattttattacataaattatttatagaagggtgttattgcagtattcgatgtgataaggctaaattattcaggctagctaaaactgacccatccaaaaaagcactatacgatagcatttctttacatataaaaatacaaacaaataaataccatagccaaattgagaaaaaggctatttcaaagggaagaaattcaatttataaatatatacaaaaattcaatgtcaatccctttgaaatacctaatctaatttatgaaaataaatgctatcataacagtgctgagaaatgtgaattatttgccaccttatttgccaattcatttaataatagtgaaaccgacccaagcaatccatgcttgggtaatattatagaaattgatcaatgctttatatcggatataaattttaacatcatcgagacccaaaatcttctgaaaaaacttccgaataaaaatggcacttctcccgataatattagttataaaattttaaaaatttgccattcttctctgtcaactgttattactgacttgtttaggatctcattagacactggttcacttccagacatctggaaagaatcaattgtttttccgctttttaagaagggtgacaaaaataatcccgaaaactataggccaatttcattaacctgctcactctgcagggtaatggaaagaattttaagcaaagatatttacaattttctattaaaaaacaaaaaaatttcggaatttcaatttggttttgttagaaataggtctacaacgagtcaattaataacagttgtggaagattggtacgaggcaataataaatggaaaaaatgttgattgtatttatattgattttcaaaaagcatttgactcagtgccccatgaattacttttatacaaattggaaaaaataggtataaggggcaaacttttgatgtggataaaggactttttgagtaataggactttgtgttaaaattggggatgatttatcctccagtaaaaaagttacctctggagtcccccagggatctgtccttggacctttattatttttgatttatattaacgatcttcctgatgctttgccatcaggagtaagaattaaattatatgctgatgatgttaaattgtatatttgttataaagcgagagttgacacagaaattatgcataaagcattgcataatttatcagaatgggcaaataaatggcaaatcagaatctcaattaaaaaaacttttgtactttacttggggaataaaaaccccaaagaaatatataaaattgatggaaatataataaatgttgtggatacaattagggatttaggcataaatattgataataaattgcaattttccaatcatgtcgcacaaataataaagaatcatatttacgtatgcgttctttatttcgg

SEQ ID NO: 77940 - DNA, 1292 bp, Heterodera glycines
atggacaatcatccccgaaagcgcttcactaacttttccattgaccatattctctccgagcccaaaaaaccccgacaaagcttgctgatcaatgaacatggcatagtacacttccaagccgaaggagcatcgaaagtggtcaaagactacgttaaaaaattggagaaaaacatcgagcatatggccaaattccactatgtcaaagtcaagtcaaaattcatcattaccgacttgccgagcacgcctgaggcaatgtggacctggactttcaaacattatatcgaggaggcatttgctgacagtcgtgagcgcaacatcgaacctacacacctcggctgtatgatcagcagtcctatgttggaaggcggcgacatcccaactccagtgcgacagatgactaacaacactctcgacaccattctcaaccagttcaaaaaagtggcgcagtccaaacaacagaaaaatgtgtcattatggggggagccatttaccgtcaccatcacgactctcgaccgtaatggactaccatccaaacgtcgagtcaacgggggagctcgtcgccctatcaaaacggctgtccatcaccgaattaacgaccaatgcctgattaaaattcgtaataacgacaaccaatactgcctgttctacgcgctgcaggcaacaatggtcgccaaaacgtgcaattggcctcgctggaagtttttcgactatgtgaacgacagaaaatgacagcagggacaacttcacatgatgcagttcagctaatgcagcaggttaatgcaccaatggatttggttggctacgacgcggacacatttgtgcctcaagtcgttgactactggaacaacgcgcagcgacaacaccgctttgctgtgttcatctttggatcgttgggacagtataaaccaatctacaagtacattgacaacacctacgacactccgctgctgttgtacttcaatgaagaccatttcgatggtgtgcagaagcagggcggtttgttcggaaaaccgtactgtttggagtgtgaacggccatacgacaaaatgtcaacacacaacaaaacatgtaaagcgcgctgtatgctgtgctcacgtgttggaccgctgtttccatgtccatcatctgccggcttcatcaaaaagtgtaaagagtgcaacaaaaaattcaccaacaacggctgctaccagcatcacctgctgtcaggcttctgcaagcggtcgaaaaagtgcaaagattgtggtgctgtttgggatgttgtcaacaacactcagaagggcagaaaaggacat

SEQ ID NO: 77941 - DNA, 253 bp, Heterodera glycines
cagcgggtagtgccatgcaaattggcgatcaattagtggaaattgacggcgaaagttgcattgggatgagtcacgagcgagccattggcatgatcaaggagaggcaatgcgtgaggctcacattgagccgacaaaagctgtaacatttgccggacaaagaaagaaaggatggatgaatcgacgaatcatcatcatcaatcacgcgaacactcaattttaataataatttatataaataaatcattaattttca

SEQ ID NO: 77942 - DNA, 1022 bp, Heterodera glycines
  unsure (1)..(1022): unsure at all n locations
atggttcatgggtttcagaagagacgcaacctcctcaaacactcgtgcactcgttgcgagaaaaccatcggtttcaatgtcatttatgtgaaatgcacgcggtgcaaaggtaagctaagaaattggatttgggatgaaaacggattttttagaagtttttcacgagtcgtgccgccattttgcgcctttgccctgcgtccgtcggcacaacacgccgaaagtggctgggaatggcaacaaatcggctggacgtcctcgccttggtgggtctttgtttagaatgccttgccagtcaaatgtcttctcttgcgttttttggttacatggcattttacgcgttaaaattgtcaaactgattttaatgacgcctttaaaagccatgtaaagacgcataaatcaaagaaaactcaaaattgccaattttacaagaaatccgcttattttcaggtgatttctgtcccgactcccgcccgatggttcctccgctggtcattttctgcacttacttcttggaccactgcaaaacatacatgccgtacagggacttgtaccaaattgaggggtaattctttaacgaaacgggcaaaaagaaatttggagggcaaattgatgaccatttgattattttgggccttaattgaaaatttccaaggaaaacattggttccgataggtgccataagtaaaaattgcattttcgacaaatcattagtggaatttcatcatttttagaagccccgctgaagtggaggccgtcacaaagcaatttctcgccccaaacaaaagctacccgaaattggtacaatgcttgcttaattatactaattattatttgcccctttttaggacgcttttcctcccgctgtcatttccgcttgtgtcaacaaatttttgatgcaaatccgcgacccgttgatcccctattcatatggcaaggagatttgtgcacttttggaccgctgtttggccatcgatgggcccattttggagggatttgccggcattgtcgaggatntgccagtg

SEQ ID NO: 77943 - DNA, 64 bp, Heterodera glycines
atgacctcacaacccattcgcgtattggtcactggtgcgggctggacaaattggctattctctg

SEQ ID NO: 77944 - DNA, 2749 bp, Heterodera glycines
  unsure (1)..(2749): unsure at all n locations
aagaatagctctactttatagaccaccaaacacttctgctagtctcactaaaaagattctgaacatcatctgtaattatttagaagaaaattttatcattatgggagattttaacctaaatgcaaaagatataacctggaccagtggaacaccttttgctaaatcggaaaagggaaacattttttgtgaattttttaataagtatggcttattccttatgatgaacggaccaactcgaggcagtgcttggcttgatctgattttctcctctagtcctgattttgttaataatgttttaattgaggatatttttagttctgatcatcttaccactaacttttcccagtaatagaactaaaacaaatacatttacagtacgcaattataattctacaaaacttaatctattaaatttaaacttatcttcaattttaccctacaaattactacaaaaatttactattgaagataagtttaatcatttttaccatctttttagagaatatgtagaattatacttgcctaaaatcactgtcggtcaaaaatccagaaagcctaactacccattgagccttaaactgtcaattaaggaaaaagccagactttataaactacaaaaaataaatcgtgataaatataagcatttgtacgatagcatttcattacatataaaaattcaaataaataacttttttcaaaaaatgaaaataattttttgaataaaggaaaaaatgctatctacaaatatattaataaatttacaaaaaattttgaacaaattcactctattaattacgagaaccaaactatttttgatgattacttaaaagcagaaatttttgcaaacattttccaagaatccttttcaaattcagatgttccacaaattagcagttgtccttcccaatggaccatttatcactgatgttgaatttaatgccaatgaaatctctaacattctaaaaagcctaccaaatcgagaatccacatcccccgatgaaatttcctttaaaatcttacgtaattgccaccttacgctttcacctgtaatttccgaacttttcagaatctcaatggacacgggcaaaattcctgaaatctggaaaaagtctattgttatacctctctctttaaaaaaggtgaccgaaatgacccacataattacagacctatttctcttacttgctgtctatgtagagttatggaaaaaattattgcaaaaaagcatttataacttccttcatcagaataatttaatatccgaacatcagttcggttttgttaaacaccgatctactaatactcaactaattacagtattagaagattggtacgacagcatatacggtaagaaaaatatcgactgtatttatgtggactttcggaaagcttttgattcccttcctataaacattttaataaataaacttcataacattggcattaagggaaaactgctaagttggtttatctgaatttttaagggataggtcttacagagttaaaattaacaataaatcttctaatttacatccgattcagtccggtgttccacagggttctgttcttggcccactgttatttttaatatacattaatgacctcccgcaggtaatcccttcgggagttagcatcaagctttttgctgatgatgtcaaaatttatgtctcttacaaaactcgtgatgaaagaagcaaattaaatattgcattagaaaatattggaaaatgggctaatgcatttggtttaaacatctcccaaaataaaacatttattttatttattggcaaaaataattcaaaacaatataaattatttaacaatattatgtattaatgaggttgaatctattagtgatttgggcattttgattgataataaatagggaagcaacttttagtgaaaaaacttttttttgctcaattgtttgaagaaaggagctcaaaaaacgcatttctgcgttaaaattttttcattcggacgtcacttttcgtcactagaaatcactatttcggcgtttcgtcatattttttcatttcgacatttttcggaaaattctttaacaaaaatgcaataaaaccaaaaaatacacccctaagaatcgacaaaaaaaatttcaaaaagcactcctaagaaatgaaaaaaattttctcaaaaaggtattttcgtggcaagaattttaatttaaaaaattatttttttatgtacctattttgtttttttcgcccttaaaaatcccagccctactcatttgcaatgcaatcagtgaataaaaattatttttgcttaatttttggctgaaaattatgtcactattcgtcactaatttcggactttttgtcactatttcttcactcattttggcatttttactcactaattttagttaactatttcgggatttttcgtcactaaaagttgctaccctaataataaattaagattttctaatcattatactaaaattactaaagctggcttatttaaggattcgcaatatggccaaaattttaaaatcccgtctaacggggagaatttttttttgtttgtggcggaactatttttgggggaaaaaaattttttgcggcgccaacttcttccggcgcccagtcaaaagaactcttggcggcgccgacacttgcggcgccagtcaaaaggacatttgcggcggcgcaaaatcaacgaccccaaaaatatttcaacaatttattanagttaacagaattgttattttaatagtttatatttt

SEQ ID NO: 77945 - DNA, 1008 bp, Heterodera glycines
aaggaaacaaagagaacatggaaaacgctgaagtgtcacaatgtttttcaaaattcgacaataaattcctatttataattggtcatgataatcaatatcgaaaattcaaaaaaacaaatgaaagaacggatacgatttatctctattgcatgaactgtgagaactataataagcagaattctgctgggttggtttcagttatttagtgattcttctatataattagattatagagttattggaagtgctattattagagagggccaattagatagaactcatcaaatcatgcaccatcttcagtgcaaaggtgtgccactagagcaacttactgctgaacaaattgataggaatcaaagaagagaattaattcaatgttcagcagattctaaatctatttggcgagaagtgatttgaatatttcataaaaactaatccaattggtacgataaatttaggggtctgacagggctagagagcatgatacagctgaggatatcgaaattgatgatcccagtggaatttcatttaattatccaaattggcaaagcgtaagacgtgcctacaaccgacgaaaaatgaaccaaataggggattgttctgatccatttaatgtgcgagaaaaatttcagctaactaaacgcggacaattaaattaattcttcaataaaagctgacttctgaagatatgtaagagttagttttatctgataatttttgattaaaaaaaatctaaaaaaaattcatattttaaagatggctacggtttcgagataaagatatgggtgttatgctctttatgacacatacacagaaaagagctgtcgctaattgtaaagtcttggtttctgatggcacctttgaattagcacctctgaattttcagcaaatttggacaatccatggattggtcagattatatttatatttctacttaggtattcttaagatagaaacaactagtggcgccgaatgggcaccattattaatggctttgatgaaaagacg

SEQ ID NO: 77946 - DNA, 605 bp, Heterodera glycines
atgcgtcgccggtcaccgccacctttgagcgggcatttgactttgaccgaagttctgaaaaacgggatacggtatttggtgggtgctaggcatactgttgaattacccaaaaaatctaggtttagtctgggcgcctattttttggtcaaatgtgagaccgtgactctcgattttaatcgcaacgcccaactcagtcccaagctatccattagcaaattatgggccaaattgagatcaataatcatcagtagatttgtgacaagagtttgctcagctcaagactctcgagtctcagtgccctgccccaaattcagtgccaaaacccctagcttccaatttagtggggccaaacgaggttagagactcttgagatcttattcagaataagaccgagactctcggttttaaaacgcatcgccaactcagtcctaagctatccaagggcaaattatcggccttggccggctcaagactctcgagtctcaacaccctgccgcaaattcaatgccgaacatgccgttggacaaaccctccgcttagcagggcccaaaaaaggctcgggactcttgaggtcaaactcagactgggccaactgtgcgccaagg

SEQ ID NO: 77947 - DNA, 489 bp, Heterodera glycines
atgggggagtactgtaaaacgaagattacggtattaaacgattttgtagcgcgactcaaagtgagtgccaacggcgcactgcgcattttccacgcaacgctttccgacgcgggcgtttacgcgtgccgaacggcggacggacgcgcgcagggaaatgtgacgcttcgctttaagccacaccagcagcaaaaaacggaaaaagtgaggggaaaagcatgattaaaaaactgaaatttaaatgctaaaacctcgagattcagtctggaaaaatcgaatcccggcaaatggcacaaaattgagtgaatttgaaaatgcaaaattattgtggaatgccaaaaatggaagttaaatccgtaattacgaaaatgatttttttggggaaaaaattatgaaaaaataaattaaatttcagattccatcaactgaaaatcgaacaaaacaacaacgaaagggcattgaattgctgcaggcaaattaatatgcagatga

SEQ ID NO: 77948 - DNA, 401 bp, Heterodera glycines
atgcggctgggccctgccggccgagcactgcttcagcgcatgtcctcaatcactgatcctggccaaatccggctcgactatggcacctcgggctgggccgactgtcgccaagcgcaatgcggccatggcgaaggcgttcaagtacggcacggcggatcgagaatttttggcttttttgtcgagagtgaaatagttacatccgatagctgtgggatttgtttcccgcccgggatttcggagcgctgtaatttgacgattcgaaaccgaaaagccgggaatgttcgagagagaaattctgaaaattgaacccaaggggggtgccatggaatttcgtacaatggaatttcatataaattaaaaaatattgcataaagacctgctcgaaaaattggaaaacccga

SEQ ID NO: 77949 - DNA, 446 bp, Heterodera glycines
gaaggatcgcaaagtgtgcaattggctgatcgccttcgattcgctgtgccaacttttcgttgtcgcacctttcggcgtcaatttggtcggcgtcattttccagtacagtaccattgactaccgtatctgtctggccactctcatgggcgctaccatagcctcgtatgcctcaataatggcaatgtttctgatttccgtggagcgattgctgatcattctgtacccgatcaggtgactctttatataggtatgtatagttggaatatataaattttatgtattattgtagaatgaattcgatcaaaaaaacgacagtttgccaatgttcgtttgcttctgccattctatgtactctttttggcttggtcatgaatttggaagtgttcaatgtttggacaattatcaacatctcttacgataggcgattaacatttgaaataaattaa

SEQ ID NO: 77950 - DNA, 790 bp, Heterodera glycines
atgttgcgctctgtgtttctgctgcttttggtccttctgatcggctggctgatcgcatcggctgcacgcaaccaaatcaccgattttatcagttttatcacaccgcttattgtaaatttgttcatcgctgaacctgtggctcattcggttatgtgtaccaacatcaaaagtgtactgatcggcattgtcacttgcgtgccaattttggcatccgccagtggggcgcccatccttttgctgaacaggtgtaaaaaggacaaaaattcaattaaaaaaatattattaataattttatttatatttaatttagcagcgattatcggactgcgtacaaaaaggcgattatgcgaagaaaaggcaattcttctactgttggaccgctttttcgtccacgccaaattgtggtggtttcgaatgagcgaaaatgatctttttgggcacacaatttttggacaaaatttaacccaagcttaattttactgaatttattgattttcagaaaaatgattcgcttcaaaattttgtgatttgttcgctaagatttttgttgtactattttttaaacatttatcatttctttcaatgtcaagaatgtttaatttggttgactctgacaaaagtcatgggagtttttgttcaaaattttcatttgatgatttttcatataaccctcttattcgagcgtggtggtcgcattctgctgactttaacattacctttacatcatgaggaccggtaaattggacaccaaaggaaaattggacaccggaaaactggacaccatcctaaa

SEQ ID NO: 77951 - DNA, 1448 bp, Heterodera glycines
atgacaacaaacaacgcgataattcacgatcatcccccaacggcacgcacaaaaagtgagaaataaataaaatgagaattttttcaattgtctaacttaagtttttctattaaaaaatattaaatttgtttcaacactaaaaaaattttttccaattttttattttcaaaaaatccgagaaaatttcaagggaacattgaaaaatttttcagcagttgtttctctgctccgtctgagtgcccatttcttagccggtcttcatgcattggaacggctctgacaactttccatggatgccaatgccatcggcggaggggcgaaagacaacgcaaagggcggagagacggcagacgccgaggcaaatttgttttaaaacttaaatttaattttttgtttctgcagctgcctctgcgcagtgcttccctcgaaaaattggatctttcatccaatgccttgcgcagagtgccgaccaaattggtggcccattaattgcattccctcaaaattttgagtttggcggcgatttcaatcgaacggatggaaccgaaattaatggccaatttcagcgcattaaaacaggcaaaattaggaaattgaacttgaatagacaaaccaattatgtaatttagccattttcagttggacttttcccaaaatttcctccattttttgccctttggaattttcgatggactctacgaattgcaagctctgctcggattggcctcacttcaatgggttaatgtcagcaaaaatgcaatggaataggtaaacctgggaaaagagaatggaaccaaatgaaatccaaataaaaattagttggaatggtgcccaattcttggcattgaggcgaacggcaacgaaatgttcttacgagatgaattggctgctgaacgccaaggcctccgccgttggcacggatttttcgcaggaacaaatcaatgccgcaaagggcggcgcaacggacatagaaagtgccaaatatgtggtgccattggatggccaacggaaaaggattattgatacaacggtgggcaggcagtatttgctaattatcagagggtaattaggaattgatttgctaattgtcgccatttccctttccagccatttgactttctgtgtccctattcgattttctgtgccgtcggctgtcagtgctgccaaatcaaccacgcagatgaccacctcttctcaatgccaatgctcgagtttctgctatgaaaattggtatcgtgcgcaggccccagacctaaaaaaattccggagggaagatgaagatttttttttttgctcttcggtcttgaaattttttctcttatttaattttaatatgtccagctattttcttccccattctcctgattcctgaattttttgagtctttgtctatatatttttttttaaattaaatatttctaataattcaaaaattacttttaaataaa

SEQ ID NO: 77952 - DNA, 459 bp, Heterodera glycines
atgttcacagccactggtcccccaaagggattcattaatgccgatcccttccgttcgccgttctctgacagttttgctgcatgtgccggatggaaggtattggcattagcaaattgtgccggattggctgagtaatgcggcggtggctcattgcccgaacttcgtccgccgatcgtttcctttttctttttcaccaccgtcactttgtgcgccgttcgatcggtgagaaaaacgatcagctgaaagagcatcaaacaaaatttgagtaaatgttgtttctagtcgcttcacctgtatcagactaagcatggacagtcccaaccacatgccaatggaaccgccgatggcggcgatgaaagtccaaagggaccacacgtaacactgctccaactcgaggtactcgaaggcgccccagatcaacttgacagaagtgaccgctggggagggcaaaaacaatga

SEQ ID NO: 77953 - DNA, 893 bp, Heterodera glycines
atggcaacgccgagtcgggtgagagttgctaacgaagcgaaggataagaagcggaaggcatccgttgacccgtgcagaaagagaaaggcggcccaaacggtttttgcgcaccgaaccctttggccaactccgtctgctgaacccgtaccttttcgccaaccaaatccacgacggtgcggtgctgcgacgagtcgcactttcgccgcgtgcgttcagttcctccattctgtcgcccgagtttgggcaggtaatgccaattttgttatttttatttaattttgttgctcatttgtcagctcgaggtgctcagtcctcgcgcttttttggccattattttgtcgccccgtgctgccattgccaacattttgtccccttccgcgttctctctgcgcctcctttccccgcaggcgtttatggccgaagtgctcaacccgaaggcgttcattgcgcgggaatagcactttttcactgtttgccctgcgtttctctgctactgatgctaattgcatcctttttccctttgcttttccgatcctttccccccgggcgatgtccgccttcgttttgtctccccgggcattgatcaccacaattttgagtcccaaaatgttagagcttcgcattctttctccgaccactctcgccttcactgtgctaagtccaagtgagccaatcttaccagtgttttgaccaattgttttatttgactgatggccaatattattttgtcattatttgcagcgattggaggtgctaaagttgcgtctccccaaagtttttcgatgtccgtcctcagtccgagcattttgtccccgtctttcctcaacaaaggcaccggcaatatcaaagtcagcttattgagcaatagcagcatttattcacatttgagctga

SEQ ID NO: 77954 - DNA, 357 bp, Heterodera glycines
atgagatcttcgggcgtacgtgcccgccgccgtgccgcacatccaccgctacgccctccaccaccgtcgccacgccctccaccaccgtcgccacggcctccaccaccgtcgccacggcctccaccaccgtcgccacgcccaccacccccgccccagaagagccatggacatggcaatggcccgtattggtgctgttggtgacggtggtgatcgccgccgccgcacttggtggtaagaaaatttactattttggttaaatattttatggtaaaatttaacttttcagtgggtttgtggtgtcggtatcgccggtcgcggacggggcctgacgacgtggagtcgcaggcgcctgttgcg

SEQ ID NO: 77955 - DNA, 432 bp, Heterodera glycines
atgccgtgtaaaagctgcacacattgccgaaaaggaaaacttcaacaacaggccaaaaaagttgctcaagaagaagaaaggcagaggcgaaaaatgctgcgtgagaaccgcagaagcgcaaatgaatgtcggcagcgtgcgctgtgccgccttcgacaggattgtcggactctacgtcaagcgatccgggaagggcgatttaccgtgacttacaatggaaaatcatcctattggaacatcacaagtccgtctgtcaatttggccgtcgatcaaaatgggcaatcaacgaatagtagcagcggctttggttgttcaagttcttccagcggcatttctgaactgaattctgatggaagctggccaattccggattattatcctggaggtttttacgtcgagcacgagactgatcgcaatgaatatgaagaatga

SEQ ID NO: 77956 - DNA, 1058 bp, Heterodera glycines
atgtctttaagcccttaccaaatgaaatctgcaaaacgaaaaaatcttaaaaatgatcaaagtttgcccgtttttgttcaagtcgacgacatttcatcatcggttgatcttggaaatgacgggataaatcctgaacaggtgggaaatgcgtgaatcgaatgcatgagaaaaagctgcttttctttacaataagctaaaaataattaattctgatttcctcagcattctaacacgaactcaatggagagtaactcgaaggaaatggaaatgcgtgaacatttggaggaaattgaaagccaaacgacaactcaaaataaatccgtttttgtgagccgttttcggcaggaattgaaaggtaattgacctatgaatcctttctgaaattacgtcagtttatagtttttgacatatttatatatttgagttttgattaagacgaagagtctacacttggaaccaaaagcatgaatttttaaaattattttagaataagaaaataataaaattctaaacagtataatttttaatacgcctttcaaaacaattgtcatttaggcattaattcattttaaccaaaataatttacctatcaatagttttttttgtatgtttttgaagtgtaaaacttttccgtttttagtattagaagaaacacatacaatttgaatggatacataagaagtaaaaatttgttactttatttctaggctattactgatcaaatatatttcccacagaatggcacatttacaagcagttttgtatttacggcacaataacatttgtgcgaaccttcccaacagcatttcgggttgattttgctcataaaagaatggcggcaattgcaatccgtgcaatgaacggtcaagattatggcaaggatggaaaagtttttatttgtgattggtggtcatggaaaaaggccaaaaagggaaaaggaaaaagtagagcaacaccgaaaggaattgtaaaattgaggattcggttaggggagggtgaagtgtttggttctcaaacaaaacccatgtaagaatatttaacattgaattcagagaaaa

SEQ ID NO: 77957 - DNA, 798 bp, Heterodera glycines
atgaatgctgccagatccgtagtttctgctctaatcggtcgaaaattttctgagattgattttgacaaaactggtatgatcacctcattgaagcttcaaagagctttgtcaaacggtactctacgaccgttcaacattgacgcatgccgtctgatcattttccaatttgatccaatgagacacggcttcgttggcattgagagatttgaatcgctttggaacgtatgtgttttttattgtttggcatataaaactattttctagtatattaacgactggaaatttgagtttgtggagttatcagagaatatgggctttctgacaatgcgtcaattacaaagtgccctgacaaaatatggtatatttattttaattcttttcggtattttcattaaggatttactttcaccacgcctttttttcacatactaatacatcgattcgaccggtcgcagactggtactattttaaattattaaagagactcactttttcttttcaggatgcttatattttgacgactttatatatttatgtattatgctccagcggattacaccgccgtttcgttatttagatagaaatgcgaacggtcgtattaatattcgtaaggttgaatagtttaactacactatatattttctattaatttcagattttgaagaatttgtaataatgatattatcagcgcaaatttagttgtttttttgctttaccagttttttcagaagtgatcgctcgcactcttactgttataaataggccctcgatatgccaaatcttcatttaattacttga

SEQ ID NO: 77958 - DNA, 518 bp, Heterodera glycines
atgagtggccttaatcggttccaaattgccgcatcaccgaagaagcgtttcgccgatgaatttccgccgtcgtgcaaagatttgcacgacgtaaaaaaattcaatgcgccgggaattttttacgtgcgcgcgaaagtgacggatttacagttcgctttgtataaggtatatttggaaaatatttacttcggctgattctcgaaattagttaattaatagtttaggcgtgccccaataaaatcaaggggttgccctgtaaaaaaaagcttgacgcagaaaaccattgcgttaattgcgggcaacgtgccaacttgtcgctccgcggcatgtatatgcgcttggacctccaggactgcaatgatcctgaaattaatcagcaagcgaccttgtttgctttttgtgccgagagttatctggatataaaggtagagcaattcgccgcaatggtgaacaacgatctgaaaagctcgaggctctgcttcaatcgaaaattggcccaaacgtttccgtcaaactaa

SEQ ID NO: 77959 - DNA, 408 bp, Heterodera glycines
  unsure (1)..(408): unsure at all n locations
atgaaaaggatagaagaaccaagatcagcggctgtaanccaagggcagcacaaacttgaggcggagacgaatgctcaggatggtggaggcggcgaagctactatcaaacgggcgcgccgtaaaagttgggacttcaagacgatggcgcactttgataggggagaaacggaccatcaacagcaccaaaaagcaccactgtttgagcagaaacaacattatgtgcaccgggtggaacgttttgctctgcaacgccatgtaaccgaatttgtgttgaatgggcagcatgatgagccggaggaggcgctcttcctcgcctttaagcacatcatagatcgtgcaatacggaacgcagaaaactcgccgagtcatcagcagcagaagcagactagcggtggtgcagaattctaa

SEQ ID NO: 77960 - DNA, 1132 bp, Heterodera glycines
atggctgagctggataagcttggtcaatcggacggtgatgaagacgtgcacggtggcggaatcagcaaacgcgcgctattgctcagcgagccgattgaagttgttgtcacatgcattgcacctccggttggtgcagcgccacgtttccatcattaccagcattggggctatgatgagcgccatatgattcgcgtaatgaatatggacgacaatttttgcctctttcatgcgctgattgccactcgagcctacacggaccatgagtttttgaagttgtcttcgcgacgggtggctgatgttgacgcggatgatggcacactggctgacgtgccagctgaaatttctcgacgagtgattaccagggcagatttttgtgcaggccacgaggcgctgaaccgacttttgtcaagtcgggaacgcatgaaagcagctgtgacggagctgatgcgcgatgcaggtattccaacaaatgaggacgcttatggtatggagcatatcgagcaaatccagcagctttgggtgggttttataacgcgaacagttatttactccatatgaaaaaacaggaccaaacttacgccggtttgtatcgaattgttctgttcgaggaccgctccgagaaattgctgcgcccaatttggaagggtccgatggggcgtcgcctctgtgtgtcgctgtttgtgtcagaaggacactattatggtatcaaaagaataaactgcttcttcaaacttggcagaaaatattgcctggactgcgaatgtgcctacaaccgtgacactaaacatacaatatcatgcaaaagtcgttgtcctcaatgtgctaaaggtcgtttgtaaattactttaatgcatttaatgattgttatcacatttttgtttcggttaagttggtccccagtatccttgcaatagggtacaaggtgtacaccttcactgccagcaatgtaaccgattctttttctcccaatcatgctttgacggtcatcggcgcagccagacctgcaatttgcttaaacgttgccctaaatgtagccgtaccttccagcaggatccgaaatgtccgcataaatgctacagtactttttgtgcacgctgcagggtatttttttgtcaatattagactgccagaa

SEQ ID NO: 77961 - DNA, 216 bp, Heterodera glycines
gaacgaaaatgcaaacgatttgaactatgctttgaaccttttcgactacagaataaagcgtgactatttgaggtataattacgcaaaagtgtcagccgatggaagcgcagaaaaaccgtacaaagcgatggaagcggaagaaatagaggggaaaatggagcagctaaaggttggactcaagtcaattgtgacgaacagagaaggactgactgattt

SEQ ID NO: 77962 - DNA, 171 bp, Heterodera glycines
atggctacccgacttttggggatttgcaacttggggacccgacatttggggacccgacatttagggatcccgacatttggggacccgacttttggggatcccgacatttggggacccgacttttggggatccgacatttggggatcccgacatttggggaccgaacgacaa

SEQ ID NO: 77963 - DNA, 2087 bp, Heterodera glycines
  unsure (1)..(2087): unsure at all n locations
agaatgaagaaatcagtcagaacccatcagaaaatgaaacaattttgtcgacaattgttgaggaattcaacgatgataatggcacaaaatgtgaagaaagcaatggaaatgatgaagaaatagaaaatgatgaactgagtgttgagcataattcagcagaaaaaatttcaataaatattagcgcattaaatggtaaatttattaaatatttttgtatttgtgcaaaattaatttatcgataattaagaattccgtaatgaaacatttctgcatgagaaatacgaagaatatttcgaaaatgaaaatgatgcaaatgaaacgaaatttctgcttgatgccggcatttttgtgtttgaacttcaaaaacgtttaaaaatggttgacgaacttcgaaaactttcatattttgacaatttaaatttaataaaaaatattgaaaaagaaaatgcccaatttttattgtattgtatgcaaattgaagaatttgatcaaaacgaattctttcagaagacttacaaaatcctaaaaatatattccaaaaatttggaaaaggataaaaatgaggaaattccatcggaaaagcaattaaagcaaataaaaaggcaaatgcatcaaaacaatttgtcaaatttaattgtaacggacaaacaatttggtgaaaaatggaaaaaatatgatgaagaatggaaaaataaaaaatttatcattttatttggtgtaaaaacttttgagctaaaacgatttgaaaagataaaaatgcgatggaagaaactaaaacagcaaattacgcttggtaaataaaatatgtgaattatttaaagataataaatgaagacatattttaaggttaattaagcattttaaataacggaaagttaaaactgtataattaaaaataataattaatttagacaccgatttatatgaacaatttttgaacaaaaatgaacaaaacaattatttaagtgcaaatttttctgaaatttctcaacaaattcatttccaccactcagattcagcttacgattcaaatgaggtaatttttttaaaacaaaattttttttatttaaattgtctaattaagattgaaaaattgctaaacgaaaaaagaagcgacggcttaaatttaagccaatttgataagcgaatcacaacagttttaagcaaaatcaatgcactcattgataaatgggtgagcttcattanatcactttttaataagcaatgaaaacaattttttgaggaatatttaaatttttcttttanttaatattatcattaattgcatgcacttaataatttagtccactggccatgctcgagttggcatttccggctcacttttgcttggcactcatacagctgactctgatgttgatttgatttgcattgtccctggccaaacgatgggagtggaaaacttttttggcaacaaaaatgcaatttgtgaaaagaacaaatgttcagatggaaccaatgactcattgtattgcaaactttgcgaggtcaaaattttatgaaattttattttgatttaagtgccaatttaaaaaataaatagtattttcagaataaaagcgtcgcaaaactcttgaaattaatgcacagctcaatctttctgatcaaatttcacatggacaatgtcgaaattgacatcacttttgtggcaattcctggcaaaagtgtgctgcaagcagagcttaatgagcaaatgctcactgattacataaactgtttgacaaatgaaaaagaagagcacagaaaaatgctacgcacaatttcaagtcagtcaaaaaaagtgggaattaatttaaatatgaaagttttcaaggtgtaaattaattttaatcattcgcacaaaaaatcaaaaattctaatgatttaacataaaaacaaatttaaaaatgtttttgtgtaaaaattaaattgaatttaggctatcggtcaacgctttatattgcaaccctatttctcgaaaaaagaatatttaatagcaaattaacagattttctaaagcctgggaaagttaattgccaaaatgataacaaaaatttagaaaatctgcgatatttaattttgtcaataaa

SEQ ID NO: 77964 - DNA, 1128 bp, Heterodera glycines
atcatcttgggtccagaaaaaagtccaagcgttcacgtgttgtcagcagcatttcgcaagcatccaccataccaacaacaacaacaaccacaacgattgtagcaacggcagcggcggatgtcacaaccgcatccaacttcatttcttcatccggacactcgtcgttgtacaactacaccaacaataataacaacaacagcatcataaagttgaatggtgccgaactgaatggtcattgtggcaccggcggaggcgtcagtagcagcaaccatctgcaacaccaccaccaccaggaaacggacaacaaccacaacagtagtaatgaatgtgcactgttgcgcgagaatgctcaacgccttagtgagatcagacagctgcagaaggagcgtcaaacgtacgcaatacaatatacacttatacattgctattttcaggcacatgtccaaaaaaattaattttcttttttgtgcaggcacccgaagggcttttttccggctcaattttttttgtccggtgaatttcaccaaatttataaaaacaggaatctgtatttttagtgtttataatcgcaaaacaaacccaaaaatgctataaaaaaagttggaaaataattttccaataataaatttttaaacccccctcaaaataggtgcaaaaaacaaaacaaaaaccggtcataaaaaactaatattttccggctcgggtaaaaaatatccataacctttttaacccttaaataataccatttacaattttttccaattgctcagtttggaactgtcgcttgacaagacgaaggtggagctgaagagtgcacgttcagcggagaatgagttgcgcgtgcagctgaagaatgtgcaacaacgggagcaaagctgtcgcgaggaatggaaacaatttgagcgggaacagaaacaacgggtggaccagctggagagcaagtgcaaacagttggccaagcagaacgattattacaaaatgaacacgcaagcgttggagcgacgggtgggcgaactgcagctgaagaagtcggaagttgagcgtgaactgaccaatgagcggttgcgcaattcgacacgcgacgaaccgccggtgggaagacagcagcaacagcacaacaacgcgtaa

SEQ ID NO: 77965 - DNA, 642 bp, Heterodera glycines
atgacccaagaaaagttgacactgacgaaggacgaagagatttggctgttgaaacggtgtccaattgttggggagacggcggcggttcaatgggaaaaagacgaaaatttggacaatttgaatggagtgatcttccatctttatcatgattgtattgggtaagcaaaaagattggccttacttttgaatagagtgccacgggaccgggaattttgggcaaacccgggaccgggaccttttcgggttgaaaacccaggaatttttgcctgggaaaaccgggaatagtcccaggggaccttggtactcaattgtactcagttgtccgctaccaggtcccggtcccgtggcactctagttttgaatagagcatggacaggagggtacagtaagtagtgtcctccgtacagtactttaaatgttcattcatttcaaatttggtttatttaggccgctgtctccgcaagatcaaagcgatgaaaaagtgttctcgactcccgggcccagtgatcagcggaaggagtgataatttgagagatgtccgactgttttatttgatgataattttgtttcctgttctgatgaccattttggcgatgaatattaaaaataggaatttgagttgggcggatagcaaaaaataaa

SEQ ID NO: 77966 - DNA, 2489 bp, Heterodera glycines
atggcctggttcatactgtcggtcgggcgaatgccgttgtgccaacaaccagccgccatttcgaacccgggatggccttgtctgtcttaactacggcttttgtcccctgaatggtaacaacccaaagtttcgaattgaaaatcaggtaaaatttgaacaattcttatgctaaaggaatttatgctttgaaattttcaggtccaacagtgttatggtaaatacaattaaattaaatttcaattttaatttaaaaaaatattttaagatttaattaacgcgtaggtaaaatatttaggtggcgcagatgctacttgtgaggccattggtgcattggcatatgactgcatatgcgacagtgaagattgcactgtaaaaatggaataaaaataaaaatcaaaatttttaaaaatactttaaaaaataatttatacaaaataatattaaatttaattgttgaataaatttcttcaggttaataacccaatcagtttctgttgtccgtcaaggggtaatgctaatattttttgctacttaagggttatgccacccctcaaaattgctcaaaaattttcaaaatttctttgggtttcaaggatgctgatcaagattttgagaattcagggctttggataatttaacccggatgaatccttttgccgttttcattgtttaaattttcagcttttgcttgtattcaaccacctaatgagggctttacacccccgggcggtggatcaagtttgaatcactggtaccatgatccgatcacaggtaagcttaaaaagcattgtgccgaaatcccaaagcccaaattttattttaaaataaaatagaattctacatcgactattttaattattttccatttattatgtcaaatgacccctccaattattatattttaaatctaattcaatctatcaaaatagaatttaaggcgagtgccgcgaacttaagtaccagggatacggaggaaatgcgaacaattttgccaccaaagaccattgcgaagtagcttttatctcatttacgatattttacccaattttaaaattttttagagttattgtaaacaaagtgagtgctttttttgttgaagtaagaaaaattaaattttcagcttgcagccgaggccttcctctgtatagggaccgtaccatgggtgttaaacaagagccagtatactgtcagggtgctgacaatggttgtacaagtccaaactatgtgggatttgcaaatttgaaatacaaaatttaaaattattttaaaatttgaaggtttgcacggcaatgggcacccttcaacagtgctgtccaactttcagttacctaattaggtgtaataaaaaaaaacaaaaattattaagtgcatatttgttcacgaaatggtgcaattccaaccgaagtgtacaacactgccggtggccttcctacagaatattttgatgttggagtgccggacggtagcgaaaagttaccgtatttcctataataagcccccgtgggttttattttttgaacccccctccccccaggaagggggctttatttcagggagggagcactaattgaggggggggggggctttatttgtcaacctctctaaaagagtggtattcagggggctctaatttaggaaatacagtattgaaaataaaattaaaaatcatgaaatttcgtattttttaaacttttctaaggaagcggtcaaacatatccacgattttattatgatgccagagagggaagatgcattcaattttctgtgcgttttgctcatttttttcgttttttttgggatttatttcactgcttcagtttcttggccaaggcggtaacttcaacaatttcttgtcccaagatcattgtgaaaaattctgctcaagaagtacagaaaatttttagactaagattttacattaactaaaaaattttgaagtatttcagttatatgtgttaaaataagttgtaaaaaaggcattgagtatttttaaatcattcccattaaacaaaaatattccatgaaaatattttcggtataggttagcgctagagctgctcgagactctcactctctactctcgttgttgatcaattctcgttctcgggtctctgggtcatttatcggtctcggctcaagagtctcggaaaattttgaggctcaagcagccttagtgtagagcacgatgggtgtgcttgttgtaaagggaaagtgcgggacggatcaatttggcaaattcgctaattcaaaatttactactaattaaatttcgtctttttttgccctgatcatagtctaatgccaacgacaattaaattcagtcttatgcagtgccggcgagccgttgaaggacagtagcggtgagcgaaacatggaatgttcgccgaccggaagtggcaccaattcgtgcccgtcaacacacagttgcgagtcaccaccggctcacaacatttggtggaatttgctgtcacggactcatatgtttgcaa

SEQ ID NO: 77967 - DNA, 250 bp, Heterodera glycines
atggcattgagtaggaaagccgcaaggtccatgttcgtcctgcaaattgatgttttaagtatgtttgttatacacattggcaaattaagcaattaaaaatatgatgattaattttatattttaagaaattaccaataagaaaaatgtgagcgcaacattgcccaatatccgttcggcacagtgcccggttgaatctaaaaaaagagacaaattttatcataagaaaaaagatttttcgaacaattttatg

SEQ ID NO: 77968 - DNA, 761 bp, Heterodera glycines
atggatttagaaggtgggggattactgttacagtagccaaaaataccatgccacaaatgttgtctcctaatttcaggattccattttgcacttagaaatgctgccgtgggcggcagtttggaggtgtgccgtctgctggtggaggagtgggccgcagatgtcaaccaacaaaccatccaagagcaatacactccagtgatttgcgccgccagtgaaggacatttggccatcggtgggagagaattgtggcaaagtgccaaaaatgtaatctccctaattttcagtgaatttcctcgtcgaacatggcgccgaccttcaacatgttgacgtggacggacacaatgctttgatgtgggcagtgaagaatgggaagattgaaatggcacggcatttggtggccatcggcgcggacattaaccaacggaacatggaaggtgagcagcagcggaagtggccaaattgttgtgctagcgagcgttttattcgcccatttcaggcaaacgggcacaggatttcgcggaagagagcggaaatgccgaaatggtggccatttttcgtacgacggcgacggacaatgggcgacacgcggcggagggcaccgatgggtaaagaaaaatttgattgtttttgatcaataataattgttttttccattttcagacagcaaaacgatcaacagcagatgtgacagcacagagagagcgaatcaatggccaaaagcggcggatggatttcttcggaagacattaattgatcactaa

SEQ ID NO: 77969 - DNA, 373 bp, Heterodera glycines
atgcagtcgtgcctcatggatagcacgacacgatgtatcggaatcttgcctatcgtctgctgtctagccagatcacagaaggtaaagctaaccgacgacaattgaacacggtgttttaaatattttatccatttgatattgtttcatgctttatccaggtggtggatgactgcgtggtgctcaatccgggccgcttcgacagagggaagggcaccggcacattttccgttctcgacttggacctttcgagtgccattggcgccacttcggtctcaccgttttgcgaagtctcactcttttcaacccaacaacaacaatgacaaaaatcacatttttgagtgtcgcaattgcccattttaacatttttgacaaa

SEQ ID NO: 77970 - DNA, 1350 bp, Heterodera glycines
atggtattagaaatttcagttccgtctctaagattgactgattttcggaatttttatcacaaaagtaaattttgccttaaaaattgtaaaaagtcacaaaacgcaaaaaagttaaaaaatcccaaagtgtaaaaaagtcaaaaaaagtcacaaaaaatgtatgttagaagcttcaaacaaagtgtagaacacttttgcagtcattttaaggtcatttagagtcagcaaaaaaaaagaagtcatttgacttaaattcccatccctagtcattaatagggctggtaaaaatatggatataaaagcgcgaaatatggccataaaatatggaccaaaaattgcaaaatatggacataaaatgccaaaaatatggacataaatttttccaatttgaggtacaatttctcaaaattcttcaaattcgctaaatgcaaagtaaagctttttaaaatggttaaatatggtattataaatcattttaaaagaaaaaaacacgatacagctaaaaattactcattttagcgaaaaatcgacttgaaaagcgaaattttcgcttttttgcttatttttaatataaattaattaatttttaagaaaatttaaatttaatcagtattttcgacaaaattttgctaaaaatgcctttttcggaaatttttgcggtctttaggggtcaaaaatgccaatttacctgatgggggccgttggttttttggaaaaatgccaaatatggacataaaatatggacttaaatgccaaaatatggaaaaatatggaaaacatggatataaaaatccatcctagaagcttctaaccaagctaaaaatatgtttttcgtgcgtttcaggcctcccacaatccaggaaaaaaatatggatttccatataattaattaccagccctagtcattaattaaacgccatcaaaaaggatgttgcgtaaaatcatcaaaacaaaaattgcttataactttgctcaagagttacctaattaaatatttttaaagtttgaaaacaattaatttctttgctaagatgctattttttaaacattgaaaatttcaaaaaagttattgccagaagaaatcaataagttttctcgaactgccgtcgaagtcctccagcagcgatggaggtttagttgggcattgatggcgacacaacattctttgtgcgcgtcgaaagtgatgaggaggaagacgaacagcagcagcagcaacagttcaattcggatatggccaagtgcagcagcagcaccagcagcagcacgcatttgcacctcccccggcacctctgccgttgtgtgatgttctgcaaacggtagcctaaacccccttttacctataaatgtgaa

SEQ ID NO: 77971 - DNA, 440 bp, Heterodera glycines
atgattggcttattcagtgttttagtttgtaatgcttttgttttgctgccatttgcaattcatttactcgtactattgattcacaactgtttggtacgtatgcttagtacgttggaagagtatgacattgaaatgaaaataataaaataaaaagacaacaattaaaaatagattataaaaaaataaaattgaaaatgggaaaaaaattaaatcgaataaaaattcatgcatttatgaacaatgatatcaactaatcaaattattaaaaaattacatttgaaattaatatattccatagaaatattcgacgaaaaataaacaattttttagttttataagaaaataataataaaattaatttgctattagattttaagtgtattttatatgattattatagaaatattctaatttctataaatttatttaaattaaaaata

SEQ ID NO: 77972 - DNA, 545 bp, Heterodera glycines
atgctgaggaatgctctactgatctccattttggcactgtttggtgattgcatggacaagggaaaaagaaaattaggaggaataagtaaacataaaaatacaaataaattatttatttatttcgtaaaatttaggtattaatgagccaagtgaatatggaaccaaagaaaaagaagccatcgcaacaagtaaatatttgtaaataaaaagtgaaattttaattaaattaacatgaatttaggcagaaaaggcaaagaaaaagtcggcgaaaaaataagtaaacatttaaataataaataaatttattatttattttttatagatttaaacattatggacacaactgaacacattgcccaaatgggtaaaatttgaaacataaatttaaaattaagaaatacaattgtggaacccggaaacaaaaatttattaacataaaaatttataaacctttatacatatttatttatacattgaccaagtcaaagctattatgggtaaaattgttttctttgatattttaaatatatttttgaaaaattaaa

SEQ ID NO: 77973 - DNA, 2175 bp, Heterodera glycines
atgctatacattaaatttattacaattgaaaagtcattcttttcattttcagatttgtctgctctcggccttccatgtaagcttttagtgcaacatttattaaattaaagaaaattatgcgaaaaaagtagggagcggatttatatggaaaaaaatgcaaatgtggacaaaacgctgaaaatttgccaatatatggataaaaattcctcagaaatttggttcaaattttcacaaaactcttaagccattaattaaaatgaaaaaatatatatttgattctcgaaatatcaaaaatattatataaatttaaatatttggtgtctgaaaaatggattttcttttcattgggaaaataaattgtcaactaatcttaaatttaataggaatatgaatgtaaactttgagaattctctgtgtctttaaaaacgtccagaggattctggaatcaaaacgaaaaatgatttataatggatttttaagtcgaaaagggggggggggaagtggaaacccataaaatcccctcccaaatttataattaattagcaaatttaattattattttttcatttctgtccagcgaagtactacccttcttggtacactccggtcgccaaaaccactccgtcattcgctgctcgtctccgcgtcggccaattgtctttatttgtggcatttttggtgccattggcaattggtaaattttcaaacaataggaaaaatatatttaaacattccaagggaaaaaatatgaaaaagtgtgcaaattgtatatatttttataggaaaatttttccaattgttttcaaaaacaggtactgaattctcgggtgcccaattctctgaaagttagggatgtgcgagagttgctattctcgattcgagaagtttctcgggtttttgcttctcgatattggctttttagtctgggaaagaaaaattatatacactgtaatcgctgcaaatattataaagtgataatggtttttggccaaatccttttaacaacactcactcaaattgtcgaatattttcggcggggataaagaaaaaaagagaaaagtttttattttttgcacaaatctcattcaaaagtccactttgaaaattctttgttctcgactctcgactcaagaaatttatcggcttttctggggtatcggtctcggttctccggacgatttctcggtttaggttctcgtttttcgctaaaaaccatttctggccatcattatagcgtatatactgaacgggtaaaacaaacccacaaaaatgaacaaattgttgaaaattcatttgtaataataaacacacaatttcagttcatgtgacgaccaccacacttttcaatggtcattaggccaacaaatcaagccgaaaatggacagaaaaaaaaagtgaattcgaaatgggtgattgaagaaaaaaagcaaaaaaaaaagagtaaatgaaaggacggaaaggaaaggaattgtcacccaaatttatatacaaaaacatgtattatttgtatatttgaataaaatttgagaatttaaaacaaaattcaattaggcaaatagcataaaatgaatcagcatttgccaattttaatttagtgtgcctgattcatgcaggcgaagactaaaatttgtccagaatttttaaattttttcatttttctatacttttatctactctaattgtcttttttatgatgatcaatgatcacagatgccgccagaaaaatttcaaaattaaactaatttatatatatattaccataaccagaattcgacatttttcaaaagcctggacctgtatttttctggacaaaaatccaggaaacccaggtccaggaaaaacccaaggtttccaaaaatggccttggcctgaatgcaggaaaaccaagcctgggccgaagacctatagatttccctattaacaatgcctttcaattagacactgaattggatacccgcccgacattctcgggtttgcctacccagcccgggaaattgtagacccggtctcttgattaattttaatcaaattttgatatttttgtcctcccttttttccaatcattttctccttttcccccacatttttagcttttgttattcaattcctttttgggttgctttgtcatcgcacattctcatctccatcaaaaagcaaacgcctgctggcaataaa

SEQ ID NO: 77974 - DNA, 759 bp, Heterodera glycines
atgtggttttcgtgcatttctcgtcgagttaaagccgcagaaaaaataagtaaaaacttaaaaatccgcgcccttttaataaatatcttttttaaaaatttaacccagtaaaaatgaatatgacatttaatttcagtcaaggacatttttggattattctaatcaattgaaatctctgacgtcgatcatttttctgattttatgtttcttagtcaatttgttgacactaattgcttataaacggcaccgaaaagcgactgtcacgtcacaacaaactgataacattgagcggaaactgttaatttactcgctgcttacttttgctggccacgcccttttggcggtgttttttgtatgtaaatttaaattttaaaatatttttaatttaaatttttattaactacaaaataaacttattccaatttcagctttccgtcagcgaattcgtctggccattttatccccagtacagtgccatcatttacatccaatacccatgggtcaccgatctttgcactttggtgttgtccagttggctgctgttgtgcacaagcgacaaatttcggcaccaattaattggcacttttttgccaaaatgccttttgccgtcaacgagggcacaaaatgttgttgttccattggacaaaaacaatgtcttaattacagtgcagccttatcattcatcaaaatgggcagcgagatgacagaagcggataattgattattgaaaaagagatgcttattttaattttaaataaa

SEQ ID NO: 77975 - DNA, 520 bp, Heterodera glycines
atgatttggataagcaatatttatggacgaaaaatcaccaaatttggacataaaacatggacgaaaatcaaaaatatggccatgaaagaaccaaatatggaaaacaaaaaaatgtaaatgctgacgttgttttatgcttaaaaataaaagattttgtaaaaagttgttcaaataagaattttctaaattttttttgccagcttttaaaaatagggaaaagaaaaaaaatttcgaaaagtggataaaaagcattaaaaaaatttcctgcgtaattttattcactgcaaaaaatatatttcatttttttcaatccaacttacattttcgagaaaaaggtgtaaattgattttgggcatagaaattttaaaaatttatttgatctttttttaccactctgaaatgtgaactttgcactttttaacgcagaaatatgtacacaactttctttataggatatttatgtatgagataaaatgtgtaaatccatgaaaatatcattttgttttatgcctaaaataaa

SEQ ID NO: 77976 - DNA, 1939 bp, Heterodera glycines
atgcatttacataaatactggtgccatttaactcaggtaatttcaagtgccatgatcggtctttcgctgttcattggcatcgtcggactgttcgccttggcactgttggaccgtctttctgttgttgaacacccctggtactcagctcaacgggaggaccaactgaggtcaaagttcaacaagaaattgttggcatgcacagcgctgatcaaaatggtcagttagagtggccagcagttgagctgcttgagcttatcagtgtcgagttgagaaattgctggaactttccgtttcgagcagttcaggaattttaaatcccaataatagtgtcataatcaatcccctaattgatcctgttaggatacataaaatcaaccgtttacccctggcattgtccatacattttgctcattgtcagctcaccggcattgcctctctcgcacttgcggcttttctcgagttcgagaacgcgcaattggcactccgtcaagagtactatcgcatcgttcttgaccaactcagtgccgtgttggccattggcagcgcaattgccgatttgtacgccggttacaacaaagtgcacggcacattaaatcttaaggtaaacggggtccggacaatgcgtcagtggacgctccgtcaatagacaatccgtcagtaaaagaacaatcagtcagtaatggacaacttgtcagcaaattttattctgtgattgttcattgacggattgacaataactgacggattgtcccggagcctaagagccttcggctcccggacaatccgtcagtaagtggacaatccgtaagcaaatttgttttttaaaacacccaaatttatttaaaatcatgtgaaaattaatttaaatcgctaaaaaagtgaattaatttattttataaaaattatgaaacaataatttttaaaagaattaaatgataatttttcgagatggtcaattaattgaagtataaagtaactagaaatattaagaatgtatgaaattatatttattaaattgaacaatcattttcgcatgatttttgatcattgctcaaaaaaaatttgctgacgaattgtccactgacggattgtccggaccccggagcattccatcttcaaattttttcatctcaatgtttcactgtatatttgcattttatatcacaaataaaatttagaaaattaaaaattaaattgtaaaattcgctttttcaggtgagcattgctttgtccaccctcgccgccgtttggtcattcaaatcagtagacaacaacgcgtttccgttttacaaaatggacatcaaccaataccgagtggccgttcacacatcccgtaaacattttgttgattggtttttgacaaaaaaaaatatattttaaaattggcatttgcatagccgataattcaaattttaaacagagactacttttgctaccatttcgcccccacaatatgccgtggtgatcattcacggcattctgatcggtctgctcgcccttctcgcgttgctatccgcttgcactgcgattcttgcggcaaacgcgctcagagaatgcatcgccaaaagggaagagctgaccgagctggccatgcagaacaggcaagaaaattgccgaatataaacaacgattgccacatttttcaaaaaaaaaatgacggcactggtaaaagcaattctaaactaggcaataattgatagagatttgtccatgagctcttctaattaaccaaaagaacttcttcggtttttaaaggattccccccccccctaccacaatgcccgtagccagaaaattgggcagggcacccgaaattttttttttctccgttgttatttttcaaaattttgagcgctgagcgcgaaaaactggaatttatagcggttttgtgccagaaaaggacccatttttgccattttgggttggggtcaaattttca

SEQ ID NO: 77977 - DNA, 932 bp, Heterodera glycines
aagggtaccactgcgtcctcccaacttgagaaagaactcagtgcggaccacgtattttcgaacgagcatttctatggtctcataaatgtaggcatgcattattttattactttaatttgaagattgtttttcaatcattcacttttagttcggcaacacttgttatgcaaattcagtgatccaagctctgtatttttgcaaacagttcagagaaaaaattttggcgtacaaacaaacacacaaaaaatcaggttttgtgcattagtgaaaatgccatttagaatttttcagtttagtcttttttaatttgtaaatgtttaagggatgcaacgcgataatttgctcacttgccttgccgatttgttctcaaacatttcgagtcagaagagaagggttggaacaattgctcccaaaagattcgtcacaaaattaaagcgagaaaatggtagtttcaattaaaaaaagaccaaaatttaaacggttctaagattttttgcttttttaagaattgttcgacaactttatgcagcaagacgcacatgaattttttaattatttgttgaacgcaatttctgaagttttaatggaggagaaaaagaaggagcaattgggcggaagcctaaggaaagccaacagcgcaatggcaccaaacaaacggtcgttttccgcgaatgcaaaaggccaacccaacgatttgtccgcaaagcaattgaccaggtactatttatatgtaaaactatgttgtatacatgttatatcaaaaaactaaaaaatgcataaaatttgttaggagatttttttttgcttttttactgtttatttttgcaaaatgtcgattttcaagaagtctttctttttaatgggtttttgttaaggcaacatccctaaaaggtattaaattacgtgccgagcattatgcattattacaaaaa

SEQ ID NO: 77978 - DNA, 2577 bp, Heterodera glycines
  unsure (1)..(2577): unsure at all n locations
atgctgctgtcccaagaaacagactcattaacgcctttctcggggtccaaatatccatcacttcttgtgcaggcgacaatttgctcaatctgttcttcaaattctgctaaatacaaatgtccgaagtgtttagttcgcacatgttctgttccgtgttttacaacacacaaagagtcgggaaaggtaatctggaaaatcattgacattttccatagctttgtctaatattgatgttgggggcaaatatcaattttagctttgtcttatttttacttacttttattagctttattttgttttgtttttttttacttttttcctttcagtgtgtttttcaatctgaccaatggaagaaaattgaaggcttttccgagtttaatgacgaagtcagcataaatgatcaacaatttattcacagaattgacgaaaaaatgaaaacggacaaaaaaagagaatttattccaagaggttagaggttacaaaataaatattgccagcgtttatgtttagaacaaaacattccaaccaaaattcaactctcaagtgaccaacgatttctcttgcaaaatgccaaaatgcgcagaatttggcttcatttggacgaaaaaaatagtgcatatttcgttgattatgattattagctgtaaaatttaaggttcggccgggtcgcgtcatgaacgtttttccgacacaattttttggacttgtactgtgaaatttgtcagtcggtgctattcaaagggacatggactttgtcaaggaccttctgataaagcagttctggaggtctatttgtagttttcctgtggctatactggccaattcataaaaagactttttatgcaatttcgaccctaaattctaaaatttcatattcgcgtttgaataattagataaatcaaatgctcacttttatacattgacctagtaaaaagtggaaccccttctcccggccatgcggcccatccgtgtccaaacaaattttaacttttcccgggttttctacaaaaaaatatctccagctctcgaatgcggactctgcgcttacttcgccaactcttgtgcatttcgttaagcctattgtcgattataacgggtccgatgatgaagaaatggaaaaagatgcggggaatgattttgacgtgttgcaagccgagtcctcccttaaattggggctgagtcaccacgacgatggcattggtgcggaaactaacaattcggatggctcttctgctgacagtacaggggatgaagacgaacagcaaacgccgttggaatgggtggacttcactgtatgttttttgtccacaatcggcttttcctatttacaattgccaggtggaaaatatcccggaaaacatacgagtcgcaactcttttacgccaatttctacgccctaaaccccacgggcccgtggtcacgctttcgcaaattgacatggtcaaaatggcaccattcatcaggtaagagtacctgctattttttcattagaattttacttaccatcacgtttatttgagtcataaataggaactgaatttttggggcgcactcttacgggcctggttatctgaatgcgtcagaaggttttctgacaatgggtcttcggctacaaaaggatttccgattttcccattagcccgaaaatacttattcattattatttttaattttttctttttagtgcatcaaaatccctgctttcctcgccaccattcgcttcaacttcgtccgataaagaaactgcagacaaaattgtggtgtattggaggtttctctaagcgatgaaattgaaaataaactgaacgatgaccaatcagaagatntaaggttcataaaactaataggttttatagctaattattcatttctaaggtattatgttgttgacccgaatcggactattttggataatttgcgaaacagacacgtgagtcatccattgtacgcataaagctaaagcgattcaactgacaagggaactgtagaatgggtataattttggaatcattgggtacgtgatcgatcctattaaattttaatatacacgcccccaatatcataaattaaaaagttatgagtctcgaaaatacaaaaacaatcattggaaatgttggagaatcattaaaaagaacaaaattggaaatggaatggccacacaaagtcaggcaccaattttggattttttatgcaccataactatttggtttctcgatatggaggcgtaatattaaaaattgcgatagaatagactatttattctctctatccaatggaaccaatttatactcattttccgttcgggttaaggaaggagtagatgttcattttatttcaaagggttgtttggattgcgtatttaattcaatttttatttgcttttaggtcaatggccatccatgttttgtagttgtgctcagcagacacacagaatttggcgagttggaattgccattaatatgcgaggaggaacagaaacatctgcagaagcgaaacagcgaaagagaacagacaatgaatggtcagcggggggagggacattgggatgatgccgaaccataccaaaatgggtggctg

SEQ ID NO: 77979 - DNA, 342 bp, Heterodera glycines
atggaattcttcctgattctcaagcagaagcacatcaaagtgcaggtaatacctgtgagtgaatccattttaaatttaatttcctaaatctcaattgctttaatcctccatcatttttaggagacgtacgtttccgagttgttggtgaagattctcgtcgccgcggacatgttcaaccgtctgcagcagttgctccaatattcggtgatcgaaaaatccaaatttttggcctacgaactgatcgctttgtcctcgcgctgtcccccgctgtaccaaattggattggacatgttgaaaaggcgtaacgactgggaacaaattgtggaggcaagtggaatttga

SEQ ID NO: 77980 - DNA, 1771 bp, Heterodera glycines
ttttccctcctttttctctttgtttattccaccgtatatctaccgtattccgtggccaccatttcaccagcattcagcgactttcttaccgtggcatacggtgacaaaatcgaagaatcaatcgcccgcagggacctcggttcattgggcagcttcggaggtggcaccaaaatgccaatgtttacgcgaaaacggccgattgtcatggtccacgggtgcgaatcgtttaaaattaattaattaattaaaaatcaattagcgaaataattatcattttctaaaagacaatagaaaaatcaacagattgagcacttttgcggcagagtatgagaacattcgacagtactttctgatgaacaattacaccgatgcggaagtgtacgcaagcagttacggacatggcccggtgaattggactcatgacgcgatgaaatgcgaacacgtgcagagggcaagtggggcaaggaaggcgccggaagggggggggcgggggacggcacaatttgctttgggaattaacccattagcggtggtctctttcagttccgttggctaatgctcgccgttgccaattacacaagttcgcaaattgatgtgatcggctacagcatggggtcgccaattgcgagaaaggttttcaaaaaagagaaacagttctgattaatctgagcccctaaaattgacatttctttttggtcggttttttcaaatcgctgctaattattggtttaattacccgtgcaaatgcttgccgtgctgagacgaagtacgaaaagtgcaagtgatcaaattaaaagcaaaataattatttaaaaaattaataatcaaatgttatttaatttaatttaataatttactatttaaaacattctttacataatttaaattttatgttaatcataaacgtgtgagtcgaagtttaaaatttgaattttcttatattttagctttgttgactttggcatagaggctatgaacacttccttaaaatcaatatgcatttataaattttgctataaaatcggatatcgaaatcgaggtttttcagtatttagaaataaaattaacgcaaaatgtgaaaagttatttgatgctatttggtatttaaataaattaaccattaaataagaggctcagcacaatatgattaatataaatatagcgaatattttaaataactaatcatattaaatttaattaactattttttaaattgatcacttgcacttttcgtacttcatcattacaccaattcttgctgctctgacaatgaatttttgaatttttcaattttcggcaatttcgggcggcgtttgcgtcgacaccggcgaacatttgggcgttccgctgactccgttggtgcacactttcgtcggcgtcgccggtgccaaccgcgactgtgtgcatttgtgccgctttttgacaaatgtcaccggcgatgcgccgtgcaattcgatcaacggaatggcgtgccattcgcggtttcttcgcgacattaacaacgcaccccgggggtaaaagagggcgattgaaataaaatttatttttaaaatttactaaattaaagtcaaatatgcatttaattattagccattataaactgctgtctaagacgacagcatttcgaggccactcatcgcgtgtacacaatttactcccgccatgacgacgtggtgggctatttggactgcgatggacttttggtcagctccatccctttgcaggacaatcacattgaggtggaaaaagttcattaatgacctgccaggcc

SEQ ID NO: 77981 - DNA, 1557 bp, Heterodera glycines
atgacccacactacaaacaaggatcccattggtgcgcgatttatgccccttcgaagacggaggaagcggtcatatattttgatagtctcacaaaaacaattcctcctattgtaaagacatcatttatggataaatttccaaaaggttttgttacaaataagcacccgtaccagtccccacttactaccacatgtgcaattcactgtatcgtgttcatctatcacatgtccttaggtcacccatttgacgcatttctgcgtatgttagacgctagtgaaagccccgacatgtattctttgtgcattttgaataaaatgattaatccgtatttatgtgtgtgtgccaattttaccaccctttgggaaagggcatagggaatgattgattaatttattataccacggcgcacatcgcgcgctgttggtgcctaccgcatatatacagcgagctcacgcgggaaaggctcacttttttcgtaaaaaataaattaaaatattaataaataataataatgtcgttggaagatcacaattattgcggcgagttgggcggcaacgaagcgcccacaaagagaagaaaaagaaatgatgatgtggagggagagccgaaatttcaaaaaaactgcattcgcactctgagcgccgacaaacagtacagccaaaagttcaaagtgcagagtgtaaagtcgactttatcattgaaaatctgcccgccaaccccgagtcaatgctgcgcgcattgttcgctcactgcatgtcaaccgccctggacgagtcacagcagaacgggatcacaccggatcaattgggctctacaatctcttcagatctgctaaatccgagcatatggattcccatacgccgcatttccgacaacaccgccgactcaattatgaaccgcttccttgaggtggcacagtcaaaatcgcgggagggctctctgtggggctcgccgttcactgtgaccatcacaacgcttgatgttgcgcagctacctcagcggcaacaggtgcgtggcagtgggaaaaggacaacgaattcagtacaacatatcatcaaagagagtgctcttctgcgaatcaacaacagtgatgatgcctattgtcttttttacgctttggagacaagcaggaagtaccacagcaaagagatgagccgacagaccttttctaaatatattaatcggcagaatgggcgacgactggaagacgtgtttggactgatgagcagcgcaaacattcgcaccgatctgagagaatatgacgcggttgtctatgtgccgatagtcgtggactattggaatcggaaatacgccacagcaaaccagcgatttaaagtgttcatttttggcgcaacaggcacctatcggccaaaatttcaatatgtgccggacaattacaacgtcgaaatcccgctctaccatcacaacggccatttcgacggaattcgatgcggggtgggcaaagcggtgtttgggcgtgactactactgcttttcgtgcgagtgcccctacgataatgccaatgatcattcttgcagtgtaaagcaaagtgcataa

SEQ ID NO: 77982 - DNA, 923 bp, Heterodera glycines
atgaaagaggttgatttcaacgaaaaatctcctctgagtgaaattggagagctttggaagctctatcgagtggtgaactatacgcctagaaaatttgaaattttcgagctaagccccctaagcaattgtcgaaaattttttaggccaaagaggaggtgaaaatattttactggtatattttgaagtacttagcacgaaatgaagctaattttaagtctcataaattttaaatttttttaaattcttgaaaaattttcaatttttgggtcgattgaaatttcgtaaaacatttgaaaattcatatctcacttgaggcgaggtcaattttagtacaatttagcttaaaaaggaaaaaaattattatatttggtttgccaatgctgaaagttgcaaaatcgatgagtgattgcaaatcaaacaaaaacaattgctgtgataatatattgtgtagtgcctacttacctaaattgtcgaaaacgaaatactttaaaacaaaataccgtatattctctaattatcccccggggggtttatttttcaacctcctcagaaagggggggggataattagagacgggaggacaatggagaagggggattatttttcgacagattactttagtgtaaatttttgaattttttcaacatgttgcaaaaaatgtcatcgcgtcaactcactgcacgtgctgggtcgtttcttaaattccgccacattgggcgtttcttaaatccgccacattgggcgtttcttaaatccgccagggcgtttcttaaatccgccaaggggtagtaaaacaaaaaaaaatgtaagacatataaattcataacttggcttaaattcaatcaaattaataattcttggtatcattcaatagctctagatgttctctaacggaatattaattttaaaaattttttaataaa

SEQ ID NO: 77983 - DNA, 673 bp, Heterodera glycines
atggcgtcgttggaaaattttgttggtaagtaaaatttggcggaaatgacaaattgctttactaattaacgcttaattattgttcattattctctctttgtttagttgacctgttttctcaaatgcaaaatgctcaacaaacggaaatttatgcaaaaattgacgaggtgaaaataattcttaaaaaaaaattgaaaaattgctttattaacaattttttttcaaagttcgcgcaccaattgaagatggaaattgatatgatggcaaatgccaccaaaacaaaagttgaagtgttggacagacagcaaaagaaaatttgggacaaattttcggtgttggacaattttattggcattttgaaggacagatttcaaaatggtaaaataaaacaataaaaatatttcaaataagtaacgtaaaaatttaggcgttgaatatttccatagatttttatattaattttttcaattttcagaacttttaacggctgtccattcggatgttcgtcagaatatcgctgaggtgaaactttaataaaattcaaattatttttaaaaaattcagaagtttgccaacccgcagcaaaattgctgggaagacaccgcttgtagcaacgagctcgaaatttttggcaacgaaagcttacgaattcactacaaaggcgatggaagcg

SEQ ID NO: 77984 - DNA, 244 bp, Heterodera glycines
atgtcgatttcttttaattcaacaagtaacgacgatttcacaccagcagcagatgagggtaaagagaaaattaaaataaatattgaaaattaattaaattaaataaaattcaaatgtttaattgtatttcagaagaagtgaaaggtgaggtgttggaaaacaaagaaacattcgctgaacggagaattggcaaattggaaagagagaaagtgagtttggaggacagaaattaaaatggaataaa

SEQ ID NO: 77985 - DNA, 1658 bp, Heterodera glycines
atgccggtgcccgagtttgggctgtccgcactgtcggccaaacaactgttttggcacgagattgaggagaaggtgtcggcacggaacagtgaccatgtgttggtccaccggtggacgggcacaacggacgccgacttttggacggagttgggatgtgacatggatacaccggtggtgctcacactcgaggccattgaggaggacccgaaccatatcaaggtttaattggatacggaatttacagggttaggtaggctcttatatgggttgtcccccataaattaaaaaaatatatgatttttaaagagtcgcatagaatacttttttccttaggtttccgtggtccgctaatcacgaatacggcatctgttttgacccatttctctagacccgaattcgaattgaatcgctttgtgcaaaaaatttgaatttaattgaaaatagagtttttcactttttgttcgaactcgggttcggagttcgaaagagaggaaatggatgttggattcgtggtcagcgacccccgaaaacctaagaaaagatgtactcaaattgcggcttttatgcctcctaaataattttttttgcacaaaacttgcgcttttctcccttttttttaatttgggggggggggggcggccgcataatggaaaagtaaccaacaaaaaaaattttttttttttgaattgtccatctttcaaccaatgcgctagcatattccatgaattcgttatttaggtatatttttttaatcatcaatattttgcagataatgttcagctgcggctccaagcattcggccttcattttcaaactttgtcccatcatcgaggatgcttacctgatattctttgtgccctaccaaaaattcgtaatttttttttgttattgttgaaaaacaaccattttttcattccaaattttcaaactctaaatttgttggaaaattcagagatagttatttggctagagaaggtggcatgggttcaattggtttgagcattttatctttcacggaacaaaattttttttttttgttgcgcagttgcgaccgttcacgcaaaaatttgcaggagaggggaaaatgatattgtttcgcaactcgagatccaaaaatgaaacaatttataattgcatccgaattatttgtttgctttatgcaccttgaaacgacatcgcaaaaaaaaaattttttttttaaattttttgaaaaacaaaaatatattgtactagtaaatgaaaacaaaattgctaatttcaataaataacgagaaaaaaaaaattcttttctctttaaatttgttttttctaaaaaaaatgttttttttttgcgggagattcattttgtctttttggcatgctccgctaaccattaccctgtttcctccattttttttctccagcgtgacggccacctgagtctgctgtcctcgctccactttctggaggagtacatgggccgcatgcgcagccgcacgttcgtcgccgagcagaaccaatgcatcatctgccaaaagctcaccgagctggtgttccagccatgcggacatgcaacatattgcaaaaagtgtgagcgaaagtcggccaaggacccgcgctgtcccatctgtcgtctgcacggtttttatttttgcatatttgttttggccaatgcctag

SEQ ID NO: 77986 - DNA, 744 bp, Heterodera glycines
atggctgacgaaatgcacaaagcgttcaccgacggagtgccctttccggtgcttaaagttctcgaagtgagtaaaataatagtagtgatttctcgaaaatatcatgcaaatgtcaatagttacgtgatttaattttaatcaaaatttgtgtcgcgggacaaaaaaaaagcatttttagtagatttttgccaaaaattaactagttttaagcatatgtatccattttttcaatttaatggaatttggtggttcggcaatttcaccggggaaaattcttcaattttaaagaaattagggaacattaaaaaatccatggaaatttaacaattacgagttcgtcattggatgccaacaatatccacgtgaaataaaacttaacatcttaacattctcaattacataaaattttcaaagtaaggacaaaaaaaataaaattctgctttatgccaatttatgcattttgcatccaatttcagtacttttctatgggccaacaatcattcgcatggggacgacagtttcggaacgcaggcaacttcactggcacaatgctttggttcgattaattttctaatacatccggacaatccgtcagttaaaacttgatttttcggcaattaattaaaaatgccgaaaatttttttaggatgatatgccattgagcagtttcattgaaaaaaatatgcagagaaaaatatatgacattctcactcgttaattagtttatcataatttaataattaa

SEQ ID NO: 77987 - DNA, 695 bp, Heterodera glycines
ccattctcgagttgctcttctctgccactctgtgttctctgcaatcacttcgtctgtactctctgaacaccgttctttctgcttctctggacaactctgtcggcccaccaaagtgccgtttcggcggtggaagacaaagcatcgacgccgaaaatgggcaacaccgcggcggtagtcaaaagcgccgctttggccatattttgtcgccgatcactccgtgcccgtctggcaaaacgtcgttgactctgtcccactgttctctgaacaattcatcgccagccgtctcgtcacgaagcactgcccggatcagtcctggccgccaccagcgcacgttcgtctcagccccgctgtcctcctcctccacctcggacgaagggccggtcagcaacagtgcggacagcaacaagcaatccgttgcttcgtccatcttttccatctctggcacgtcgtttggctcgacggcaccgccgacaatggcgccggagagcgacggcaccggcagaggggaagtgaccaacagaagaagcagaagcagcctgatcagcagtagcaggagaacaaccgcagctgatcagcaacaacaacggattgatatcggagacgacgaagaagatgacagtgatgagctgatcagtgacgacataaagcatttcacaatgagaagtggggcaaaaggggaggactgttggcactga

SEQ ID NO: 77988 - DNA, 1122 bp, Heterodera glycines
atgtccaatattattttttcacatttcccatgggaaaaattgaaatttgtttttgttttgccgtctttgatgtttctttctgttatttataaaaattacagtttttcatatgacaattcgacgttattcaggtcattcaattaaaattattcgtgtttaatacctttttaaaattctaattaataacttaattagtttttaaaaattattaattttagaaattaattaaaagtcaataattaagggccccactaacaatcttttcctttttggtgccgaatgtatctgttcaaaaatggcaatattctaaattcttataaaattttttgtcttatgtgtaataaaactggtgacttttacattccttttattggattttattaagaatttgacagaaattaaatatataaactttagtttatttttaaacttaaatataaaattggccaaattaagtcaaaacactcaccgaaagattttttgtatcataaatttttttttcgtttttatccaaattaagcatttatagtatgttcgatagctcaatgtgttattattattctgccaaactttttccaacgcccggaggagcaaaaatgcattcttataattcatttcataattaataatttagctttgcctatttgcaaaacaatagcggtgaattatcatcagaagaatgctttggagaaaaggtatttaatttaataattttcaaacaatttaaattattaagatggtttacactttgaaaatgaacgactcgcgaataattcgtggcaaaaagtttaattgctcattaacatggcttttggagcgctacaaactttcagacaaatacgcaattaaagagaaaattgaagtctgttttttaatttatttttaatttatttttattaattttaatcatttttatgtcaaataccctggccatcccaaatttgtgttcgtgacagccgcaaataataattatttcccttatcttcggacgttcattgcaaatattaaagaaatatttggatgccaacagaaaatcattgcttatgatttggaaacggtgacaaaaaacaaagaatgggtaaaaaaatgtttaattttactgtaatttaaattatttttaaa

SEQ ID NO: 77989 - DNA, 417 bp, Heterodera glycines
atggcaaatgaatataaacaaaaaagaaaatattcaaccaaagaatggcgacaaaattataacgaaatttgtaataaaattggagtaagccgttcactaattgaaaaatggaagaaacaattcggaattcgctgtaagagaataatggtgaaagaaaaaatggaaaaaatgaaaatttattggaaaataaaaagtgaaaatccaaaaatgagtgataatgaaattgcaaaaattttgaaaatccatcaaaatagcattttcaattggaagaaacaatttggagaagaaatttaaagtattaaaaacagaaaatgagaaaagggatcaataattatttcgatagaaaattgaccaattcttttattttataaaattattatcttggctaattgaattatttaaatttatttaaataaa

SEQ ID NO: 77990 - DNA, 384 bp, Heterodera glycines
atgtatgtcaacacagtggaaagtgaatccgtgacacgacagctgggtcatggtaggaataatttaattaaatcaagaaaaacaaaaaaaatgctataataatttttaaagagtatataaattcaagtatcagaaacaaataattttaatttctttctttgaaaaaatatcataaatgaaatcgcgtgttattttctatgaaaaagtttattaattgcttgacaattaatcccaaataatttagctaaacaaaaggaggagtgattcatttaaacataattttgtataaaaaatcactttatgaaattgtaacaaaaaaaattattatatatataatccaattttataaacaagaacaaatgaattgcatagttaacaattaaa

SEQ ID NO: 77991 - DNA, 3083 bp, Heterodera glycines
atgtttattgccccattcactctaattctgtcaggggccactgggagcggtaaaacccaatggctaatgaaattgctgagaagctacgctgaacttatcgatcctccgcctgctaaagtattgtattgctactctgagatgaaccaatcagtcattgagctgatgaagcgcggaatcgagacacataatggcgttccggatcaagcactgatccagagtcagccgaaaccattgcttcttgtgcttgatgatttgatgcttaatgtagggaatgattttttggatttgctgttcacacgcggttcccataattggaatgtcagcgttatttttgtcacccaaagcctgtacggacgtaatattaagaccgcaagggcgaacagtcattatctggtactgacaagaaacccgtcgggccaacttcaagtcagaacggtcggctcacaactttttccaaaacgattaaattactttatggaggcttacaatgaagcgaccagtcagccgttcagttatttggtgataaatatgcacccaaatgctcctgaaaatgagcggctgaccagcaaaatatttcctggagagaaccgtgaggtgtatttgcctatagaacagtaatatacgcgtgcatgtgcgtgttgtaagcaataaactatttaagaaacagaattttcccatcaaaagtagaatagtccatacattcgcgataactcggattttcttaaaaaattacttccaccaaatcggcaaaaagaaaaacgatttgcttcgcggtgcttcagcagaacaaatactaggcttggtggaaatttgtgctaatattctgaagtttaatttccgactaaacaggcgtcagaggaggcggttggccgtgtacgcagactactaccgagcaatcgcacgttcacgcagtgagcccacagccagacagcggctacaacaaggcagcggaattgctttaggagctattttggcaccaataattagcgttttggctgagcagttgatccaaaaaattgttacagccgcaccggcgtcaacaacaaaaacaacatgaagcacactaaaaaaatggtccttgtaccggagagtgaatatctggcgcttattaacatgttgaaaggaggcgccggcagatctgactcacttctgaatgagaaagctgctctcgatgcccaaatacaaagcaaccttagcgacagcaaagcgggtgcagatgtcaaaatcaagcgacattcttggttgtacaaacaaaggcatcagttgaaggatatgattgagaacaagccacaaaaggtgatagtggaaaatgcaacgggcacagcgccagcaaacattgccccgtatatgggcatacaaaaacccacggtcaacaaactcgacgcagtggacagtcaagatgatgacaaaaaaattaagggccctaaaaaggtcagacggaaagcgatgaatgctgctacttccagaatacgaatgtccgccggcggcattacaagttacggagaagaaactgatgattacacatctgcgccagagaccgatctgttgccgatgagcaaaaagagacaacaaaaatttcttgaactgaagacaagcaaggaacattacgctaaaatgatgagtatgatcgcaaaagaccctgacaaatttggtgtcgacaaaggaacaggcgaaatcttaactaattttaaaaggccaatcctacgttccaattatatggattctttgttgtatattacgggacagagaagtgaagcgcccaaaggtcaccgcttctttgcacaaaaactggctgctgatccgcggatgatgaaattttttgaaaccaatcaaaaaggagaaggtaaaggcactaataggaagcgagaccgtacaatgaaaaagaagattgttcttgtgagagcaaacgctataaaaacggatggactcagtcgtgtggtggcacaaccagacaaagggttggctactcgtaaatttaagccgactttatgggcaaaactttagctgcggaaaagttgttggaacaagtgtattatgaccttcggtcgccagcgagttacgctggcattcaaaaagtgttggcggaagcgcagaggcgaaacccgagcattacttataaggatgttcatcaatttttgcataagcagcgcacctacacgttgtttaaacctagaaaaaaccgtttccgtagactaaaaacagtgcccagcgggcttcatacggactggcaatgcgatttgtgtatcatggatgcactgaaagagcataatgacggatttcgttacatcctagtgtgtattgatgtgctgagtcggaaaattctcactgccgaggttgagtcaaaaaaaagtgagcacatgattgaggcttttgagaagatttttaaaaaggcgggcgtgttgcccaacaagctgtacagtgatgcgggtcttgagtttcaggcgaagaaaatgaaggactactggattcaaaaacaaatcatcaaacacgtgatgtatagcccacatttgcacgcaggagtcgttgaacgtgctaaccgtacgatcaaagagcgactttacaaatattttagcgaaaagaacacaaagcgatgggttgatgtcttggaccgcattgtacacaatctgaacatctccgcgaaccgaacaacaggaataaggcctgtggacgtgaactttaaaaatgctgccgcactacgcaatcgcctatataagcatagtgaagtggataaaaattctgcaaatagctcaaaattacaactgggtgacattgtgcgaattagcaaggaaaaaggtgacttttccaaaggttattttccaaattttacggacgaactgtttcgcatttctaaagttaacccaaccgacccaccttcatatagaatccgcgacctcgacggagaggacatcaaaggaattttttacgagcaagagctggtaaaaacggttgcagaaacatcacatagggctgaggtgttgaaaactcgacgacgaaacggtgccaaagaacattttgttaggtggattggctactcagacaaacacaatcgttggattcgagacgaagaccttgtgcgaaattag

SEQ ID NO: 77992 - DNA, 2450 bp, Heterodera glycines
atggcgttattttccatactactaatgctgctgctactcctgctccatctgtccggcggagaatggatcaacgtagagctgagcgttgacccacccaatttctttgaccgcacctttcgctccctttccaagacatcacccatccaacattggttcggctacaaccggaacaccgcgtgtcacgttgagcgggaaacaaacataaatcgactgtacaacagtgctgatatgtggaacattgccctcactgatgtggacaacttcatgagcatggggcggcaaactatcgagttgttgtccagcgccttgccgtgggcgtgttttggacatgaccgccacagttttgtgatttttgaccttcgaaatgacgcaaatgaagtggcagttgtgcgcggtcatcagcacaagatagcacgaaatttgagtgcatatggacgcattttgttcgaccatatttccggccggttgtacatggtggacaagcacgagcgccggatccatgagctgctcatcaccgattttgtgcgatggtggactctgaataacactgacggaggtggtggtggtggtggtcataacggcggcggtgagaacagcacggcaacacactcgttgaggagcaactttgtcgggtttttaccagaacaaaaaacggattttttcattgcggccgaccatgtgtacctgatttggcgtagacgtgtatacaagttccgtgttgggcactacttcaatgatccttcctcgcagctacagtttttgaccaactccagtgacattcgcttcaacttcctcatattcgagagagatgatgacgccaaattggaagacagcactgatcgtagaaacagcagagcagcagcagaagcatccgcaggactaacaccatcatcacagatgatgaacagcattgagcggctcctgctcgctttgatgtacctctttgatgtggcagtcatctgcattgccgtttgtgtgatccgaatactgcgccgtacaacatcaaattcgggcccggacaacaccagccaagctcgcagcaacgatgtagtacacactacggaaatgatggcactgacaagtggtgaatatggtctgatccagtcactttcgttacctaactcggggggcggagctttcgcctctgtctacaaataatccagtgtacactgtgacgcttttgtcgacagcgaagctatgtctaaccagtcaaccactatttaagccgagcattttgtaccattgacttgctggcttgtttgatgattgttagtatttgttctgttgttattatttttgttgcctttctttctattgctgccgcggctgctatttaatgcaaagagcaataaagcattttctacaaacatttgcgctccaaactgttgaagagctgtacgcatattttaaagaggaaattttgagctccccgggcgaatattacccgaacccgctcgcagagttcgtttgtgtgcacattgccaacgaggatcacgctgaccaaccggtgcttgtgaacggcacacttgacctgatcgaaggcgtagaactctactccacatgttatccgagaacggaaacggggaccatcgattggtaagtttgtgggagcgcacgtgtgcgtctgtgttttaactgaagcgtaaccaaccagccaaccatttaaacttcttctaactattcaggagcgagccgatgtacgtggagctgaaagacctgcgcatttgtccagccaattcgccgcgatgtcattgcgtacaaccagcgagcaacaacaaccaacagcagaagctgccgcaggaacagtatttgaccctttggatgggggaagtggacgaggtggacgaccatcaccctcacatcaatcgccgcctgaatttatgctggcgcgacaacgtcgacgacacagaaggcggcagcgaaaactgagcaatttggtgaccgcgctgtgtgatttcaacaaatgcggaccggcccgactgccgatgttgctccgaaagcgacgagcggaaaacctggattttctctcgcgtctctgtctgcagactgtgcacttaaagggcgacagaaacgtgcatttttcggccgccgcattgtccaattatggtgctaatcgcacgtttgcctaccgcggccttctgtccataacggttgagcagcatttgttcactcggcaccgtgtccgcctcaggcacccatttctgccctgtgttgtacaagctggaggcaacaatcactgttatttctaccctcttgagctggtccgcgtttgccagtcgccttcgtctgggtcacataccgacaataacaaaaacaacatcagcaacaacaacaacaacaaaacaatgaggaggatgccaatgcagaggaatcaacggctctcgcgggatcgtcttcatcaacagccgaagcgttctagtgtttgtttgagagatgtgtacgatccataa

SEQ ID NO: 77993 - DNA, 544 bp, Heterodera glycines
atgcaccgctcggacaatcaggaaagtgaggataataaaaacggggggcgttcaaatgaaatggagaagggaggcggcaaagagggcggaggcgatgctggagtaggtcgggctgatgaagacgctggtgatgctctgaaaacttcatccccttccgtctcctcctcctcctcgtcttccagcggtggcccagatcaaccgtccacaagcagcggaagtaggaagagacgatatggcccgccacctggtgttgtgtcagcgtcctggctgctgggggctatgaaggcgcgagagcgacagcgctgtgaatggtgagcaggcgcgcgcgcctctttctataataaaagctacagtgcttactacgattattgctctgctgcccgttagattttaatattgatttattggcaggcttgaagcgctggaggccaaatattcgagaatggagcgggaattgggtgctgaagatgatgatgatgatgctgtggtggactttgcacgagattcactggagactgttgttagcaagtgcgacttattttaa

SEQ ID NO: 77994 - DNA, 354 bp, Heterodera glycines
atgacaaatgtgcggagcggtgaagtgaaatatgttcaaaaaattcgcggcatcaccttcgatgtgcggaacagtcaatcgctacaatttgagtgcttccgcaacaaagtgctcagctacggaggagtagaaggaagacgtgccgatcgcggcggaggagatgatgatgatgatgatgatgaggacggtgatgtcgccgtgcagcaaagtgcagctgtgttcacatatgacaaaatacaaccgacaagggagagccgaattatcacacgcaagcaaagaaagcactatctgcccgtttgtcagaagggcataatcaacgaacagctggaagttttaccctttggctaccgataa

SEQ ID NO: 77995 - DNA, 1258 bp, Heterodera glycines
atgaagttggatgaacgtctattgttcagctgctgtcatcgttgtgcgtctcagttccgtacgttgaacacgcgatgccggcacgagtgcgcacattcggatgctcagcgagcatacaccggcaattacactcacattgagctggcaatggcccttcggtacggctaccgtgtggaccgtttctggagagcgtggcactatgagcagtggtctgccttactgagcaattcttctcaaattggaaacaaaaactgtgcttttcaggagcgaccaaatcttcaaggaatacgtacgtcttttactcaagctgaaggttggttggttggttggctgcaggtttcttgttctttcgtgttttcacccgtttcccgaaccattatccaaacaagcacattgcacatacatatatgttacgcagattgaggctagcggcttcccagatgggattacaactgaggcacaaaggcaccaatttattgatgcatatgccaccgtgtatgccgtcactctggacgtgggaccgtgtgcataagaatccagggcttcgcttcatcgctaaactaatgttgaacagtctttggtaagcaaaaaaaaaaattatgcaaacagtcgcctcattctttttttggccactatgatcgcatccatctccaatcaatcaatcaatctgttttcaggggaaaatttagcatgagaaatgaactaggaacaaacaaggtcatcacaagaccgcaggaattctactcattggtgctcgaccataaagtcgaaatttctgccatcattccgctatccgacacagccattcgagtgatgtaccggcacaaaaaaagtttcgtggaggagcattcgtcaagcaacatagtgctcagcttatggacaacaagtaaattgtcaattcattcagcaaccaggattctgtataacaaacaaaaaaaaatgtttgtttgtttttttctactccaggtcgtgctcgattgaagctgtttgagtacatgatgcaagtgcagaatacggatggagccgagcttctttatacagtcagttatcgtaggcgaacatatgcatttgtcacagtggttggcataagagttaccttttcccgttgtgtctccaggataccgacagcgtgattgttttgcacaaacgtgatcgggtgccaatcctcacgggcgaatatcttggacaaatgtccgaagagtacgcgggatttgaaatacaaaccttcatatgcggaggtatgcgctatgccaattag

SEQ ID NO: 77996 - DNA, 4231 bp, Heterodera glycines
atgcagccatcatcatcatcatcatcatcatccaaaagaggggtgacacaggctggcacagcttcgagcgggggccaaagaaagcagcaacgccggaaaatcggtgatgcggatgatgatactgcagctgctgctgctcctgtcacagcaacgcccggtcgttgggatttccgctccatggcctactttgaacaatacataccgccgcctcctccttctcctccgacctcctcatttgaggctgcttctttggcttcaaattttggcactcagcagcagcatcgccatcgcacaaaacatgtccaatttggagccggccccactaccgtggcagcaccaattgatgaatccgatcatgaacgtgatgatgatgatgatgatgatgatgagcagcatcagcagcagaaaatgttccgtgagacagcaaattacgtccacaagctggaccgtttctcaatgacacgtcacatcagcgaatttgagctgaacgttgagcacgaggagccggacgagcagctacgcaacgcgttcagccaactgattcggcgagcactcagaaatgctcagcagcaattggacgggcgctcggtgcaaaaaataggcattgcgttgcatgggaaaggtgcgtgcgtgcacgcggcacggatgctatatagctttacatgatttgcgcgttcaggcctttatgatccgattgttctcccactgcgcccacctgagcaaaacaatgccgacgttttgatgggcgagcttgataaattgggccagagcggcacagacggcggcggcgatgacgaccaaggtggaggtggagcggacccggacgccggcatcatggacaagcgtacactgctgttgtccgaaccagtacagatgaccatcacttgtgtggcgcctccgcagggcagtgggccccgctttcatccataccagcactggggctacaacgaccggtatcggatccggatccggaacactggtgaagcggagcgtcgcttttgcatgttctatgcacttgttgcggggcgtgcctaccatgatcggactctgtttattggactgaacaacgacaacaacatgaacaacaacatgatcatccaaatggcgctgctaatgcccgatttttgccgaacacatgagctgttcaaccgtctggttgccagtgacgaggcaatgcggatggctgccacgcgtctgatgagagatacgggcatcactgccgacctgccggcatatggcatggatcatctgcagcaagtccaggcctattgggtttgctcaaaaaattttttttgttgttatatgtactgttgttgctcaggatgaacgttttcctggtctgtaccgcattgtactgtttgaagaccgtccggaggaactgccaaggccaatctggaaggggccgatgggacgccattttgacgtaccacttttcctgtccaacagccactatgacgcactgacgaagatcaactgtttcttcaaactggcaaggaagtattgcgtagagtgtgagtgtgcttatacggtggacaataaacatacgctgcactgtaaggtcaggtgcccacagtgcacaaaaggtaatattcataactcatttgttgttgttgtttaccctattcaattaatctataccactcccgcacagttggacccaataggccctgtgcgaagcatgatggcgtaaagattcattgtgcggaatgcaatcgctactttttctcccttcaatgcttcaacgaccaccagggctcgacatgtgcgctgctcaaacgatgcaaattctgccaacgagtgtaccagtgtgacccgaaggaacagcacaaatgtcgcacaaaatattgtagaagatgcaaggtagccaattttattcaaaaattccagcctctctgttctctttctctcttcattgctctgtgtttacttttcgtatgttcttttatttgtcatcgataggtttaccacgagaacaaagcggggtcatgtttcatccgaaagctgaatgttccggaagagcgaaatcgatatcgaattgtctgctgggatacagaaacgcggctggagccgctggacgatcgcggtcatcgcgtgcacaaagtcaattatctatccgcgcgtgtgctgtgcaccgactgcgctgatgccgacgccggtgcgataggtcagcctgaggaccatcggttgccagcggaggattgtgaaatatgcaaaaatattgacggcgtggtggaacgagcgaaagattggttagcacagcgctaagagttagaatcatatttatgttattactatgtcaacataatctaagctcattcattatctgatcaacaacaacaaaaacaactaaaccataatttatgctctctctctctctcaggtccgaagtggacgggcatgagccggtttccgagttcgtggaatggattctttacgcttgggacaagcgctttacgacctatgtttgggtaaaacacaataaccgtagtaaagtgtgtgtgtgtgtgtgtgtgttccaggcccacaacgcgtcccgttttgatggtcattttgtgctcaaatatcttggcgaaacacggaggcgacccgatgttgtgatgaacggactgaaaatattcgaaattcggctacaaggttcgcgcgtgcactcaatgctgatttggcgtgactcgtgcctgatgatgccaatacgtctcgaaagcctgaaaaacacctttgacctcaactgcgctgacaaaccattttttccttacgcgttcaacaaaaggttggatgtgtgatgggcaccgctgactatgcgctgtttgtattgtttttttttgctgtagggaaaattacaatgttcatctgccaaatcttcctccgttggtcgactactgtcccggttcaatgagcaaagacaaaatggagaagttcatggcatggtagtgtgtctgttctcacgctgcacttgaatttttttgcagcaccaaacaaacatacaaacaaacaacctctccaggtacgaggaaaatcaacacacgccattccacctacccgacgagctgcgggtgtactgtcagaatgacactgaaattttgctaaaagcaatactcaaatttcgtagccttctgatgtgtaaggtgacgagcgggtacgatgtgctaccggtcagctgtacgattgcgaggttttttaagcatacacgggcgccgaagcatagtaatctgttttcccattaagcgcatgcatgaacctatttcgtgcccggttcatgaaggagaagcaattggccatagtgccagaggcgggctatgagcgaaacgatcgggccagcgtcatggttctgtttattaaaattgaaaatatcaagaaataagaaatgttaccgcatttccaggccattaagtaccttgactggcgcgcaaaaagtgaagggctccagatccaacatgccggaaatgggggtgaaaaacgaattcgtaaccacaagctggacggctggattcaatcacaaaataagtgtattgaagtgctcggatggtacgttaaataagggtgctgctataataataataacaataaatgttccaagctattggcacggttgcgagcggtgttttgacccttaggataagctggtcgatggcaaaacatgtcgagagcttaatgaggccacccaagatcgactacaccagctccgagaaccggattgcacgggagagtgcatgacggttgaagagatttgggtatgttgtgatggttgatgacccaacaatatcaattctaataatgattcatttcaccgtgtgcaaaccaaaaaaaaaagtgaattaaggagtgtgaaattaacgccttgctgtctgatgcagccaatcatcaaatgagagccttcttcggcgacataggcaacgagcgaggcccaattgatcccagatcggcatattttggaggtaggtgtggtacacatttgctgaggtgctctcatgtcgatcggtcggtcagtgggtcggtcgtttgatgttcacaaaacaattcaggtcggacaggaccgttgaagctgtttgccgaaccaaaagaggatgaaaagatatcggtatacgatattgtcagtctttatccgtgggtaggttgtcatccgaatcagcattatgatatgctttttctgaatgttctgttttaggtaaactacgataccgagtatccaatcggagtacctaaaattatatacccgtctgctgtacagatgttg

SEQ ID NO: 77997 - DNA, 1410 bp, Heterodera glycines
atgatcgggctgaagtggcacaagtgttcagcaaaatgctcaaaagtgccgggtgattcaaattggcacaaatttacattaaatgtcatcattaccgatgccgggatcgttcaaaggcgtagccaggggggggctgagggggctaacccccccccccctcccgaaatccaaaaaggcgcctagtggcaccgccggacccctattttaccatatttttggaaaatggagacaaaaaagacctcttcattggataatcctaagtgttctctcgattagcatgcaaattaaaaataattaagttagggccaaaataattaaaataaatattaaatgttttggccataatttttgatagtaacaattttttttttgaaattttgcacaccaatagagaaaacaaacaaaaaaatttattagttgcgcaaaacaatgtcggccgcggcggcgttcacggcgtgacggcgaaacgaaaagctacgcattaattatgcttcaaaagacgggcgaaatgtacaagctgacagttcatgtttttgccgttttaataggcataatttttgtaattacttttacaaaatcaatttttataattattattaaaatagggacaagagatcattatcatcagcacaaaaaatcaacagattaatagtttaggattaaaaattaagttggaaaattgaaaaattccgtttttggcactttttaaaaattgttaaatttaaaaaaaacattccatgttttcgagcagtctcttcagcctgaattttccatttatccctctaacaactgtacttagataccacattttcaaaaaagccataggcaaagatttttccattttttagcccctcaaaagaagggctcattttttgggcttacagtaatttagcgggcggtgggggaaggccctattttaaggaatacggtagcatttgccaaaaaattccaaatactctaatgctacacttagtatacatattttctaaagccatgggcgagtgtttttccaatttttttccaaagcttgaggggctcaattttgggcctacagtaatttcgtgggcgacgggggcatatttgaaggaatacggtaatgtgtttttaccatttttaattttgccaaaaaattaagccctttttactggaggcgcggccggccttgtgctgtccctcatctgctccctggccggcctggtccaatcatgtgccaacatctgttgcggatgcccaagcaaatttaagccgaacgaaggctgcctgagcgggctcatcaccggctttggcctcgttggttacgcggcactttggctgatcgaagtgccattcacattcaacagtccgatcagtgatcacaaggatttgcgtgaaaagctgcaggaggcgcttgatgatatcattgactattga

SEQ ID NO: 77998 - DNA, 1352 bp, Heterodera glycines
atgccgccattgcctgccatgggattgccaaatgtggtgccaaagaatgtggcgaagacgccgaccaacggaattatcgccgtgccgcccattcccgccactgtgccggcggcaaatgtgatggcatttggaatgcgaaattccatcgctcgggtattccatttttttatttgtgaattaaatttcgcaatttcgttaactgaaatttcgtttatgccttggaattcaattcctaacatttttaggccttaaaattccttttcttgaaactttttggagttttgtgttttcccaatttttttgagcctctggtttgaatttcctgatttttaaaaattttttaggccttcaaatttcctttcctggaaatttttgagtttcatgtgattccgatttcccatcgaaaaccccatttttttcttattgttgtttatattgtctggcgtaatcaaggcgtgccgatggctcagttggtttgaacaaaaatactcgtcggtatggaagagcgccatgggttcgagtcccatcggatgaatttcattttccacacaccaaaatgttttgtataccattcacgttggcatccaatgagaattctgatcagttttgcatttgattgcactgcactgatcagatggttacggatgcgcaaattgtacggctgtacttttaccgacgggattttccatgaaattctgttaaaatagcacagaacaattttttaaatattagtgagaccgtcaaaaaaaattttttttgcaatatttcaatgctttcatcaaagcaaaaaatttcaggaattttttttaaccgatttttagaaaaatttttgagaaaaacttgttaataactcatccttgacttatgaaaaaagcattgaaaattttttcaaaatttttttttcttgcaattttcgtataagaaatttcctaaaatgcaccccaaatttgaactctaaagaatttttttattaaaaaaaatttcgggcattgaaccactgcaagtttaaaaaaacgcattttttcttgttgcctcaccctctaatttgaccatcacagaaaggcacaacggcggtgcccggaatggcacagcgccgcggcgcactcaccaaatccgccgcggctgctgcgtgcgcacacggcgtgtgcggcatcaacgtggcccgcgctggcggcggcgccgctgcgcggccggccaacaacggggcggcagccaagacgtggcagatgatgcaccagcggcgtgagcagcggcaggcgttgtcaatgcgtcgtgcggcggcgatccccccaagtgccgcttacttatccgccggttccaagctgtaccagcaacaacagcagcagcagacg

SEQ ID NO: 77999 - DNA, 806 bp, Heterodera glycines
atggagctggacttcaagaaaggccttgacccgttgacaggtggtcgtcgtactcaaaatgttaaaaaattgtcacggtttttgttgggataatttgttttttggagggggggggggaggaaaattttttgaaaatttatttggttttgacataatttgtttttatttggatatacattatcagagatggtcccagtggtgggcaaaatacgcagggtatacccctttaattatttttcctaggaaaatattaaattttttttcagaaatttttggttactgtttttttccgaattcaaatcctgttttttccgtacttctgctgtttgtttcgggtgggtggccgcaaatttttccatttattcccctataaaaattccaaaaaatttcggtaattgtaagtttcaaaaataataattatgagcaataatgctcgaaaaacaagtttttccggtttttttggccgtaactttttttaaatgcacaaaaatttttgtaattttaagactaataaaaaaaaacaattaggggctctcaaaaatgtatagcaaagattgagaaaaattttgtccatttgtatttacttctttttccatttttcagcgccgaccgcttccgtcaaaatgttgcccacttacatccgtgccattgcggtcggtgaggagcacggcgaattcttggcactggacctgggcggcaccaactttcgcgtgctgctcatcacgctggagggcgactgccggtcgacgatgcaaagcaaaatttaccgtgtgcccgaccacatccaaaagggcaccggcacggcg

SEQ ID NO: 78000 - DNA, 163 bp, Heterodera glycines
atggccaaattgtggctgctttccctcgcctttggcattggcatcgccccctttctttttgccgtgtccctccaaaaggccaaagggacgacgcgaaaatggttggccgaacacatggacgaagtgatcagcgaaatggacttggccaaagcatacggagcac

SEQ ID NO: 78001 - DNA, 921 bp, Heterodera glycines
atggcaccgctttgtttccaagtgaacgaatattacgcgcagatttcggagttggtgcccggcctgtacatttgcggggtgaccggactgacgccggccaacatgaaggccttccgcatcgagttgatcgtgaatgccaccagggaggtgccgaacctgaagagtcttggccatatccagcggatgaagctgtgggtggaggacacgacggatgaggaccttttcccgcactttgacatcgtggcagatcaggtagagtctctatgatcagcagcactgatcgctggattgatcacccatggccgttgcagatccatgccgtcatccaagaccgtggtgccgttctggtgcactgcgtcgccggcgtttcccgatccgccgccatctgcttggcctatctgctcaagtatcggactcggtctctgagagccgcctaccatttgatgtgctcaaagcgtccgatggtccgtcccaatcttagcttttggcgccagctcatccactacgagcaggtcactcgctcaatttgccatagaatgaccaaggcatttggggtttcagcaggtcaagggcaatgtcggctcggttcgcatcgtgcgggacgaagcacagcccgacaaattgctccccgacgtaagtctcggaagcggcactcgagaatccggacatttgttccctttcaaggtctatctgaagatcgtgatccccgaccagctaagccgccctctgtcgccgaccaatgccaccgatgcgtcgtccccccaatccgtgccaaagtctcccttttccgacgagccggcaccagtctcgcaactgccgctgagccggcatcgcaggaacagttccggcgggtcggcgcgtgtcaaatttgtgcccgtgctcgaagtgctcactgaaatggcggctgagtccccggcgtga

SEQ ID NO: 78002 - DNA, 1155 bp, Heterodera glycines
atgtttccaaaatggacatttggaaggccaatgcgacaaggtgcaggaatggagacggagaaacaaattgccaattccaaaaaggaaaattggaaatttacgaattggaacggccatgaaagtgaactccgcttccttttcaaaaccgacgtggcggtagatggcaaagacatcaaattcgtactcgacagcggggctgaaataattgtgatcgatgaactatcacatgaagtcatcggcagcccccgactccgcaaatgcaccgaaagtggatgcatgttcgatggaacacaagtcaaattcgtcggaaagggagtcgcaaatttcaaattccgcgatatttgcatcaaaagcgaatattatgtggcaaaaaggggatcgctaaatttgctaagcgtgcaaatgatggatgcttttggactgctcaacgaactcaaggccaaaatcaatgcgccggtaaatttgtgccgagtcggagaagagacacgaggtttcactaaaactccaaaatcgccacaaaattcgacagtccaatcgcacatcgaccatctcaaagcgtcattccccgaaattttcaaaaacgaattgggccgttgtatgaaatttaaggcgcatctgactttgaaagcggacgccgcaccggtctacagaaaggctcgcccagtcccatacaacgctcaagaagcgattgatggagaattggagcgatgggagaaaatgggtgtgattggaaaagtcgaatacaccgaatgggctgctccgattttggcggtgaaaaaggccgacggaagtgcacgcctatgcattgactactccactggtctgaacaacgcccttcaggaccaccaacacccgctgcccttacctgaggatattttcgcaaccctaaatggaggaaaatatttttcgcaaatcgacctcagggatgcatatctccaaatcgaattggatgatgaatcgagaaaactatgctcgatttcaacccatcatggcaattacgaagttaagagacttccttttggcgtgaaatcagcgccagccatcttccaatcggtaatggaccaaatcttggcagaatttgaattcgccacagcttacttggatgatgtgatcatcgtaagcaaaagcgtcaaagagagcacgctgatcacttga

SEQ ID NO: 78003 - DNA, 421 bp, Heterodera glycines
atggcacaagccaatattcaacaattgctggacgcaattagtcaactcgtcaccgcacagcagcagcaacaaaacaatcaaccgaatccgaacaataatgttccggtgctgcctgacatttcggtcttcgaaccgaccgacgaaaagggacgaatttcggaatggatcgaaaggttttcttttgcaatggactgttcggcaccaaacgcaactgacgcagtgaaagtaaaggcattaatgaacaaattgtcggaaacggcattcagtgaatattccaaatcatgcctgccgtcaaaagtgaccgacttcgacttcacccaatcaattgaaaggctgcaaaagctttttgcaaagcctcaatctgtcttcatcgatagatatgagtgcttgatggcctcgaaaaccgaaggagaagattttc

SEQ ID NO: 78004 - DNA, 1409 bp, Heterodera glycines
gaacaatatgaggcgaaaacgctttcttggacattggcatgtgccggagacgagcacaaatgctgctccgatgtggtcgtggccgacttggacgccgtcctggaccgatcaggcatcgggctcacgaagatagaaaatccgctcaaagcgctgttggcaatgtttctgctgaagtctgaagcggtcgcatcggcatctgctgccaaaaagctcatttcgcaaattctggacacggatgccgattgggaactcgcaacatattgcagtgcccgagaagacgacgtcaaaaacggcacatttccatccgaatcggacgtggaaagcgttttgcgaatttggatcggccactgccaaattgcccgaaaagaagtcgaaaaatcggcatttgggccaatttcaattgagctgccccaaggcctatcacttctgcccgaaactgaaagagaaggcatgaggaaatcgctcgaaagtgcgccatttttgctggagaagctccgtgccacagaaatccaaaagaagacacttgtcaccgccgaaagagtgattttaggcgattcaaatgcctaccaattgaagaagctatggccaagatcagcatttgttggagtgcaagaaggatcaactgccgaagtgatcagacaatttgatcaagtggggctggcctcaaaagtgaagtggctgattgtgatggttggaaaggactcaattttggctggcgattcggtggacagtgtcatcgaaaaagtgaagagactgcgccaactttgcctccgatttgcgcatgtgaagatcttctggctgttgccgccttttatctacaacaaaaaggccgaatctgaagaattctgtggaagaatgagggcgctgtttcggaagaaaagcgaaattgagctggtggcagtgacagaagaaggaagaagtttgctggagatttggcgtttcgggaagagttttaacaatgaacatgttaatcataacggatggatgacagaaaaggggctgaaaacgctgaatgcctggctcacatcattggttccgaattttccgggcgatcgagagctcgggatcagaaccgtgaagtcgaaagtggtgaaaattggtgccgtgaagggtggtggtccaggagacccttccttaattcgtggcaatgcaccagagagaaatgtgagaggagaaggcccaggtgacccctccccatctcgaacgattggcatttctgacaatggccccacaggttccgcccgaccaatgaccaatcaaaatcgcgggtttgagtttggacgagtcggcacaggttaccgctcggtccctcctccgacgttccgtggcccgtcttcacgtttccatccatatcagcaaagtcgtggtcgtccggcgttccatccgactccgatgaatcgtcgcaatcg

SEQ ID NO: 78005 - DNA, 355 bp, Heterodera glycines
  unsure (1)..(355): unsure at all n locations
atgggcaccccccccactgaagttaaaattaaatatccaccagattatttgtaagggttaagtatttatattatatatgtaactacctccatccttatgcagattattacatatattttttagcaaaactaacaaagatagtcaaggattaagaattccgtctctaacaatgattttttatatttttaaactcacaacctctaacccgcgttctccagacaccctggcgtttgtgcgcgaaaatcatttcgcgctctgcgataagtagggtgggttaactacttatgacccttcaataattctaatcaatgagncctggttaaactccagaaatacggtagacgcggaacttaca

SEQ ID NO: 78006 - DNA, 1224 bp, Heterodera glycines
atgccactgatcttcaagccaactaaaacgtcaaatagccgtgctctcgttgagccttctcgtcttctgaccgatgatgaaatttggaagcaaattcgtagtgccagtcgtcactttgtccgaccgcaagcgcaaaatgccgtcattgtgagcccaccaagtgcccctcaaatcgtagaggaaagtgaggcggcaattgatcagggagggtcaattcagaatttgggtcaagtttcactgtcgcctgctgtcaattcggtccgcgaagtgcccaaggaatatccggcgctacatccgcgctacttttccccgaatttccgcggtcgctctcccgtccgtcatcgctcgactccgattcgtgctcctcctccgcgtcgccgttggtcgccgccgcgtcgtcgtttgtcgccattccgcaagtctccgcgtcccgcccaacgccatggtcccccgtctcatcgctctgaaatcgacacccgccactcttcggtcacccgcttttttccgcctccgccgatgcctttgaaccgcgttggatcttcaaaagcgcaaatgattccaccgtttttgacccctgagcaaccaccatcccgaattcaaaattttgaaatgacctataaccattgcactatgacccaaaatttttccaaaatgtgatcagtgattatttttgaattgttgtttatgtttgatttaaattttttgttggtgtggtgctgtttttgggtcaaaaacttggttctcattagcgtttttcctagttgttagtcgttttggcacttagtcattgttcatctccaattagtccacactcaaataccaaaatcattgcatcgagcggttcgggcaccgtatttgttgcatttttggattgttgtcatggttacaaagtaagtgccaaacattgaaaatcgtataaaattaagtacaccgtacggattcgaacttgcccctcccccctcataatccccatttacgccatttctacagaattttaaaatttttatttacttcgaatgccgaaaaaactaaattaattcttcattttgtaatgttctttctattgactttaaggtataaaaatctaaaaaaattttttgtaaaaacttatttaaaaattctttcttcatctcgcacaactctttttttgcttggggttgatgattcgcctcagatggtcgctctgtgctaaaaggattccctgctttataaatttctggtaaa

SEQ ID NO: 78007 - DNA, 2140 bp, Heterodera glycines
gaatttacggacaaaaaattgggtaggaacagaaatgtgagtaggaatacaagggagtggaaggaggaacgtgatcgcatcatcattatatgaaataaattgaaaatcctaaaaaatttgcgaattaggatttggaattaatgacgaatcattttttagtaaatttaaaattgctcctaaaggttgggctcgattacaacgatccaaaatctaggcccaggtccaaattggatttttcttggacctgaattttgtcccgaaaagccaggtccaagtctaggcttttaaataaaattaatttacggatattcaggttttactcaaatcgttaaaaaccaaaagctataaatgagtgtacaaacaaataaatgtacatatatgcatagagcataggtaaagcattcaagcgtgtttgttcttgtgcttttccttgctttacgcttgttcgcttttcctttcttcctgcttaataacgaaaaattaaaatttgttttggcattatgttttattcaaataaataaaaaattaagttttatttcaacttttaatttttcaaaaacccaatcccgtaattcccagtcactgcacttggcccaattgaaaaactagttttattattattattttagtccaaaactctttttttccatttttcgtcgcaaatgccagcacggaaagccaccaaagtcatcgccgacaaaaataatgccaatgactctgtaatgattgtggacaatgacgatgatggtacttcgcctgacaatgttggcatatcggcaacaacaacaaaaatgccaaagtatgctgcctcgcaacggcaaaaattagtcgcaacggcacctccatctacggcgtttgtcgcttcaattcgaattggcagtccgccgcccgggcgtcgggtgctcgctgttgccgatgcagttggcatcagcaatgccggcacgtcatccgctagcagttttggccaaaatttgctccaactaacagtgccgggtgcaatgatttgtccggaggtgggcgaaaatgctcgaaattttaattgatttttcagaaatttgctattttttttttgtttgtttaaaaatgaggggaaaagtttttttgatttttttatccagtgtttttttcaaaaaattcagtgacgtagcgaaaagaaggattttatggccgtttttgaccaaaaatgaccaatttttcccatttgtggtcaaatttcaaaaaattattgtacaatgggatccgcgaaattttttttggtaatttttatgaaatttgtccattttttcttgaaatttttttagtgcttttttcaaggcatcccagcccccctccccttcccatttttaggccggttatatgcgtggccatggcacatttccgcacgaaaatgcgctccattcacaattggccggaattgtagtccaaaccaacaagttgatcagtgtcaaaccgatcaagagcaggttttgttttgttttttattcattcattcgcccattcaaaaatcgaggttttttgggtctgttttttaaaaaattcttggaaaattttctggatgatcttttcgtccaattctaccatggttccagtccaaaatccggttaataccaatgatttacaggaggaaaccattcacagtaataccctgaagaataacgcatcttaacacgggctggatgcatttttcgtaaaaatacccgaaatcctgttacctcatacaaattttttacaatttattaccagggagcagctcccctcgaaaaaatttttagatgaaaattttatgacgaattatcaagttcctcaaaaaaaattttcatatcccgaactttaaaaaaatttcattgttttcttataaataaaaattttggcggtggagggaaacgtacgtaatacacccttattactgcctcccccttcctaaaaaggtaccacggcgatgtgggtgacgtggttgtgggccgtattgtcgaggtgcaacagaagcggtggaaggtggacatcaactctcgccaacatggcgtgctgttgctgaacagcgtcaatttgccgggcggtgagctgcgccgcaagtccattgaggacgaactgttgatgcgcgagtatttgcgcgagggcgacttggtcagcgcggaggtac

SEQ ID NO: 78008 - DNA, 358 bp, Heterodera glycines
atgcttattttggaagtcaaacccgcaaatttttatggtaatttattaatcaatatatttttttaaaccttttctagcaagttattaattttattagtttctgttttttatattaatttttagttttttaactcaatttcattttattatttattttcttttttattaattttaattaatttattgcgtataattttagcattagtcaaattaatttaatttctctgtttattttatcttttttctaaaaataaatatttgtttatttagattttctatttattgtgacaaataaaggaattaaggatttctgaactaataattttgttatgatttttttattttaaactttttatga

SEQ ID NO: 78009 - DNA, 2891 bp, Heterodera glycines
  unsure (1)..(2891): unsure at all n locations
aattatttataataattaccaattnatgattattaagctctccaaacggtgttcacttttgtgattatcccggcttcaccgtctgttgtgtttcaaaatcgcgttgcttaaacatttcaatgttcactattccggcaattttcgcttctctcgtcaatgtgttacttatggttttgctggtgacattttgccagaataattaaaaaataaatgcataattaatgtcaaattcaaataattttttaggtaatgcgctttcgagaaagtcatgttgggataacagagcgcaatgaaaacaaagtgaaaattcaaaaaaatattttaaaagttaaaaattcattaaaatttttaatcaaattcagacaaatgtttcgttaggtttgaatgtgccgaaagaattgcctccgtatgatcgttgatattatatttccattttttaagcaaaaataccaaaatttttaattaaaaaaaagaaaatttatgttttttgatacatgaattttttttagcgatgtatattgtgaaaatcaaaaattttagtacacaattttggcattagaacaggggtgcgatctgtccttatttgtaagatttgtccttacttattttttggtcttgatgttcttattttgaaaatttttcgatcgcacccctgcattagaactgttttttattatacaaatcttaataatttgaaccttttcatagcattggtacggcttttgccatgttgatgttcaaatggtcacctgttgatgtggtgttctatgattcattggcacatgctgtacgcggtgttgttgcactgcttgtctatgtggcatacattatttttgattgcgggaaaaagtaataattaattaatcggttcaagaatttttaaaaaatatttcaataattaaagctgcaaattttgcttttggcaattttgaattttttgcacttatttgaaaaacattgtgaaatttattaataaaaataaaaaatacacccataaaagtcattataaaggtttttctgaaaaagtcacttttatttattaaaattttaaattttgtgactttttgaaaattaaatttgtgtggcccatcttatggcactttcgcttagattgaatgatcgaattgtgtgcctattctcattggtggcactgtttctgttccatctgctcacatattcttggccctttctgtccaatcaagttcaacttatgcatcataaaacgactggtaatttatatcttttttattttatttttactatataattaataaaataaaaatgagcaattcctttgaattaatttttttttcaatttatacgtaaataaataaaatcattaagttctagttatacaattttttcggtcctttagctgtatgaataagaagataaaaggtaacccgcccgccggtggcactcaaacccaggcccttccaaatcgtggaatgcttttaaccaactgaactacgaaagaggtcctggttttttccatgtccacattctcattccttatgacatcaccacacatataatccggaaaagtatgtgatcattgagcatcgggtcgcggaatcatgggccgaaatagaagttttaagcctaaaagttttagcatttttcttacctcagctaggttattggagggggatgtaacactgaaattttcatataaattttcagaaaattctactacaaatttgggaggctgtgacttgagcaagtacgcctggtgtgccggcttgacacgggtaaacccgtggctttattacggcgccattgtgctgctgattggaccggcctttcccaacatcaatgtggccatgaacacactgttctcgcgcatcatcgggccacggatgcaatccacggaacaaggactgttggaaatgcatggcgcaattgggcggctagttggcccactgctaattaggtccagttttgttttttttctaaattaagattttactggtcaagaataaattatcagataccgtattttctctaattatatgcccgtctccaattatctacccctttcggagtaggttgaaaaataatctctccgtctctatttatctgcccggggggataaatagaatttttattttttcgaaaaaaaacttctattctatttttataaaattaatttattctaaatttaaattcatttaaatcaggctcccagttatgaggctttagcttcatttggtggttttttgatgggtcaatgaggcttaattttcaaaatgaggctttgaggctttttttgggtttttgagaaattttgaggctttgtggaaaaccgtcagaatctgttaaattttatgattaattttgataaattggcataatgtttgacaatcatttaataatttgggtttttaaaggagtgtcaaaacgaaaatctcacccaagttttccaaaaaatttgttaaatttttcacaaaaaccagaaaataaccaattttccgaaaattcacaaaattaagaatttttatgcttatttataacaataaattgaaaacacatataacattttaaacgtgtttttaaaaaaatataaaaatgaggctttttaacccaaaatgagtcttttttgcatgccaaatgaggcttttaaaattttaatctgggagccctatatatttaaaaatgaaaattcccgtcttcattaatctgcccgattctgaattttccccctttctgagggggttgcaaagtaatatacccgggcatttaattagataaaatactcccgattttctttatttttaagctttattccactaacattgtccaaccctgaagtgagttttgaatttccaaaaatttgcataaatttcccgggctcaaaaaaagaaaaaattttcaaatttaaaaaaattcca

SEQ ID NO: 78010 - DNA, 228 bp, Heterodera glycines
atgtcattgaaccgtttttgtgccatttgttgttcccaaatgtatcggcgccattggtcacaaataattagcaaatatttattggcaattattcttttgttcgctttggcaattgctgcaccaattctttggcattctgtgtgctttcgattgtctgaagtgagaacaccgcttgggcaaggacagcacaaaatggacggccccgtgttcatggaaattccaacacaa

SEQ ID NO: 78011 - DNA, 534 bp, Heterodera glycines
atggtaatgataagtagggttgtaaattatatggacaaaaaaacggtaaatatggacataaaatatggactaaaaaagcccgaaatatggactaaaaagctcaaaactgtccaaatgtggaccaaaacatggactaaaaactgccaaaataaagttttaaaccccaaaaaattccaaaaaaggtttatatattcaaatttgcttaaataaacttaaaaaataataaacaaccaaaaaatggatttaattaaaatgccaaaatgacgacgaaagcacaaatttttcatattttttggggtgtaatttttaaaaatttccaaaaagtcgaattttaggggtgtatttattgcttttcttgcatttttcttgtgaaaattcgccaaaaatggccaaaatatgggaataaaaaagcaaaaatggtgaaatatggatttattcccgaaaacccttaaaatatggatttatatggactaaaaacattcaccaaaccaaaaaattttaacgcagaaatgctatttttgagcccctttccta

SEQ ID NO: 78012 - DNA, 918 bp, Heterodera glycines
atgacagcgttcccatccccagtgtgtgactgtcgcagagaacatctgatcagttcagcaaaatgccaacttcgctctgtgcaagaattggagagacaggcagatcagttccagcagctgacacaaggcggcgacaaagcaacggcagaggctcgggctctgacgatgggcattgtttgtgcacctcttctgccgtccatcaattttgagcagatgctgttggccccattccatgtcttccagggcctcggaaatgcgttgatcaaggagttggaaactggagaaaatgccgaaatcgcccagcaattcttcagacggataggggcaaggagggaagcgttcagaaagcgagacatgacggggaacagcatccggaaaatcctcgtccatgccgatcaaatggaggcccttttcgagacggaatgggccaaaacaatttgccaaacaatggcacatttggggaaaatccaaattttcaccaaagtaattggtttcatttttgtattgtttgtggaaatatttttttaaatttaaggcccagccattgtctccaggtgatttggacggattggagacggcggttgatcagttcaaggcatttatcaaccaacaaccaatggtgcaaaaccttctttcaaaaaagacaaaggcccatttgctgctgcaccattttgttcaatttgcgcgccaacaccaatttttggggcttttggatgagcagggttgggccataacattttgggggttcaattttaaatgttgtgattttcaggagatgaggcactgcactccgtgtggcggcgacttgagcaactgtggaagacgatgccggacgatgaacaaatgcgccaacagctggagcatcatttcgtctcgaattggctgctggacaccggcagactcgacgaattgaagctg

SEQ ID NO: 78013 - DNA, 526 bp, Heterodera glycines
atggaaaatgataaagatggacctaatgactatgttcttttggaggaagttggagcagcaaacaaaaaacttgacctctgtgaaacgccatcttttttacgttattttcaattcaaaagaggtgatgctagtgccagatgccgaatttgcaaagcccaaatagcgcgaaaagatggaaacacgtcagggatggaccgtcacttgaaacggcacattgagttaattttaatttcgtttctttttatatttttttagaatttacaaggaatttgttttggcaaagtacggcaaaatgcgttcaaaagcgcacttctttttttgatgaatcaacatcacaaaagccaacgaaacaattatgtttagagaatttccgtgagaaagaaaaatggacaaatgcgcatcgtaaatctcagaaaattgattcacttaaattacgctttatctgtttgtctgttgaaccaatccaattgacggaaaagaaaggattttttgagactttataagaagcatgtccaaggtaaaaaca

SEQ ID NO: 78014 - DNA, 652 bp, Heterodera glycines
atggacaccggagagacgaccccgccaccgctggccattgacgagcgatcagagcgcatcgaacaactggagaagcagttcaaggaccgggacgacaccatcaaatttctccgcgagcaggtgcgcaatcgagaagcgctgatcagtgatctccgtcggcagctggacgagcacatggtaccaccgatggcaccaccaacgaccagcaaaagtgagtgaactttttccttttttaatttcataaaatctgatcattttttcaattttagcaccaccaaacagaggaagaccgaagaaaagactggatcaactgcagcgcagcgccaggcgcgacatcgtcgaccaaattgtgggcgtcatcgatcgtgatcgctcgcgttccgcgagccgcgcatctttggaccgaatctaccgagaaatccgccacaaattctcgcactacacgccaaagggccaaaagctgcaggagggaatggaagcggaggatggacttctgctgcttgcccagctcgggacgcagatggcttacaacggatgaaggcgactctaaggctgatcgacaggcgctttgacacttttccaccactgagaaaggtgcagtttttcattgatttttttgttttaccaactttttttgggtcgtcgaaataaa

SEQ ID NO: 78015 - DNA, 1903 bp, Heterodera glycines
atgatcttcatggaattccatcaatctctttgtttagatgatgatcatcagataaaaacatttcaaaatttgttgaccgaaatgcaaatcattggcattcgacacgacgaaattaatcagacaatcaaatatctcgaaaaaaagaagaacgagttgggcaaaattaacaatgtgtaaatggttaatcaaatcattttgagcattgaggaaatcttcaaacaggaaaaggagatgattagtggcgcttatcagttcgggaaagcattgatcagcgagaactgttcgggaaattgcaacaattaaagcgaaagggatgcttctcgtcccgaaattgcatcaccgttcggaaccaaattcagcataaacacccttttcattagcattttttggtagcaaaccaaaaaaaaacacagtcgatttattagttagttattgcttgaaaattccttttatctattttggaaaatgtttcttcacatatctccatttattagggatgtgcgagaattgatttttgccgggaaccgagaccgggaaatgaccccgagaaacgatacgagaaccgagaaatgaccccgggaaccgatacgagaaccgagacccaaaaagcccgagaaatttctcgactcgggaaccgagaaatcttaatggaattaattgaaatcagttttttaatcaaaaaaataaccaaatcactcgtcaaaattgaaatgtaaaaagagttgttattttgcatgctcctccgaaaggtttgatctcttaggattatcaatttctgacagcttgctaaatgttctttctgattcgacagtgcccggcggtggtgacaaaaaatttggaacaattaatttaatgttcgggtacgttgtgcattgttgccaaaactttaaaggatcgtcatccgggttcagagttggactcttaaaatattattttataatttttgattcgttaaaaattctaccttaaaatatgaatcaatttcattttttattacaatatcaggtttgtgagtttgccatttgtcctgtttaagttccagaaaaaagaaaatctgataaaagattttcagaaatggtttgaagcgttccttggttcatatcatccaaatcagtttcggaaaaacggcgctgtggattgatgtttaattctatttaggtttccaacaaaactttattttgaattcggtcttcgaagttgaacacatttatatgatttttataccggggattgaccaaagtagcaatgataagaaacctgaaaaaagaattgtgttatacacaccatcccgaaaaacgagaagtgtaccaataaatagagagtgccagagaaaaacaatatctttttttctctaatttttttgtctccttttggcgtactatctaatattttcattattaggaaaaacaacattcacttcgctatgtttagcttcttttctatatgttagatccacaccaaattttgcaaatcgatagagaaaaaaattctgcatcgatttctatgtttattatcatcgcttaaatgttgtcttaaaaagttataagataaaaaagttaaattattattctttttaaagatttaatggctaaaagaactttattacggaagcgacagaccaaaaatgcacgccatacgcgtgagaataagcgggaggagagaaaagcgcagacgcagagggcgagacaaggccgatgggccaagaaaagtgagttttttcatcaattttatctcaaaaaaatcatttttttgtattccagccgctacacaaccaaatcccaatgccgaaatagcactgcaggacgaagcagggccgtcaacatctgctgcatcaacggaagaagcgatggagcctccgccaccaactccaggaccagtgccaacgccggagatggacgagtaa

SEQ ID NO: 78016 - DNA, 218 bp, Heterodera glycines
atgtggggagggggaagggtaaaggccatttccggtcccggccttacaacagtatcttccttcagttgagattgatcaaatcgaattcgaatttggtggtcccaaagttcgcctcaatttcgtcaccaacaccccacatcgaaacaaatgggtacaaagaaacgggtgaaggcggaaaagcgcagtccaacacggaatctgtgaaaaatatacaatga

SEQ ID NO: 78017 - DNA, 122 bp, Heterodera glycines
atggcatcgaatttaatgatcaaaggttttatgtacgatattgtcacctttcccacgtcagcgggttcaattgtccggaagtgcaatggaacacgggaatttctttgcattggctggaaaag

SEQ ID NO: 78018 - DNA, 2392 bp, Heterodera glycines
ccaatgcaaagaaattcccgtgttccattgcacttccggacaattgaacccgctgacgtgggaaaggtgacaatatcgtacataaaacctttgatcattaaattcgatgccataaattttaactgaaatttaatcttttaaaaccatgaaagattatttctattggtctactgtttttccatttctgctgttgtcattttcagcttaagcctttcctttttcccggggaaagctttacaacgaataaaaaagagcataagatttaaaaaaattattttctcacgacaatttcggaaattgtaaaatggcggagattcaaaatggaagtggagagggggggggggctaatttatgctgtcctgctctgtcatttagccaattggttttttctcatttcagaattgtcgtttactgtgaacagtttttcattgcttttccgttcgacgagtgctaccgtatcccatccacacaatttcatgccaaccataaccttttcttggccaacttttatgctaagcatttgagcgttgcttatgcattggacggcgcttatcggctgttggggaagaaagcaaagtaagcaaaaagagaataataaaaatgaattattatatttttatttatttaaaaaagtaaattttagatttgtgcgaatttactcaaaaatttggcgaatcatggaagttttgcactatttcacttcacgcggatgggttttcgagtcgcaaaatgcgctcaaaatgtgggaacggttaagcgaagaggacaaaaaggtggtagccaaatgctcacaattaagggatgcgccatttccgatagatttggacgaaattccgttctaaaaccattgggataccggcggaattcaatctggatttccgtctaattacggaattaacggcttcctgatgcttttcccctcactcattaaacacatcacttttagctttattgtttcgatgttcgtaaagtcgactgggacaaatatttgtttgactatttgatgggaattaaggtgcctaattttgttttaaataaatttgattaacttttattaaccaatttgggaaaaatgtaaaaaagacaaatgaaacttcacggggcgtggcacggcgtttcgaaaaataaattttgttactatttgaaatgtttcgacacaagaaaattcgagttgggtcaaccaaggtcctatcaatgggcatcggctgaaagttttatacttttaaactcaacgattaattaaattatgtaattggctccaagtccaaattaaaggagaaaattttaaataatttaaacaatttttagatttatttgctccgggaaagtttggacgacgtgccgagggcacaagcaaatcttttatggtcagaaagaaattaaattttgcaaaaaaacttgggctttacaggcaaaaacaattgaatttgtactcaaatggtctcttttttgctttgctcgtccgtctttttgcgtggtaaaaaataattatttttgcttttcatttacttttaaacgataataatttatcacaaattcctattaattaattttttctgagttgtttcttcatttttcattttccttatttttggtgtcatttaataattttaaaatgcttaacccaaagatggtacatatttctgaggattatccccatttgtgtttttttgaggggctcagagtttttttttttgaaaagaggatttcgttacttttagcgttttgactataaaaccagagcaaatttttcatattttttattggtttttttggcaaaaatccttaaaaattagttgtttttttgtcaaaatttgttaagtaatcgaataattattcaattttttccgatagcgcattttggcactgctccataaaattctaattaaataaaaaaatgctcataatcagaaacagaaatttgttcatttttagacatgtttattgacaagtctcacctgaattaattaaaaattttcccggcggcgctgtcaccacagccggcggaaccacccttaagaaataaactttgatgaggattattttgagatacctcttctgtttaataggctcttggtcctgtctaattttaaaaaactacaatatttgaccaaaaccttggaattgtaataatatttcatcataaatccatccgctttaggaggcgatcaaaaagacaacgctgggcattttggctcagcggctttctgctgagctttgcctaccaaaatgccaaccattggttgcgtcctgctgttcggctgcgcaatttggaggagtacaagcggacggcgctgcgcttcttctcggaggacgacgaacagaaaaatgggaacggcggcgagagagtgcggcagcggcggagagcggcagaaaacggcagaaacagtga

SEQ ID NO: 78019 - DNA, 581 bp, Heterodera glycines
atggaggaagcgccggaagagaaggaagaggagaaagtggtcaatgaagagaaagaggaagaagagagggaggaggaggaagaagaggagggagcagcggaagtgagtcgaaaggggggacaaatggagggggggggggaagtgatgaggagttttattggtcgcgaaatatccaataataaacattttcagaatggcgatgaaaatagaagaagcgaagcgaacgaattggactcggcctttcccgcaatgatttccaatcttttcggcactcatccgttgcgcaccgaaataaaaaagaaaaggccgtcgcagcgtcgggggaatgccgaggaagagacatttcactcgacaaatgactgtcacggcaaattcgacgcgaaagacacgcgaaattttaattcatcgctggtggaggtgggacgagcgggaggggggagaacagaatgggaataatgggcacacattggaggaggtcagcagacacccggcactgttcgacttcacaagggacgagtacaaatcgaccgaggcacgcaatagacattgggcagaagtggcggaagaaatgcagcaaagtg

SEQ ID NO: 78020 - DNA, 383 bp, Heterodera glycines
  unsure (1)..(383): unsure at all n locations
atgctatttctttccatttttgcacttattcgactgaatgaagcggtaattaagcattccaaacaacaaatattttccaaaattccttttagcaatacacagcacccggggcctattatgtatatgcccctggttacaactttaacccaccgcccccgggtccgggaggtcccgggacggtggggaaaagaaacgcggaagcgccggcaaatgaaaccacaaatggcacaacggtgacgaaaagaagcgcattggcaacagaggcacatataaacggaacagagaagacgaagcgaagtgccggaacagttcaaattggaaatggacgcggaaacgcaacggagcaaggagagagagggcggnggatggagaaaaagggttga

SEQ ID NO: 78021 - DNA, 1527 bp, Heterodera glycines
atgttcggcattgttgccacctttgccgattatatcagtgtgcgtgaggatgcggtgcgtctcattttgtccgttttggccggctatcccttggccgctgtccaccgcacattccttttcaacaaacccgcggtgatccaacattcctatttcgcttccatcggactgctgctttatctgttcaattgcggttcgttcctttttgtctgtttaatatgctgccccttgggcttcggtatttcaaattttgaaatttgagctcattcaatgagtgttgcctttttgaagggtgcctgttagagctctccctgaacatggatccaggcctgggtttttcctggatccaggtgcaggttaggcagggaaacgctggagttccttgacaatcttttagaatttgttttttcgactgaccatgttttatttcaaattatcaaagtgtataaatgtttattagtcaaagaccctgaaaatgcaatagggatttacatgaaaaataaacttaaaaattttcctttccctctttcagggcttcaaatttaccactgtttgttgagcacttttctcgtctatttgatcgtcaattttttgcccggcacaaaactctctattttacttgggcatttttgtttcttggtaagttttggcaatcgcctagatcattgctcccgaaaattttttcttttaattttttttctaaaaattcttataacgtttctaggggtgttttgaggcgctgagcacgaatccggcctccattttgacctgtttgtaacaccagacccgaattcgaacagagtcgaaaattagaatttttcgatttttagtctaaaatggtttaaacgattttattgtagcactgatgcgtatcggtgatggctttcagttcgtttccgtgtgtgtaaacaacggttgaacaaaaaagtgaaattttaaagaacttgaattttcgaatgtttgttggaatttgagatcggggttcggaattagggggaaatagaagtcgtattcatgatcagcaacccagaaaactcctggaaacatgttttcatgatttttaaagttataaaaaaatttaaaatgttcgaagtcaggtccggtgttacaaataggtcgaaatggaggccggattcatgctcagcgcctcaaaacacccctagaaacgtgttataagaatttttagaaaaaaaatttaaagaaaaaattttcgggaccaatgatctaggcgattgccgtaagttttcaatcagaaatcgcttttttaactaaggaaatcatcaagttttctttcttttattgcagggtcatctgctcatcggctattggttcgcttatcttttatttgccaaatttcatggaaacaaacaaattccctctccccccattttgggcatgctgaatccaccacctatgacatcacttggacaacgcccttttgcattatgacactccgttacatcggcctggtgatggacgtttatgatgggcaacaagctgttgcgcaacaggttgcaaagccaagaaaat

SEQ ID NO: 78022 - DNA, 113 bp, Heterodera glycines
ctcaggtgggattgaacctgggactccctttttggtggcaaactcacagaccactgagacaacaaatcaattagtttttgaactgggggctcaaaattgactcggtgtgtaaa

SEQ ID NO: 78023 - DNA, 928 bp, Heterodera glycines
caaatgttttcttttgtaaaaatcacccatcgtttttattccaccgaaccgttggtaaaaaaactaacggtgattggctcgggtttgatgggcgcgggcattgcccaagtcagtgcccaggcaaacgtaaaagttgtgctggtcgaccaaagtcagtcaatcgttgagaaggccaaaagtggcattgaaaacagcatcaaacgggtggcgaagaaacaattcgaagacccgggggtgagtgacccaccaattccatcgaatttcggataaatgttaaattattgctttttttagaaacagaatgaactcgtcacccgcgctctttccaatatttccctgtcgacgaatatttcgcaggccgtgtcgggcgccgatttggtcattgaggcaatttctgagaatttggacgtaaaacggaaactgttcgcagaagtggagtcggctttgccacagtgacttacaattggataattcaacatttattttcggatggcatttgtccctttagaaatgggaaaatggccacaaacacttcttctctgacattggccgacattgcggccaatttgaagcgcaaagattcctttggggggctgcactttttcaaccccgtcccaattatgaaacttctcgaggcaattaataaagaatagtaacccatgctttttaaaaaacaattaggttgtccgctttgatggcaccggcgaagagacgttcaacgttctgatggactttggcaaaaccgttggcgaaacgaccgtcgtttgcaagttaattgtttcgactccgtttttttctttaattggcggagattttaggacaccccggggttcatagttaaccgtttgctggttccttttatgctggaagcaatgcgaatgttcgacagcggcgatgcgaccaaagaagacattgacgtagctacgaa

SEQ ID NO: 78024 - DNA, 780 bp, Heterodera glycines
gcgccagatgtctgttggaacgcgcccttcaaagaagcgattcggaagctgtacaacgattggatggcccatggcgaaaaggcgacgacatcaggcggaaatctgaaggccccgccaatggaggtttacctggaatggattgccaatgcatgggactcgcttccaaagcaaatgattgccgactcttttttgacgtgtgggattagtaaggaagaaaaaggccgacacgacgacaaaattcacgtttttaaggtcctcaagaatgttaacattttttgaaattcttatttttaaccggacggagcaattcctaatgggctcgctatgttgaagcaacgccgacaggaagaagaagtactgaaactggtggaagaaatcgatttaagcgaagacgaaagcgacgaagaaattgatgcagaagtttcctaatattttttttgttaatgttttattaaaacaaattgttcaatagtttttgcacgtttctgacttcaaaagttttgaaaaaaaaattttttttgacgggggcttatattcgaaggggggcttctactcgagggggggcttctattgttcaaccccccaccaaagggggcttatattcgagggggggcttccattcgagggggggcgtataatcgaggaaatacggtaattatttttttcaaatgactaatattatagaaatgcgccacagagattgaactgagcaatccgctgactggatcatctacaacggcatgcttgtgctccgaagcgaaatcaaaggaaggaggatga

SEQ ID NO: 78025 - DNA, 1216 bp, Heterodera glycines
atgctcggatggacattcttgaacatcagcaaattcaaaacggtaatggttttgggcattaaggggaatgcaaagtcttgacagattcccatccccccactcaaaaaaaagaccgccagcatgcggtagggatcagttccatctgagacaaatttttctggccaacattttcaaaactaactttcaaagttggtaattaaaaatgaaaattcttggtatcaagcgaaagcttagggtctcaggaatttataaatgcgagaaagggcaaacagttctaatttaatttgtaactttttacagttcctgcactttctgctcgtatggacaacaaggagggggaaatccgaagcggtaagcatagaaaaattccctcttctatattccatttgaggcagattttctggccaaaattttcaaaaaggcctattttttacaattagcataaaaaagaaagttggataatattgtcaatttctatttttggacttattggtcgaaacccgggctctaaaaaagttgaaatgataaaattaacacagcaccaaaaattaattttaaaaaattggttttcactcactgtatttttaacaaccgaaaaccctttaaacagtttatttttaaaacccttaaaaaaagtatttatgtgcattttccatttcagttttttccattggtttagtcgatttgatttttcaatagaattttttgttactatcattttgtaaattagtcgcttttgaaataagttatggccctcaaaagttggctcaaatggaattggtcaaacgacaggacttctccgcaatgggcgggaaacttgattttttgcataattgacttatttaaaaaacttacagttgaacgttcgcttcgcgcgctggacgaacgcattgacagaagtaaacaaatttgatttgattgaatagcaacaaaaacgttaatggtcaaaagattattagcatttattcataattccattttgatttttccaattccctaatttaccgtcttaaatttgttgagaaccggaaatagttctaatgcgttttactggcctgcaccagggacggtcccaggattttggtttgtggggtaggtgatgccaatggacgacgaatttaattttaaattttaatttttaaactaagaatatcattgaatactttttctaattttttgtgtgaatgcactttgttgatttattgctgaaattaaa

SEQ ID NO: 78026 - DNA, 2774 bp, Heterodera glycines
tgcttttggagggttcgccaccgatccgaagcatcgaatcgtttgctgtaaaagcagcccaaaatcgaaaagcccaccccttcctttccttccgtccgttccctcccaacaaaaagcccaaggcgaactttgccccttttccttctccgctgactctgaaaagcctatccattttacgtttgccctcctttcttccgcttcgagcccaagtgccgaattcgctcggcacaaccgattgccgcagcggaggacgagcagtgcgtcgtcggatttgcaattctatcgcgggcagaagcgtggggaaaagcggagcagaagtcgtccgctaaggcacggcttttgggtgcccctcggcgacgactcactgatcaaagcgcttagcgcagaagaaactgaagaatatttgaagggggacagatcggaaaggagggaaaaagaagcggaagaggtgcgaaagttgggtaaagcaaaaacagagagaaaaacatggataaattggcaaatgcagcagaagaacggcacaaaatggaagaagaacatcggaaaacgccgtcggaagagaaaccgcacgaatattttatagagtaagcaaagggagagaaagaacagaacgccagggacaaaatcccgaagcaaattcagcgacgagctgatcagcgactttgagtcgagcttggccggacgggcgcgactgggccgaacgcaagaggacttgggcaagtacagacagcgcatcgacacgaacgcggagcaccaaagggaatactcggaaatcattgccacaatgcaaaacaaagtgacggacggtgccactggcattgtacgatgcttttgcctttgacagctgctcgagtaccgacggcacattgccgacttacaacgcggcacgagtgcgacgaccgccgactcgtcgctgttcccgttgggcgactcgctattccccgcgggggctggggacatgacgacgacggattggagcgcacgttacgggcgggatgccaattacaattatgatgccattctgatgcgattggacgaggaacgccaacggtaaaacaacgacgagggcagagagagaaaaagaattgagagagacaggggaaagagtgaaaaataccgtattactcctacaacttaaaaaggagaaaggcgtagtacggtgtgggagagtataactgctgatttggattgctttttgcttttgtcagttatgatgagttacgcgtccaattggaaagcgaacggacgcaaagcgaccgactgaaagcggatttggtgcatttgcagcgacaatttgagcaagaaatgcaagaaaaggacaaccaatttcgaaacagagaaacagttgaggaaaagggaaaagcaaaataaaaaacgaaataattattaagaatttaacgcaatatttgaacgaagaacagaaaaaagtgacggacctttggaacgaattgcaaagggtccgaaggcaattcgccgatttgagagaccaaacggaacgcgaattgagcgaacaaaggcacgaattcagcagaataatgcgaaatgtgagaacaatgggagacggaagcgaaggtaaagcggacaaaagtgatcagaaaaaggaaaagccaaatgacaggaggaggaacaattgttaatacggacaatgtcctaatcgaactcatccgacggatcaaagaaaggggaggcgctgaagccgcggggaaattggggccggatttggaattgctgaacaaactcagaggggagacgacggcaacggttgagccggaattgtaccgggaactgatcaaaaagtgagaaaagagcgatcggtgggaaaatcacaatggtgatcaaaaggtatgaagaagcaaccgaacggaacattcaattggagacggacggagacgaaaacgcgagacgcgtcgccgaagtcgagaaggaactgcgcaaaacgcaggaaaagctagcggaatgccaagtgaaaatgggaaagtgaaacggacggaaaccaattaaaatgcccacagaaagccattcgaaaagtgaacgaaatgagcacccacggcacccacgagggcgagacgcgttcgcgttccctgtcgcccgccggaaatgcgctggtgctgagcccggcggaaacggtgcggaatgtgcgcaacgcgttgcggaaccgcgacaacgaaatccagcagttggaacaacggcttaaaggaaacggacgccaaattgaggaactcggcactaagctaagccaaaatgaggagacacgacgacgcgtggagaaggaattaaacggggcaaggcgagagaacggagaaatgtaagaggaaagcgaggagggaaaagacactaattaattaattagttaataattaattaggctgagacaattggaagaagcggaaagaagcagaaaacggacggaagaaaagctgaaaagcatgcaaaatgaaaaggcaattgcggaaacggcacaaaacaatttggaaaatgaaattcgacgactcaaacagtgcaaaaaagaataattaagcaattaattataatgataacactttagagagttggaaaaagccatttcagaagggaaaagaaaggcgcacgaagaagccgatgattacgcaattagcatggagacggattataaaaataggttttgagagggaagggacaaagcaaaggaaaagcggaaatttacacagaattgacgaattgaacaagcgaattggcacaatacaggaggaaaagcaaggattaaagaacagaattgacaccgttaagagcaaaag

SEQ ID NO: 78027 - DNA, 1317 bp, Heterodera glycines
atggaattgcgggtcggaggtcgttaccgccttgggcgtaaaattggcagcggttccttcggagatatttatttaggtggttaatttttaaattaataataatacccaatgatcaacaggcctgtaaccaagaggttccccgaaataaaaaaccaaaaaattttaaggaaaatggtgtgcttttttgaaaatttttcaaattttcgccgggatttcatttcccacctcagtttttttgttttcggcatgtatttaattatataaatactgattaaaaatctaatataataaacaatgatttggttggttttaattattcatttttaaggcgagaacattatgacacacgaggaagtggcaataaaattggagtgcgtcaaaaccaaacatccacagcttcacattgaggccaaactgtacaaaatgatgtccggcggagtcggcattccacaggttatccaaagaaaataagccaaaacaattagtgatctaactttcacgaagaaaatgatgacaaaaatttttcagaaaaccaaccaaaaaattttttggttatatttattgggtgtaatttaggatgcagacaatattttctattaaaaaatagtcaaacaccaaaaattcagcaaaaataaatgggaataaccggcaaatttgcaatatttattttatttttttttcataatttctaattgttttaggtccggtggtgtggttttgagggtgaatacaatgtgatggtgatggaactgcttggcccttcgctcgaggatctgttcaatttttgctcacggaaattcacactgaaaacagtgctgttgctcgccgaccaaatggtacatatatttttttcaacatttactaaatacgtaaatgaatttcaaaaatgttagacacatgacattttaaaatttctgcgttcagttttttgattttactagcaataaattacgtattttttggaacggaaattgttgaggattattccacataccgtaattataaaatataagccctggtgtttctatttttcaacccacaaaatggggtttatattttaggcaacatagtattaaagaattttaattttaacaaattttttcatgaaaaattgtcacctggccaagcagtagtagtacaatactacaaatgcattttctttcttaatgacaataaaatgttttttttagttggccaggatccaatacattcacagcaaggatttcatccatcgcgacataaagccaggtttttctttttttttcattttacattattcggccttgtaaaaaagcactctttttagacattttctga

SEQ ID NO: 78028 - DNA, 1308 bp, Heterodera glycines
atggccccgtcctgtcaatgctcctcctgtacaaggccgagttcattttcctcggcccatccatctccgtgccatgggtctgaaattggcttttcaacatgcgattcgtcgtcagcacaattttcaacatttgacaccaattccaataatcactttggggatgggtgttcatcaacggcgagttgttcagaagcgaattccgcttctgcttcttctgtcggtggtgagccgacttcatatcgcgaagaggaagcagttcaaggagttgaacacgaagagaactcagcggggcagcagcagcaagcacaaattgagcagcaacagtacttcccggcatttccaattgggccgcaaggacaattcccggcattgccaattgagccgcaaggacaattcgtgccccaggaaattccttctgcgccacagcagcaatcctttgcggttgaaaatgccaacaatggtcccgcggcgccatcctttgtgtgccaaagcaatgaggacgataaaggtggacgagaaaacaatatgatcaattcaataccacagcatatgctattccaaaaagaagtgttgtttgttcagctccctattgttgcaacggcgagttgaagcgggtgatgagggaagcatacgcaagtgccggggtgaactgtccgaggaaggaccaccccgaggcgagctgcttccactgctgcaacatccaaagattggcgaacatcatccaggtggtgaaggctaatcaattccatgataagcatggaaccgaccgataaatttaatgaaataatataaaaaatgggattaatttttatattttttatttgctaaatttaaatcttaaaatatgtgtatatgtaagcattgttgttaagcatcactgcgagtgtcggtttggcgtcactttcgaagtcgtcgtcggactgcgcgacttttccctgcacagccattactacgagaacttgttgtgcaaaatttctgaaggggaaaggttggtttttggctttaattttaccaatttttatcaatttccattcgcattttctcagccaaatcgccgcttttgccagtgcccagggcgtttgtctgccggacggaaggccggcaaattcaaataacggcacaattccgccaatgtgcggccaaggggcaacgagcaacggcgaaatgtacgaggaaaagcaccagcaactgagagacggggacaaatgcgcgggggcggaggaaaagcggacagtgcccgaggcggaggaggactatcagctgacggaggggacggggagaagcgaaacgaatgccgacgagcaatga

SEQ ID NO: 78029 - DNA, 650 bp, Heterodera glycines
atggccattgtaatggtcgatgaacagcagcagcaccaccaccatcaccagcagcagcccgtttcagcggcggcgattggtccaattgaaacgcaacaatccgctgaagtgtccacttcttcctcgacaattcagggtcaattagcgttttcttcccttaattacatgtttaatttgtgaaggcttcgaagtgtccttattttacatgatttccccaaaactttctcaattttcattcgacccattgcatctttttgcttaattacttataataattggcaaatgcctttagccgccccattggaagcgaaggatgagccgcccgcgccttaccaattcgaccccaacgacgagttttatttggcaccgccaacttgtcaatttctgcactatcgcgacgcggctgtggtggtcggaatcgtcgagattctgctgctaattgggacttttttcacagcaatgagtaaaaacaattaaaaaattaccattaaaattttgtagaaatttctgtgacacaaattggccaattaattcattcgattgttgcaatatgcacagattattatgccggaagtcgccttgtgggcgtgtgggcgccgttgctcgtcgcttctgtgctatgtatcgcaattggcacaaccatctccatg

SEQ ID NO: 78030 - DNA, 393 bp, Heterodera glycines
atgaaaaaatgggacaagaaattcggcattaaacaaaatatttcaaaaggtgaaattttttaaaagaatttttaatttaattatttaaatattaaagggcggaagcattatacaattgtcgaaaaaatggagaagatgaaacaatattttgaattgaaaaatcaaaatccaaagcttaccgatcgcaaaattgcggaaattttaaatattacaaaaagatctttagaaagatataaagcggaattcaagagaaaaagtgaaggcgttctgaatacggaatgattgagaatttatttcaattttcagggtttagtcaatgtgttgttatgtttgataaatttttgtaatttgaaagaagaatcaaaaaaaaggctggaaaaatattttaataaa

SEQ ID NO: 78031 - DNA, 688 bp, Heterodera glycines
atgaaaatcttattaatatttatattcttacgggttttaatattagaaaatgcaattgaccaaattgaggctggcaaaataaatcaagaaaaaagttttgatgaaatatttggccaaaaatgggacgaaagaacagaagaaaacatttgtcaaattgatgaaataatgcaaggacaaaatgttgatcagaatattcaagcagggccaaatgatctacaaattaatcaaaaatttgatgaaagtttggaagtgaaagaagaagagagtgatgaaatgtccacagattgtgatgaattgggcggccaattgccaatgccaacaaataatggacaaatttatgatcaaattcgaattttaaatgacaaacagaagagagaaattgttgaaaaattccataaaataaaagagaaagttaagcaaatgggaaagaaatattcaaagaaagaatggaaaaaaattgaaagaaaaattgcaaaaaaattgggcgtcagtcaagagaaaatttacaaatggaagagagaatttggattaatcaaaaacagacattcggatgaggaaagacgtaaaatgttaaagcaatttgatcaaatatattctaaattaaaaatgaaattaaatggaaaattggaaggaaaaaagaaaaaatgcaaaaaaataatagcaaaacatttgggcataaatatcagca

SEQ ID NO: 78032 - DNA, 572 bp, Heterodera glycines
atgaaaatcttattaatatttatattcttacgggttttaatattagaaaatgcaattgaccaaattgaggctggcaaaataaatcaagaaaaaagttttgatgaaatatttggccaaaaatgggacgaaagaacagaagaaaacatttgtcaaattgatgaaataatgcaaggacaaaatgttgatcagaatattcaagcagggccaaatgatctacaaattaatcaaaattttgatgaaagtttggaagtgaaagaagaagagagtgatgaaatgtccacagattgtgatgaattgggcggccaattgccaatgccaacaaataatggacaaatttatgataatttttcaaaagcaattgataaaaataaaagagaaactgtggaaaaatttcataaaattaaggagaaagttaagcaaatgcgaaagaaattcacaagaaaagaatggacaaaaattgaaataaaaattgcaaaaaaattgggtacaaatagagaaaaaatttacaaatggaagagagaacttggaatgatgacgaaaaaaaatcattcaattgaagaaaaaagaataat

SEQ ID NO: 78033 - DNA, 3497 bp, Heterodera glycines; identical to SEQ ID NO: 2136
  unsure (1)..(3497): unsure at all n locations

SEQ ID NO: 78034 - DNA, 1168 bp, Heterodera glycines
atgaaaatgttactaaaatttttattattatgcgcattaattttcgaaaatgcaattgatcaaattgaagctggcaaaataagtcaagaaaaaagttttgatgaaatatttggccaaagatgggacgacggagcagaagaaaacatctgccaaatttatcaaataatgcatggagaaacagttgatcagaaccaatatgatcaacaatttgatcatttggaagtgaaagaagagcagagtgaagaaatatccagaaattgtgatgaattgggcggccaattgccaatgccaacaaataatggacaaatttatgataatttttcaaaagcaattaataaaaagaaaagagaaattgttgaaaaatttcataaaattaaggagaaagttaagcaaatgggaaagaaatattcaaagaaagaatggcaaaaaattgaaagaaaaattgccacaaaattaggtgcaaatcaaatgaaaatttacaaatggaaaagagaacttggaatgatgacgaaaaaaaattattcagttgaagaaaaaagaataatgttaaagcaatttgatcaaatatatggcaaattaaaaatgaaattaaatggaaaattggaaggaaaaggaagaaaatgccaaaaaataatagcaaaacatttgggcacaaatatcagcagtattcaaagatggaagaaagaaataaaagttggaaaaatggtgaaaaatcaaaaaactgatgatgaaaaaagagaaattgttgaaaaatatttaaaagtaaaaattaaatttatgcaaaatggaaaacattcgcagaaggaatggaaggcatttaatgcaaaaattaaacaaatgtttggtgtgagttattggacgattgaaaaatgggccaagaaattaggaattaaacaaaataatttaaaaggtaaattcaattaaacttttatttttaaatttaaaataaatttttcaatttaaatatattacagagcgaaaaaggttcacaattgtcgaaaaaatggaaataatgaagcaatattatcttatgaaaaaggaaactccaaaattttccgatgtgaaaatcgccgaattgttgaacattgagctaatgtccttaataaaatacaaatccgaatttaaggaaaaagtggaaatgttttgaatacgacagaaggccaataaa

SEQ ID NO: 78035 - DNA, 439 bp, Heterodera glycines
gttttaaatataaaaaataaaaatatttattattggaagggaactgctgaacttgggttgctgaatttgccctttcacttacattcttcgaacagttcgaccttccgaccttaatgcgcaattggtactgaatgcccgccacgacttgtgacttggcactgagaacctccaaggggaaaagactgaagcgatcgtttgactcggagtttattttggccactgagcgagaagcgagagactgaacaaagcgagagaattgagcagaagcgaacggacatttgaatttgtaattgccatttatgaacagttagccaaatttccttttcattgccttgattttttcgtcgttcacattttgctctgtccatcccccgacaattgaattctgctgatcagtcattgccaatttgataagcaaaagtaaaagaatgaaaatttg

SEQ ID NO: 78036 - DNA, 204 bp, Heterodera glycines
  unsure (1)..(204): unsure at all n locations
gaatttttcatttttatcaagtgtaagtcttgaaattgtaatttttgaacataatgtacccaacggaaagggacatggaaaacagactgatcagcagtggaagacaataaaagtgatcaatgcgggacaagaaaatctttcgtccatcgattgacagatcagctgngaaggaggacattgtgataatttcgccattntttaccg

SEQ ID NO: 78037 - DNA, 248 bp, Heterodera glycines
atgatcgaaactgttatttatttggcaaaaaccggtcaaccttttcgaggcaataaagattacggtgttttgtcagtgccaaaaacagttggagagattaatgcagaacagggttggaaatataaattaatgtaaaaaaactaaaaaattaaaggcctttttcgtgctagtctgcaataccgatgtttgagtggagatgaaaaattaaaattacatttggagacaggtggtcaaataaaatcttaaaa

SEQ ID NO: 78038 - DNA, 608 bp, Heterodera glycines
  unsure (1)..(608): unsure at all n locations
atggtccttgtcatcgaattttgtgcccaaattctcggctgttccccgaaatcactccgcgacaagctcaatcatcccgaggaccgagtgaaggcactgaaggagctggtcggaaaaaaggttcggacgacatacaaggaccggaatggaatgcagaaaacattttttgtcgacggaatatcggacaaaggagcggctttgaccccggcgtatggcagactcagacaaccgtacaacatcaacattgctgcccatttctacgctctccaccgtatcaagctgcatctcccgtacgtgccgtgtgttgtggagaaatattctggatgtggcgaagacagatactatccaatggaactactcgaaattgtggatgacgactacaaccaacaaaagaggcgaggcttggcaaattgtttaccgaaatcgaggacgacttcatttcctgtcaaacgctttggtcgagttgaggaagtagaagaaattgacgacaacgangantggggtggtcgctacgaatgcagtcaaccgtcttacgtttattggtaaacacatgtatgttatcttaattatgcacttttctacataaaaacgacaagttcgtgcacata

SEQ ID NO: 78039 - DNA, 679 bp, Heterodera glycines
atgcagaaggtgataagaacgcttggatgcggcctcctctacacggacaccgactcgctgattttcgtccacccgatcggcatgaaccgtttggagacaggaccacacttgggacaattcaccgatgaataccccaagcatgaaattgtggagtattgtagtggcggagcgaagcaggttttcaccttttaataattcataatttatactttatcatttcagtatggactcaaactccggcgtaatgggcaggacgaatttgtgctgaagcttaggggcatcacactgaactacgacgtgatgcagaaccaatccctatgctacgacacattcaaagaagaagtgttgcggtatgcccaaaccggagagtatgagccaataaatgtgatgtaccccaactttttgagacccgacattagggatggcggacacgtcacttcaggccccctccaaaaatgttatcgcccatatgtaggcaaagggatagtgggtcctaattatgatgttctcaattttggacacactttgtaaatttatcgtttatcattcattgtatctctcacacacacatacacacacacaccccatacacacgtacacacgcatgtaccacctttgttttttatgttttatacctcaaattgtgtaattttgtcattttatttgcgtttttaataaa

SEQ ID NO: 78040 - DNA, 2385 bp, Heterodera glycines
  unsure (1)..(2385): unsure at all n locations
atgagcgatgagcttcagtggatggtggacgatgatgatgaagatgaacaccaacataccaatgggacaataaatcgaacggttacggtagcgaaccgactcaaattaccgtacaccaacgcagtgatttgtgtaagtaatgtgcataaaacagggatgatttgatgtaatagtaatggcaaaccaggacgtttggtttgacataattacgcatttgagtaaatgtttntaaattggaacagtaactaggattcattaaattttgttcatcttttcaaaatttttaatatttataaagtatgggaatacggctttttatcatgccaaaaaaatgcgttacggatttttttaagcttaccgtaattacgaatacagattttccgagaatttattggtcatgaattgcataaatttaaaccttgatcatttagtccaaaaacatagcttatggcaaaaagttgaaatgaattcacaaaaaaaatctactttatttttgattttctttatcttttaaaactattttaaatttgttccttaaatttattccttttactaagccttttttctaacttttgaggcatatgccttttttctgcgcactagtttcgacatattaagcataaataacaccttttccacttggtttgaggcttctacgttgacttttattatgtctttttttgccttttccgggattttcgtgccttaaatgccttttttggcattttgccattttggtgccttttttggcgttttccgaaaaaaaccattaaaaattgaataaaatcgggaaaatacacccctatgaaatgaatcaaaaattttttatgaaaatacaccactatgaattgcaaatttttttttcaaaaatacactcctaagaaatgaaaaatttgtcaaaaattcatctccaaaagaatattttttcttgataaaaattctaggtttaaaattttccttattaaaaaaagctataaaatattttaataatcatttaatgaccaaaaatgaattttttgattaggttttacgtgttttgctccctaaaaatccttaaagaaatcggaattctgagcccaaaacgtcggaaattggtagtcgtatattgtaattccttgccatccctgttaggtgagaaaaataccgtgccacttttgggtatcagaatcgaatctcgggctcaaaccttcggatatgaaacaatgactaatcctaatgcattgctatcttttcatccgcaataggacaatcttgagcagttcaatgagcttaagcagttgctctgcggacatttcgccatcagtgtgcacccgctgaccgcgctcttccgtctgagtccccgcctttttcggcatttgcctttcctccacggcaaattcaaccgaaccaaaacggtgtaccgtaatttggacgcattctttgagcgccaaatcgacgagcacagactgaaaattaatcagctacagcaatgggataatgacaacacagagccaactgattttgttgaggcttttctaaaggaaaagacgaagcgggacggacggaaacgacggcgatccgatgcaccagttcaggtgagcggctgcaaaatctgttcccataaaatgatgcatttgaaacagtcttccaaaatttttgtccatcttttcgcaaatacttttacaatcagttctgcttcatctcatcttccaaattgtttaagcattgagcagctaaagggcatttgcaacgatttatggtcagctggacaagtaaaatggaataattagcaataatttattttttatttcgtattgggtcattcaggacacgattaccaatacgctttcttggggcattgcctatctgaaccatcatgtccaaattcaagccaaaatgagcgatgagcttcagtggatggtggacgatgatgatgaagatgaacaccaacataccaatggggcaacaaatcgaacggttacggtagcgaaccgactcaaattacattacaccaacgcagtgatttgtgtaagtaatgtgtataaaacagggatgatttgatgtaatagtaatggcaaaccaggacgtttggtttgacataattacgcatttgagtaaatgtttttaaattggaacagtaatgcgccggcttgtgaccattgacgggcacctgctcaaggcggggacgatggtgtgccaataaatttctgcggttcaaatggataaaaaagtgccaaataattaaaaatgattctttataatcaattcagatattcgagaacccgacagcaattttgtcgagaacgattcctggacgagaatgtaaagctaaagcgagtgaatgaattgatcccattctcagttggaaaatggtaacttttggtggattgtaatatatttaataaa

SEQ ID NO: 78041 - DNA, 312 bp, Heterodera glycines
atgtccgagcaaaatcatgaatcggatgatgttttgcccacttgggccatggtcgattttcatgaaatgagccgtcgagaaagactgcgaattcagcagcaagaagaattgaagcggcaaaaccaaaaaaagcaaacattggagcagtttcggcaacaacgggtggaacaaaaacttcaatgggagaaggaggaaactgaaaaaaagaccccaaaacatggaagaagaggaccgatgagatgaagaaaatctgtgaggagagatggacgaaagcaaaatatgctggcagtagcaacgacaacaagaaccaca

SEQ ID NO: 78042 - DNA, 935 bp, Heterodera glycines
atgaatgaaacggaaaaaatattggacgatcctgaacgtttacttgatcaaattgttggaattgttgatgaggaagatacaattcctttgggagcagaagtaagctaaatttggttcttttaattgtgtaagaccacatttgtagtgcagaattgtaagaaaaattttgaaaatcattttttaagcaataggattttttgccttttgcgatatgaggaaaatttttggaaatagtaaaacaaaataaaaatgaacaaaaacgtttaggccggcaccctcaacaaagaaaaaaggttgaaaaagaatagacgtggcgggaaaaaagtgcagaaactacgggcaaaatcgatggagatggacaaaatctctgttacgacttatttctatttttgccaacaaaattttaaccttttatgtgtttctgtttacggctcaaaaactttggaaagtttgaacatcaatatgggcccaaaatttacagtagctgacgttccgctgcctatcattgaaacggccggattctcaattctgaggccagtagtatctaaaaatacaaatcaaacttttacaatgttttgcaagtaaacaaactgattttttggccatttaatgtaaaaatagcctcacgagttgctagattaattccacacccgacaatatcatttggaaaaaaacggtgcgaatgcacaactggtggaccgcctgtagcggaaaatcctagcaattcgcctgacgactcatagccataagatttcgggctccaacacacgaaatcgctacggtcaagggatccatcacacaggccgataccgaaggttcttaatttaaaataattcgttaaaatatttttgaaaatacccagcgtcgccacggaatttcgcctcataatatgccaaaataggataattgttagatggattcaacggtccaataaa

SEQ ID NO: 78043 - DNA, 1947 bp, Heterodera glycines
ttttcaagggagcacttatggggcaaaacaaaggcagccttcaaatacgcatacgaacagtatttagtaaattttaattaccaattaacattttattaattaaaaaccattttttatttattttaatttgcaaaaaccatttttattatattttattaaaataataaattggttattatttttagaatgactttgattggtttctcaagactgacgacgacacttttgtgattgttgagaatttgcgcttccttctgatggctcattcgccagaagaacccatttattatgggtgcaaattcaaaccctttgttgaacaggcaattaaatgaaattaataataattaataaatttaaaatcgattagggctatatgagcggcggagctggctacgttttgagccgaatggcattgaaaaaatttgttgaagaaggactccccgacgcaaagaagtgccgggtatttttattccgaaaatctaaaacaccaattactaaattcaaataatttgaatattagaaatttttccttatttcttgaaacattaatatgtaaaaaatcagattatctattttaagcatttaacattttttaaacttgaattatatattttttacttgagttaacttttgctttatatttaaatattcataattaaattacatttaaatatttccatcttttaaaaaaaaaattgatatttggaatgaaaaaattttttatttgattatcgctagggatgatatttttagctttttatctattttttcctgagttaccaataggcttaaaagcatgaaaatatgtttttttcggtcgttgttaagtacttttcgtgtttttagaacctattttctatgttactatttttagaacctaaaaactcaaaactatttggaaaaaatattttaacgtattttggcgttttcccaaacatattaacaaaaatgcaataaaaacgaaaaaatatacccctaaaaccgatcgcttcagaaaaatacatctctaaaaatcgacataatttttttccaaaaatacacccctaagaatggaccaaaaatttctgaaaatacaaatccataatatgaaactttttgttacctattttccattttagcaactattttaggagttttttagaaactaaaaactaatcactcatccctccctaatttttcagtccgatgaatggggtcacgaggacgttgaaatgggcaaatgtttggacaaaattggcgtcaaggctggcgattcgcgtgatgccgaagaccaccatcgctttttcccatttgtgccggaaactcatttgtccccagaccatatggacaaatcattttggttctggaaatacacttactatccgatggaagaagtaggacgaaaaaaattctaatttaatttaatattagattttgggatagctattttaaattagaacaaatcgtttttttattactttataaattgtacatttaggggcccaactgttgcagtgattatgccatttcttttcactatgttaagccgaattcgatgtatagcgatttaaattatttaaataattaattaatttacaggtactcacttgaatatttggtttaccatttacatctattcggcaatgaaattgaattaaaggacaatttcgaaaaaaacaggctaatttattgaaaataaaattatttattatttttttgttgtaaaataaattttcaaaaattagtttaataaatcgaaaatttttattatttgaaacttaatgaaaaagcttaaaatttttaaatgttagaaaattaattaatatttatttatcacaattagacttaactattatttttgtgtataattaatttagtgtcggcataattctacgaaatgcttacaaattggcaatacaaaacattggtgctgatgatgtgttcaagaacaacgaaaaaactatcgat

SEQ ID NO: 78044 - DNA, 1855 bp, Heterodera glycines
  unsure (1)..(1855): unsure at all n locations
atgcccaatattttagaagcacaactgccaaatgactattttttctacattttacggctttttgccgttaaacttgacgaagaagcgaaagagaggcatggattgaaaaccagaaatttgcttaataatgaaattttagtctcaagactagtcgccctgggtgcagaattatcacagaggcaggaactactttcctgcgtgcctataatgaaagtgggttttttaaataatgaaataataatttaaataattaatntaaaagaactgggattttttgttgcggtttatatttgttcaatcaaattaaacacttaattagatttcaaagccctttatgtaatttgggtgctttggcttttttttttaatcatatatttagacatataaaatccaagttctgattattagataattgtaattaaaaagataaataataatttaataataataattataaaattaagttaaattacaattaaaattaatacacaataaaaccgttgcataaaaaaagttaccccctttaaaacagttttatttttgaaagttgtataaaaaaacatatagataactctctaagctgaacaaaaaaaagtaactattgctaggtcgtttttcatgtatatataagactatccaaattgtctaaccccagaaaatttaagacggggtagggctttgtatgtccaagtatctctgaaaattggtaccatgccatatgtataatattttcaaaaatacaaaaatggcgtaataattttacaccgatcggttcacgggaatggtcaactaagcaaaaccgggatgttgtacttttttaatgcaacgaaattgtaaatgtatacataataacaaaaaaaatttttttattaagctagcggcattttgaaggaatggccaagcggccaggatgtagagtctattatccaattaagatttaatatttagaaacgttggtttgttttaatgttatattttaggaaaatattgttgaacacatttaattactcattataataattggcccctattcctttaaatcatttattcataatttcattttaataattcatttatgcataattacattttaataactcatttattcataatttcattttaataattcatttatgcataattacattttaataactcatttattcataatttcattttaataactcatttattcataatttcattttaataattcatttatgcataattacattttaataactcatttattcataatttcattttaataactcatttattcataatttcattttaataattcatttatgcataattacattttaataactcatttattcataatttcattttaataactcatttattcataatttcattttaataattcatttatgcataattacattttaataactcatttattcataatttcattttaataactcatttattcataatttcattttaataattcatttatgcataattacattttaataactcatttattcataatttcattttaataactcatttattcataatttcattttaataattcatttatgcataattacattttaataactcatttattcataatttcattttaataactcatttataataattggccactattcctttaaatcatttattcataatttcattttaataattcatttatgcataatttcattttaataactcatttataatataaatttttcaggtttattataaatttaattggcccctattcctttaaaatcatttattcataatttcattaaagtcatttaaaaatttccatttaaatatcttttaatgcatttattttgggtttaattga

SEQ ID NO: 78045 - DNA, 501 bp, Heterodera glycines
atggcgattcttaagggcattacattgcccaactgtccgctgctcaacttcgtcagcaaattttcccccccccttctgaccccttgcgttccgcgtcatgacccaacccaactgaccccatcgccatcatccccccccctcccccatttaaacagttatgctccctacatataaatcctcaaaatattagagtttccaaatttttctcaaatattttcagaccgaaaattcattttttatgggacaaataaaatccttcgccgtcatttcttctgtcgaaattgctgaaagtcagcagcaatcgtcgggttcatttatggcaacatcttttggaaggcgacgacattggtaaagtaatatcacatgttttaatagtatcccgcgggattaattccacacccacatatttcaaaatttccaaaaaatgcaggattgcggacttggctcatccagcaaaatcctgcgcgatatccaagtccctcaccggtgtcatgacaactc

SEQ ID NO: 78046 - DNA, 497 bp, Heterodera glycines
atggctggacgggcgccggacttttcgacagtggacttttcgacagaggacatttcgacagaaggacttttcgacagcaaaggacttttcgacagaaatattttaaatttaaggaggggacttttcgacagtggacttttcgacagtaaaatgtaattaaatttcaaatttaggggtgtaaaatcttaaaattttatccaaaagcaacaaattaagtcaaataattattgagatacataatttttaaattcaaaaattcttttcaagaatgtaaacaaactaccacgtagatgcagttgcttcaatattccatttactgacacgaatacttatgaatctattgatccacgtgtacgggtggggtactccaacaattatggcgagcgataatccaacgcataattaaagtacatgctatagggaagctattcccgaaggattctgtctccccataaatctgggcgcatcggatcggggggactgccccgaaaacaaaa

SEQ ID NO: 78047 - DNA, 413 bp, Heterodera glycines
atgctgcttatccaagcggcacttttctatctgccaaaatggacgctagacaaattgctgagtgattttatgaaagggcaaaaaaaaaataattaattcaatgaatttaaatattttaaaattattgtttataaaattcagcttgtttgttggcaattgccgtggcacaatttgccgtggttaacgcattgaccggccgagggcaccgctggtggggcattgaaatgggaaaatcattgcgcagtggtgatgaaatacaggtggaaaattgaatggaatgactaatttaagaatatttaacctattttttttagacaaaccctgacttacaaatttaaatgtttttgtttagcaattatttcaaatatttcggaaaatttatgtttattttcaaagtgcataattttatctaa

SEQ ID NO: 78048 - DNA, 712 bp, Heterodera glycines
acaaatttcacatcttccaattcggctgcatccagcgtcgggtcacgctgtgacgattttgtgagaaattccgtcggttcccggtacaaagagttcaacagcgacccgtacacatgcgagtgcttttttgggggaaccggtgccaatctgtccaacaaaaatgtccatcttccggtgactcatcctcggcccgaaactgacgacgccggcacaacagcagcaggtcgaatttagggaaatacaaattgtaaaagttgtcgtttggtctccttaacccccgggtttatctcctctaaactcgaagacgagcaacagcaggccccaaatgccgcagcattcaatcacaaattaattttaataattgctattaattattattatttatttctttccatcttccagtgactcatcctcggcccgaaaccgacattagtgaaatgtaaattgaaaaaagaatcatatgtcggcatttcattatcaatataaaaaatgtaattaatcttttttattattttctttttagattcaattaaaatttttgtcgaattaactggcataaatgcgaaaagtgccgctgttcgtcgacaccattttgatttgaatattctgctgttgttgttgttgatcagctgttgtttttttagaatgattgtgaggaggaaggaataatttttgtgatttaatttcaaaggaattgaaaatatattaatta

SEQ ID NO: 78049 - DNA, 363 bp, Heterodera glycines
atgggcaatgtccgctgcgggaagatgaacgtagtaaagcatcaatccgacgcccaacatggccacagtgtaatcgatgctcaacgggtgggcccatgccgaacagcgaataggacctgagtgatgttacaactgctcgggaatcccggccgaggcaaaagccggaaatttcgggttattaatgcccgtccagattttgtcgtaaattctcgaactatgaacccctaatttttcaggattaagcagatttagagggaatgagtaccataagggaaagtgccggcttatggaagcgtatttcacccatcggatatattatgaaatattaatcattgagatgttaaaaaaccaaattgtttaaca

SEQ ID NO: 78050 - DNA, 646 bp, Heterodera glycines
atgttacgtttcatctattcctggtccaagtagttagacgaaccaattgatcgggggtgaaaatcaaattgttcaaattgacgaatcgcttttcagcaagcggaaaaataacaccgggagtgtgttgccgcagtttggatttttggaggaatttgtcgaattccaaacgaatgttccttatacaaataaacgtgtttgggttttttgtcctaatttctaatttctaggttccggaccgcaacgccaaaaccattctcaatgctaatgtacaaaacaccgcaactggaagcatcattttctccgattcctggtctggatacaaaacgcctgaatttgaagatgctggctttattttaaattcaatcatcggtgtgtttttttttgaaattttttgataaacttatatttcagtttcaactttgttaatccaatgaatggtacgcacactcaaacagtggaaagaatgtggggaagtgcaaaatggcgaaataacaagcaaagaggcaccgcgcgtcatcatttggagagctattttgccgaattcatgtagagaaggatgatcggtgacggagatgtattcgaagaattgatatgagcctgttcgaagtattggcctctcgagtgattctttaatgtgtctaataaa

SEQ ID NO: 78051 - DNA, 755 bp, Heterodera glycines
atggtgtttaaaaataatttctaattccttcaaattaatcaatttcgtacaattttaacttttcttcacaatttttggatttaaaataagtatctaaacattataacaaatcctactattcatcaatcaactactattcctattaattgttaaaaaacaatagaattttcaattatgaaaaaattttcatgttcaataatattttctcacttcatgagcatggaactaataaagatttggtactttacggttatctgtgtccagatttcaaaaaaatttttgattaaaacttgggtttaggcattttcagagtcgggaagccgattttggcatctgttttgctccaatccgacttcagttcccgaactcgaacaaaattcgagaaaaaatgtcgaaaattcattttcaccaaaattcacgtttattgcacaaaaatgatttttaggggttttcagggtccggaaaaccaattcggacatatatttggacaaaatccaactccagaacccggattcgaacaaaaattcaaaaatttttcaacaaaattaacattatatttttttatacatataattttcactgatttttagatttttcaacaaaataatgttacaaatttggggcttggccaagcactgaggatagcttcatcaatttttccaggaacgcaggcttcttcacgccaaacgcaagtgtacaaatggacatccaatgaaattatatttgggataaaggcaagaatggaagtgcaataa

SEQ ID NO: 78052 - DNA, 625 bp, Heterodera glycines
atgagcgaactaaactctgaaggaattttttggactgattcaaacggacggcaaatgatgaaaagacggtgagaaaacaattagctcattaattaaatgattttatcgtttcttgaaataatttgaattaattaaataaacaaataaatttattatttgagtatttaatgaagtagagaaattttagttttgacgtgtttcttaaatttgccattataaatttttaaatataaaaaatatttaaagaaatgtattaattaattcgaaaaaatttaattttttcaaagaattttaatggaaaaatttttgacaaaaaagaaatcctaagactttgaatcgaagaactttttttaaattttttaatatttgggaattttgcttgatatatttcttcaaaatctaaatctgagtcttttcgttttaaagtattccattaattaaatattctttatttttttaattttaaaaattttcatgatttttgaaaatttgtggggaatggcacttttatgaaatgtactagtaaaatttgaatttcagccgcaatgattcgtcattctttgagggcaccgaaccggtggcagccaattattacccagtgaacaggcaaaatttaattacctaa

SEQ ID NO: 78053 - DNA, 758 bp, Heterodera glycines
atggatcagtacaccattggactcgacttactcaatgccagctatggtaattgataaaactgctcgagagagattcaattatatgaatatatgccaaaattttgttataaaattggtaatatattgttgcctaattaattattaaggcgattgcggacacgccaaagtggcctggcaaattgatccatttggccacagcagggaacatgccaatttggccgcaatggtcgagaaacatagtttaaatatttaataaaataattgattaacttatatacaataatgcataagagcctcaaattttttcctggttgtaaattttaattgaaaaaaaaatttttttttttaattttttgattctctaaatttttccagtgctaattttgtatttaaaactttttttgttttatttaaaaatttaaaatggactgttcagattggctatgaagcactgttcttttcacgtatgcactacattgaattggtaaaaaaacacataaaaagagcagatgaaatttttcaatttttcttacgtgttttccttccttttgcttcactctctcatttatctctctttctcttccgcttatctccaatatcacattgtactattttttggttgcgctcacctcttttccactctcctccttttacacctgttttttttttctctttttttcaggaaaaacgtgcagaacaaaaagcgctggaaatgatttggaatgtttccgatgacatcagtacaaaaaaaaaataaa

SEQ ID NO: 78054 - DNA, 330 bp, Heterodera glycines
atgatccgagaacaatgtcaaaaaagagcgagcattaaatgttatctcatttggtggcttttttggggttatacattttccttaaaattccaatcattttttaatgtaatttagattatcaattcttttttttgaacaatgggattattttcattaaatggcaaagtctcgccacttcttacttgatgaactgcctaatttttgtccttttgtatgtgtttttttaatcattgccttaatttgttcgtctttatattttagggttgtacgagaatcatttttattacataattttaactagaataactttttttgttttaaataatttga

SEQ ID NO: 78055 - DNA, 159 bp, Heterodera glycines
atgacttcgggatttatcgtatacaaaagtctgcttaaaggaaacatgaccaacatttcaacaattaaaggattgtgtgctaaaacttttaatgaaggagatagtgattatttcactgtgcatgcaaatatatctgatttaaaaatgcaaacatataag

SEQ ID NO: 78056 - DNA, 1248 bp, Heterodera glycines
atggaattgggatataaaatcgataaattctataggtaaggaatattaaaaacaaatttaacatttcgatttagggcatatcatttcgaagaatttgattctgatctatttaaaagatatgttcggaaatttcttaagctcaaagtatgaatatggaaaaatttgtctaattttattaatataggttgactcatcgggatggccccctaatcttactaatgatgaagaaaaacaacattttatttccgaatataaacgaatttttaacataaaattagaccagaacaacattaaaccgaacgccggtatgagatacattgcaaaactcttacttaattcactttggggcaaatttgggtttgtttaaatattgagttaaaatcaaaaaagtttttagaatgcgaaataagttgtcgaaaaacaaaataataagccaaccttcagagtattttgaacttttatttgaccataaaattgtcttatctaaaccagtaattcttaataatgacgcaatacgcgttatatacagagaacaaaacgaatttgttaggccgcacagcgtgtcaaatataataatcgcactatggtataacattctttaaaaatttaattatgacgttttcctaggaccacaagtcaggcgagaataattttgtataaatggctccaaactgttaaatcggataaagataatcatttattatactcagatacaggtactattaatgaataggaaaatactatttttttgttttagatagtgtaatatacaaacaccaaaagggtaaaaaccccatcgcttttggagaatacttagggtatacagttttttaaatcattaattgttttaatttaagcgaaatgtctcatgaaaacaatggaaataaaattctcgaattcgtttctggtggtagtaagcaatactcaataaaatttgaaaatgaaattgacggaaaaatttggtataaaactaaaatgagaggtaattatcacaatcaaaaatgtactaattaatgatttagggataacctttaacaaaaaaaataacttcgaccacgaggactttaaaggaatgattttaaattataaagacgaaaagagaaaatatttcaattatgataaatttggaccatcgcgagacagtaaaatattatcccaaaaaatgacgaaagaatacaaacccgttcaaaaaaaaggaataatcgacgaaaattttgatattattccctatggattttggtgaataaa

SEQ ID NO: 78057 - DNA, 1813 bp, Heterodera glycines
  unsure (1)..(1813): unsure at all n locations
atgcgaaaaatttttattgaaataacaaaagactcggaaacccctaacggttatgatgtttttaaggtaatttacattttgagttaccatttatgccaaattaaggacagtacgacaatcgcaggagcggcgataaaaatttacagagccaaatttttaaaggaaaaacacctagctatagtccctgaggggggctttgaaaaacaaaataaccaaagcatgatagcaataaaatattttgaatattatatgcataaacattgtgttaaagggagacacgcagctaacgggggcgagattaaaataggaggtcttagtaatgaaaatcattcattaattttaaaattaagacttcaaagttgattttatttgcgggaaattcaaaaccataatcgaatttcaggttataaatatatgttaactaaaaaaatgataattttagggatgtgtttttcacggtttgttatatcaaaatctttgtaaatatgatattaaggatgtaaaaaatgtttcaaaccttttcaaattgggctcaatggtaaaactgcagaagaaaattttgtaaggacaaaaaaccgaatgtttatgcttagaaaattatgtaataattttggaatacgggtggaggaaatatgggtcagtacaagttaatgatttctcgattaatattttttaggaatgtgaggtccgacgaaagctaaatccacgtgataaagaaaattatgacatagaaatgaagaaatatttcgattcaattccagataagggtggggtagtcaaaacaaaaagcaatttaacaaatatttatgaccaatcgacccccgggatgcttttgcgggtgggcgaacgcaagcattttgtttatattcaaagatttctgaaaacagagaaataaatatagccgacatagtctcattatatccatcggtaatatagcttaaactctcttaaaaattttaattctaggttaattatttcacaccgtacccggttaagacaccaaaaataataataccaaaatctcaagacgttctgtggcaatgtcccgaagacatcccttatgatggtaaccgtaaccgtatacaaaaatataaatattttataggactgttaaaagttagggcaattcctccaaaaaaattggcaataccgctattaccgtaccattatgattccattttattcttcaccaattgttccaaatgttgccaacgggcgaaatctaactttgtttttatgaaaaatgttaaaaaatgtaatcattctgattctgaaagagggcttcatggggtttttacaagcattgaattaaaattaggttagtaaatgtatgtaattttaataatttttattttcaagctatggaattaggatataaaattgataaattctataggtaaggaatattaaaaacaaatttaacagttctatttagggcatatcatttcgaagaatttgattctgatctatttaaaggatatgttcggaaatttcttaagctaaaagtatgaatacggaaaaatttggctaattttattaatataggtagaatcatcgggatggccccctaatcttactaatgatgaagagaaacaacattttatttccgaatataaacgaatttttaacataaaattagaccagaacaacattaaaccgaacgccggtatgagatacattgcaaaactcttacttaattcactttggggcaaatttgggtttgtttaaatttagagttaaaattaaaaaatttttagaatgcgaaataagttgtcgaaaacaaaataataagccanccttcagagtattttga

SEQ ID NO: 78058 - DNA, 553 bp, Heterodera glycines
atgcttttcgtccttcttttcctctctctgttggcttttatccgtgcccaatttgctgccactaatccccccgcccccgaaccggcatatgtgcccccctcaaactaccaatggggtcttaacccgtggcgacgtgagaattgggcggatgcgtcgccgcacaaccaaatgtacgtggactcaagcggccgccaggggatgcgcaacgtgccgatgcaggtgataagtggtgcaatgagtgatcaggcggatcaatggactactaagggatcaaccaaccatgtagtggcaaataatgggataagctaataaattaggaccaatgcagtgatcagtcagtaagcaccttgatcgaatgataacaaaatagcgatcgctgcttctccctaagctgatcaatgcttttaattcccttcccaactgaagacacaacacggatggttcttttggtgcacgacgaaaaattgtgcgggacggagaaggagaaaatgaaagagagaagacatttttttgtttattttataaataatataaaaaaggaaagaaaaataaa

SEQ ID NO: 78059 - DNA, 279 bp, Heterodera glycines
atgcgccaagagttggtggatgtgtggaagaaaatgagaaaaaagacgacggaaattgaaaatggaagagaaagaaacattgaagagaaagtcaatgggaagaaaaaaggaagagaagggaaagggaattgttgcaagtgtaaaagttggaagggaaaacaaacggaggagaaaggcacacagacggagaaggaaatgccaaaagtggcaaaaggtgccataaaaggggacaagaaaagattgaagagtggggacgaccaaaacggccaaattgcctaa

SEQ ID NO: 78060 - DNA, 183 bp, Heterodera glycines
atggccattaaaagggcattcgagagactgcgaacggacggagcagcggcggaagaacgccttgcacgactcgcagctgagacagccgaagttaacgccacagccggcggaatcaccgcaaatctaagcgaaaggcaatggagaaaaaggaaaagcggacaaatgagaacagccgatcggaaa

SEQ ID NO: 78061 - DNA, 624 bp, Heterodera glycines
atgtacatcaaattgaacaaattgataagtgaaactaaactaatatatgagcaaattaaatctgacactaatcctgtggataaaaaaaagaagataggggaaatttgtaaaataacacaagcattttgcaccgatgtaaatgacgataattgcttatattcaccaaacattttaaaaaatgtgaaagaaatcgaaacaagcattatcatgctgaaaagcaataacaccaaagtgtttaaagattgtaaggaccttcaaaaacttattgaagtcattgagaaacaaaatgggtctaaagactaaacaaacggttagtcatcaataattttaaaatttattcaattcttaaaaattgatgaatacccgaatttagaaacaacaacaaaaggacttgaagaacagaaaatctgtgatgtgtggacgtacagttttattgtagaagattgtttctttcatttctgtctctttttctttcctcttttattggctttcatatttttaaatgttatttttcgcttattttttgggagtagaaaaacgtaaattttgttgcattcatttatctaattagtatgactctcatttaaaaatactttggtagccaaacgagttagaattattata

SEQ ID NO: 78062 - DNA, 1205 bp, Heterodera glycines
aaaggaagcaaagaactttttggtgaaattgacgcacaaacaaaccctgaggctaaaaaggctaacttagacgaaatttgccaaaaaactcaagaatattgcacatacgtacaaaacagtataaaagacaacaaaaacatattttctgtttacgaaatttttgatcaactgaaagtgatcgaagaaagcattccaaaactgaaaagcaatgatcccaaattgtttgaagattttgcaaagcttaaagaagtgattggagaaaactctaatcttggcaccaatccaaaattaaccaatgtgttggaaaatcttgaagaattgaaaagcaaaatcaaaaacctaaaagatgttcgaccagcaacaaatgataatccggtggcattaaaaaaacaaattttgcaagaaatttttgcaaaaacaaaaaatttttgcaatatttttcgagaaattttgggagaatttgacatcaaaaccgataacattgagaacggcatcaaacaaattgaacaaaacatcacagagctaaaaatgcacaattaccaagtggttgaggatttggcaaatcttcaacaaatgattgaggacaaaattgaaaatgcttaatttggccaacttttgaaggtgcagcagcagaagaagagttgttgctatgtgatatgctttttagtgtgctattgttggagaacatgggatctgtccaattttttctcttttttttatcatttaaaaatttgtttgacagattgtcaaaaaaccgaaaaaatatggtcggggtctgtctcgttttcgagtgaccattttgcgtggggtacgttttcgcccggggcgacatgaactttgggcaccagaataattgttaaaataggttttataaattagtacctggaagctctaaaccaaataattaatatttattaacttataatgttctgaaaatcataaaaaatgataaaaaaaaatgccgaaataggtacaaaaattgtatcttggtaataggtagaaaacatttaaattgtaaaaattcgtattataaatttcgatgggtctagaagctttaaattaaaaattatttttattattcttttaaattttttaattcaaccaaattctcaaaatgcgtcaaaaaatcacaaaacaggaataatatatatattttaactgttgagaaaatttttctttaattatactaattaaaaaaaaataaa

SEQ ID NO: 78063 - DNA, 1085 bp, Heterodera glycines
atggaagcgactaaagctgtttatcggcatttattcttatggggaaatggaaacagattaaaaacagaggtaaaattattttaaaaatttggtaaaaaaaaatttatttacggttaaatttgataaggacattctcgtgttgcttttgcatttggtcgtcatttttgttgccatttgcagccccaaaataacaatttccttaaaagctatattttatcgcatttttatttgaaattaaaaaaaacccaccataatcatagacaaactcggcatttttagcgcaatgctccagtttacaaaaagcttaaaaacaaaaggattaagaaatattttcacttttttggtttatatggaagaattattcaattaaatatgtttgcctcagatggcaaactaaaagaatcaatgaatttttcattatttttatggggaatcagggctgtatctaaggccgaaaaaagcccatatcccgattacctttgtggcacacaactgaattgacctcctaaatttaaaagtttactaggtaaaattatttatgaaaaatagctataaaaatgccataaaaattattaatttattgtattaatttattttatttttatctttgttttctgctatgacatttggcttaaagatgatatttatctgcttattctgatgacactggtaatcacagaaaaggccattaccacaattattcatttctcatttaacattctctgctgcagtttgggagaaaattcatttacataatttggtgcaaaaatgacataatgcaagagaacattgaaggaattttgaaaaataatattaaaaataaagacaaaaatgtttttaaataataaaaataaggacaattaaaaggtttaaagagtttaagcctcggcagcccatgcgggtgtcaagaatctcggagattgcgaatttcggggatggaatcagattagcggtcgaacccgtcaattttcttagggaaccgaccgagccaaatatgatgtacccacaatttgttagtaaatttattttttaggcagttcatcgaaaattaattttaaaaaattaattcaaattaaatttttcga

SEQ ID NO: 78064 - DNA, 540 bp, Heterodera glycines
atgtctaccccctattcccttcctaaaatacctaaaaaaagtctacaaatgaacggatgcatgtatcgcctcttgacaaagtgccaaaaccacaaatgccaccaccagcaccaaaaaaatcaatttggagagttgagcaaaatcctcaacgcccgccttcacctcctccgcaaatgactccaagaagtgatgagcgtcagcaatttttgttgaatgaaggcccaaatattacaacgccgccaaatacatattgtaaaacaaaaaatatgtacagatgcttcaactgcttatttttgtatctaaaggtcatgcgtggcgtagtgtgtcttccgcacatatgcagtcgattgaagggaatgagcatttatcatactggatacaaacgaacccgccgcaatcaacatcatatgattatggaacacacgatgatgtttctactgccgaaatagatttggaacagcaacaaccatgtgaaaaaataagcgtactgcgacatttgcggatattcccgacatttgaggacatacacaatttcaaaaa

SEQ ID NO: 78065 - DNA, 739 bp, Heterodera glycines
atggaaaacaaagagtctctgttggtccatctctttgaaatgatgccctcttttgtccgcgggaagacgccccatttcccaataaaaaaggtttatctgtttgttttaatttactttttgattgttcagattctgctgctttcatggaaagtgttgcttgcgactctcggcggcaccgattttctccgcaaagaaaaggcgagaaagcgtgccgaggctggcctttcaccagtgacagacaccgttcaagtggccatgaagatgaaacctttgctcagttgcgacggttctgttgggactggcgctttgcttggtctgaactcggcgagtggtggcgatgggaaggccgagacggactcaggaagtaaaatagtaaaaacataaagaagacaatactaaaacaattatattttataactagcaattaccggacaacttgggcgtaaggtccgctccattcaccacccaatccgtccgttcaatcgccaagttgcctgctcctccaattccgaacaaagttcctttcctttaagtcagccttttgatttgttttcaattagctacagcacacgatgaacccaaccgtcgcgaagaaagcaataaaacctttccggttgacaaaaaaggcgaaggaggagaagcattcggaggaatgtcagaagaaaccaaacaaattgcggaggaagtcgacgaggcgatcgttggaggacggaatcaggaaaatgaggtcagaccgtaa

SEQ ID NO: 78066 - DNA, 948 bp, Heterodera glycines
cccaacggtaaatagacaaattaaaaatatatttgtatgtcttaatttttagcaaaaaacacttccatttccaattgccccccggcgattccaccaccgtttttgctttgcccgagcccattgtcaggggcagtttgcccgcgttgcgtcgcaatctttatgttccgctcaccgagcttcaggttgaattatcgggaattttcttaccctttttgaatgtttcacttccagctcgaatctgaagaccgatataaccgatttccattctcgcaaaaggaattcattgaagattgtccggcagaacgactttacgtccgaatccttcccgaaatgactgaatatgtaattgccctgctcaaagtcattctcgcttcgttgccttcctccaaagttctttttgctaattttttgcattgaattcttagacattctaaaatatactcatttaaggcgaaaatcgatgctgtcacaattctatccgatgtgctgacacccgaaactgacacaaatgagtaaataaagagccatttattcccttttgggacccttactccgattccctaattatttagagtcctttctaattcgatcagtttggaccttgccagtttttcacacacaaatgtattggaagaaactgtccgagtcgcaattgacataaatcgacacaaagaagttgggcttggtttagtaaattttgattattcatgcactctcttcagctgatcatcaaatcggcttcgtcccttctcattcttttgctgaaacacttacgtttgaaccacacactccaatttgaaaacttggcccgttatctcgtcttggccaattgtcttccgctggtgcttaagtttcttgaccagaatatttgtcgatacttccaagcaaagcacgagttggccccgttcaactatcctcagtgtgcactgttttttgtgaggaatggat

SEQ ID NO: 78067 - DNA, 851 bp, Heterodera glycines
atgcaagcccgctatttgggtcgacagtggcgcaagacgaacatggatttgatttcgggcatttacttacgcgtccgtcatcggcttaacgacgactgggccttcgccaatgaagtgatgcgaacgaaatctattgactcgcagcaagaagagaacgaattgggcctggccatcagacggtttaacgcacggcgttatccgtacatttacagagacggaggtgggcagacagagacttacagtggtaaaagtgaagcatactgactgacatccacgaattatattcaattgacatttattactctgtaataaatgaatccgaaaaattttttgtggcaatcactctgaaacgagttattagatagaccctttcgaacgttgtttttcattttcccttccggtagagaaattttttagctaacaaataagggaaaatttcacaatacgcaattttcagaatcccatgttggagtggcaagggaaggcgaagaacaacatcagcagcatgagagagtgttttcttcagtgactgacgcggtcaaattgggttttgtggacgaatgggagcctaaggaatgggagccgactgacaatgtgtggttcagtttagctggctaacatttgtggtcactttcattcatttctctttgagtctcttcaatccgcgttggcctgggaaccgcaattcagcgaacggttcacacaaaactacgagcaatggttggaggaagaagtgtacggtcagcagacggattgggactcactgctgcgcaactccaggggactgttggacatttactgctgattcgatagaacagatgatggttgagtctttttaacaattccacaaa

SEQ ID NO: 78068 - DNA, 2061 bp, Heterodera glycines
  unsure (1)..(2061): unsure at all n locations
atggaccgtgcgctgaaggaagaacgaaattacattttggagctgtgcaagcaaatcaaaaaggccgggtgcaatgtgttgctcatccaaaagtccattttacggtaagcggtgacgaactgtttgactcgttttccgacatggtttcctttttaacgtgatcctctttagcgatgccatcaacgaaatggcgctgcactttttcgcaaaaatgaaaattatggtgatcaaagacatcgagcgggatgacatcgaattctatgccaaaatcctcgggtgtcgcccggtggcatccgttgaccattttgtgccggaatcgctcggaacggccgatttggtggaggaaattgagacggctgatgggaaagtcctcaaagtcagtggagttttactctctcctttttggctattttgtaaccattttcaggtgaccggccttaaacagagtgggtgcgctgtgtccattttggttcgcggctccagcaaattggtgttggacgaagccgagcgctctctgcacgacgcattgtgcgtcattcgctgtttggtgaagaaacgcgcccttctttccggtaaaaaaaaaactttgttccagtttcgaccatcacttgtgcttctctcccacaggcggcggtgcccccgaaatggaagtgtccgtccgcgtccgcgcagctgctcagacaanacacggagccgaacagtattgctggaaggcatttgcggacgcactcgaagtggtgccatacactttggcagaaaacgctggactgtcgcccattgaaacagtgacggagatgcgcagtcagcacgcaatgggaaacaaagagcacggagtgaatgtgcgaatggtgagcaagcggaatgggagaaggggcggacaccccacaccttttcagtttatttattaatgaactgtctgttgcccaaattatggttttctcattattatgacatgtttgagtcctttcagggtgcaattacggacattcgcgaagaaaatgtggtgcagcctcttttggtcagttcgttcgccgtcaaacaggcagccgaatgtgtgcgcagcattctcaaaatcgacgacattgtgagtcttacccaggccatgtctcccattcattctctttccaattttaggttctgtcagtgcgttaaatgtgacggagaaaggcaataagaaattgttatgcaaccatttaataatgttatgacgttcattgcgtaaatcgctttttacttttaaatatttgtccaacaaaagtttaaacaaaatgatttgttatatttttttctttaatacaaaagtgcattttaaacgatgatacagcagacactgctcaaaatacaatgaaaactgctcttgagttggcaaaaaaaattgtttgtggtgtatttattgcacacgtttttcgccaaaaagttggccgaattcttacgggagtaggtccgccgaatatttaaaaattattttggtttttgaatttaaggtgattccatgctgccgactatccacgatggcgacattctatgggctcgagtttgggatccgaacgatgctttacgaccgggggacgtcgtgtgtttagttgaccctctcgatgcagaagagtaagggaacaattctataatattccgttcgtgcctcgaaatccatcctttccataggtatgtcataaaacgcatttccgctgtccacaaagactgcatagaagttcgcggcgacaatgcgaaaaagtcgttggactcgcgcaaatatggccccgtgccggctggacttgtccgctaccgcgtgtctttgcgactcctccccttaaatcgttgaacattgcgaaaaccaaagtgatcaaaagctaaccaaaaacactaattgactcggtcgctttgcctaattatttgctgtccccaaaaggccttcggttggctccgttcgctgtgtctgccgccgttccgcccgtcgaccctcccccaaattacgagtccgcccttctgctcagttcacctcacccataatgctcaattttcatctgattattgcatttaattttctctttttgcgctggtgaa

SEQ ID NO: 78069 - DNA, 374 bp, Heterodera glycines
atggcaatgggagaagcgaaagaatgggacgaagtgagtgttgggacaaacgaagagggcattaattattattattccattttaattgccatttcgaagtttaagcggcgaattccgcgccctcagcgtcgttggctaatgcgcacgacggaacttaaagagggaagcggcggcgacaaatacgtgaaaagggtggtcagcgaaagcgaactgaacgcactgctgaagaacgcgtggctgggcaaaaagcggcgataaaaaagggggagaaatgagaacggagcaaacgtgatttgatcagagagagaaagagaggaaggaacacgaacaaaagcggaataattaagcaacgaattaattaattacacaataaa

SEQ ID NO: 78070 - DNA, 216 bp, Heterodera glycines
cctgggtaagactcacaatgtcgtcgattttgagaatgctgcgcacacattcggctgcctgtttgacggcgaacgaactgaccaaaagaggctgcaccacattttcttcgcgaatgtccgtaattgcaccctgaaaggactcaaacatgtcataataatgagaaaaccataatttgggcaacagacagttcattaataaataaactgaaaaggtgt

SEQ ID NO: 78071 - DNA, 383 bp, Heterodera glycines
atgaaccgacggtaattaaattaaaagtcacaaattcgtcgtttatttgactaaactgtttttccatttcagttggatttgcaacgacgtttggatggacattttcccatcctttgaccgtcctcaactcggcctcaaattggcacttctttcgccacgtttcaatgcgttggtggacaaacatttcaatggcaaaagcgaattgacaatttggagaccaatcgcaattcgtcgcaaggacaaaggaccagaaccgaaactatctgtgtggatggatgacaaaattgtggaatttccattgcccgattatccgttgaccagcaaaatccgttttaatcaccttcggatttagtaattaaaaatcaaagctttatggcaataaa

SEQ ID NO: 78072 - DNA, 339 bp, Heterodera glycines
  unsure (1)..(339): unsure at all n locations
atgcatcgcgttgatcagtgtcgattngacgttgccctttttgcccacnagcaaaaggttcttcactatgtcctttttgctctgccgctccaattctctgttcagcaaatcgagcgtcgtaaaggcgtggaagtgaacgccatggtcagcaaaaaaggcacaacggaaagtcaagcgatcgacgcgagtgccaccgcagtcgcagaacaaatgagtgatcggagcctgggagagggaagcaaatgatcaaatggaattgaatggcattaaagtgatttaaacacgagagaagtggggccatttcaatgggccattgtaacgaggaactgtttaaataaa

SEQ ID NO: 78073 - DNA, 339 bp, Heterodera glycines
atgcatcgcgttgatcagtgtcgatttgacgttgccctttttgcccaacagcaaaaggttcttcactatgtcctttttgctctgccgctccaattctctgttcagcaaatcgagcgtcgtaaaggcgtggaagtgaacgccatggacagcaaaaaaggcacaacggaaagtcaagtgatcgacgcgagtgccaccgcagtcacagaacaaatgagtgatcggagcctgggagagggaagcaaatgatcaaatggaattgaatggcattaaagtgatttaaacacgagagaagtggggccatttcaatgggccattgtaaccaggaactgtttaaataaa

SEQ ID NO: 78074 - DNA, 996 bp, Heterodera glycines
atgaagggtgtcacttctaatgaaaaggaaatgagaaaattctccgaagaatgggccgaatcagtgcagcaattcaaacggttgttgaagcatttggccactgtgaagccccatttgactcgggaaacgttgtcggtgtgtgccgcgcgaagtgccatcgtcaacattataccaatcattgcgtcaaacgggaagcaaattcaagtgaatcacacagacagcctagaattatttaaaatgccgaatttcaaatcattcagaaaagcatcgcaaagttggaaatcgaagaattggaaatcgcagaatggacaaaaaccattggcgaggataagaagaaagccgacattatgtttgacaatttcatgaagaaggaacttggtatactccgcatgcttttgcactccggtgagttttggggtgcaccccaaaatcacgccgccgaaatcacgccgctagaaattttaaaaaaattttcgaacctggaattttttctagaaaaaattcttagaaaattttttacaagaaaatttcaaagaaaaaaaaatttttttggaaaatttcaaaaaacttagtaatttatcataaaatttcaaaataaatcgctgaaaatttttcaaaatttttttttcttttaattttcttaaaaaaatttctaagaattttttttagaaaaattctaggtttgaaaattttttaaaaatttctagcggcgtgaatttgtcccggcgtgatttcggcggcgtgattttgtcctgttcccgagttttgtctaatggaaagagggggggggggatgcgatgaagcagccagcaggggtgaatttctactttttgttcaaattcatgttcgtgagccggaattgatacataggaatgggtgtctttggtgatcaacgataatttttctctcatacaacactaaaaagccaaaatttttaaaaacaaattctatattatataaaaattttggtgtttatgcactttatagaccgtaaaa

SEQ ID NO: 78075 - DNA, 695 bp, Heterodera glycines
atgaattgcatgtttaagacagccaaatggatctcctgtttgaagtcaatggcagtgataacggatgatgaccaaatgctgagatacatcgaattgagcatccgagacgccgatggaaagatggccaaattgaagggacagtcgtcccgcgaggagcagcagaagagcatcgatgcactccgagtcagttcaactgcttacaaatagaggaaaaaaacttggaaatacctacgttgttattggatttttaaattcatctatggtcatgcttctccatttttctgtatcggattaactttatccgatggcttccatccacgcttcactttttgtcgattataaaaatcttgaaaattaggggcgtgcgttttcggagttgcagaacacatatgtatgacagggatggcatagaattccggcttcagatgtctggaaaattttttggtgctttggaatgccatccctggtatatgacacgatttcgaccaattcttaagcccaaacacgaattcaaacaaaaaatcgaaaattcaagcccattaaaaaactaatgaaaattcaaatccctttgacgaagtaacaatttatttatttatttacagaaattcaaggaatgttacatcaaagagcgcacactgttcgaaacagcttccggcaatggtggaggagttcaaatttccgaccgaaaatgttga

SEQ ID NO: 78076 - DNA, 347 bp, Heterodera glycines
atggaaatggtgccattcgaattggtgaacgaatggacaaaggaaaagctgacattggccaaagcaaatgaatttgacaaaagttggataatgaaacgatgcaaaattggggagaccacggcggttaagcaacagcagaagaaagatgaaaattgggacaacaattgtaacaatgtgtacttttggctttttagtgccaataattgcatcgggtgagcaattaaaaaagcatttgattttgtttaaataattaaaattgcgcataattaaggccattgtctccgccaccagcagaagaagtggaagaggaagccggacaatgcatcacaaaagggccaaatgagtga

SEQ ID NO: 78077 - DNA, 1012 bp, Heterodera glycines
atgcgtcaatgcatgcgaaaagtgctgcctgtggacgccagcgacgagtcacggcggacattggccgaaacggaggaatacaaaggtggacttttaatgaatgagtggtgggtaagttaatttttgcagaacaaaccaaggaaattcctttcctttcccttgcgatggatttaccaccagcgccgctttatttggacgaacggcttcagaatattatcccgcaagtgccgttgtcgacgctgctcatgaaattcaacggacaaacggagaaagtgggcatttgatttataacaaaaccaaatattgcgataattacccaatcggcgagcaactcttttttaattaaacaattaaatagtttaacatttttaactagttaggacaaattcgaagtaatccaaaaatttccattgatttaaggagtacaaaacgtacaaagacaatttcctaaagaagtttgaactgcttcatctccccgaatatctaatcattacttatgatcgtttccacaagaatcagtggttcatcgaaaagaatcccaccatagtaaattttccgatcaggtgaattttgaactgatatttgtacatttcaaaattggtatttttgcatttgggaggcgtaatgaaactgcttttcagtaatgttgatttatacgagtgtttggcaaccgatgtacgggaaaagcaccgatacaccacttacgatttgatctcaaacattgtgcacgacggtaagccaccgactgcggtgagcaaaggcgacatcgcagttgacaccggacgataccgagtgcagctgatccatgaggtggactttcgtcatttttacaatttcacacaaatgcaaactttgttaggggacaggaaaatggttcgaactcgaggatttgcatgtgaaggaaattctgccgcagacaatcactctcacagagtcatacatccaagttaggagcttttcattcattttttgtcagttaatttcatttcgcagatttggcgattgaatagga

SEQ ID NO: 78078 - DNA, 661 bp, Heterodera glycines
cactcgtataaatcaacattactgaaaagcagtttcattacgcctcccaaatgcaaaaataccaattttgaaatgtacaaatatcagttcaaaattcacctgatcggaaaatttactatggtgggattcttttcgatgaaccactgattcttgtggaaacgatcataagtaatgattagatattcggggagatgaagcagttcaaacttctttaggaaattgtctttgtacgttttgtactccttaaatcaatggaaatttttggattacttcgaatttgtcctaactagttaaaaatgttaaactatttaattgtttaattaaaaaagagttgctcgccgattgggtaattatcgcaatatttggttttgttataaatcaaatgcccactttctccgtttgtccgttgaatttcatgagcagcgtcgacaacggcacttgcgggataatattctgaagccgttcgtccaaataaagcggcgctggtggtaaatccatcgcaagggaaaggaaaggaatttccttggtttgttctgcaaaaattaacttacccaccactcattcattaaaagtccacctttgtattcctccgtttcggccaatgtccgccgtgactcgtcgctggcgtccacaggcagcacttttcgcatgcattgacgca

SEQ ID NO: 78079 - DNA, 931 bp, Heterodera glycines
atgaaaagtgatcgggcaaagtcaaacaatggcatgaaaagtgatcgggcaaagtcaaacaatggcatgaaaagtgatcgggcaaagccaaacaatggcatgaaaagtgatcggacaaagccaaacaatggcatgaaaagtgatcgggcaaagtcaaacaatggcatgaaaagtgatcgggcaaagccaaacaatggcatgaaaagtgatcgggcaaagtcaaacaatggcatgaaaagtgatcgggcaaagtcaaactatggcgtgaaaagtgatcgggcaaagtcaaacaatggcatgaaaagtgatcgggcaaagccaaacaatggcatgaaaagtgatcgggcaaagtcaaacaatggcatgaaaagtgatcggacaaagccaaacaatggcatgaaaagtgatcgggcaaagtcaaacaatggcatgaaaagtgatcgggcaaagtcaaactatggcatgaaaagtgatcggacaaagccaaacaatggcatgaaaagtgatcaggcaaagccaaacaatggcacgaaaagtgatcggacaaagccaaacaatggcatgaaaagtgatcggacaaagccaaacaatggcatgaaaagtgatcggacaaagccaaacaatggcatgaaaagtgatcgggcaaagtcaaacaatggcatgaaaagtgatcgggcaaagccaaacaatggcataaaaagtgatcggacaaagccaaacaatggcatgaaaagtgatcggacaaagccaaacaatggcatgaaaagtgatcgggcaaagtcaaacaatggcatgaaaagtgatcgggcaaagtcaaactatggcgtgaaaagtgatcgggcaaagtcaaacaatggcacgaaaagtgatcggacaaagccaaacaatggcatgaaaagtgatcgggcaaagtcaaacaatggcacgaaaa

SEQ ID NO: 78080 - DNA, 920 bp, Heterodera glycines
atgacgcttggacattatgatgcttggacatttcgacgcttggacattatgacgcttggacattatgatgcttggacatttcgacacttggacattatgacgcttgtacattatgacgcttggacatttaaaaaggcaaatcggtgccgaagtgacaaaaacggttttctattgggcgaagtgacaaaaaggcaaatgtgggcgattagacaaaaaggcaaatgagtggtgatcagaagaggcgggtcatttcagtaccgaataatgattttaattaattaataatataactattttaatctattaattatattgctggccataattataatttcgttattatttaatatttcccaatcaaattacaatattatattctgtctagagagagaaataatatccacatgcatagttgatcaattcgatcaattgcacttttatttattcacaattatatattatattctgtctagagcatttttcatttctttaatattccactattaacttgtctttaataatttattaccgaatttttaattgatttagaatgaaaagtctacttttgaaactttttgttggcctctgcttcattgactttacgtcaaatataaagtcaaaatttgaggactttcttgaaaatcaagaagcaatgaagttgatccaaaattaccaagaaaagcgaatcaaaactattaaagaattacatgctgaactaacaaaaaaagggattaaattggcagaacgtagtttgaggctatatctttgtaaaattaagagtgccaattctgatacatcaaaagaaagtccaaacataccagaaataaaatttgaaaaacaagatagagaggaatatttttggcagacttttactcccaatatggatcattccgtaaaagactaacattaatttttataaa

SEQ ID NO: 78081 - DNA, 583 bp, Heterodera glycines
atggcaaaaaatgtactaaaacacacaaatttgagatttgcacaaaataatcgacaaaaattgcgggtaagactatggatggtggtgggcccccttttttcgaatcccgaacccgaattcgaacaaaaagttcaaaattaaattttttgtaagtcatgaaaatacattttcaaaggttttcggggacgctgatcagtgatcacgagtccgtcatccatttcggccaaatccgcggattcaaacaaaaatttaaattttaaaaattcacatttgtaaattgttgagcttttaactatgttttcagcgcttaatatacctaaatggctgtattggaagagtttcaaaattttacattgaaaaaattgcatgaaaaactggctttgaatgacaatgattttgtcgaatggcttgagcatttgggactcgtgcattcgcgtcgctcatgtccttgatgtggtggaaatacttcgattgtagcagttggtggaaattggcgttgcactacaaagaattgtcgggcaaaaacaggttcttggttcgtagtgcgacttttcggaccactattctcgatagaactgtctaa

SEQ ID NO: 78082 - DNA, 590 bp, Heterodera glycines
atggttgcacagtccgagaaaagatggcatgccgaagcaattgcatttctttttgaaggagccaccaaatatggaatgggccaacactctcaaaaaggtgtggccatattttcgttagccaactgattttgattgcatttaattaatgtccgtccgttttcccattgtttagcattttctccgtgccaatgccatttcttcggtcagctaccaaattcaatttactgtttggcaaccgtcaacgcaaattgtgccatttgaattagcgaacgaacagaccaaggaaaagcggacactgatcaaagcaagcgcaaatgtttgggaagaccgctgggtaatgaaacggtgccaatattgggagacggcggcggttcaatgggcagcccaaaatttggacggatttagcactgtcgagtttcattattacgtcgaagctggcattgggtgagcaacaaaaaagcatttgattttgtttaaaaaattgtgccgaatttttaggcctttgtcgccacgtcgcaaatggtgtccaattatgtgaaggtgatttaatgcatttgagaaatgtcgatcattttgaattatggcgatga

SEQ ID NO: 78083 - DNA, 1440 bp, Heterodera glycines
atggaaaaagctcgaaaatcaacgccgccgaggtccatgactttggaagcacttctggaagagtgccgttccattcaatcgcttaaaaattcggctgccgctttgtctggtcccggacaagttcattcagtgcaggtccgaccgcaacgagtaagcgatggaagtaagaagtctaaccgaggtaaaatggtcaaccaaaagggcaatgtttcggttccaaattcgaaagagtataattttcctttcaattcgaataggaccgatgaagatcagcagcaaaagtgcaagcgatgtggtcaattccatgtcaacgactgtccttatgcagccgatgtgaattgctaccgctgtggaaaacgtggacacatcagacccgtttgtcctgaacgcacgcagtcaaacgctgtcacagtggcctcaactttttgtgttactcaaaactgccacgattggatttggacgcagccactgatcaatggacatcctgtcaaacttgtggctgactcgtgctcgcatctgacaattattcaggagccactttggataagtttggggagtccaaaattgagaaaacaaggtaaaaaagttggtagtttttccgggcataaattaaatttgttgggcgaattcgattgtttggtgaaatttaaaggtgttgaatttaagctcaaatgttcagtagcaaacaccggagctccaaacatcatgggacttgattggattgtgccgtttgagaaggccacgcaatctcccatcgcgacgacattggatttgtcaaacgccccaacaaaagtcaacacaattgatgaacgtccccgtcatttcaaaacggtgacactgttctcgtgttgaattacggaaggtctggcaagcctaattggtttgaaggcaaaatagtcgatggtaaaggtctaatttggaaggtcaaaattccacttttgaatattactgtcactcgacatgtaaaccaaatacgttcttttgtcccttaccaaacagagacaactttttcggccgatttagttgaccaggttcctcaacagaaaagtccttgccatcacaatgtcgcgaccactccggtgccaaccttgccaattcaaccaacgcctcgtcctcagagacaacgccgccccccaatacgttattcgccgtgaggaaacaaattttaagaagggagatgttggagatggatgttgatgttggattttaattaatttgaattagcgccatacagtaacagtgatgttcctgtttgtttctccgcgccacatttccagtcattattttccctccgttgttcctcctcattcattaattatttcattcttaatttttcggttctaaattaaatctgttttgctccttccattttcgtcattcctctgactccgtcgtcatcttttatttatttattgatttcatttgtctttccacaataaa

SEQ ID NO: 78084 - DNA, 1548 bp, Heterodera glycines
tgcgcgagaagtcgcgccaaatgattaaacagttgaacgaacagagggcggcacgcacactgtccatcgttgtaggagtgttcatcctttgctggacgcccttttttctgttcacgccgctaatcgctctctgcggcaatgaacaggtgggcaagcctaattgggggggggggggggggaaattaaattcataaattctctgccggtcctaatgataaaattaaacatatttcagagtttcgccgactacgaaacggtcttttccattttcacttgggccggccatttgaattcgatgctcaatccgttgatttattcacgcttttcgcgcgactttcgcaaggcgttcaagcaaattttgacctgtgaaagggaaaggccgaccaaaaaggcgattaagtgagcttatttatatttgtgaaacattttaaaaattaataatggtataaagtcaattaaaaaaccgtacctttcgacaaattctttaatatttggcacatttcagaagccccctgaacattgtccttgcccaactcacttcgatggcacaaattccgccgccgacaaaactgggcgaatcgtcggaaggataaaaaagcgtcaaaaatgaacgacaaaaaaagggctttcaaaatcattcactcataacaaattaatttcttcctcaacattttacttaaaattttcgaatgtttaaaagtgattaataattaattaaattcaacacttgtccaaatgcgtatttttaataaataatttaaatccgactttaaaataggggaaaatttttaaaaataggagcaaaagtgaaaagaaggcgtcccggcaggattgaaatgccgttttgttttgtcgggatgccaatccctacattctgctaatagcacctcttttttaacttatacttacagtgaaaagtatttatggtccagtaatacgtttgttcgtaccttttcagattgtctgcgactattttcgactgaagcaattaatccgcacaaatgttaattagggggcaattaattgctaagaagtcacccgttatccgtcattagcatgtttattcgaaaggtaccttatgagcttatgagtgaatcagctgctcagttgccaatgtgcattttctctcccactgtcagtcgcttaatcgcctaaaaattcacacattttctcaaaataaaaaccaattattttttgtgcctttggggcgcctttcgtttggccattaattggtaaacaaaaaatgcgcaaattggcacaaccaattttccgaatgtgatgtgagttgggtgcctccccctctgtgtgccaatcatttcgcttttggcaccgttacgctttgcttttttgccatttttttaaatttgcccacgcggacatttcgctatttgctggaaattccaataaaaaacagaaagcacgcgaaaaattctcattaggaaccattggcatttacgtaaatggcaccacaaaagcatattgaataaaataattccgttgctttttcatatttaatttctattttagcttaaacaaactgacaaatga

SEQ ID NO: 78085 - DNA, 1981 bp, Heterodera glycines
cgtttcgcttgcggtcgctgatctgatcgtcggtatgccctttggcaatttaacattaattatggcattttgtcattgaaatgtttttcaaatgacatgacttgcttcgccacaatttcattcattcattcgctcgttctttcttgcccaggtttggtggtgatgccgttaaattcgctgtttgagatgagtcgccatgtttggctgcttggtgagccaaacgccaaacatttaaaagaccaaaaaggaaaagccataaaaacaattgggggggggggggggggaaaaaagaaaaaaagggggggggagggaatttgggacaaacaaaaaacgataaaggaactaaggaaggacaacaaaaacaaaacggacggacgggggacaaaggggggaaaacaaaagcaaaaaaaaaaaagccaaactattggtttttgactctccaatttgaaagggcaacaaaagcaaaaaggaaatttaaataaaatttaaagggtaaattaccacaaggaaaatgaaatttaatttttggcaatttaatattaaatggttttctccataaattaaaatggcgttttgcaaattcgttttttctttgtttaaattccatttttggcagtttatccgccctatgccctcccccctttttttgcgtgtcaatccctcccaaaaacatgaatttcaactgcgcttttcatgtgaaagtcatgcaaaaaaagttaaaaataattaaaaatgaatttccgaatttgtcttttgtcaagggttgaccacctgtgacatttggcacgcattggacattttggcgtcgacgtcctcaatttggaatttgtgcgtgatcagtttggtcagtgagccgaaaatttaaaaaaaaaattaaagtttatctttaaaatgattatattttataataattttgtttttgattaggatcggtacatggccggcgtcgacccaattggtacgaaagcaaaataaaaccaaaattaaattattaatgatggcattttgccaaaaaagaggggtcattaaagagatggtccataacagtttttattattattattattattacaaaaaaaaatctgcccaactgtaactgatatctttcataagctcttcccaggtgctattagccagccaaaaaccaaaaagaattatttgctgaaaaatatatttttgggcttttccttttttccatttccattaattgccctgctacccattaactaattatttaattagttaattaattgtccatctccagggtatcgcgaccgcgtgtccaaacgccgcatcatttactgcatttgctgtgtgtggttggtctccgcctgtacgtgcaattattattgccagccaattaaccattaattaatttggaattgccttaggcatttccttcccggcaattttttggtggcgcgcttcttcaccccatttgtacaaggacaaagttggacaatttaattagctaacatcaaaattaaagaaaatttatggaaaattttgttcagaggcgctgtctgttcactgatgatgcgtattacgttgtgttctccgcaatgatttctttttacatccctttggtgctcattctctttgcctacggtaaattttgaaattgcaaaaacaaaatgccaacaaaaatgtcaaaggtcgcgtgtactgtatcgccacaacgcactcgcgatcgatgaagagcggcgagaagcgggtgagtgtttatgctttgagcggaccgactgatcaaatcaaaagcaaaaaaaggggggaaaaagatggaagagagtgatcgttgtgaatttaaatactttttaaaatcattgaattcacctcataatttgcagattttgctgaaacatcgcgaccgaaacagcggaaaatcggccaagtcgggcagtcccgcgcccaatcaatgctcccgaaatcattcggcgggctcggaaacactgcgcattcacttcggacagaaacggacgac

SEQ ID NO: 78086 - DNA, 1239 bp, Heterodera glycines
  unsure (1)..(1239): unsure at all n locations
atggtgttggcaaagacgcgaaaccaacaaagtgcggagccaaataacttgctggaccatttcttggatgaccacaactgtgaacgggacaaagagtgcgattttggacgaaaaaatgtgtgcggacaggtgagtgagagaaacaaaccaattaaatttgctaattagccttaattggctcattaccaaaattttgtatattattctgtttaaatagaaatgtttcaggcaaaattccttgaagagctccgtacagtgctcagtatgatactgctgtttgtgccaatgccattgttttgggcgtaccaatcacatatggtacgttcaaaaaatgttgaggctgatcacagataaacagggagcggcataatgaaaatgcccaaatacctgacaaaaatagtgatgaaataaaaaattttcttttaatgacaaattcgaaaaaaattttaattagcattcactattcgggatttgtactttttcatttagctctcaatttggtccatccaacgggtgaacgtcgacccgaatttgccgatgatcggtgcctttttcagtcgtgatcaaattgggctacatttgaatatttttgtgctcgttctgataccaattttatatgtgagtttgtctgatattgnggataaaaaattgggtttttttgccaaaatcaattttccttttcagtacatcgtttatcatcatcatcatcatcatcattggcacaaattctgcacatgancacgtaagccaattcattantaatggaaaattttcaggatttcaaatgtgatataccgtatacccaaggtatacaaatgttctctcacttgttccaacttctggttttataggtcacacacccactatttgttcgtcaaaagaattttctttttttaattttttgggaaattaagagttttgcctttttttgcagaaagcctatgatgacccaattctgccatcattaaggtatttgaagaggatggcttccggcatatttttgtgcgctttggctagtgccgtttcggcaactgttcagttccggctcaatgttagtgtcaattaaaaaaagactctgctgttcgtctttctattttatttaaagcaaaatccgttagagatttcatgaaaatttcaaaaagtttgtaaaattaccaaataattttcaaaaattattgacgaacccttttaaaatctttttaaatacaaaagtttcacttgtgcctaacggcacaaaaa

SEQ ID NO: 78087 - DNA, 1553 bp, Heterodera glycines
atgtacaaaaagtggtccaaatatgtacaaaaaaccccaaatatgtaaataaaatttttttaatggtatttttgggaaagaaaatccccgtaaagtatgaaatagccacaaaatgacataaaaattactttttttggtatttttaggcaacattttcaaacttattttttctttataaattttcaaaatatgtacaaaaatatttgccgaaattttgaatttttttttgaggatttccaaaaatttccgtaaaaaatactcaaaatatgtaaagaaaatgaaaatatatatgaaaaaaatccaaaatatgtacaaatatgtaagaaaatcccgaaatatgtataaaaaccacgaaatatgtaaaaatatgtaaataaaagtcccgatttttgttcgcaaacacaaaaaagaaagtgtttttcctgctatttagagcaaggagaagctaggaaaaaaatatgtatttacataaaattggcagccctaataccgtatatgctctaattatagcccagtctctattaataccgcagtctccaattatcccccccccctttctgaggagtttaaaaaataatcacccagtctccatttatcccccatgggggataaatagaatttgagaacattgtttgacactaattatttctgaaaaacaaaacaattttccagcaaattggttgataatttgcggcaccgtgttgaccaacacatagggcttgagcttatgaccattgctgcgggcttttgcagtggagaccggacaactggggtcggagggatcccgagtccgggataccgaccgaatcccgatcccgatcaatcccgaacattttggaaaaacgatcgagacggattccgagtcgggatcccgaccgaatcccgatcccgatgaatcccgaagatttttattcgggatcccgcgggattatcgggatttgctaaaacccaattttttattggctttttaatttttagttttgtgctaagttttgttcaagtgcttatctaatatttataattgatcaattcgattgtgaaaaataggaatggtaatttattaggtttttatattttttttccaaaattagaatatctagggtcaaaaattagaacatttaacaacatagctttaaatatttttacaatttaatcaattaatgtcaatttctgtattttcgcctcctattatcattttaaacaattttaaggaaattagaaaatcgtaaactgcatcgggatcaaaaatcaagaatttttttcgcagtgaatttttttcaaaaactttaggggaacaggggggaggccggcggtgccgataggcgccgccgggaaaattttgaatttgaaatgtaatttgttaacagaatttatcctaaaactgtccatattttgtgattttgaactaatttataagaaataatggggttttatgtctggcggtgacggataggcatcgaagaaaaatacgtagacatcaattttattatgattttttggacaaaattcttagaaatcgttgtgccatgaaactacctattataaaaaataaa

SEQ ID NO: 78088 - DNA, 1244 bp, Heterodera glycines
gccacaaaacatcaccaaagtgatcatcgatcatcggtcaatcaatcaatcaatggccaatcaatcaatcaatcaatggtcaatggtccgtcggtcgcccttttccccggccgttaaaatgcgcaccgatttgatcacaaagaagaagagatccgatgagcacactaaagcaaattcacaatcagaaactaaattcagtcgtcagcagagtcattaagctgtttttgttcactccgaaggaaaattaaattttgtgaattaaattatttgtttttaaattccttaaatacaatggcgaaagcaatgatttgcttaacaaagcagtgataacagcagttgtgattgatcaagtcgttagcaatcaattacaccaaattatgcaattaattaattactcatttcgccgtctgtcccccctccttttgctcatccctcgcgccggtctcttcagcaactgcaaattcgcagtttttactgcgtcgaaattttaacaccaattttatattttaatgttattatgtattaattaatattaggtttggttaaagattcccgcttaataatcccccgggttttggccacttctttcatttccttttttgatcaaacccatcgattcccattttcaaatgccatataatttccacctgctgcttctgttgtttttgtgcattgacatcttttgcgcgacaatcgttttgtgttcgccgtccccgcccaaaaagagaacatttccatttggaaaagggtaaattaattgaatttctttgaaaataccaagtcaattttttaattttattattatttttttgtgtttttagtttaggaaattcgctgccaatttcagtgccggtttggccaaattcgttgtcccattattatcaataaccgatcgaacaaaacgcagtcagccggggtaattaagggcattcaattaatccatttaattttaattagtattattaatgaatcacaggtgtatggcgcattaacgtgcaatggaagccccgctggtggggtcagagtgaaattatttgacgtcgaccgctgtaagtgtcagaaattgggagcaaaatgcgattacataaatttaaataaaattgaaattcatagaaaaaattgaaatttcagagattttcctagggttcgaatcggacgatctgttggccgacggatggaccgctcagaacggcactttcgctttgtatgggtccgcaaaagaggcgacaaaaattgtgcccaaa

SEQ ID NO: 78089 - DNA, 135 bp, Heterodera glycines
aagatgtcaaaaaggggctctgtgaagcatcttgctattacgtcgatgatgtcgaccaggatgattacacaaatagcggctttaaaaacagatcgtcacgtttggctgatggtgccaaatgtgaaaccatggtga

SEQ ID NO: 78090 - DNA, 513 bp, Heterodera glycines
ggaggctgaaagcaacggaggggaaattttgtatacggacactgacagtatttttgttttgcatgatcgggacgtggagccgatcacaacgggaaaatatttgggagagatgagcgaggaatacggcggctatgagattgaagaatattgctgtggaggggcgaagcagtacgcactgaagatgagaaacaagcagacgggggatattgaatatgttatgaaaattagagggattacgttcgacgtggacaacaggaaaacattgcactacgatacattcagggagatggttttgaattatgggaaaggggaggtggacccggcattcttcgtctataagaatgattttgggtgagttttgtaaaaattatttgcttcattaataaatcaatatttaggccgacaagggattcgaaagtggtgacgagggagaagcataaaatgtacaggccggtctgtcagaagggtatcatcgatgaggagcttaatgtgatgccatttggattttgttaa

SEQ ID NO: 78091 - DNA, 57 bp, Heterodera glycines
tgccctaccgggaccgggacctgagcttttcaaaatccgggaccgggaaccgggacc

SEQ ID NO: 78092 - DNA, 1071 bp, Heterodera glycines
  unsure (1)..(1071): unsure at all n locations
atgagccacccaatttggcaaattgggctttttaaacgaactacagaagattcggtcgagtgtttggagtgtaaaagtaaaaacgtcagtaattttactcttaaattgtcacagcggagtgtcaaagggctcaagacccatttgtttgccaagcacaaagacacgccatatgcagaaaaatacttaaaactggatgaaggcaagtcaaagaaggatggtccaaaaatcacagattatacaacacggagttcgggtccaagaataaaattgtgatttaaattaattaccattttaggcaaattaagtgtgatggacaaggacattatcaattttattgcttgttgcaatttgccgttccaaataatcaaccacaaaactttcaaaaaattgctccgaaatccttcggaaaatttacgcgacgaaagccattaccgaaaaaatgtcctgcctgaagtttacaaagttgtcaaacaccagatcaagggagaaattgctgagtttgagcaaatttgttgtacctctgacatttggacttcggatacaactaaggatgccttcataaggtttttattcgtttggtacaaatgaaaatattcaaaaatttagcttgactgctgttggtgttagctcaaaattttcgcgcaaaaatttactctagctattcaaaaatttcatggggcccacacttcggaacgcatctctgaaatcctaaaagctcttctcgaaagttggaatgtaaaagaatgccattgttttgtgacgatttcggcagcaaatntagttaaggttagtttattgaacattttatttcaaatacattttttggaggcattggatttaatgcacattgaaagaatcagctgtgccgctcatgacctcaatttatgtgtaaaggattgcttttcaaaagaaaaagacgaaatggctcaaattttcgaaaaatgtcgaaaaattgttggaactttaaaacattcggcaaaattgatggatgatttaaaagatgttcaaggcgaacttggtctaccgaaagctaaattgcttcaagttgctaattatcaaatactcatttaa

SEQ ID NO: 78093 - DNA, 463 bp, Heterodera glycines
atgaataaccgacggacaactctgtacaaaagttaaaagtttttttatgagaaatttaaaatagcaagttttgtcctgattttttacatttgtttggcaattttttaaatagggaatgtctgattgaattgaaatattctttacctgagaatttatgcttaaaactaaaatttgatttcgccacgtttcggagtttttcgcaaataatgcgagagggccgaaggagagaagccggaaatttcttccaaaattttctataatatttcaaaaatatcttcatttaaaaaattggaagattttgcactgtttttcactttttttctacaaaggctcagaatctttgtcattctttcttaatttttcagactttttcactgctttgtttttcgtcacttatattggtgcaagtgggtttcttaaaaactgccacccatacgcgattcttaaaactgccaaaatatga

SEQ ID NO: 78094 - DNA, 861 bp, Heterodera glycines
atgatttattcttctgctatttgttttggaatatttattttcaaccatttttcaattccgttttcaaatgcaattccatttgtgagtcaattaattagggaacttaatttgtttaatcatttttgataggaagacgacaacatgtttaatgcgtttgttcgaaatggtcataaaatgcaaatcaatgaatattcaaagcaaaaatatgagggacattttggcattgtttattttacgagaaagaattggcaatgtgacaaaattgtggatgcatttgaagaatatgaaagggcagaatgccaaaaatatcgaaaatatttggacattttgtacgaatatttatatagagagtacgtcggaattcaaacagtgaagcccaaatttgtgtttaaagaacgaattgaaattgaagggtcaataatttatgcggtgatttgcttggccagaatttcgctattttattttaaattatcttggagtaatgactttaaatataaattaagtgaatttttcatttataattctgaaccaaaattgttgaatgagaagagattaaattttgaagttaaattggttaatgaaaatgaaatgccaattaatgaaatgattttgcaattggcaattgacagagcatatgaatatcaaacaattgaaagtttagacgcaataatccgacaaaaattcaagaaaatgttggaggaaatgttcaaaaaagcggaagaaatggcaaaaaaacataaatggcaaacctttttcgcgattttttatccatattttttaatgccctaatgattagagctcgacaaaacgacttttggggggttttaaatgcatttctttgaaagatttgttcagctttta

SEQ ID NO: 78095 - DNA, 849 bp, Heterodera glycines
atggccttattgtctgtcgtaactcgttcctttggtatgtctagcatttgagggtaagcgtatggcttcagtctctctttgcgacagtttaaacacccatattgctttgactgtatcgtgttttgatgaatcttctgccttttggtatccaaaacttctctcttatttgtgccaacagtgtgttatgatttgggtgtctcattaacaaatgtgcctccatgacattgagttttgttgtccatgattccggtggcaaataaattggaaatttcgtttcctcatttattattgcttctccaattcgtcctctgcatctccagagctctttatcgttgaatagacgaaggtctctttgaagtttttccgatggaggaaattgcttttgtgcctcccaaattattaactgttcagatgcacgtaattctgacacagacagtatacagggacaaagaattgataggcttcctgtaccaataataccctcattgacaagatgcccatgagtataccatcaatacaattttcgaattttatgtttcctgtaccaaggttaccctcatgggtaagatgccaatgaggatatcatccatacaaattttttaattttatttttgttcgaattcgggaatgccggattcgtgatcagcgaccccaaaaaccccttaaaacctattttcattatcggttctggtcggttttatgcgcaatttcaaaccaggtacaagcagctgcatcaaaagcgatcagaatgttgcaggggccattcaatgagctaaattaatgatattttaatttttgatttcggcactttgtaaaataattgaaaaatattcggaaattccttaaaaa

SEQ ID NO: 78096 - DNA, 562 bp, Heterodera glycines
atgtgtccatgtcgagcagttttggtggacggcggttgcgattcgaccgtcggacttcgttctgattgtgctcgtccgggaccggctgctcttcaggttgttcgtctgggaagatgcacaaatgcgctgagtgtagcggtcgcaatgacttacactttcacaaatgtgtctttccttaaaattttagaatcttttacttacttactgcataaatatacaatttaaaatggaccaaaataaaacggtatttaaaaaattattatataaataataaattattggtttttagctttttgattaagttttagaatcatttattcattgcttattatatcaattaaaatgaatcaaaacgaaacggtatttaaaataaatatataatataaaaataataaaaattttgtggtttagctttttgagctttatgcggaagacggtttgccatgggcacttatcgctttaacagcggtacgaacatttatctccacaattgggataatatgtaacttagcactagtatacgtcaccatcaaaaccaagtaataaaaaatgataaaataaa

SEQ ID NO: 78097 - DNA, 1480 bp, Heterodera glycines
atgggacgaaagaacataagtgtcgcgaaaggacgagagaaaaaggatgggctttggatggccgggattgttcccggcggactgaaggaagcagggggcccgatgccaaacagtgattaatttatgatcacccccaccatttttgcttccttttcccttcctttcacttcaacaatttgcctcccccccccctctttttccgtcttatccaatttgtttaccatttcccttccttttgcttctcagcatttctcatttgcatttttgtccccccgctcactttcatttcgaaatgttttcctttgttgccccaccgcggggcatctgctctcaaatcgcttcttttgtcccaattttttgcccgtcttttctcaccattcaattcaattcattttgtaccttgggccccaatgtcatcgggcaaatgttcttcccaactttgtccccgtccgaaatgcccattcacgtgatttgcatttcttattgcccggcctatttaacccccgccggtaatctctccggcgttcactcttatttccttcggtcatctttcccttttctttcgtccttcccttcacttcgtctcccccttatcacattttcctccaaatatgtgcccttccctttggcaataaatatttgtgtgtttgtcctttcctttggacagaggaaaattgcccttccctttgggcaatcaccaaattcggtcattcggttggggcattcggcgcccctaatcgcattcggagcgatcagcaattgtcctgcgggattggatcactcctgatccttgcccactccctcccatcgcccttccctcctcagcgatcggagtcggggctcatcccggcaggcaattgggaggttcactcactccttaactgagtggtggtgccgttacatcatccccattttgtcggccctccccattctcctttctcggccccccttgggcattcaattcggaaaggggtcgacaaagccgagaaggagggcaaaggaaaccggcgataacccctccattgatcgccacctttttcgacaataagaaatgcatgcccaattgatcaaataattcatgcagaaatttttgatcagagtgaacaacttggacgaaataaccgacaattttatcaaattgttgttgaaattatggaagtgaaagaagaggagagtgaagaaaagtccagtaattgttatgaattggaacaattagatgaaaataatgaacaaaattatgatcattttccaaataaatttgataaaatgaaaagagaaattatggaaaaatttaataaaattaaagagataattaatcaaatgtcaaataagtattcagataaaagaaaaaggcaaaaaaaaaagttgtgtgcaaatcgactgaaaatttaccctaatggaaaagataatttggaatgaatataaattaatattcggatgaggaaaaacgtgaaatattaaaacaatttgattaaataaa

SEQ ID NO: 78098 - DNA, 742 bp, Heterodera glycines
atgaatcaaaacgaaacggtatttaaaataaatatataatataaaaataataaaaattttggtgtttagctttttgagctttatgcggaagacggtttgccatgggcacttatcgctttaacagcggtacgaacatttatctccacaattgggataatatgtaacttagcactagtatacgtcaccatcaaaaccaagtaataaaaaatgataaaataaattaaatcatttttatttgttagaattaattatttttcatttttcattttttagaattttttttaattcgaaattttttaaaaatccgctattttaattttaattttgtgaaaaaatagaaaaaatttattttttaaggaatttccgaatatttttcaattattttacaaagtgccgaaatcaaaaattaaaatatcattaatttagctcattgaatggcccctgcaacattctgatcgcttttgatgcagctgcttgtgcctggtttgaaattggctcatggattggcatgttccaaattttggtgggccaacaatttgtgccaatacgtctgtgctgtgtttacctgttgctaccattcattactggcatttatgcttcaatgtccgccactttgttgatcgcttttgatcggcttctcagcatttgcttcccaatttggtgtcttatttaatattttaaatgtctaacaaaattatttttttatatttccccaataatttttatattatctccaattaaa

SEQ ID NO: 78099 - DNA, 155 bp, Heterodera glycines
atgttggttattgcccacgttgaccatggcaaatcgacacttaccgactcacaggtgtccaaagttggcattatcgctggtgcaaagtctggtgagacgcgcttcactgacacacgcaaggacgagcaggaacgttgcatcgccatcaaatctac

SEQ ID NO: 78100 - DNA, 637 bp, Heterodera glycines
atgaagcgccttatggtgctggcggtagcggggaaggttgccgaggtgaaggcggtcgggcattcgtccggctgggaagaggacgagaaggattggtgccgcgtcgccagaaaggtaactgaaaaatgaattgaaaatgaccagttcaaattggcaaaaccatgcgtttcggtctaaaaaaaaattttttgttaaatcttctgactcaaaactttgtttaaaaatacatggaaacaaagcgaaagtcatcactgtttcaataaaatataatttcaactatttttggattaaaaatggaaatttgttagagcttttgttcgaattcggattagaattggtcgagagggatgccgaattctcgaaacgtgtttttagaaattacaaaaaaaaaaaaaaaatttctgggaccagtaaaacacattgttgccgtttaattgcagcctcaagacttaaaaaagtgaaacaaaaataaataaacttataatttaagcttgccatgacgtcgacaagatgggcagagattgaaggggaggaggagaagagggcgtttgtcaagcgggaggtccggcggttagagggatgggccatgagaacggcccggaaggagttggtcgccgaatggccggatgttttgcgg

SEQ ID NO: 78101 - DNA, 504 bp, Heterodera glycines
atggttagcaagcacagtttttaacttaagtgattaattttcaactgaaaaaaacaccccctaagaatcgacactaaaattaaaaagagttttttatttgaggtgtgccgggcaagtccctcctggcgccaccttgtaaaaaaaaaacaaaattaatgctttcttatctacatatctattttcggttaagtgctatttggtgatgacgacgcggcggggggcagtgcggaaggggaagcagaagcggcacacgaagaggaggaagaggaagaaaatggtcagcaaattgactttgttttcaaatttaaaacgcgttattttttttttttgcttgaataaattgtagtttttatcactagggttcgaagttgtatgcttttgcatattttttctgcgcatatgctatgaagaaagcggctcaaaaatagcatttctacgttaaaattttttgatttgatgaaggtttttagtgcatataaaagcatattttgggggttttcgaga

SEQ ID NO: 78102 - DNA, 649 bp, Heterodera glycines
atgcctcgaaagagaacgttaactggacgacgagagagaatgctccgacgtgaaacatcttcacgtctgggaaaagctgacagtgttgcgggtgcggcttcgattccttcacaggattcattggccagcacagcagccaccagtcctattcaggacctcggcaatggtctccattatttgtttttatttcatgagaatttaatacctatttgtagtgccatcaacctcaaccaatatccgagcacaatgcagtcagccacggggtgctgttgaacctgctgtgggtacgtccccaatggatctgggcacctgtgttgtttcgactccgaccaccactggattacaggccttaagcattattggaggtcttgatttaagcaaaattaaaactaaaacaatatatattaaacaattgccaggctcttcaaataaaagaacccgtcacagttcaaacgtgggtacgcaaaacaatgcaactcagcacacggtacagcaacgagaggatgcaagcgacgttgaaagcgttgcaggtattttgagtcaattttcccataatttttcaacaaaaagtcacagatactcggcgtcggaagtcagcgccgacgctttttgctgcgggtgcgaacactccacgttgtacaagcgttag

SEQ ID NO: 78103 - DNA, 386 bp, Heterodera glycines
atgctgggacctgtgtgcaggcacgcagggatattgttcatagtaatttttcaaattataattaggtatgcaattaatgcttaaatattttgtgtccaattcctttaaagaattttattttttcaatatttatcatttaaatgttaagttttttgaggttagaaaataaaataaattttcattgtactaaataaaaaatttgtttttcagaaatggggaattaagcattgagaactcaaaaatcttaaagtaattattttcagtgaaaatattaaagaaatacaaaaatagttaaattacttaaaaaaattaatgaattttacatatgaattttatatataattttcactgttgaatttttgtatatttatgcaaaataattatga

SEQ ID NO: 78104 - DNA, 1736 bp, Heterodera glycines
atgagcgacagccaaagcagtgatgatgaactgatgtattcggcggatgagaatttcgagatgaaagtctcggttcaaagcagcaaaaataatgacaaaatttcggaagccaaaaaacattcaaattgccaaaaagatccgttggaggatccaccaaatttcgaaaatttattagataacagtccaaattgccaaaaagatccgttggaggatcaacaaaattttggaaaagattcgttggaggatcagcaaaatttgctgaaaaatccgttggaggatgaacaacattttggaaaaaatccgttggaggaaaaaagtaaaaaattcaaaattcctgaggatttgttgggggattctcaaaaaccaaaaactcggaattatgtgccagaaaacattccaaaagtggtggcacggtcaattttggtttttattgtggataatcaagtggaaatcgaactgaggcaaataatgaggaagaaggaaatgaaggcgatggtttttcgaccgagaaagtgggacaaaaatacaattggcacagaaatcgaaattggcacgattacacaatgcatagtgatttggagagaaacgatggacgctgaactgttggcagttctaacaaaagttgaagaaatatgttatgaactgctttgtatttgggttgtccccaaaggagtgccaattcacgttatgaagaaaaggtttccggccattgttcgagtgccagaagaagaaaatattgacaatttattgacaaaattggaacaaattggaatgccaattgagaaaaggggcgaacaaagatggcacgagacagcttcaacaaacgcacctagagtgaattggaaccaattgggagacggtcacagagtgcaggccgcgggaagccattcatacaattcgtttgtggcgccacatttttcatcatatttgccaacaacaacaactaaaatgttcttcccaactccggaaatgccaaaaaaggtgaaaattttggaaaaatccaatcagaaaaatttgatccctttgtggtattgggagtaaaacgaaagtctcaatctccagaatcaaattatgaagaaggagacatttttgaaggccctttgtgcacaaaacgaaccaaattttgggtaaattcgaaatgtgaaactacaaacacggaaccgttgggggtcaaaacatttttcaaaaatgaaaataaggaaatttatcagccacattggaaaccaattgttttaagttcaccttcaggcaaaaaaggagctttctttttcgggaaaaattttgttttttcaaattttcatccgtcttcttttatgatggatggctttaaatgggacaatgtggaacaaaaatactgctttgagaaggcctcgttttttggctattttaatttggcaaaaaaaaattaaattcaaagatggaattactgaaccaagtgaatttaaaaagattactgacaaagagatggaccaatataagtcctttgaagaaaatcccaaaatttttgatcagtatgtatggaatagggttcgagaaaatgtcatacgcccaattttatgggcaaaattcacacaaaatgaaaaatttggtcaaatgttgttggaaactggaaaccttccactgtatgaggcctcagtcaatttttcgtattttttatttgatcatttttatttgtttgtttattttaggctccatataagatcgctaatgcacatgtggcttgctcgataaataaa

SEQ ID NO: 78105 - DNA, 68 bp, Heterodera glycines
aaaatctttttcaatggtttttgctgatgactctatatttactcctgtttttgtgtatgaatgttcgg

SEQ ID NO: 78106 - DNA, 1218 bp, Heterodera glycines
attttcattccaaataattcatatattgcgactttattcattagagatgcacatttgaagacaatgcatggcggtcgcgaattggtgaatagcaaattgagagaaaatttttggattcctaaaagcagaaggaaaatttatgaaatattaaaaagaaaaaacaaagaaaaatgcgggatttgtgcaaaatttacaaataataaatatacatatcctaaaaaccctcctctaccagtgtttagagtaaaagggaaaagtgcatttgaacatgttggaattgattattttggacccctctccgtaaaaactttggatggcaataaaaaatgttggggagcaatatttacatgtttaattgtaagagcaattcatttggagttagtttccgatgtaagtgccgaaaaatttcttttagcatttcggcgattcattaaaagaagaagagtgccaaaattaattatttccgataatggtacaaattttgtattagcaagtaaagcattaaaacaaatagcacttgaagaaaataaacaaaatagaatatggtcagaaatttatcgtgatcctacgatacaaaatttttcatcaaatttgggaattgattggcaatttaattcgccatatgcgagttggcgcgggggagcttacgagagaatgataggacttgttaagacacatttaattcggagtttaggaaaacggttattgagttttgaagaattaatgacatatttaatcgaagtcgagaggattgtaaacgaacgccctttaagctatataacccaagatgaagtgattgaaccattaaggccaatcgatatattaaatccgacggatggagaacctttctcattgaaattagatccgacatttgatcgggaagacataaatgaatattttgaaaagaaaactaaaagagaagaattatttgaaatttacaaaaaggcaatttttaaaagtgaaatattttggaaggaatggagtgaaaaatacttattatcgttaagagaaaagcacattaacaaaaataaagatggaaataaatacccaaaaatcggacaagtagtaatcgtgagagaccaggataattatccaagatcaatgtggaaattaggaaaaattttcgaaattctttctgatagaactgttaaattaaaaataggaaaccgaatggcggaaagacccacaaaattattatatcccttagaaatagaggat

SEQ ID NO: 78107 - DNA, 173 bp, Heterodera glycines
agattctccccgatgtgaagaagatgatcagttccgcctgaatgaagggcacacgacacaatgatctttgtttagatttttagacaaatttgcttgttttgaaatatatttttatcacatcttgctggcattttcatttttctgaaataaaaattggacactgaaactgaaaa

SEQ ID NO: 78108 - DNA, 876 bp, Heterodera glycines
atgcgtgaaatggaagatgtcctcattttgtcttttaaacagcttccgatttggtttctctgggccagcagcagcagtcgtccactgggccttttctgcatccgtgtttccctccagcagctgtgtccgctttacatcagtcaaatccacaacccttcaaagtccaacagtcgccatcgattggccaacagcagcagcaacaactgtactttgttcagcaaagtatcatcaaaaacatgttgtgtgagactaactgactctatgcctttgtttcgcagatgcccaaggcaacttcggtccaatgcattcgtcttcatccacctccccgctgtttggtgtgagacagatgagttactttggccccggtggtgcttccgttcaaccaaactggaaccagcagcgtcaagtgatcataaaaatggctcctaatatgactctggcaaacaaaaaatctttaaggcccaatatattaataaccctcaacttggtcagcaaaacaacataatgtcacctcctaagcaacaacaacaatttgtcgttgcaaattgtaagccttcgcagccgtgccaaatcagctcttttcccgctgacgttgtccaacaacaacaacaaacgatcggttttcctccgccaccttctcaatcgcttcagaactctccccctgttgccactaaacaagaactaaaccaacaccaataccaccagcaaatgcttgttcagcaacaacaacaacaaaggtacgctacttcatatacccaacaacagtttctgtcacaaccgaaccctactgcatttccgatggggtcaaattacggcgttgtggaccatcgacaatttatgagccagccatgttcaattccttcaggtaccagctga

SEQ ID NO: 78109 - DNA, 742 bp, Heterodera glycines
atgtgttcgattatactttttaccttctgctgctgttcagctgagtatctgcacaaatgttgtgtggatcctgagaaacagtacaaaatggtgaagcggaatacggtaattgtaaaggggcggagtcgttatttaaaaaaccatgattatgaaattcttgtcgaaaaattatttataattttgctccaaagcaatcaaatttttaattcttgatatgattgatagctctaagtgtttctcatgaatgataacaatgattaaaaatttagtgcttttgagcaaattaataagcaaaaaaattcattttgatggtttttaaaataacgcacataatgatggtttttaaatatgacataacaccattgtaaagattcaatctaaatttatttaaatcataatttctaggaagatttggtaaatgaactcaggaagaaggatgagtgtgccggcaaaaacagaaaatgtttttgctgggcacatacgaagatttactcggaatctgctggcggctggtgttaaatttttgtgctgtgacaagtcattatgttcttgttgtgaaacggttggcatggataatggctttaatttgattaattaatgagaatttatttttcatttacttaaattggtcataaatttttctttaaactggaatgaaaaaaatttaaccgaagatttgggacaacattttttaagtaaatgtttagtgtccaccaatgcagaacaacactgataggaaaaa

SEQ ID NO: 78110 - DNA, 615 bp, Heterodera glycines
atgcccacgacattttctatttgtatggatgccgaatcggcggctgttcttcggcccttcctgaacttgaattcgttggccaattgtcaatgcggatgggccaaatgcgtgaatgggtggcgagtggctgctgtccggtcggtacagcttcaacaatgttgtgtcacgggtaaataaaattctattgaataaaagaaatatttaatttttaaaaatttttaaatgcaaaaaattatttaatgtttctttttttgaaaaggctattccaaattcatttatcgttttaatgaaaaaatatataaaaataatttgacgggcaaactgctatagagtgattgattaatttattcagcgaaagccgatttctgttttcaattgaatgccgtcgagccctttaacaaatcggaagtgccaaataaaatatattgattttaattattatttttttaatatccatattgattttaatttctttatcaacattctcacatacaaatgccaaattttcttatttttggatttgctaattaggagtatttaattattgttattcatttatttctcttcatctctacttcatttttatttttattttattgaattaattttagaaga

SEQ ID NO: 78111 - DNA, 992 bp, Heterodera glycines
atggacaaaacgctcgcggaaattttggaaaaattaacgcaagcgatcaaacagcagagcgcgccgacatccaccacaactccaccggcacaaaacatcacattgccggatattcatccgttttcaacagaaaatgtggaggaattcgaggagtggttggagcgattccaattcgcattggattgcgcagcggccaatatggcggatgaagcgaaagtcaaattgttgatgacaaagctcaatccggccgccttcggcgaatacaagcgctactgtctgccggaggaaatcaccaaattcaacttcacggacaccaaatctcgtcttattaaattgttctcacatccgccatctttagcgattaatcgctatgaatgcctgcgagtgtgccgcgagaacggcgaaaaattcgaaatttttgtgaaccgacttaaggcagccctccgcaaattccgtttttcggaattaaacgaagaggaattcaaatgcctggttcttcttacgtcgcttaagtcaccaagcgacgcaaaattacgccaacatatcctcgcgcgtctcacagcagagggcacaaagacgacaaaaacgtccaaattattcgacaaagtcgtcgaggacttaaatacacagctaaaaacggaggcggaagcaaaaattttggagcagccaaagcccaaaataaacgcaattcagcatggcaaatcatcgccaaataagcaccaaaatcgcggaaacggtcgcccaaatcaaaaattcacgggcaaatcaaaggccaaaataccgccgagcaactgctatcgttgcggagaattgcattgggcacaggattgcccaaagaaggaaaatatatgcagcaaatgcaatcgcagaggccacatcgatcggcaatgcgacaaaattcgagcatttcaccaaaataagggcagaaatttcaacacaaatacggtgatgctaagcgcggcttacatcaattccgtccattcatcaaatcg

SEQ ID NO: 78112 - DNA, 1594 bp, Heterodera glycines
tcatcgtcgcagccgacgcttcacaacatggcatcggcggcgtcatatcacacaaatttgccaatggctcaataaaagccatgtcgcacttttcgcgttcacttacaccggctgagcaaaattacgggcaaatcgaaaaagaagccctagcactcgtggaagcagtcaaacgcttccataagatgattttcggcagaaaattcacattgctgacggatcaccagccgctgaagaaaattttcggcaataaagacggtgtcccgaagcattcgcacaatcgtctcgtccgctggtcacttattttgacggcctacgatttcgaaattcaatacgtcaaaacggacaagtttggacaggcagatgcattatctcgcctaatttccgtccaaaagtcaaaatccgacgacgacgaagtcattattgcctcattcgaagtggaatcggcattggacagaaatttgatcaacaatgtcaaccaattgccgatcaccttcaaaaatttggcccaagaaacggcaaatgatcaggcacttcaacaaattcgtcaatttgtcaaaaatatttggccagcacctaaaaattttcagccaattgaagggctggacgaagccaaattcattcaattttttcggcgccgcgacgaaatttcaatcgtcaaggactgcctgatgttcggcgaccggacagtcatccccaaatcactgcagaagcaaattctcaagctgctcatcaaggacatccgggagtcaagcgaatgaaatctttggcccgaatgcatgtctactggccaatgatggacgcagaaatcgaaacgttcgtccaaaaatgcacttcatgcgcagcagtcgccaaaaatccaatcaagacgacactgcagtcatggccaaaatctgatggcccatggaaacgcattcacatcgattacgccggaccatttcatggaaaaatgtatttgattgtcgtcgactcattttcaaaatatccggagatatttgaaatgaattctacaaatgcatccaaaatgcgctcattgatcgcgcactacggcatcccggaaacaattgtttccgacaacggcactcaattccaaagtcaccaattcgaaggtttcgtcaaatcgaatggaattgatcacatttttacggtgccgtacatgccacaatcaaacggacaagccgagcggatggtcgacacatttaagagggcatttgcgaaaataaaaggggagggagtcgacggcaatgtgctcgacacttttcttctcacatatcgcacaacgccatcagacacactggatggaaaatgcccggccgaattatttcttggccgaaagcctcgaataggcctcgacctcctccggcctccgctgtcaattccaattgtcaaggacgataaaatggaggaccaattcaatcgcaaacacggcgcaaaattccgatcattttaaatcggacaattggttttcacacgtcggcacaattcagcggaatggcgacacggcaaaatcatcgacaaaaagggtgtaatttacaccgtcgaattgccaaacaattctcgcggccgatttcatgccaaccaaatccgcgcacgtcaa

SEQ ID NO: 78113 - DNA, 3228 bp, Heterodera glycines
aatggggcgaaccgaatagcgctaacgccttatttatgcgacatttttgaataaaattggaattgcacatccacaacaccggagcagaagtttatagcttatcctcttttacctttaaaaaattattgcaaaaaatactttatttttaattaatttattatttaaaaatattaatgatgtcttcccaaattggcgtggtctgggaaaatatgggcccacatttactctcgtttggttgacatgcgggtttttttttgccactatttttttgaaatgccaaccttttgtgctattttttattttggctctaccatttttccacggacgtcagtcagctgctgatgcaacccccgccaatgaatcaaaaatgcaccattttttccaaactatgaattaaatgaatttcaaatttactgcctattcaatgcgcaattcgcaaatgtgccttttcgcgcgcgcgcgtgccacgcctaatcgaatcgctttatttaatttatttttttttgtaccgcaaatttgtatcattttacaattccattttatttgtatacaaattatgtcgatgaatttaatgagcagcaaaaatggacatttttgagcattaaataatttatacattttttatttaaatgaaatatatataaatttttttatttcccttttccaatctttggaacaattttcctattgttgtttgtcccgacactctcgagcaaccaattacttattgaataatttttcatgggaccaatgtctgtttgttttattaccacctgtaatcatattttgtttttaattttttgctgctctctttttaatttttaatttattattattattattattatattgccaatatcattaattaatttacaccttttggggaaatttcttcctcgtttcaatttgggttaaatgggcatttaaaatgtgcccttttctgcgcaggacacgcgtgcgcatgcggagagtgccaaggaggcgctggacgggaagacaatccatgggcgtcagctgcgtgtccgttactcggtccatggcgcgacaattaaggtgtggaaagggggaatagttttattaaacgtaattttttttaattatttttcaacaaattataacggatggggaaggggaatgagtatacggacatctcaatctgtatcattacgtcctcagaaaatttttttttataagagagtcccaggaatttctttttaatttagagatttttataaaattattggtgaaacagtaattcaaattttaaaaatcctcataaaattttcaaccctttgtttgtttttgtatagaaaagatgcataccatctcgtaaattgcgatttagaattgctttcaaaatcaaaatttttcaaaattcgttgtttttttttgggttgagttcggctgcgtttgggttactcccgatgtacaccttgagaaacgggtcgggccggggtttgttaaaatttaccccccccccccctctctcaaaaaacgcaaaaaaaaatttcttttttttttgcagctcaaggaactgtccccggcagtgtccaacgaaatgcttatgctctccttctccgccttcggcgatgtcgagcgtgccattcacattgtggacgagaaggggcggtccaccggcgaaggcattgtcgagtttgagcgcaaagtgtccgcccaggaggccatcgcgcagatccgcgagcgcgtcttcctcatgacgacgttcgtttttatttacggggggaaaattgtgcattttggatgcattatattcttgtctcctccgaatcttgagtaaaaatatcaacaaaaaaaaatttttcgaaaacgctaaaatttttcattgaaaattatataaaatgatgaaaaacttgaagaacctttacaattcacatattttttttactagaaaaaaactcagaaatttaaatagaaattaaaatattacaacttaaaaaaaaattttggcgggtaaacgggggctgtgttggcgctgtccatgcaattctaccatttatgtaattggaaattatattgacaaagatgaattaaaattttaaaaaaaaaacttttttttttttgcaacaccgtaaatattcttcattaggaaattctctgctttcgcccgatcgacccccccccccccccctccaaaaaaattaatatttttgagaccttaattagaattacatattttgatgtctctgctttgttttgcagtaattcgcgtccattgcaagccgattttttggaccaaaaggacgacgaagatggattatgtgagaagacaattcagcgaacgccatacctgtacaagtgagcaaatttgtggggataaattcgaaaaaaactaaaaaaaaaaaaactaaattttataccaaattctattattttgccccatttaaaatgcccaatttttatatttaaattaaattaagtttttgtcctatcccaatataatttattaattatgtttcacatttgtgtgattaagggaacgtgagttgggcccccgttttgcgcaaatgaacagcttcgagtacatctacgggcgccgatggaaggacttgtacgagtttgagcgcaagcggcgcgcggaagtggaggcggaactgcgcgagcaacgccgccgcttggacgcggacatggaggcggaatacgaggattacaaggcgcaaatgttgcgcgaaggtgaagggggcgggtgggataaaataattcgtgaaaaaactaggggctaatgtgagtttatagggtgggtgggaccaggataaatgtgttatcaatcgaaagctcttgatgagccaaatccacataggggcgaaagaagttggttgatccgaagcgattaaacctgctttaaactcgaaaataaagaaaattggccataaaacggtcaaatctggacaaatttgaatcactcgaatgcacttaatgagttaggttgccgcatgtgtactcactcactcacccatctgacaatgagtaccaaaatgaacaattcataccaaaaaatgatggaggaaaataatgaaaagttttttaaattatttttccatgctcaaaagatttaatttgcccctaaaatttggaaaattgcgagaaaattggaatttaatgcctgctgcaattatttaatggtagtgtcccgtccgatcaatttgtttattgtttttttccagaattgctgcatcgccaggaggagttggaccgtctggaggcccagcg

SEQ ID NO: 78114 - DNA, 2803 bp, Heterodera glycines
atgtgttcgtacgaaaacggcctggccccagacaaacgtatggacattttccaatttgtagcctcacccaatgccaacccggacaacaacaccagcatcaactccgaagcagcttcagttgaccagaatttgccgcatttgatgcatcgtatggaagaattgcagccgaaattgatgtcattgaacatgaacttggccaatcgcaatcgcgacgaaattgtaaatgatggcaaggaaaaggaggaaccgaagaaaggggacaaggcggaggacgaggccaacaaggaggaggaaattgttgtccttaacccatacctttatctgaccaacgaagcaatggaaaagatggagaaggagcacaaagaaaaggattccgctgaagccaattcggatacggtgaaccatttttgtgattaaattcacggtgttaccatgtctagtaccactaatttgcacttttttaatttaactcatctttatccatataaatgaaaacattttttatgaatttaaatatttttcgattcactttcagaccaatgccaattcgttggacaaagaaaagcagccaacggcacccatccaattgggcaacaagcgcaaattgggagacggagtgaacaaagacaacggcgaagaagaccttatgaagttgagcacgcacaactcggaggaaccagttgacaatggaaatggtataattcacttataaaatcaaaattaaatatatagtaatatcttttgatttttcatgattttggtcgggatacgacggaaaattgtccgctttgccatccatccactcataactcaaaaatctatttatttttagtagcatacgtctcttcgttctcgtcccgctcctccacgactactatgtcttccgttgaggacgaggaggacagtggcaccaacgcgggtgacgacggttggatggtggtgaagaaggagtcgttcaagaagttgtgcgacttctacgagaagcgtcgtcgcgtggagtgcggcggtggcaccgtcgccgctgacccattcgcggaacaattggagcgcgaatttcgcgaggcaacgatggctgacaacaaccgcaccgatgaacgcgtggatgagaaattgacggcggagagtggtgagttgggggagggggataattttcgaagattttttaacttctaagttaggaaattttaaaaaattgcgggattgtgaaaagttcaatttggtctactaaaataactgaatttacggtttataataaatttattagtccaataattgagtctcttgtttaaaatttaaaagatattcacaattttagccgaatatgctcgaactttctacatgacaaagccatttagtgttttatttccctcaaatgcttcattttgattgctgtatttatttgtagaaccgaaaaaggcaggcgaattcgtgaaggaagttggacaagaaccggctgctgcggtttatgtggcacaaattgtggatttgaccaccgaaaaagatggaaagtcagaaaattcggagaaggtggtacataattcttcagtaaaagagggaaaaggaacattttttttagaccattccctgtgtccattcggttgtgatgcgcggcgtatgtgccggatgtggacaggattttcgtcaggtaaatgcaaatacggcaaaccatttattaaaacaattatttgtttttattgttagccaaatgaatttgtcgggaactcggctgccattttcaactttgaacagcaacagcaaaagatgaaccagaccgtgcccatttctggttcctttggtttgccacgatgttttcgcacatttctttttaatcattcatgtaacaggtgttgatgcccaccagaaaactgcaaaaaacatctatccgtctttggaactattggttagtacgatggatttaagggggggggggggtcaaaaagttaaaatcagacacacattttaaaccattctgtgtaaaatacaatcagattttggacgagaaagttttataggttcaaataatggattttttaggaaaaagaaccacgcggagggacactgatgggctgcgtggatggagaggaggtgtgcaccgccggactgccctacccgggctatcagaagccaaagggtcagaagcacagtcgtcactgcgagtggaagcacaaaagtgagcaaacgcaaataataatttttgatataatttttcatattccaattcgtactttgttcattttgccttccgctattccctgataattgccaatataaacagaaaaaaagccctcacgacaatgggttttttctagtaaaaagcgcattttagacttggtcatccagagtttggttgaacagttggtcgggatgggcttcgacaactgcaacggttggctgttccgtgtggcggagaaggaaggcgccgagttggaccgcatttttgtcgcgattgacgaggacaagatgtaccgtgcgcggatcagccttcagtgaagaaagaggcaatggaaaacgaaatgaggaaatttatgatgaggtggataaaagaaaacgatgctttttcggctttggtctttaattttaatgagctaattaattaagcaatgctttggaattaaactataaaatcatctaaatatttgtcccttattccttcgctcctcatttactcattcattttaattagtccatttgtaattgcatacattctgtatgatgggctttttcggcgtctgtatgtgtataatcatttcctttccagctctttgtcgttatttactcttgtcacaatcacatttattatcca

SEQ ID NO: 78115 - DNA, 743 bp, Heterodera glycines
atgtccaaaatgttggtttcgtcgtttttgttgctgccgctactgttggtgttgttgccaaccatggacaatggtgttgatgatgatgatggcatcatggtcttctgttgccaagtctgaacaccaccagcagtgccattgttgttgccgttttgttgcggcggtgatggcactgccgccgattggcgccgtcgaattttgagcaaatggacaagctgttcacgacgccggtcagaaatggcatcaccgagcacgcccaaaagcctaacaaattccaattattactattgtgttcactgtttgctaaacatttatagtgagtaaaaacgaggaaaaagagaaaattccataaaatctttaaaagtacattcaatctggtaagaacaattttttaaaagacctcaaaaaatggcaaattgccagcaaaaaaatgtgacaaattcgggacgtaccaggccgttttcacgtggcccaagttcgggatgctaaaatttcggacattggatcgatttaattgttttttttatattcctttggcatcatttattttagcggtgttacagttacagtgagtgtacagacagagtgaacccgaagtgtagaaaatgataattttttgtttttgatttgctgttgctgacttgtcaatgagatcatccttgaagaattgaggtgatagaaccgtgtgtttgagaatgagacgccaattctgcgtggacaccgaatcgggggtctgttagtga

SEQ ID NO: 78116 - DNA, 958 bp, Heterodera glycines
agaattcctcctgtttttggccaaatcctgtctggccccgtcatctgtcgcctcctcctccaccagcaccggtggttcgtcgtcctcctctcccaaaaagtcaaatgtccaacaacagcaccaaatcccagaggaggaagaagccgatgtggaaaatggttgtggtgataatgccaatgccgttgttgccaatgacttcaacgatgaaatgccgagttcactgttctgcattgacgaggaggacgagacgttggtggcaacaacaacgacagcaacaaccagcggcatcaacaacaatctctcgtcgatgatgagtgatggtgaaattgctgatgatggggatggtgacgataatgatgatgatgataatgaagtggttgttgttgttgttgatgatggaggaggaggagggcttccgttgttcaaatgtgacggtagtacacatttgaaatgtttgtttttgctcattttcttgggtgaagggggtgaggggcggggcgtagtaatttaaaaattactagaaaattttttcataaaagattcgatcgctttttttttagtatttccgcaaggacgagcccaatttttggacaagtgggggcaagaaatagcccgacgattttttcaaaaaaacaattttttttcctgaatttttgagaagtttagcccctcggggcttgacgattcggccaaccaccaatggtacaaacagacgctgttttatccctctccaatagagtaatttaagaaaaaatgcaaatcattttcaaaacaaaaatcaagggacatgacgaatgaaggaaaaataaatactactctacatataaaaaattttcaatacaattttttttttatagttttctcgcgtgaaaagtttattgacgaaatcactgtcatggagcagaattattaccggcccattctcatactgatcaacaacaaaggtgggcatacttaa

SEQ ID NO: 78117 - DNA, 2090 bp, Heterodera glycines; identical to SEQ ID NO: 14124

SEQ ID NO: 78118 - DNA, 255 bp, Heterodera glycines
atgcgatctccgttttgctatggcacttctcaaccgtttggcttatatcgttatcctcgtaacattccagctaattccgcatcaaatttccaaccggaagcactcaagtacaaagctactttgaaaccaaaatcatacaatcataaatcaaggaacagtgctttaaagaaatcacaatctgcaatggagtggacgaccaatcgtccggctccctattttccccggaacgattacgcagctttcagtacttcacaa

SEQ ID NO: 78119 - DNA, 1147 bp, Heterodera glycines
atgcttcgttcacaaagtgcggcgagtgtttctgaaattgatttaacatccaacagtgtctttaatgcttcctctctgggtttaagtttagtgaaaaaggaggattcttccgctcacgatcagtcaaattctttttctgcaccgaaaaatgccgaacagctctctaagtgcttgttggatgttgaaactgcaaaaaggttgctcgcttcaaaattgccattgccggaactaaggccattgatggttggttgctacatgcgttaccatgcaatccgagaaattctgaaggttatccattttttagtaaagaaatttgttggcgttgacttattctgcataatgtagaattagctttgagcttttattaataaatatatggtaaaattcaaaaaacgtttcccttcagaataggtatatgggttttactgctctataatttaaatattaaagctctaaaaaatagtcaaagaaaaatttatttattttccttcgggacacaaatttcaaaggtaactaaagtggtctaataatttgtgttccaggactctgaatgcaatttctttattgacaaaattatccacgtcaatagagatggtattcgcttcaagcattgtcgtgacaacagctacagaagcattcacaaaataaaggaaccagaaaatgcaattgatcagcgtggattcaatctgtggataaatgacatgaaaaaatgggtaaatttttagttatagtgcattttatatgagtccaattaaccttgaatttcttttggctgcaattgcctaaaaatagctctgaaactcagcaataagcacgaaaatactaatctaaacaaaaaatcagcatgaaaaactcgaaaatataagtctcaaacaagttagaattcgtttttcatgtttattaacaaatgctgcaaaatccggtctctgctctaaatgcgctagaaccgaataattaaattttctttgatatcgcattttaagaacgaaccattgccctatatggacctccaattactaatcttgaagtcgatcagaaaagcagtttcttcacttgaggagggggagagtcagtcactcatggactcaacagataaaacgactgtcccggagaagccatgtaatatatcaagagcgagtttgacaaa

SEQ ID NO: 78120 - DNA, 319 bp, Heterodera glycines
  unsure (1)..(319): unsure at all n locations
ctgtgactggattttacacacagatacgtgctcctccaaatcccaatgttcagaaggtttaataatcgtattggaatataaatgttaatgatgcttttttttgtctttgggataaaaagggaggtgagtcgttcatcttcatggaccaaataatcggtgtttcttgggcaaccaaaccttacatgttgctccaaaggccgttgacaatcgtcctgaaatttcgtcattttcgtgatgatagaatatgtcaattgccttattgnaagatatccgatggaatttcccaggaaattacaaccattgngtgaatgatatgcga

SEQ ID NO: 78121 - DNA, 1118 bp, Heterodera glycines
atgcaaatatgtgtattattaattttatttttaatcaatttaattgaccaaaccgaaacagaaaagaaaaagttggaacaaaagtcatgtgatggaatatttggagaaaaatgggaagaaaaagaagaagaaaaacgaaatgaactcaaaaaacgagaaataattgcaaaattttataaaataaaagagaaaatcaagcaaaaaggacgaaaatactcaacaaaagaatggaataaaattaatttgaaaattgcaaaaaaattggggacaaatcgtttatatatttataaatggattaaagaatttggtcttcaaaaacaaatacaaaaaagctataaatcaaaaactgatgaagaaaaattagaatttgtacaaaaattcattgaaatgaaaaaggaatataagcaaaaaagaaaatattcgccaaaagaatggaagaaaaattatgtcgaaatttgtaagaaaattagagttaattatggaatgattaagaaatggaagaaacaatttggcattcgcagtaaaataacggaggaacaaaaaatagaaaaaatgaaaaatttataatattagaagagtaagagttcgaagaaacgcagaagaatagtgatttgtttcatttttaatttttttttattcaaattttaattttttttttataaatgttttattcaattttgcattaatatggacatttgaggctttttaagatttaatgcatattttttattctttcataaaaaaattttaaaaatttaattaaggtttgttgaattaatattctggtggcgagagaatacttatgctattgaataggctatgcaacatttagaacttttctcaatcttgcggaattttaagaaacatcttaactcaagagattatcacaaattttaattttaattctttgattttgtgtcttttttatttcatttttaatgacgattaaattgatcatttaccctgcccctcgggggtcgtcgctgttcgtggcgatgactaatggcgctttgtgcaagaattgattggcacctttgggctgatgggatgccttttgccttattcataacaaaaaataacaaaaaaattccttttttttgccatttagaaaaaataaa

SEQ ID NO: 78122 - DNA, 1095 bp, Heterodera glycines
atgttgtgcggcgagttgggcccagtgctggacgcgaaaactgagacgggcaatgtggaaattagcactcctctccaagcccttttgagtctattcatcctttgttcgggtgcaacagtttcatcttcggcggctaaaaatttggtgcaactgattctcggcaccgaacccggaatggaattggtcgtctacgaaggagtccgtaaagacaatgtccgtgccggcatctttccaaaccatgaagacgtggaaagagtctggattttgtggtgcgagaaatgtgccgtggcaaagaaactcctccaatcgtctggattcgaccaatccgagtggaaaaactcgggtcaccacctaacggatgccgaattaacggcagggacgcctttttttaggggttgtgatgtgttaaattgaatattttgacctctctctgcttaatttatttctataaattgtgttatttttctctccgacctctgacctacctataattatgttttcctttctttttgttgttttcgctaattatgttgttattttcaatagatatttcctttgctagatttccccgcatgtctccaggaggatttcttttttcatggtacattttactaaggacactgttctctctaaatattttgtgtgcatttatttattcgtcaattttaattaattggtctacagtccgttcgcttgtcatcttgtcggctttctcaatcgtcgactattccgccccgagtggcaaagcaaaagggagaagaattgaattaaaattggacgatatgatttgaatggataaaaaagcatagtattggacaaaaacccgcgcattttttgtttttacaaaatttatggagtgggaaaaacgtgcaaacctattttggtgtaatgtgcaaacagcaacgatttgaattttttaaatatgtatgtccttatttttccgcttgccctagggatatgaatttaatattattattttttgttattgtaaattatgtaaaatatttctaatttttgatgaaacattcattggataattgtcctgatttttttgtgtttgtactgtttttttataatcgatttaaaagcaataaa

SEQ ID NO: 78123 - DNA, 444 bp, Heterodera glycines
atggtcatttaccctggctctaaatcaaaaacacagcacaaaaaattacattggaatcacttcggaccatacgaaattgtcaaaacactcgattcgtctgctagtgttgtcccggttgataaaaaatcggcagaaccaattactgttccaatagaacgccttgtgcgcgttccaatcggtgtacccgacatttctacccttcctcatggaaaaaacccctaccggaatattttggctacaattctattggccagcttaaaactttcaaaattagacacaaaaggaatttttggacagttcgaaccgctcttacagacgcaatttggggaaaattctttaaagtcatcgaaaaaaatcgtcgttaatcagttagggacaactgacaatttaggagaacggaagatgaagcagcgacagcagaaagaaaacgacggactttcgtag

SEQ ID NO: 78124 - DNA, 559 bp, Heterodera glycines
atgtcggacgaaccaaaagaagcggaaaagaaaatggaaaagcaaatgtaattgaaaaaagtcactcaaaatatttgtgccaatctcagttggatgtgcggtgacaattggctcaaagtgttcgaattggtcccaattggccaacttggccttggaattgcattggtcagccgcgcatttgacttttttgtggacgagcacttcaaaacgcgcaaatggacgttggactcaattttgatcagatgcaaatttgcagaagatggccaaaaagaaatgcaaactttcaattcgcgcgatgaattagtgccaattcagaaagtgccgttgccaaacaaagtcgtcggcttcaaatgcattcgttgcaggcaattgaacatggcgcatcatctttcggatgttgatgctactaattactacattcagatacatcgaccaaaatgtcgtggattttctcagccaatttcgccatcttttcgccgcttttggggcaaatttgttaattataaacaccgacgaaccaattttggaatgggttatgcgcatttggcctatgctcagg

SEQ ID NO: 78125 - DNA, 588 bp, Heterodera glycines
atggcttttttcaccgcgttcggacggtgtgccgaaggagctttggtgttccttaaagcagtttgagagattatcggcgattaatgacttgaaaacggtgattcatattcataattgttcaatttctttgctgattcacccctttcaggcttttctcaatgcttcttcccgtgcctatttcatcattttcattagaaattgtggttattacagtggtggtggtgcccccgttgtgtcgccatttgaattgatcaacaatttgacaggggaacgactgacctttaaaatgttaaacaggaaacatgctatgctgaaacgttatcccattgcgcaagatgagcaaaaatgggcgaattgggaaaatgatatgatggtaatgggagcgaaaaatgtcatttggattgaagacgaattcgacaaaagtcgaaagaaagcgaattgaaaagagataattggatgactaaatcgcattgcttttcgagcttttttatttgttatttgcaatattttgactaaatgttgataattaattttggaaaatgcgccccctttcaaagccctaagggtacattcatataacgactttaa

SEQ ID NO: 78126 - DNA, 1284 bp, Heterodera glycines
  unsure (1)..(1284): unsure at all n locations
atggcggtgaaaagtttgccgatggtgacacggtcggatcgtggtgttaatctggccaatcagaagctgattttcacaaagaatggacatcaattgggttggtaaaacaaaaaattttgttttttttttctccattagtaaaagcattttatgtttttttgcgcattggcatcggcatcacttaaatccttttcagatggcaccaattcactcgctcctttcctcttctgtgcccgccgattctctgtttccattcgtttcgttggcagattatggggacaaaatcagcaccaatttcgggccaaatttcatgttcgatttggccaatctctgaaacaattaattgacattgtctttttttaaattttttgttgaggattttcagtggcaaaaaatgccaaaataattaactaaataatgataaaaaatgccaaaaaagtggcaaaataattacaaaaagtcacatttataaatttaaacaaaatattttttcgtttattttcattcaattttgagtttaaaacgcagtgggacatttgcggacagaatgaaatgttggtctcttatgtgattaaaatggggtacggacaatccgtcagtgtatatccgtcagtggacattcgtcagcaaattttttgagctatatcaaaaatctgcgaaaagattgtaaattagaaatatttttcatagatcttcatatttgtataacatacacaattgataatcagtttttagcgaataaataattttcacatgatttaaataaattatgattaaaggtacgggaaatctgatgcncaaaatatcggaaatcggaatttagtgcagctagtgtccagcatttatataatatccttttaattttgaaattgtaaataaattttgttagcaactaagtatatctcaaaaaatttaaaattgtttcttttaatagaagaaacggactaacggggccaagtctttcattccatgttttcagaaatttttaaagattttttaaatttttttccctaaaattgtccgcaaattccggaaggcgttcaaaaagaaagtaattttgtaattaaacaaattaatatccaaaaatgcattaaaaattctaacaaaagaattcaattattccagaatattattttttatggaatatttttaattaattttgttttacggctgttattttttcttttttcagtcaaaaggtactcagttgtcccattctttcagtaccaggtcacggtcccgctatattctagtaaaaaatcattccctttttttacaaataaa

SEQ ID NO: 78127 - DNA, 307 bp, Heterodera glycines
atggcgtactctttgacacttctttggacggaggcaaggccattcctgggtcgattgaagcagttaaaaggcatcatacctatacattttgttccaaatgcttcatattttgctcttagactttacgagctaagttgtgttcgttttgtaagcaatgaaagtagtgggacacgaggagcaatttgtcaaaaattacaccgtctcggattcgttgggcctcagcctgagcacattttcacaccggcaccggttgctgtcaaataccttcgacagcatggactacgaccaaaattgatagtgcacaaag

SEQ ID NO: 78128 - DNA, 937 bp, Heterodera glycines
atgagtcggacaaaccgaagagatttctcacacaaaggaaatccgtcccatttgaagacgcaaaatgtaactccaacaaaattggcaaatttaaaataaaggaagaaaggacggaggaggaaaatttggaaaatttatttgagagttaaacacggaatttttttactgtggaaattttaaaaaattaaaaattgttacagctcgacattttgaaaaaagccagggaaccaaggctggaacaggattttttagaaatttgggttgttgaaaatcctgaatcttggatggtttcaatgttggacctggacctgaatttcctggctaaaaatcctggaaaattataggtccaggaaaaatcaaggcttgccatggcctggacccaggcaatgggccaagattttataaaatagagtttctgaaaaaagcgtgggccttgacttgcattccatattggacatgacctgaatttcctggacataaatcaaggtccacagattttttttggaatttaggcctagattcgatgtccaagtcgagctctaaaaattttccattttttaattattaagaaaatttcatgtaaagcaacactaattaaattagtgcacaaatgcatttccgaaatttgctaatcgaattaggcgccgcgaatttttggcgatttaatgggaaagtaaatttttttatgacagaaaaaaatattagagaaaattttcttattttcaaaactaaaataattttagaattaaaaagcctttttaagaaagcctctgatattattaaaatttacacgaaaagcgaaaagttaggtaatactttttaaagaaattatgacaattgcgggccggcaaattagtcatcaattattttaaacttttcgaaatttccaattgagttattaattttcggtaattaaaaatttaatttgttttctcta

SEQ ID NO: 78129 - DNA, 416 bp, Heterodera glycines
atggatcactctcttcgttccccacaaagtcatcgtacggctttcgtcttctcttcttctttgtcttcgtcggatgcctccgttcatttccaaaacatcaataacactgtggccaatgcaatgtctccaattttggcagggcatccaaattgtgtcgtcatcgctaaaatcgacctgacaatgaacaattcaccggcggtgtgtcgcatttgctacagtggcgaggaatcgggtcccaacgatggcgagccgctgatttcgccatgccattgcaagtgagaaaaagaaagggtggaaaagggacaaaaaaggagttgtattttgcaatttcttatactctatctttgcattttcagggggactatggggctttaccatcggacttgtctgaacaaatggctggttgtctctcagag

SEQ ID NO: 78130 - DNA, 621 bp, Heterodera glycines
atggactttatcaatgaccgtgttacgaacttgcacaactgtacttatcttgttcttgacgaggccgaccgaatgctggacatgggattcgaaccgcagattcgatcaatcgttggacaaatccgggtcattcatttcttttgtcgtctttattatttaccttttttatagccggatcgccagactttgatgttctctgccacttggccagttgaagtgcgttctcttgcagccgatttcctttcttcaccagtcggactgaatgtcggctccctcgatctgtcggctaaccacaacatcaaacaaaatgttgaagtcatcgaagactttgcaaagaaagaccgattatttgttttactcaatgacattttgaaacaggtaaatcaagcaataaaatgggaatcagaatttcaacaaaaaatattcatttagacagaatacaaaacgctgatatttgcggaaactaagcgaaaagtggacgaactcaccagagagatgcgctacaagggaattcccgccctttgcatccacggagacaaaagtcaaaaagaacgcgaatgggtgcttagcggtgaacaaatgaattacggatgcaaaatctcattcaatcataaattttag

SEQ ID NO: 78131 - DNA, 366 bp, Heterodera glycines
atgatcacttggttgaagcattgtgccggtggcggccaaccacagaatcgagtcgggctcgccccgggccattttccatcggtcggccgtgccgccgacactgtgccaacggcacgggagggaaaagtcgcagtcgaagccgacggcggaattatcggaacggaggtcggaaagttgcggcagttcggaggttgtcacgaacagaccaagtgcaacctaaacaaaagcccaactaaacatgaatggttggaggaaaaggctgatcagaatgatcagaagatcactctgatcagttatgaatttgctgagttgatccagtcttaccggacaataattccaatgaatgtatttaattatgtaaactga

SEQ ID NO: 78132 - DNA, 635 bp, Heterodera glycines
  unsure (1)..(635): unsure at all n locations
tgatcagccttttcctccaaccattcatgtttagttgggcttttgtttaggttgcacttggtctgttcgtgacaacctccgaactgccgcaactttccgacctccgttccgataattccgccgtcggcttcgactgcgacttttccctcccgtgccgttggcacagtgtcggcggcacggccgaccgatggaaaatggcccggggcgagcccgactcgattctgtggttggccgccaccggcacaatgcttcaaccaagtgatcatttgtccatcaaatgccaataagcaaatgccattccgtcacagccgaaccgttcgctcttttggaggtgcgcgagggtcggctggcggacattctctgctccgaactaatcggctgtcaggaagttccttcgctgctcagcttcacttattggagtgtcagtgcttccgacttggagatttgtctgctcggctcggactttcggcggctanactgcacgggaatgctccaagcgacggcccaaccgggcaaagtggcactgaaagtgccgccgatcagacggagttttcacgtgagaaaccggggaaatcattaaaattaattttaatttaatttaatggcaaactttcaaaaacagatcgcaatcattc

SEQ ID NO: 78133 - DNA, 153 bp, Heterodera glycines
atgactgtggaagtgaacagcgatgccaaatccggcggcggagtgacgtgtggcggaggtcgcacagtgcccgtgccaaagtccgttgttggcaccacaaagggcgcaatgcgagtgggcgaagcggtgggaaacgaagtgaacggaggcgga

SEQ ID NO: 78134 - DNA, 2228 bp, Heterodera glycines; identical to SEQ ID NO: 14138
  unsure (1)..(2228): unsure at all n locations

SEQ ID NO: 78135 - DNA, 988 bp, Heterodera glycines
atggacaaaaagcgtgaggagttgcgccgcatggtcggcagaaggtacagagacgtgttggaggcgtcgaacacagtgaaaagactgtccgaaattgcaaatgaattggcctcgctgctggcgaacattgggcaaaatgttgtgcatggacagcagaaagacaaacccagcgaaacgccctcctttgccggcgaagatggcaccaaattagtggcaccaaagttattacgacccaatgccagtcgttgttttttgctccttcaaaatttgctttccatggttcgttcgggaacaggacgacataatttcgccgccgaaattggaaaaaaaaaaattaaactgaaatttttcaagaaaaaaatcgtagaattttttattagaaaattttatggaaaatccttgcgacatttttggtgcacccgattcgttcttccgcttgaattttccaattaatttgaatttttcactcgcttttagtcttttgtctccgacgaccctttggtccgtgccttttgtctgtgtgtcgccgactttttccatcggacgctttcctcctccgattcctttgcacttcccttctcccatcctccggtggtgccgatgttttccgaccaattcatccattttcgaatggaattgcttgacatttccacctccaaaatgggttctgccggtgcccagtggcatttggctgtcagtgctttggtcgcttaccttttgttgaggccacggaccaccgcggatgaactgttacagcttttcctcaagtcgaggatggtcagtgcgtatttgcaatgcaatgactaaaactgtccaaataattgcatttttaaggattttttgatggaaaatcttcgacaacccgactcaactttgctgggcctgatcaaacagatgaaagacactgtgcaaagtgcggaacaaatttttgcccaaggcgcactgatctccgccattcaatgcgttaccaccaaagggtggagccccg

SEQ ID NO: 78136 - DNA, 112 bp, Heterodera glycines
gaatgtgttcaatctgcagtttttcgtgaaggacaatgttggagggggcgacaaaaccgttgtcgatgagtttcgaatttacggcatgccaattgcgaagactacgaacatg

SEQ ID NO: 78137 - DNA, 2725 bp, Heterodera glycines
atgcctccgcacaatccaaacgcgtgttatgccatcaacaatccgccaatcccaagagcaacaacttcgctgagtaacagcaccaatccgtcgaacatcaacaaccaaaacaatatcagcaacggaaacggaatggctggaggcgtacaacagcagcaacaacagcaggtaaaaacatcagtttaatgggttggactggtcgagagtcttggtctcaagccgggaaatttctcggatttttggaatattgagaatttgaaattttcgagtgtctctaacagtacaattttctgaaaaaatgatctgtctgtatgtaacccattgattggtgtctgatcagaagacactttggtcatattaatgtaggcttatctgaaatttccagcaaaaattatttaatgagtcacaaacaatttaatttaatttaattttgttttttttaatatttctctctaattgactattgttttttgaaaattttgattgactaaaaatttattttaaattgaggcctatgaaaaaaagctcttgaagggacacctgactgccctcgtaatgtccgtcgtctaatgttatacccatgaccctgaaaatctaatgatcaaaaaatagcacggcttttcaaactttaaaatttgcagcaaaagaatccgaagctgtacaaaacggagctgtgtcggtcatggatggaacacggacggtgcaattacggggaaaggtctgactgaacatgaggccgtgacattttgacaacccgttgaacaggtgccaatatgcgcatggtgagagggaaaagcggccggtgccgcggcacccaaaatacaaaacggaggcatgccaatcctaccacaaaacaggtgatgccggattttggtgtgttggcacaaaatttagtttgtccgttttgtaggttactgtccgtatggaccacgctgccatttcgttcgtttttcaaattgttttttctgcgtttggcattttacccaagtgccaaatttagattcacaacgagaacccgtcgcagctgaaggctctgattgatcagaatgaaaaggcgttgcgactggtgcaggaattggccgtcataccgatcagtgagtcgtttaactgctctgatgagtcactttcggcacttttactctcattaagcgtaattaggacgccctatcaatgagagaagggtttttaaatctcttatctttattttagaaaaataaatcctttatttttgtgctgatatttgcgaatcttcaggtggttccgcttctgaaatcccccgaaaatcgctaatcgtttcttcgtcgagcgcttcgctgggcaattcgccatttggctgcgttttgcagaaaaacaattccgtgcacacttttagcaagtaatttgcatcttttttacaaaaattattttattatatttttattttacttatttattcatttgtaattttttaaattattaattatttttgtttttttaataaaattattttttaaataattattttcttttctttgttataattttggcaaaactttgaatcctgtccccatattttttttacatttaaataatttaaacccattatattcatcatttttatatttagttaaatttatcgttattttaaataatatttctaaaaataaaatgtatttttaagctttcacggtcaatatttggagaagactcagagcaataatgctctacaacaacaacagctgcagcagcaagaaaactgtgcacatttcttccagtttaataacgcatcccaacaaaatcatcagcacaaccaccaacaacaactgccaattggggtgggactgaatttgatggggcacagtaacatcgtacagtaccagcagcagcaacagcaacaggacattacagtactgggaaaagaataaggaattaattgaaattttaatcacttggaaattataaattaaatttaaatgatatttattaattattcattttaaattatttattatttcattatctttttataaattattttaaattttgatctcttaacggtggtgagtcattatttaaaaaacatcataaagggcgttatttaaacaccatcaatttgaaaaaaaagagattcataacttagctccaaagcaacaaattaatcattcgatagccctaataaaattttaaaaaatttcgttaaatttcaaaaaaaaattatgaccaaaatactcagaaaaccttcgcattcgaacatttttggtcataactttcttgaaacaacaaaaattttttgcaatatttcatgctaatagaaaacacttattgttcgggctatcgaatggtatcaaggattaaaatttgggtgctttaaagcaaagttaaaagcaatatttttttattttgatggttttttaaataacgcccattagcagcaccctcttaaagattacacaaatataattttaaattctttattaattattcgaaatttttacatttttctcttctaaatttagttcttcgcctctcctcaacaatgttcgccagagaatcaaaatgcgcagcagtcgccgctttcgtccgcatcttatgaaatgttcggcggcatttcgcccaaaaaccaacaacaaatgacgacggaactgttcgatcacggggaaatgagctcaccacagcccaacaacactcacaatcagctccaccaccaccaccagcagcagcacttcaatcagcaccatcagcagag

SEQ ID NO: 78138 - DNA, 344 bp, Heterodera glycines
atggtgctgattgaagtgctgctgctggtggtggtggtggagctgattgtgagtgttgttgggctgtggtgagctcatttccccgtgatcgaacagttccgtcgtcatttgttgttggtttttgggcgaaatgccgccgaacatttcataagatgcggacgaaagcggcgactgctgcgcattttgattctctggcgaacattgttgaggagaggcgaagaactaaatttagaagagaaaaatgtaaaaatttcgaataattaataaagaatttaaaattatatttgtgtaatctttaagagggtgctgctaatgggcgttatttaaaaaaccatcaaaataaa

SEQ ID NO: 78139 - DNA, 466 bp, Heterodera glycines
tcgattgggccaccccgcaagtcagccgttgtccccattcggcaaggaacagcatcatcagcaacaacagtttggccacaacgctcaagaatggcatttggccaagcaaatgcaagagatttacagcaacggcaaaaatggcacaaaggccgcgagcggtgccaacaatcgcaacaaaaacggcaacagcgagttggacccgcaaaatatgctcgccaatctgtgctcaagcgatggtaaagaaatcatggaagctcgggatttttggctctcgaattgagcaattctgattggattttggagttaaatttcgactctattgcttcattttcgaaccccgtctcggaaaaatttcgaggaattttttgaatgaaaatgagtccttcatagattttgctccaaggtgttattttataacatttggctttttaaaaaattttacggttttaaaaaatcattttttata

SEQ ID NO: 78140 - DNA, 1025 bp, Heterodera glycines
atgactttggcatttgatgacgatgtaaaattgataagtttaagtcattcattttatcaaataattttggccattaaggcattcattcggataattatcaatcaattagcgtttcaattaagaaaaaattactttgccaatcgataggctccgatggggaaaaatttgaaaatttttgttctaaaattattcaaaggcaatgaaaatttttaattttcatttcagacattgaccaaatcaaagggtgaaagcaaaaaattggccagccctcaactgattggacaaatcacgaatttatctgacgccgaaagcgatgcgcaaaatcgacggagcagtgacggagacactgtgaaaggtcagtggtagtttttgacgaacaatggcacaatggcttctcatttgggcatttggccaaagtaaaagatcggaaaatgaaaattgacttttcatagagcataagcatgtgaagtgaattataaaaaggatatcttattgggaaaggatcagctgttctattaattaaaattcatgttataaatccgttgggatttctttcaaattaaatgggataaccaagggctagcgccagacccttggcttcgggggggggggggctcaagtaaaaaattcgatttttaggaggtgtatttttctttttcattcgatttttaggggtgtattttttttttagttttttgaattcccgaattaggggggtgtattttacaaaatttttagtcgttttttcgccaaaaattactattttccattttggtctcaatttttcaaaaacatggcaaaatgggggtccggcggtgttgttaggcgccgccgggaaaattttttttttgaaatttttaatgcaatttgttaagaaattgcttgaaattacaaaaaattagctgaaaatttttacttttttggatttcgggagggctttagccccctcggccccccaggctacgcccttggggataccgtacttcttcgattatatccccccctcgattagaacctcctctcga

SEQ ID NO: 78141 - DNA, 1658 bp, Heterodera glycines
atgccattgaaaaatcaagaaaatgcaatccgtaaaaactcttgtcaatggtacaatcttcataacatgaaaatattcgcgtgtgtcacttcattttttggttgggcctgatcattgaaacactaattaaagtttaattaacttaattaatgcccgattaaataggcattaattagctttaattcatttcccaatctaattaccaccgagcaattgatcagaaggcccaactttgacttttcgattggctatttatagcacctttttattgatgtctctcaaattagattgaacgaaaattttgcgaaaatttatttgcattttttaattattattataattaaattttcgttccttttaaacaaattaactacggtttacattttgctgcgcattatcaccgattatagaacttaaatattgtctagatgttctttgatctgctagaactggtgtccaacaaattaatatattaatattccattagaatatatttgcatcattttttgtatttgtaaattttcatttaattgtaaattatttttaaattatttttgtgttcatcttagataaacgttagactgatgttctttggcatttacacataataataataataaaatttgcgcatttttcttatcatctttcattaaaattttcaaaatttttccgggcagatcctattggtactgccggaccatcattttacctcgtttttgaaaatttgaccccaaaatggcaaaaaatagtttgtttttttttggcgcaaaaacagctgcaaatccatgttttttgctctctggcgctgaaattttaaaaatgactggagaaaaaatttctttggcccaaagagcaaaaaaaaaaggtcttctgattccccccttttctggctacgggcttgatcatttcaaaccattttagacaaatttaatgaaaaattattattaaagctaaattaacaggattttttttcaatttaatggtggagaaaaacattgttatcatgaacattaatgaagtgtttacattaaagcgcgtgaagcgtgtaatgcttattgtagtatcgcgaggcgttggcatggcatggcattggcattggcacactgggtggcgggcgtattggcattggcatgcccaaccccaacagtcattactccattaagtggagcgcaatttgataattattcttgcctttttaatgcattatcacttttatctgagaccgaaacgggttgcacccgtatacgcgttcttcggaccctttggcgctataagccgtatatttttcaactgatatgggttttacgagttattgagcccgtagtccggaccccgtataggtaaccagcgcgtaattaattttataactgttgttattggttcttaatagcgatttttcgacgaaattacggaaacaaattaaattttgaaggggtcccagttcaaatgttttaccgtttgaaggcaaaacaaaaaaaaaggggggggggggaaattttcaaggtttgccaatataaaatgctgtttcgaccggtgtacttaagcatttttgaattcgaaactccctgaaaaagtgacaatggaaaagccaaataccggcggaaaatccgacggcgttgagaacagtttacaaaatgagaaaatgcgacaccgcgaaa

SEQ ID NO: 78142 - DNA, 1679 bp, Heterodera glycines
atggtgcatagcaattacattgacttcttcagccaaattgccaaaggcattgccaaatttggcattaaagtggcaccgaaagagcgcgaaactgtcgcaacatttgagcaggcatattatggacaatttatgaatttggatcaagcagacgatttgattgcattggtaattaaaatatttaaaaaatatatattttataaaataaattatttttaatttgagatacgcactttcctcgagttcgcttgtgtgaaggaagtgatcaacgaacggctgaacgagcttgatgtgccagacaacacagaatagtgaggggcaaacaaacatttaagaaaatatgggttcaaaagtcatgagtagggaacgaattttgaggcataccgtatatgctcaaattatagcccagtctctattaatcccgcagtctccaattatcccccagtctacgaggtgttttgaaaaataatccctctatcataatcccccagtctctaattatcgccccttttatggggaggttgaaaaataatcccccatgggctataattagagcatatacggtatgccttttttttttgctcattagttacgatacattaagcataaataaaatgcaataaaaaaatatatacccctaagaaatgaaaaattttctcaaaaattggtcgccaaaatttaatttaatttttttgataaaaaattttctgtttaaaaatattccttattcaaaaaaaattataaactatttaataatcatttaaatgagcaaaattaaaattttttgattaagttttacgtgttttgctccataaaaatccttaataaaaatttttaaatgacttttttatgcctatttgaggatttttatgccttttttgcatatttttggtacctattacagtgcctttttcgcgatttttagtgccttttttcgttctctagtcatgagacaaataaaaaattaaaatttggtaattttagggcaatttgggggcaatttattgacaaatttcgccaacaatttcaattcttaattaaaatgcattaagtcttttggaaaatgcgcaaaggattctgacggagcattactcgccaacccatgacgacataatccacgcgagagcagccacaaaaggcatttacgaaatcattttcgcattccgggaattcaaaataaggtaaaggaagaagacaaagcaaagggggttattaaaaagtgcagattttaatttagccactaattattattttcagactaattgatgagggtggacagaaaacggagagacgcaaatggatccattgctttggtaatgaatgaatgaaccgggcaatgtcatccccctgaaatttttttcaaataatttttttaggctgatttaaggtgctgatgtgggacgccgaaattgagggagggcgactacacacaccaataccccagggagaagggaggggcgaacgtgatttccaaataatcgatttcttctagtctaatctagtcaaaccggtgcgagaattcgatagaaataacattcacggtgcgaaaaatggggtttgacaagtctattggggaaaaaagactttactaaataatacccctgggagaagggagtgggaaacatgatttcaaaattttcaattttttatagtctaatctactcaaaacggttcagaattca

SEQ ID NO: 78143 - DNA, 91 bp, Heterodera glycines
ggattatttttcaaaacacctcgtagactgggggataattggagactgcgggattaatagagactgggctataatttgagcatatacggta

SEQ ID NO: 78144 - DNA, 396 bp, Heterodera glycines
atgtgggtggacagaaaacggagagacgcaaatggatccattgctttggtaatgaatgaatgaaccgggcaatgtcatccccctgaaatttttttcaaataatttttttaggctgatttaaggtgctgatcacgaatctgacgttaatttaggcctatcccgaacccccggacccgaactcggacaaaaaggtcgcacaaactcgacataaaatcgatttctaaaaattcgaatttgcgacttgtttgggttcgggtccgggattcgaaataggcaaaaatggatgccatattcgtgatcagcaaccccaaaaaaccattggtatatatattacctgttcgttttcacatcatgtgaattttcacctaactcgctggaaacatgttatagctaaaa

SEQ ID NO: 78145 - DNA, 1206 bp, Heterodera glycines
atggatccatttttaatttatttttatttttttattattattatcagaggatgttgctgcaatccttttcattgtgtcattgtcctgctacaaccaagtgatggaggaggacagccaaatcgtaaattaatttttgaaaatattttaattgatttaaactcttaggaaaaaaaaattaaatagttaattaatttcagaatcaaatgtcggactccatcgaaatgttcaagacaatgtaccgcaacagattcctccgttcttcgtccttcatcatgtttctgaacaagaaagacatcttcgccaaaaagattcatcaaattccaatggaacaatttttgcccaatttgggggtaattaaactaattaattggttaattttgttgttcccatctaatcgtcgtcgtttttatagacaaaatgaaagcaaatccaaatctgagcggtgatgagctttactcggcggcacttgagttcgtcaagcaaatgttcagttcggtgagttaattaattgtttaattattaaattactattttaaattttattttatttaaatattttactaaaaaatttaaaaaattctccttttttctaggttagaaggcaagacaaacggcaaatttacacacatgtgaccaatgcgacaggttgaaaaaagcatttaatttttttcctaatatttttaattttattcaatttcagatacaaggaacattggcaagtttaaaaataataataataataataatgtataattattagaataaatagctgataatgagtctgaaatttatataaaaaaaataaataaaatttctaaatggactcgaattccctgtaaatggcattaatcccttgaaatctcgttaaatctctgtccctgacccatttccaattgttcgatttcagctacaaagatttaataaataattgattttgaactttggtcataaacaattaacaagccaaattaacaaattcttgccatttttcagactttgtgttcaatgccacctgcgacattattctcgcaaagaatataaagtcagctggcatgaactaacaacagacagcttaagatgagaatctgccaatatttatttgaacaatttgctaatttatcaaattaaatttaataatatttgaatgtaaattgtgccgttgattgccataataggtatcaaattaaaaatgctttattttacata

SEQ ID NO: 78146 - DNA, 656 bp, Heterodera glycines
atgggtcaaacgagtccgggtctggatattgaaaaagacgggtatctgggttgccgcaaaaaaatttgctttggtaacccggtttttgcccaaatacccggccccgtgcatcctagtctaaagtatatgcttcgcatttctttttctttgaaatccgttctcatccataaatttattattttttgtctttcccatcaaataatttttttaagctataaaataaaatttttttattcaaaataatgtttgacatatgttatggtttttctaatggggtgtgatacaaaagctttataatttgattcttaaaagtcccagcctttcacttaacttttcttcttgtgaaatattttctcttcaagataactattgccgacaaaaaagaagtcagaagtttaattgaaaaaacctttaaaaaggttaagtgcggcctgcgctctgtgtggaataaaacagaaagtgtaagcgacaaaatgattattcttaattaaaatttttagctggtgcgcaaattggtccgagtgggatcaatgaacgcagaacaagtgtatcggtcggtgatttttgttaaaaaactattgccgacaaaaaagaagtcagaagtttaattgaaaaaacctttaaaaaggttaagtgcggcctgcgctctgtgtgga

SEQ ID NO: 78147 - DNA, 182 bp, Heterodera glycines
atgatggaaaatgctcagtgtcgaatggattttcgccccaagcaatctgctttggagtgccaggtgccgaaccgtcagtcgaagaagacccatcaaaaccgcgagggatggcatcataggcatcgggtggactttgatttggcaagtctggcattgaatgaaacatcaacaactgttccaag

SEQ ID NO: 78148 - DNA, 158 bp, Heterodera glycines
ccttatcaaagacaaacacggagaagcatctggcagcaataaaagtggcaacaatagacggcacaattatcaccaccataagagcaaaagtagtgaccttcacagaagaagcacggaattacacagcatttcacgacggcatagtgccgactcaataa

SEQ ID NO: 78149 - DNA, 67 bp, Heterodera glycines
atgtccctcttccgccgtcttgcaattttcatcgtcctcctcgcattcttaggcgttttttgtggag

SEQ ID NO: 78150 - DNA, 597 bp, Heterodera glycines
atgtcggggtcgagatttgtcgagattgtgaaaagcggggtatggtttgtcggggttgtccaaatcgaccggtgggttttcattttttcattatatgtctgggtcggcaaggtcggtcgggatttcacagccggtaacatttttgggaaattgaatgcaattggttggaaattacacaacattagaaaatctttcatcgtgctatgaaaattctaaatgcttagcttgaaaacagttttaaaattcaaattagaaaaaattttctcttggcaaggaaatttttcatttaaaccaacaatgcctttggaaaagcagaatttctttaagtcgcgaatttctcttaatgtttctttcatctgttttgaatgcccaacttctggacaagtgaattatttcatgaaataattatattaaaatgtttattttaataaaaattaattaaagtttgtatttatcgcttagatttatttatttttgaattataattttcaagctttttagctttttaattttcttcaacttttcactttattaattcactttttcaggtttttttaaattttctataattatttattccaataataactaaataaa

SEQ ID NO: 78151 - DNA, 601 bp, Heterodera glycines
atgccaaagatgatcttcttggccgctccagaagctgcagcagaatggaggaggtccgtttttgaattcttaaaatttggaacgatttatattaattattaattaaaatcactaatatattaaaatattaatttttcactaaattttactgttaatatgtacaggaggacaaccaccagcagcaaacgaacaaatccaacaaggtcttcgagaaacgagtgtttgaatcatttccgaaaaatgctgctgacaatgatgagaagagcagtgatagtgaaagtgaaaagggtaaaaattgggaacaattacatattaagcaaatctaattaaaaaaaaacattgcttaatattggatttattaattcagcaccaattttaaaatactatgctccagggttaattgatatcctaattttggtcggtaagcacataaattcaatgttatttagaataagcaaaaaattaaaaaatttgatttggtatgagcattatgtgttttcgaacctaaaaagacatgaaaacactaaaacctagtcctattattaatgcgaaccgtaattttatcaattaattatttttatttaatattttatttttgaaa

SEQ ID NO: 78152 - DNA, 3588 bp, Heterodera glycines
gatgtccacgagtatcagcgactgttggaggagcacgacaaattgggcgcggaagtgcggcgagtaggcgaacggaacgaacggtggaagcgcgaaatggacgacagactcagcgagtggttggacccgctgggcgagttggtggccaacatcagcaacaacttcaccaactttttcgcccaactcggctgtgccggcgaagtccggctcgacacgccgccggagaacaaagtgagccaaccccacctggttttggccaaaataaccatggccatgcccttgttttggaaggggcgatggaattttgggaaaatgttcggcgacaatttcccctaggattttatgcctgccagggacggaggatttcggcttgggtggtcccccaaacgacctttttttgcttttcaaaccgtatttttgtggcgcgttttcgaaaaaaatcattcatctaaaattagtaattttgtggattttctgaaaaattcgagttatttttccgtacttgatgccgaatttttaaaaattcactcggcggtgctattgttgatttcgacatttctattcttaaaatttaatgttccatttatttacagtgtgttatttcttttgttacagtacaatgtcgcggagtacggtctgtccatcctcgtcaaattccgcaacggcgttggcctccgcgtgttggacccgcacacgcagtcgggcggcgagcgcagtgtggccacaatgctttatctgttggcactacaaaatctctgtccggtgccgttccgttgcatggacgaaatcaaccagggcatggacccggacaacgagcgggccgtcttcaacatgatggtccgtctgctgggcaacagcggcacggcgaggggaggcggcgaaaacattgccaaaacgcaatactttttgttcgttttcgatgccttattttgtgttaaatttggattataagttgaaatttacacaatcgtaaaaatttaggttgccaaattttcaaaaaacaaattgtttgaattttaggcgctaattaaaattaggttggttttgaattttattaaaaacaaaagggagggatagccttttgggttgcaaaattttttataaataatgcccagtcatgaaaatttgttcacgcgttttgagtccctgcttacgaatctcacacctattttgaccatttctaaaccccgaaatcgagtaagagtcaaaaattaaaatttttcgataatgatcttttttgttcaatttagcaaacttgattttcatgtaaaaattctttcccttagactgactcccaaattgctgaacggactcgagttcaacgagcgcgtcactgtccacattgtgcacaacggacccgaaattgaacacggcgatgtgagtttttgagatggtagggaggaaaaaaattctaaaaaacatcaagttcgggaattccctttcaaaaccgaacgctctcataaaattggttaaaattccattactttgcccttttgttcccatttttctccgtcattttttctcacgggacaattgggcggtcttttttgtcaattaattaattactaattagtttttacattactttccccccttacaattagcattgggatccggagaattttctggctggggccaccaatgggcaccaccagcagcggcagcccgagcacggacaacagcggctgccgggcggccgtccccggcaattcgtccgagcgacggcggaagacggggagggggaggatgaggacgaagggaccgatcactgatcagcggagaggcgccagaggcactgtgatcggcagcggatgagtgaggaaaagggaagggatgaaagagcgatggatgttgggatggctctgatcatcaatcactcactcactctttccccggggggccaatgtttcgccgtctttccgtttggcatttgtttctgtgtgttccctttccccattctctgccactttctctctgcctctgctctctttctttgccttctcccatctcacaatggtttctcgatgtcacttattataattctctcccattgattgatctctcctttttttggcttttccaatcattttttcggatgactaaatttatttattaaattaaatattttcattactttatgtttatataaatacatttgattacacaaaccgtctaattttggtaacgctttcgacgtgggtgtgatgggttttgctgtccctcccctccgaatttcgctttatttccctgccttttcaaatccatatggcaaacaaaagcaaaattaggcgcgaggggggggggcggcaaaaatttggccaatttttgacctatggcaaattgggtcggaggaggagaacacatttccattatttttatttttttggctgtttttgtttaggagggaaagcacaaaatgttgtttctttcaaatcactcttctgtctgatgaaaagccttcagggaatgttgtcgctttttgttggaaaaaattagttcaaagttcaaaacgattcccttgtgcttttggttcaaagacaaaacgccaaacaggcaaattcaaaaaaaagtctaaaaggatcggaacgggccaactccgtctgagccaactttgagtcaatataactcttgaagttattgaccgaatcaaacaatcttgatatcattcgaaagctctttacaggctctattagcctactaaaaattacagaaaatttcgaactataaaaaaagatagaaataaaaaacttcgaaaattctgccttttttgcggttttcaactgacaacttttttgagagctgattaatcactgagaaatagcttataaatatcttctaaacatctagggctttcgaatgataccatgattgtgaagtttggccaacaaagaaaaaacttatagctttttgaacattgctgagacggagttggccagacggagttgacccctaccgtaaaaggatgccgtatttatgaaagtcccctcgaaattttacgaagttattttttctttgtaaacaatgcttggcatagtgttcagaaacgttttgcgcataccgtagtcctcccatttccaatcctttcgttctgttgcagcaatcgaaaaaggaagggattactgatctgattcgagtggaaaagaaagcgcaaattatgcgaaggatggtgccaaagtatgctgacgaaggggcggcagcggagacggcgacggtgccaatgccatcgccgtccgccgttgtagtcattgaaccgacgctgaaaaaggaaaagcaaagggaaaaggaaaagcgcagtggggagacggacaatggcaaaaagcagcggaaggatgaaaaggaagaagacgagcagcaaaacatgggagaagaggagcatacggcacaacaacggcaccaggaaagtgccaacattggcgaagaagcggaggaggaagcggctaatgtcggcaaacggcaccggcgacgacgcttccgacgctgtctgccgctggacggcgccggaggcttgtgcgccgccgtggcgttggacatttcggcgctacggcaacgggcccactcggagggacacatccaacagcagcagcaaag

SEQ ID NO: 78153 - DNA, 375 bp, Heterodera glycines
acggtaggggtcaactccgtctggccaactccgtctcagcaatgttcaaaaagctataagttttttctttgttggccaaacttcacaatcatggtatcattcgaaagccctagatgtttagaagatatttataagctatttctcagtgattaatcagctctcaaaaaagttgtcagttgaaaaccgcaaaaaaggcagaattttcgaagttttttatttctatctttttttatagttcgaaattttctgtaatttttagtaggctaatagagcctgtaaagagctttcgaatgatatcaagattgtttgattcggtcaataacttcaagagttatattgactcaaagttggctcagacggagttggcccgttccg

SEQ ID NO: 78154 - DNA, 825 bp, Heterodera glycines
atggcaacgcgaaaatggccacgcgatcttcctcagcgcgaaaatagccacgcgaaaacggccacgcgaaaacggccacgcgaaaatggccacgcgaaaatggcaacgcgaaaatggccacgcgaaaacggccacgcgaaaacggccacgcgaaaatggccacgcgaaaacggccacgcgaaaatggccacgcgaaaacggccacgcgaaaacggccacgcgaaaatggcaacgcgaaaatggccacgcgaaaatggcaacgcgaaaatagccatgcgaaaacggccacgcgaaaacggccacgcgaaaatggccacgcgaaaatggcaacgcgaaaatggccacgcgaaaacggccacgcgaaaacggccacgcgaaaatggccacgcgaaaacggccacgcgaaaacggccacgcgaaaatggcaacgcgaaaatggccacgcgaaaatggcaacgcgaaaatggccacgcgaaaacggccacgcgaaaacggccacgcgaaaacggccacgcgaaaatggcaacgcgaaaatggccacgcgaaaatggccacgcgaaaacgtcctggcccgaaataaaagtaccatttttttttctccttcttttgtggcttatcgtataaatgattaaattcttggcaagtcgctttgcctttgacggttgagtgagattgctgttagtttgttgtccaaaatctgactacgaatttcttgactattcgacatagttatttcgcattttctcactttctatgcgtgatttcgacagcaattgaacccgacaattagagactgggtttttaagaattattgacaaaaatgca

SEQ ID NO: 78155 - DNA, 1558 bp, Heterodera glycines
atgatcccagggcagcaaaatgttggcaccccattccaatacactaatccaaattgtcaaaacggtggtcagcagtttcaggcaatttattttgttttattttacttaagtaaaaccaaaaatttgtgtatttaaatttctttaattttatttagccaatgatcccgaccgcacttgggattcaccccatgtcttcagtgatccatggcactccttcagcgggcacatttcagccaactttttcaacagtgccacaggcaattcaaattcattaattaaaaaaaaattctttaaaaagtcagatttaattattcaaatgggtatttagcattttgtttctcatccttttgggatgggtcaattgaatggcgcctatcaaatgcccgggggttaccaaaactcatcgtctgcttcacaggcaataaattattcaagtctttttttctttaaatacataatttttaaattatttagcaaattgttgtacctccgagtcaaatgcctcccccttatcaaaacgcttctcttgtgcatcaacaacatcaggcatttgaataatttttatttaaatttattatcttttgtttgtgttaatagtttgtgtccccagcaactaaccaaatgccgggaaatttccaaaatgcctctttcgctcaggcaatcaaataatataaatctaaccaatttttattagtctatttagctttttattccgtcagctcaagtctcgaataatttaccacacgctcaacacaataaccaatcatttgcacaggtttaaaaatcagattttaatgatattatcaaatctattataacatggattatttttgagttttaaaattttttaaaaaaaataaagtttttctgcatttaaaaaatgatattgggatgcgaaaaatactttatttggtgctatattaattgagaaatttttaaagaagcgataaaaaaatatcttgctaaagttgttgatctttgaacaaataaaaaaaattgtataattttaaaattctttagaagtttaagtcatttttagtcaaatttacttattaatgtttttatggaattttcgggattttttttgtaattacagaatctacggcaaatcaaaaaaaaattaaagaaattttcagttggcgccggcattgcgtgccaacaacaatcaaatgatcacacatgccatggttggcccacaaaatgccgataattcgcagaatttgcaggcaaataattcaaaaaacaaattgtttttattaaaacatttttttttgtttcttttagcccacgaattggtcaaatcatttgcctggtacccaacaaaatgtcgggccccatctttcaaacaatttccaatcacaacaacaacaaaattgccagaatcttcaggtagtgtattcttttttcaaatttaaattatcaaatacactttgtttttattaaaacattttttttgtttctttcagcccacgaatttgtcaaatcatttgcctggcatccatcaaaatgtcgggactcattttttcaccaatttccaaccacaacaacaacaaaatag

SEQ ID NO: 78156 - DNA, 2739 bp, Heterodera glycines
atgcactggatcagcgactgtccaaaggcaccgatctgctcaaactgcaatcgccgtggccaccatcaatcaaaatgccgcctgccagcgccatcatccaagtccaattcacaccgcaaccatgcaacaatgtccatcttcaacatcggagacgacatttcggattggatcatggtcgattgtcaactcaatggcaacaaagcatcactgatggccgattctggatcacgtttggccgttattcagcaagcattatgggaacagttaggcagccccaaactcaaaaagggcatttcaaaagccaaatcatattcggggcactttttcgaaatctccgggtatttcatttgctcagtcacttatcaaggagtcacacttcaattagaatgtcatgtcgcaccggaaggagcaatgaatttgtttggtcttccatggatcagggcgttcgaagcggcacttcaacgtcccattgtcactactctcaccacagatcaattcaaattcgacaccgattcaaattcaatctcaatctcggaggacccggacaaattggcgacaattttaaagcaaaaatttcccaaagttttctccccaagcttaggcctttgcaacaaaatgtgcgcacatctccacctcaagtccggagtacaacccgtcttctgccgtcctcgaccagtcccacatgcggccaaatcagcagttgacgccgaacttgatcggctcgtcgcttgcggtgccatcaaacaagtcgattacagcaagtgggcagcgccgatcgttgcagttcgaaagaagaacggcgatgtgcgtgtgtgcattgattttgcaacaggcctcaacgattgtttggagttaaatcgccacccacttccgcgcatcgatgacattttcgcagcgttggaaggctcaacagtattcagccaaatcgacttccgagacgcctatttgcaaattgcgttggacgaggaatcgaaagaattagtaggaataaacacacaccggggcttatttcagtaccaacgcctgccatttggtgtcaaaagcgctcccagcatttttcaaaagcttatggatgagctcaccgccggacttaacggagtttttggctacttggacgacttcattgtggccacaccaacactggaggaacaccattcgcttctcaagaaattcttttcccggctccaagactggggcctacgtgttcatttgaacaaatgcaaatttctgtgttcccaaattaagttcctcggccacattgtttcagctgaaggaattcgtccggacccggctcgttcagctgcaattgatttcatgccaccaccacatgaccttcaaacacttcggtcatttttgggcgcgcttaactactacggacgcttcatcaaaccaatgcgtgagctccgcacaccgcttgacgagttgctcaaaaaggatgttccttggcaatggggacacgaacaacaacaagcattcgtcaaagcaaaggagttgatgcagtccgaccttctcctcacccactacgacccatccaagccgatcatcgtcgcagcggatgccagcaaaaacggaatcggagccacaatcagtcattcatttccagatggctccgaaaaagtggttgagcatgcctcacgttccctctcctccgcagagcagaactattcacaaatagaaaaggaggcccttgcacttattttcgccgtccaaaagttccacagaatgatctacggacgccgctttacactgctcaccgaccacaagccgctggttgcgatttttggatcaaagaacggaataccaatttacaccgcttcaagactccaaagatgggctttaattctttcaaattatgatttccaaatcaaatatatttcaacaaattcatttggtcaggtggactttctttcacgtctggtcgctcaacaacgcgaaactgtacaatctgaagaccgagtgatcgccaacattgaggaacttcccttgtcaatttcagatcacgatcacccgacctcacgcgatgagcccgacgagtccgctgtcgaatttgtgttcatggcaacaattgatcaacttccggtcaccaccaaagaagttgccgaacaaacgcaactcgacgaaactctcagggaagtttccgaattttgtcgaaatggctggccaaagaaaacaccccaaaatttggcatcttatttcacacatcggtacaaactctcggaagtcaatggatgtcttctgtttggagagcgcgtcatcatcccggcagaattgcgccaacgcatcctgtccgcgctacatttcactcatcctggcattgtacgaatgaaggcacttgcacagcgacacgtgtactggccacgcatggacctcgacattgacaggtgcgtccaaaactgtgacgaatgtgcacttgcagcaaaagcaccgccaaaagcgccgcttcgttcatggccttctacaaacaaagtgtatgagcgtctacacatggattttgccggaccatgttccgatggacgtctctatctaattgtcgtggatgcttttagcaaatggccagaaatattctcagtccagagcacaaccgccgacaatgtcattgtccaattggaatggctattttcgcgatatggttcgtcaccgataatggcccaccttttcactcaaatgaattttcccatttttgcaggaccaggggaattaagcaaagttaggtccgccttatcacccgcagagcaatga

SEQ ID NO: 78157 - DNA, 1622 bp, Heterodera glycines
atggccgttgactttgctcaaatcctaaagcaattagtcgaccaacagacccaagcatttcaaaatttgcttcaaaatgcccaaccaaatcccaatgtttccaatcattcaacaatttattccaccattaattcccaacttggtgaattttcattcaatccagaaatggattcaacatttcaaaattggctcgaccgttatgggcctttcatccaaattgatgggaaagacctccctgatcagatgcaagttcgacttttgctcggcaagctcggatcggaggagtacaaccgctatgcagaaagtgtgcttccaagcaagcccactgatttcacactggcgcagacgatcgacaagctcaaggctatgtttggtgaaacaaaatccattttcacccgtcgatttgaatgttttcagctcacaaaatcaatttcacaatccccattagatttcgcaagccaggtcaacgcaatgtgcgagcgatcacaaatggatctgaccaaagacgaaatcaaagcactgatcttcctcacgggactttcggacactgatcgagaactccgtgagcgttgtttgcgacttttggaagaagcgaaaaagaagacaccgccggaagcaatctcattcgagaagctcacagaagaatgccgcgcgtttctctctcttcgcaacacttccaacgcattagcccattcaactcatgtggccaattcaatcactctaaaaccccaaaaattaagggatcatcaacaacaaaagcggaggtgtcgcaaagctcgtccaagacgacgaccaccaccagcaacaatcaacgatcatcccaatttcagcgcaaaccgcagcagcctccgtcgccatgccgttactgcaaccaaatgcactggatcagcgactgtccaaaggcaccgatctgctcaaactgcaatcgtcgtggccaccatcaatcaaaatgccgcctgccatcgccatcatccaagtacaagtcacaccgcaaccatgccacaatgtctgtcttcaacattggagacgacatttcggattggatcatggtcgattgtcaactcaatggcaacaaagcatcactgatggccgactctggatcgcgtttggccgtcattcagcaagcattatgggaacagttaggcagccccaaactcaaaaagggcatttcaaaagccaaatcatattcggggcactttttcgaaatctccgggtatttcatttgttcagtcacattccaaggagttacacttcaattagaatgtcatgtcgcaccggaaggagcaatgaatttgtttggtcttccatggatcagggcgttcgaagcggcacttcaacgtcccattgtcactactctcaccacagatcaattcaaattcgacaccgattcaaattcaatctcaatctcggaggacccggacaaattggcgacaattttaaagcaaaaatttcccaaagttttctccccaagcttaggcctttgcaacaaaatgtgtgcacatctccacctcaagtccggagtacaacccgtcttctgccgtcctcgaccagtcccacatgcggccaaatcagcagttgacgccgaacttgatcggctcgtcgcttgcggtgccatcaaacaa

SEQ ID NO: 78158 - DNA, 882 bp, Heterodera glycines
atggcttcacttcgttctcacttaaaaaatcaccatcaactaaaattgaaagaattggaagaaaaagataaggctgcagaaagcctcaaaaataaggaaacgaacccgagacaaccgacgttaaaacgaatttttgcgacttcaagtccagtcattaaaaaaatagcgagggctgaatctgctaactcgtcgcaattaaccatcgaaaaaaccttttgtaggaatttaattttaaatgaatttacataatattttcagctcaatggacacccgacggagaaatgactaagaaaattgacaaggcaattaacgatttggtatgtactgctggattgccgttctcttttgtggaagaacttgggctaaaaaatttattaagaatattggttcctcactataaaactaggtattaatttgataaataaaactttcgatgatcaacttttttcaggggcagaaaatatttcacaaatgatgttttagagtacagctattccttgatgttgcaaaatgttaaaaggcgaattgaaagcactgattacattacaattgccgttgattcgtggtcctctgacacaacccactcaatttttggtataattggccattttttggatccgaattttgaacctaaattcgttgtgctcgcggcgatcccagtgaaaggtcgtcatataggccaaaatttttccaacatggtttcaaaagttagtttttgggtaaagcttaaaatgtaagtctgtgtttttaagactttgaacgcttatcaaattactgataaaaaattgcacttgattctacgtgatgacgaaagtgcgatgaaattggcgaccaatttgctcggttatgattccatgcaatgtcacaaaattcaattggtaa

SEQ ID NO: 78159 - DNA, 984 bp, Heterodera glycines
atggcatcgcccagaaaaaagcaaaagcattcctccaccgatgaaacttccaccgaaattggtgaatatgaacaacaaataatgggttcagttgtgacatcatttggaaaacggcgaaaagttcacgtgccaaagaaaatgaataaacgaattttgaggaaaatgtgagaatttattgggttaaaattaaacattttttaaaatcattcaattatttttccccggcattttagctggatttgctttgacgtttggatggacatgttcccattttttgaccgtcctcaactcggcctcaaattggcactaatttcgccacgtttcaatgttttaattgacaaatatttcaatggtaaaagggaattgacaatttggaaatggataggaattgacaaaatgggaacagtgccgaaactatccgtgtttactaagtatcctactaattctgtgccatttccgttgcccgaccgtccgctgcacagcaaaattcgtttccatttcctcctaattgagtaattaaattttctatattgtacatgtctaaaccagggttgctatcgaaatattttcaaaatcagaacagggcttaaaaaatcagatattggggtcgaaaaccaaagcatttgcaaaattgtttcaagtttttttcggtttacctcagttggaccggcacggttgggcccagcatatttttccattataacttttttttgttcttcaaaatccaatattttttatatcattcgaaagcttaacatgtttagaatctttttctaagctattgcatagcgattagattcaattaccgagaaagttaaacatgaaaattgcgaaaaagtcgaaattttttcttaataattttttaagaagccaaaaaatctttttgcttttttaaagctaatagagcatgtgaagagctttcggatgatactcaagaatgttggattttcaaaaacttaccaaatattgaatttggggaataaa

SEQ ID NO: 78160 - DNA, 1970 bp, Heterodera glycines
atgttcatggaatgggagatccgacgtttaataatgccgacaacattaatgagcaaaaatggacccacggacaaaggatcagtcaaataataatttaattaagaatatatttaaaatgggaaaataaaaaaatatactaaatttaaaatttgtactttcgttcagcttttatagcacttatttcaggcatcggcgaaatctaatcctaatttgttcagattagagattttttggtcaattaagtcatatacatagcatttttctcacagtccaaattgagtaaattagtcacaggaattctctcagcttatttttaatcttttttaaaattcaaactattattttatggattctttgtctgtgggtcctttgtctctgtgggtcctttgtctagatattttgaatgggggtgctgataggcgccgctgggaaaattcttgaaaatttgagtccaatttgttactaaaattacccataaaatccaaaatttttcgtttgcggaggattaaaaatttttttccattattcgcttgaaaatttttaaagttttcatttcggggagggggggggggggaattcttcccctagctacgcccttggctacgataaaagaaaagttttgggttattatgaaaaagcgccggggaacgacctactttgagaggaaggggaggagcagtggcgttgccaacttggcgcctcaaagacaatagtgtaataaattgttcaatttccagcttatccggaacttgtggcacttctgggccgaaccgaacacgtgccagccacctccacagttacttgtgagtaaaaataataattgactttgaaaaaagaaaaaaaccaataatttttcttatctttttcgaataaactggtcaaaataatttatctttagtcacattaaatgattaaatagaaaattgtttttttttcagtgacgtctgccgagttacgcgatttggtgacaagtgcccttgatgccaatatgcgcgcggcggtcaaccaaacgggtaattttatttgaaaaattgaaaaaaaaaattgagtttccgtgtgaaaagggaggggtttgagatttcaacggtcaaaacccctgcatttttacttttaaaatgatatttttataaaaaaaaatttttttgctttttttttatttttatgtaaatgagcatttttcaaaaaataaaaaaggaaaacttgagaaattcttttaaaaaatagtcattaaaattttgggaggaaacgatgcgtggggggtggggcatttcccgccaaaacatatggttggtgctggaacttttactcatcaaaagaaataacaaagtgaaaaaaatttttcaaatttttatgctgactaaattttttcaaaatccaaaaatcgtttggaattttttttgaaaaaactttattttatgtggtattgaaattccctgtttttcagtcagaaacacggtggctgaagaatctcacaatcagcaacaactcattaatcggatcagcgaattggaaaatcaagttcggcagctgcaaattcttggccctcaacctggtgagtagaggaatggtccaacagattctgacattcttcaaattccaaaaacactgttttttaaactttttagagtgccctttcaggggagggggcatcggaagtggggagatcgcagaggagggaaaccgagaaaaatttcttggaaattttggcttattgaaaagaatttggtttttttagtgtatttttgcttcttttgcgtccgattctacccccttttttcatgatcgaaaaaaatcacatcttttttgtttgtttcccgggagtagtgaatgaaacaaaatgcacataaataaagcaataaacattttcagtgacgacttcgaacggaacctccggaattcgcggtaaacatttctttttattttcggtttgtggcattgcaaagccaacaattattttgattatagtataa

SEQ ID NO: 78161 - DNA, 957 bp, Heterodera glycines
atgaaagaaatagagaaagcaatagagcagcggcagtgtaaacagaaaagccggcgaagcgataaaccaacgcgacaaatgacaacaaagcaagagcaaaatagaccggatcagacaactgcacaaggagtgcatcaacaaagacaagtgaatataaaattgtgttataaaatttaagagatctttggatttcctcgcgcaaaaaggatgtaagcaagttcgcattggccggcgtcacattgaacagtctaaccacttcagcattggagagggcattttctgctgcttccaatgacgtaatccgttgctggcaaaaggcagtgaaacgagcttaataacgaatcactgttacatttgaaccgaaaattaatatatgcaaaaaaaagaagaaaattttggaatgtctcaattaaatttggtcagcttattttggaacacggctcgaatgacagacactcagccgaatcaggcccgtatccaggggggaaaaggggggggcacgtgccacatgaaatgaaaaatgcttcaagaaacaattttttgtataaaattgcataatttcttattaaagtacataaaatttcaaaaaattattccctgcagcgccatccggcaccgccggaacccattgaaccatcaattgctgaaaaattttcaataattttttctttaaattttcttataacctatgtattttatattagcatgctaaattttgaaaaatttcgttaagtttcagaaatttatggccaaaaattttcggaaaacaaagtttgctaggttttttggaaatacttttccgaaactcaaacaaatttttcgatttttggcatatagaaaatacctagggctaccgaatgctattaatttaattcaattcgaataacaaaaaagttattctccaaaaaaccgggctggtgcccagttggttggcgccaagtcgaaccccaaattaaa

SEQ ID NO: 78162 - DNA, 287 bp, Heterodera glycines
atggtcaaaggttgggccaaggcccaaaagagttgtgaatggaatcaatcgcaaagtataattattaatagagcccggacgggaccgggatcccgccgggattttgccgggactcccggtccctgcttttttggacaaaccaccgggaccgggagtcccggaaaaacgggagtcccagtcccgggatcccgtcccggtccattttccaagtcccggtcccggccatttcaaaattccgggctctaattattaattaagtcaatcaataattgattgggtgaatcaaa

SEQ ID NO: 78163 - DNA, 332 bp, Heterodera glycines
atgcgctgtccactgggcccggcattttcttctgctgcaattagtgaacatgaacagcaaccgatgggctcatttgtgacagaatttggcaaacggcgaagtctccgcgtggcaatgaaaaagaaccatcgaattttgaagaaaatgtgagaatgtattgggttaacaatttatgaaattcatttttaagaccgctcaacatattttaacaatttcagttggatttgtagcgatgtttggatggacattttgccacattttggtctgccaaaatatccgctgcccaataaaattcgctttaattaccttcggattgagtaattcaaaataaa

SEQ ID NO: 78164 - DNA, 2882 bp, Heterodera glycines
atgaagagcggtgcgggatccctattcggacagcaaaacacgttgggacaacaacaaggaagccttttttcgaaaccagctggcggatttttttcaagttcactgggttttcaaaaattaattcattgttgtttttcagccacgacttcgggcgcaacatttccgactgcaacaacgacgtcgtcattgtttggcggacagactcaaacgggtggcctctttggcgcagcaaaaccagcgggaacgtccatgttcggggccacctcccagcctagcggagggcttttcgggcagcaacagacggcgagtgcctttggggcgaccacaacacctggaaccggactgttcggacagaataagccatcggtgtgctgcttttctttcgggaaatgggtttaatttgtctgtttaggcttttggtcaggtgtcacagccgagcatttttgggggacagcagcaaaccactggcagtattttcggtggcactgcgccgtcttccgtcggtggttttggcgctgcgacggtgggaagaatggttaactgttggtttctattacgatagtaatttaagactacgactacgagtcttttcggtggacaacctcaacagagtgccttttcctttggccagcaaccgcagcaaacggccgccaccacgggcctttttggggcgaagccggcgcaacaattcggggcattcggtgccactcaacccacttcaagttttggttgttttttaaatattactttaaagatttgaaattaaattgttttatatgttgttcttggtcgtgaattattttaaagctgggtaattttataggcctataaataccttgcttaccgctataatttatttttaatttttgaaattacctaacattttcagaacttcattgctatgacttgaaaattagttacttttccttgtacaatttcttatctatcaactgatttagcggctaaatttgcgccaccaattggagaggaccaaatgcaactgaaaggaacacctcacaaagtgaacacgaaacaaatgtgcataacatcgatgaaggagtatgagcacaaaagtttggaagtgcgcgggacgaatccttcgcttttatcagtttaatgataattaaggaacttcgggtggaggattatatcgccggcagagcgaaaaacaccggcgccgcttccgccgcgtccacttctttatttggtcatcaaaatgttatgggacaaccgcaacagcagcagcagggcggactttttgggaagccagcgggcggactcttctcacccggtggatatttgttaatttgccaagatccgcgtttgggtcttgtatgtttttgcaaaatccaacaggacacaaagtcgtatcaaaacgtttttagccaggaaccctcagagttcctctcaaaaaacaggccttgggtgaaatggtaatcgaaaatcaattcctgacccagctttttttaccaatagtccaagcctttattgtgaacttcgcggcgagggccggtgtctgcctgccaagaagggaaacataaaaatttataatattcatttttaacctatttcacatatttatcattaaaaaaattttggtttccgtggaggggggctatatccctcctggctacgcccttgaatattatgagataatcgcagaaaggccagtctttgatcatatgcaatcgaacccattctatgaaatcttgagtatcaaaaaatgtcagaaaattttagtgtttctctttcgtaatcggtcaatcgttagccttctctcccaataaattgtaattcccataaaaaaaattccagctacaacttcgggcgcaacatttccgactgcaacaacgacgtcgtcattgtttggcggacagactcaaacgggtggcctctttggcgcagcaaaaccagcgggaacgtccatgttcggggccacctcccagcctagcggagggcttttcgggcagcaacagacggcgagtgcctttggggcgaccacaacacctggaaccggactgttcggacagaataagccatcggtgtgctgcttttctttcgggaaatgggtttaatttgtctgtttaggcttttggtcaggtgtcacagccgagcatttttgggggacagcagcaaaccactggcagtattttcggtggcactgcgccgtcttccgtcggtggttttggcgctgcgacggtgggaagaatggttaactgttggtttctataatgatagtaatttaagactacgactacgagtcttttcggtggacaacctcaacagagtgccttttcctttggccagcaaccgcagcaaacggccgccaccacgggcctttttggggcgaagccggcgcaacaattcggggcattcggtattttattataataaaatacatttaataatttatattaggcactcctgccacccagtcgacttctctgttcggcgcccccttgtccaaaattggcactggtagcatttttggttctccccaacagcaacaacagccccccgttggtggtttattcggacaacagacgggaacaaacttattacaaaagccagcacagccttctctgtttggcacaacatcgcctcagacaggatcaggcatgttcggcacgggtatgtattctttttaaaatttaaatgtgtcccaacctctctcttcattcattttcaggcttttcccaaccttccgcttttggtgcggcttccgccgggtcacctccaattttgcttggctcaaatgtcaacatttctgccatccaacaggccattatcagtgcccaactctcttccctcccctacggggacagtccgttgttgaaaagccccgccatttcgccaagcaaatcggccgatgacattgcgag

SEQ ID NO: 78165 - DNA, 1710 bp, Heterodera glycines
gtacttgatacgggcgaaatgcatccgacgcacaatcggacgaacaaatttgtacaagtcttccaagacattgtcgactcttacggcattgccagctacagggaaatcaaccccggtaatcaatcccttggcatttctcccccattttcatacttttccttcttcagcaccattcactttggtcaccttcccttttctgtttggcgttatgttcggcgacattggccacggactcgttcttttccttgccggcctttcactcattttgtgggagaggcgaattgagcagtcgcgcatcaaagatgaagtgagtgttgtgatcgttttctgattggcattgccattgataagttagacatttctcgcagattttcctaacattttttggtggtcgtttcattatcgctctgatgggactgttctcaatttacgctggactgatgtacaacgacgccttttccaaatcgttcagtattttcagttcaaaatggacaagtccttacaagtaataacgtgtaatgaatacctttttgaattcgattttgatattttccccctcagtttaactcagttaattgcgttgtcctccgacgccaattcgcctcgtcaaatggttttaggcttggacccggatgttgcttttcttcgtcaggagggctcttattggatggggttggaccccatttggaatttggcggaaaatcggctgaatttcatcaattctttaaaagtgactaatcatttgttgatttgttccgttaacaaattatcttcagatgaaaatgtctgtcatttttggtatttctcaaatgacttttggtgtcgttttgtcacttttcaatgccaggtgaacgcactttctcctctgttttatttgcatttcttttagatttttccattcttccgtcaatttgtggacagtggcaattccgtccttctttttcttgtcttctatttttgtttacctttgcgtgttaattttcgtcaaatggattttcttctcggtaaaaccggatgtgattttcggttattattaccccggtattaatatctttttaattacgatattactttcatattttgctcaattttaggtagtcattgcgcaccttcactgctcatcggactgattaacatgttcatgcaaaaacagcgaccttatggctttgtcgattcaaacaacaattctacggaatacccaaactgtcacttgtccttgtggtacccacagcaggtgaagtgagagtcgttgagggaggggggggggaattgcggaatttatctgatttccttttggttcgattacacatgaattctttaaccgatttttagtaattacttttatttctcaatttcaggctttggtggagtccgtactcgttggcgttgctttgttctgcgtgccgataatgctttgcgggaaaccgttggttcgcaagattcggcatcaccatcgtacgacggatggaatggtggcggccaacagaaaggactcgaccagaaaattgcaaaagtcaaaaaatattgtacgttattattaaaaataattcattatacaatgaattatttcagttggtccgtgttaaaatggactccgaagttgctgaattgatcgccaccacgactagcaacaacgacttggacaaggggacaagaaacggacagccgagcggagagggcggaagggcctaccgagcggaggacgaattg

SEQ ID NO: 78166 - DNA, 471 bp, Heterodera glycines
agatgctgcctactcctgtgtggttgagctgggccaatattcgcttgttcagttcaaagatgtgattttcggataattggggttgttattaaaccttttctcttcagctcaaccatcatttgaccaccttccaacggacgtatgtacgcgaagttcgccgttgtgcagaaattgagcggtgccttcgctatttggagactgaagtcgtggaggggggcgtcagcgaccacattccgccattggacaccactcgaacggacatcactctgttgcgtgaaatgtacgatttggaggtaatggacatggaaaattagaaaattaatttactgtttttcaattcagtcacacttatacgacatcgagagggacatccggcagtttcttgccaacgaggcccagctgaagcgcaatttcaacgatttgaagcagttcaaaagtgtctatgaaaaggtggaagctttcttcagagtg

SEQ ID NO: 78167 - DNA, 503 bp, Heterodera glycines
atgtccctcttcttcaaaaaggttggcccgcaactcggtgtccctgttcgacaccaccatcatttgtgcctacaacgcgtcgttggcattcccggtcaagcagctgagcagcgcgaacattggcgaccgggtggcccagcggacggtggcacagtgcagcagcggcatcggagaggaggaggagacggcgacgatgacgacggacggggacatttgatgagcgatgactgaccgatcggacaatggaggggtcggggggggggggggggacagagaacggaacgaagccgatccgatcgatcgatgatgtcatttccaccatggtgatgtgccaatgatgtgtgctggtggcggacattttaaaatgccatggattttttttgggggcgagttatttttcgacaccctgccaattcatctaattaatccttacacccgaccaaagtttaataggagcaattaaatgatttctaatacccaaaagtcagggaaaacagaataaa

SEQ ID NO: 78168 - DNA, 800 bp, Heterodera glycines
  unsure (1)..(800): unsure at all n locations
atataaaaattattccattacttttttggctgtgaaaaaaatgaattatgccaaaatttgtttcattttcctgcaactttttccaattttattccattcatcggaaggtaaattttttaaataattataaattgcattttaaatccgataaatttagttttaaaagtaaattaataaaaaattgaattacaaattttttttttggaaatttctaaaattttatttattatggaaaaatgattttcttcaatttaatgggagtcactgaaacaatttttcggcaaattcgaacctatcgtgaacaaaaattttaaataaatccgcaattaaaaatttaaataaattttcatataaagaaattctggcccagtattaaaaattatttgatttacaggccgtgtcgaactttggcaagtcagccaagggtatgtttcggtgggcagggtttttttcatttatgaatgactaaattcgaacccgtccgaaaattaatgctccgtttttcgggtaaaaaccccgggggggggggaggcttttcaaacaaatttttgtccaaaatagacaattttatgggggtttttggccgaaaaaatcattgttttttcacccagtaatcccgattactacacacggggcgctattctgaatgaggatgctgtgcncaatgaaaattacaacggcggaggccaacattatgccacattctgagcaaaaattatgattgattgaatgatcgccagtccaattttgcatactgtacaaaaatcattactgttgctttaggttttcacttttgtata

SEQ ID NO: 78169 - DNA, 676 bp, Heterodera glycines
atggaaaagcactgtctaccgtcggcatcatgctcaaagtttttagtttgtgatttaattggagaaaacggaaaaagaagaggaaaagaggaagaagaacaaaaaaagatgagggaaagagagaagaaagaagagaaagaggaaatggaagacagagaaagggaggagaaaaaagaaaggggagaaaaagaaaagggaggagagaaaggaggaaaggaagagagagaaggagtcgtgaaagaagaggaggaggaaggaggagaaggaaagagaaggaaaaaaacggagagagagcgagaaagaggaggagacgccggagggaagaaaagagaagagaaaattagagagggaaagagaaggaaagaaagtgaaaaaggggaaaatgactgggagaagaaaggagaagaggaagagagagaagaaatggagaaagaagaggacaaagaaaaagaaggaaaggaacggagagaaagagaaacaggggaaaaggacggacagaagaaagtagaagagggagaaggagaaaatgacgggaaggagaaggaaggaaaaactgaagcaaagagagaggccgaaaagcagaaagaagaaaggagccaaagggaatgccgaagaaagcgaacgatgccacaatttgccgatgagagagcagccgaactgctggtcatcgccttcg

SEQ ID NO: 78170 - DNA, 1029 bp, Heterodera glycines
atgattataaaaggtacaaaagtgattggaaaagttataagagtaattagaagaggtacaaaagtgattagaaaaagtacaaaaattgtgaaatggtacaaccatggttaacagggtaaaatcatgatttcaaaattaaataaataaggaaatggtttatgaaaaaatataattaaaaaaaatgtattaataatttttaaaaaattattaaaaaatgctttcttttattaattaaaaataaactttgaatttacaatgattgagtattattgtattgaaaataaatttttgacaaattataattaaaaaaacaaataaattctttaatttaaaaataaaaaataattaattttaaatgaatacatttatttaccaaaattatttacttcaaattaaacatttttatttattattaataaaagaaatctattttttattaataaaaacattgaaaataacgtaaaaatgcacagaaaaataatgtacaccgtccggatccgaacctgccccctcccccctcaaaatgatgcctcagaatccccaatcacacagggattctgagggcttaacgatgtaataactgaaatctgatgtcagattagtgatcagcggcctaaattggccctaaagacatatttttggaagatttttgtgaaaaaaattttccactcaaaaatcctggtcacccccctttggtcccgaagccgcccccccccaaaaattgggaatttaaaaaaaatatcagcgatttttaggccgcttccagtgattagaagaggtacaaaagtgattataagaggtacaacagtgattagaagaggtacaatggtgattagaagaggtacaaaagtgattataagaggtacaacagtgattagaagaggtgcaactgtgattagaagtggtacaacagtgattagaagaggtaaacagtgatcagaagaggtagaacagtgatgagaagaggtacaactgtgattagaagtggtacaacattgttaggagaggtacaatattgtttaaaattaa

SEQ ID NO: 78171 - DNA, 92 bp, Heterodera glycines
acattgacgaaaatgccgacactttgatcaaatcggatggatttttgcaaattgaccaaaaaatgttgtgcgaaattttggaacgcgacgaa

SEQ ID NO: 78172 - DNA, 1099 bp, Heterodera glycines
atggaaaggcaaaaatcggacacggaactttcgggtgtcagggaagatctgaaagtgtgtgagaaattaataaaaatgaaaaaattataaaaacgaaatttcagcagaaacggcacacactcaaagaaattgaagaagcgaaaacgaatttggaggacgcacttgcgaaaatcactcgcgaattgaatttgtcaaatgagcaattggtgaggaaggaaaatttggtggaggaattggagaaccaattggaagagatgcgaattgtagggacgggaaaggtaaaaattggaaaggtattcgggggaggggacaaatggacaaaatgatcacttttattggagcaatttaaacatttaattatttagcaccaatacatcatctctactgaccaaactgtcgttggtggcatcaacggaagtggcgctgtttcttcacacaaaattgacgacgcgacacttcgccaattgttcctttcctattttactgcggaaaagtctaaacaacccgaaattgcaattgtgatgtcaagaatattgggatattctgcagaagtgagtgtcttgttatttctttgggaatgatttcggttggcgcttaccaaaattttttccgaaacagtttttttgagtacgtttgggtcgaatgggcgaacgccccttcaccgattattttttcttttatctccaaaaaattggtaaagaaatgttactttacttaggcattgcatttaaagaagaataaatgaaataaaaattaacaatttacaacgaaaagaaaatgaaaaataatgcttgacaatatgaactgggaattatgatgttcaaatgagctggtgttcatttgacagcctccatttgaaccaatccgttgtgagagaaatttatggatttgccccttggatcagagacccctcccctaatatgtcacttccttttttctaggaactatctcaaatcatatcagatattatatagtacacctcctctgctcctttatatcctacttactttgccacatcttaggcccgatcacatcgcccttctcataaaatatctcttatatgtcttatacgatttgaatgattttctaaaaaatgaga

SEQ ID NO: 78173 - DNA, 505 bp, Heterodera glycines
atggcttcactgaaaaaggccaacgaacgcccgaaaaagaaattatcggtaattacaataaaatattttgccatttttataaattgattttaaataattatattgtaattttctaattttaatttagtggacaaatgtcaccgtttttctgcgcatttttcgagcaaaaaaagattttctttggaaaggcaacgaaatccaatggacgggcgaaccgttggcagaacgaatgggcattttgcgcacacggaagcaagacaaagtgaagagtttgaagaagaaagcgatcggacagttcgccaaggaatacaaagtgagtgccattttgaatttaaataaatttgaagaaaattgaaataaatgaacaaaaaaagagaaacattttgtaaaactgtcattttgacaaaaaattggcataacatttctcatttgtcagaacaaattgaacatttttgacatcattccatggcactaacaaaaaatgtttcgcttagtcactattaaa

SEQ ID NO: 78174 - DNA, 411 bp, Heterodera glycines
atgcacaaaatcattactttgtttgtcgttttgtttttgtattcttctaaattcaatggacacccaaagggtaaaaattaaattaaataaaaataaaaataattaatttaatcacaaggagaaataactgaagaggaagccgaagtctcggcagaagaaacagaagcagcgccagaagtgaaaaatggccattgcaaatttgaaggaatgcttcttttgggacaaaatgccgacaaaaatgtcgatcttttgtccattttggaaagtgccgaaaacaatgaaaaagccaaagatacggaaaggactgacaaagtgaaaataattaggccaagcgaaatccatcgattcattgaatcgctggaggggcaaacggtggccaaaaatggcatacaattcaacgtaatgtctggg

SEQ ID NO: 78175 - DNA, 2384 bp, Heterodera glycines; identical to SEQ ID NO: 14170
  unsure (1)..(2384): unsure at all n locations

SEQ ID NO: 78176 - DNA, 1498 bp, Heterodera glycines
  unsure (1)..(1498): unsure at all n locations
atgactttgatcagagacaaacacatgccgacgaaggcaaggnggaagcacgcagcggaacagagcataaccaaaccaacgaagaagtgagtactgaaatggaaaggaatcaaaagggaggataaaatgggaaaaataaaaaattaaattgaaatggctgaccgaataatggaaagcgtgtcactccaaccgctgatttaaaaagtattggaatgttcttgagcagttagtgattgcttattaccaggcatattccgacagtccaagtgcttggatgaaacaaaaaatggtgtggaggaagaggaccaagaagaagaccaggaaattgaaggacgaatcatcactgacaaagaacagagaatgaaaagaaaagttaaggcattgcccaccgaaatgctttgtaaacggggcgaaaccaaaggagaaaagcgcacggagtgaacagagccaattgaatgacagccaaaaaggggagaccgatgggaccaccggcgaacagaacgaacagcaaagaggcgaccaagttgaaggccaaggccaacacgtacagcagatagacatggtaagcccaacggacggtttcctgaaatgggaaagaaaggggagaaaagataaaaggagacaaaaacacactgaaacaatgacgacacctgaaactgttggggaatctccacatcgatgtcctggtaaaagcacggcttcagcggcacaatgctcggaagcggaggccaattgtggtcccgattctgtgccccaaagccaaggccgtttgcctgcggctgcgtttgctgacgacggttttgctcctaattgaggcaacggatgtattgtagaagaaatcagggtttttggaccaaagggaattcaatttttacccaacaaatgatattaaatattctaattccatttcaattttgagtcaatcgctcgtccgtccccgttcgcaaacgtcgtcggaagactttttgaaccataactttgttcactgtcaatcaaattaagaattgttggtgttgttcgatagctctatgtgtttattattaatttgcaaaatctcaaaaattttcgttaagtttcaaaaaagttatggccagaaggaactcaaaaacccagtaattcgaactttttttgctctgattttttttgtgcataaataaaatttttgaaaatttgcaggctaatagcatttttcgaatgctttcgaataataccaagaatggttaatttggttgagaaagaaaaaagttatggtcgaaaaattcgttcgacgacgtttcggctgacgacgttttgtcctactccgccccgttcgacctgttcccttttgctcaattcctcctgtcgacgaaacaattcatcttgtcccatgctaactgccggtggagtcgagttggtagccttaaatagggaattcaaaacaaacaatctttgcaactggttgtgagttggatggaccattaaattgcgaaaattaattggcgtcttcttgccaaatcta

SEQ ID NO: 78177 - DNA, 1423 bp, Heterodera glycines
  unsure (1)..(1423): unsure at all n locations
gctaccaactcgactccaccggcagttagcatgggacaagatgaattgtttcgtcgacaggaggaattgagcaaaagggaacaggtcgaacggggcggagtaggacaaaacgtcgtcagccgaaacgtcgtcgaacgaatttttcgaccataacttttttctttctcaaccaaattaaccattcttggtattattcgaaagcattcgaaaaatgctattagcctgcaaattttcaaaaattttatttatgcacaaaaaaaatcagagcaaaaaaagttcgaattactgggtttttgagttccttctggccataacttttttgaaacttaacgaaaatttttgagattttgcaaattaataataaacacatagagctatcgaacaacaccaacaattcttaatttgattgacagtgaacaaagttatggttcaaaaagtcttccgacgacgtttgcgaacggggacggacgagcgattgactcaaaattgaaatggaattagaatatttaatatcatttgttgggtaaaaattgaattccctttggtccaaaaaccctgatttcttctacaatacatccgttgcctcaattaggagcaaaaccgtcgtcagcaaacgcagccgcaggcaaacggccttggctttggggcacagaatcgggaccacaattggcctccgcttccgagcattgtgccgctgaagccgtgcttttaccaggacatcgatgtggagattccccaacagtttcaggtgtcgtcattgtttcagtgtgtttttgtctccttttatcttttctcccctttctttcccatttcaggaaaccgtccgttgggcttaccatgtctatctgctgtacgtgttggccttggccttcaacttggtcgcctctttgctgttcgttctgttcgccggtggtcccatcggtctcccctttttggctgtcattcaattggctctgttcactccgtgcgcttttctcctttggtttcgccccgtttacaaagcatttcggtgggcaatgccttaacttttcttttcattctctgttctttgtcagtgatgattcgtccttcaatttcctggtcttcttcttggtcctcttcctccacaccattttttgtttcatccaagcacttggactgtcggaatatgcctggtaataagcaatcactaactgctcaagaacattccaatactttttaaatcagcggttggagtgacacgctttccattattcggtcagccatttcaatttaattttttatttttcccattttatcctcccttttgattcctttccatttcagtactcacttcttcgttggtttggttatgctctgttccgctgcgtgcttccnccttgccttcgtcggcatgtgtttgtctctgatcaaagtcatttttcgtcagatttgccctccaaat

SEQ ID NO: 78178 - DNA, 103 bp, Heterodera glycines
aaaagccacatcaaatgtcgaattggatgccatcattaagacaattgggagagggaaaattccaacgaaagtcgaaaattggattttatcaccagaattataa

SEQ ID NO: 78179 - DNA, 440 bp, Heterodera glycines
atggtcctttgtccgctcagtttaaaccgacaactcgggtgcacttgcaccgtcctttccgaaagtcattcggtccaaattctgtgcaacggtacccaacccgacaaagtatgggcagttttgggcggtttcgcccccaacattgacaaattggcaatccgtcgctgcacaacgaacaaaaagagcagcatattgaagaatatgctcccgttgaaggttaattggtggctggtcacaagaaaccatgacgaacgattgactgagtttaggttcgaagccttgagatttccaactgcgcaattgcacaaatccaaccgaacgcctttgactcgttggccgattcgttggaagagctgtccctcgaaagcaatgcgctcacttcgcttccgaatctccacaaattaaagcgtgtaaaatccctcaacttcaacaacaattcg

SEQ ID NO: 78180 - DNA, 1781 bp, Heterodera glycines
  unsure (1)..(1781): unsure at all n locations
taatataagtaaaaaacaacaaatttcgtttaagttttgtcaaatattgctcaattaaaatgagatgatttaggaatgtaattggcactcaacgacttgttgagctgtgccaacaaatgccacagctgaaggtcaataatntatgggaattttcaatcaaagtgaactcctttttttgtgttaggcctttgtccacgcttccagcgcttatgcaaattgcaatttggccaaaacggaagagcgcatttacgagcaaaaagtggaagtgagcaaattggtgggaacgatggaatggatgagcgacgaaatggtggaggcaattgaggacaaattgttggaggcaacggattaataatctatattatttaaatttgatgtttcaagtttaattttcaaaattttcatggaattttgttttatttttgaaggaccgaccgaacacttacacttttgcgaaggcaatggccgagaatcagttgagcaaaagcgcgaaggatctgccagtaatcattgcgcgtccatcaatgtgagaacgattcgcaattttgttttaatagagggctgcgcaaatggcctgagtttgacggaaaggccaggaaaatattttaatgaatttcgtttttctaaaattataattgatcattttattaattacagcgttttcaggacaagctttttttcaataaacttttggggaacaggaggagtccaatggggtcgatggcgccgctgggggaaaattggaaatttttgccatatttttaataattttacacccagattctagggaaatcacacccattttttgcggtgcgctttttacttttcttactcacaatcagctgattgatcttaatacacaattatctttcagcattggtgcaatttggcaagaaccattgccgggatggattgacaatttgaatggggccacgggcatatttgccagtgttgggaagggtcagtcagcatttgtctgttgtttttgcaatcaaaatttgatattgtattaaaaatttacgggggagtaaaagagagaaaaagagagtgagacggtgagagagagtggggaaaatgagagaaccaatacgggaacagacagttaaagactggacgagagatcggttttctccgcgttaatgggaaagtattttaaataattacgtgactatttatttatttatatttttaatcactttaggactgctgacagatatgtgtggtgatatgaaatccgttgcggatattattcccgtcgacatcgttgccaatatgctcatcgtggcagccgcgtgtcgctcacagatggggtcgcacaataataaattcaaaaatacacaaaattacaatgaaataatcaactcgaaaataaaagcagcgcctcgggtattgtgcccccactaaaaatcgaacatttccgccccgacatttgagcccggatattaatgtcccattccttaagggcaattttcggacatttgctccccttaagaatatttgcgcctcaatcattttaaatttatgttttgtgtcctgatcatacctaaatttaattttactattttaatcggcccaaatattttattatttccaatagttcaaattttatagaaattaaaatcattggcttggtcaaggccatacgagctgtacatttatagctaccaatcttttatccaataatcggctattcgaaattgaatggcattgaaatggcgcccgctgttcgtctcatcatttcgtttttattcatctcataaagcgtaatcaattccttcatc

SEQ ID NO: 78181 - DNA, 1563 bp, Heterodera glycines
atgaatcccctaattactttaattattcatcccttcagtttgctgatcacaggtgccactggctttttgggtaaagtgctgcttgaaaatttgttattcacgcagccaaaaattgataaaatttttctgctcatccgtccgttaaacaatcaaacaattaaagagcggctcgataatttgcttgaggcattttaataatttaaaggtgttttttaaaataaaaaaattaagagcccattattcaaccgaattcggtgtgtcgatgaaacacgcttaaataaattggtcccaatcagtggtgacctgaaaatggaagggattggcattaatgagcaggaccgtactgcgctgatcaaccaagttacggtaatacgctaacccattaagttttttaattatttaatttttataaacttaaaagttaaattagcactaatttttttctcattaatttaagtttgtgttccattgcgccgctaccgtcaaatttgacgaggcccttaaagttgccattcaaatgtaaaagcaaattaagatgggggggggacatgacattgataatataaagtaaaaaacaacaaatttcgtttaagttttgtcaattattgctcaattaaaatgagatgatttaggaatgtaattggcactcaacgacttgttgagctgtgccaacaaatgccacagctgaaggtcaataatttatgggaattttcaatcaaagtgaactcctttttttgtgttaggcctttgtccacgcttccagcgcttatgcaaattgcaatttggccaaaacggaagagcgcatttacgagcaaaaagtggaagtgagcaaattggtgggaacgatggaatggatgagcgacgaaatggtggtggcaattgaggacaaattgttggaggcaacggattaataatctatattatttaaatttgatgtttcaagtttaattttcaaaattttcatggaattttgttttatttttgaaggaccgaccgaacacttacacttttgcgaaggcaatggccgagaatcagttgagcaaaagcgcgaaggatctgccagtaatcattgcgcgtccatcaatgtgagaacgattcgcaattttgttttaatagagggctgcgcaaatggcctgagtttgacagaaaggcccggaaaacaatttccaaaaatattttaatgaatttcgtttttctaaaattataattgatcattttattaattacagcgttttcaagacaagctttttttcaataaacttttggggaacaggaggagtccaatggggtcgatggcgccgctgggggaaaattggaaatttttgccatatttttaataattttacacccagattctagggaaatcacacccattttttgcggtgcgctttttacttttcttactcacaatcagctgattgatcttaatacacaattatttttcagcattggtgcaatttggcaagaaccattgccgggatggattgacaatttgaatgcgggccacgggcatatttgccagggttgggaaggggtcagtcagcatttgtctgttgtttttgc

SEQ ID NO: 78182 - DNA, 497 bp, Heterodera glycines
atgtcgtcaaaacccgaaactttggtggagcggatgaagcatttgttgagctcgggcgatgacgcggacgttctctttttggtgggggaaggagagggaaaggaggcgagttttaaggggaaattgttacaaatttaaatgcttaattaatttaaattaattttaatttaatattgttttctttaagcatgtgcccgcgcacagagcgattctgaattcggcttcggacgtttttgaagcgatgttccgttttgacaccacaaaaaatgcgactgactatgaatcagcggctggagaaggtgtgaaaaaacaacaaaaaattttgtatttaaaaaaaaaaaatttaatttgaagcgaagggtcccgtagaagtcactgacatcgatgcgcatgtgttcaaagtgatgctcaacttcatttatgcggatgatttaagtgaattgaatggagacaacgcaatggcagtgctttacacgggccagaaaattagtttttaa

SEQ ID NO: 78183 - DNA, 603 bp, Heterodera glycines
atggtcagagaaatccgaaagagagatgagcggaaaacgaattttggacagtgccaggccgaggacaacacgacgattctctgccgaacattcggtgccattttgaaggcattgcgcgtcagcccaacggagtgcctgaaaatgaatttcattcaaaaatttgtacattattagtacagcattccaaataatgagttcgccgctgatgattttcaactggtcacgttcgataatttcatacagcaaattttgttccatttccaaaaaggcatccgattggatcagcgattccgcattttggtcaatgtaatccaagcagcgacaagagaaatcctcaaaaaaaagaaaaaaaataagagatcgatttgatctgattttttgtaccaaacttcaaagaaaaaattaaaatttgtatatgacaaaaattattgattgattttaatttaatgataaaatggaaacaaaatttcatgctttttcgctgagaaggcgagattggtcataagcgagaaacacattgccgagctcggaaatgggaacatttcaacacgctttggccaatgcattaggattatactttttggctaaacataaaaaaataaa

SEQ ID NO: 78184 - DNA, 337 bp, Heterodera glycines
gatttctcttgtcgctgcttggattacattgaccaaaatgcggaatcgctgatccaatcggatgcctttttggaaatggaacaaaatttgctgtatgaaattatcgaacgtgaccagttgaaaatcatcagcggcgaactcattatttggaatgctgtactaataatgtacaaatttttgaatgaaattcattttcaggcactccgttgggctgacgcgcaatgccttcaaaatggcaccgaatgttcggcagagaatcgtcgtgttgtcctcggcctggcactgtccaaaattcgttttccgctcatctctctttcggatttctctgaccatgttg

SEQ ID NO: 78185 - DNA, 48 bp, Heterodera glycines; identical to SEQ ID NO: 62879

SEQ ID NO: 78186 - DNA, 1095 bp, Heterodera glycines
atgtacaaatttttgaatgaaattcattttcaggcactccgttgggctgacgcgcaatgccttcaaaatggcaccgaatgttcggcagagaatcgtcgtgttgtcctcggcctggcactgtccaaaattcgttttccgctcatctctctttcggatttctctgaccatgttggtaggtcgtccgtcaatacaatattttaaataatatttattttaaaattcctatttttgttagtgccttccggcgtgttgaccagtgacgagttggtcggcatttttctgacccatgcccacgcggaccgtcgtgccaactgcgagttgtaccccaaccaatttcccacccaccatcgcactctgatcgggaaccggcttttttttctacgaaaaattgattagtcgataaagctattttgcaaattgttctgatttttaaccaaaaaattcattaaatttatatcttttctttcttttgtcgctttaagttttgacttttgaaattaacaacaatgaaagatcaaacaaactttttttggcattttttgcgatttaaatttttgacaattttattgcacatcaacattatttaatgtgcaagaaaaatttacgcatttttcccctgaacatttcggcgacgggatcgaaagtttaaaattaacttttttttttcagtatatcatacgtatactgtacccaaagcaaagtagtttttgaaaatttttcaggcaaatgaccttatcaaaaaagtttttgccaagaccatacgtttcggcatcggtaagggcaaatctattggatttattggtcataaatctgcggattatttttcttcaacggaaatatgtattgaaaaaatgaaattttatctttctatatttaaaaagcaaaaaaaaaaaaatgttggataatctgttaccttcagaggcagtaagggaacgaacctgagagtaaaaagtgttgaggaattaatttttaaaaatgagagcatacatgtacaaggggtgcgccagtcagacccccataccgtcggacgtttggcgcagggggggtgcgcccgacgcaccccccttgtccatgtatgaatgagagaatgccaaa

SEQ ID NO: 78187 - DNA, 1086 bp, Heterodera glycines
atgtacaaatataatttttttttcgcagttccttctggcgttttaacatcagaggaatctgtcggcatttgtcagtttcatttgcctgggcttttatctccggtggcatttccaagccatgcacggatttccgcgtggaataatacccccaggggaaatgcgggaacactcgcaatggaaattacgaaattttctcaatttgcgcgaagggacgagggaaagtgccgacttagcaaaggcaaagtgcacataaaggcacttccgtggaaaatatgtgccaaaataaatacgacgaaaaacgaaaatggcaccaccgaaaagtgtttgggctttttccttcagtgcaccgcgccaagagaaggtgggataatgataattaatggtgttttaattctaattaattattttttattttattataagacccgaaatggagttgcaaatgttcagcgacatttcgaatcatttctcaaaagcgcggcacggagcatttaattggaaaacgcaatgatcacatttttaacaacaaaatgaacactttgggtttctcaaatttcatcactttttctgtaagaaacaattaagagatgtctttttttataattgaccataattaaggaattgatggaaaaggacaaaggattttatgacaaagacggggacaaagtgacattggccatcgatgttattgtgaaggaagaaaaagcggataaattggattattcaaatccaaacaaaacaaacgggaaaattgtgatggaaattggcaaattgactgagttttcgcgagagatttgtttgagtgaacggagcagcgaaatcaaacaaataaagggactttcgtggaagatattggcactgataatcaatcagaataataaaagcagcgaaaagtgtttggcattttaccttttgtgtgccggctcaaaaagtgggcacaaaatatggatttatcccattatttaaattggcaattaaggtgaaaattggagttgcaaatgttcggccacaattcaaattgtctcacaaaagggcggggcggtgaatttaattgggcaattcaatggccgaattttcaacaataaa

SEQ ID NO: 78188 - DNA, 719 bp, Heterodera glycines
atggacccgaacagaggattatatgaccaaaatgaggacaaagtgacattggccatcgatgtcattgtggaagaacaaataacggagcgattcatcatttccgaaccaaacaaatccaacgggacaattgaaatggaaattgacaaattgtcggaatttgcgcgagaagtttcacagagtgaacggagcagcgaaaccatacaaataatgggattgtcatggaaaatagtgacagaaattaatacgaaaaatgacagaaatggaaaatgtttgtgctttttcctgtgtggcacttaaatacataattgaggttttttttgctcaaatcgactaaattgattcccccaccgccggcgggactcaacttgagacttgagcatacatttttgcggggggggggtcacaaattttagaaaatttctcaactagcacaaggttgtctatggcgcccagttggcgtaggttcggcagcgcccagtttgccccgatctcgcaattgtctccccctccgtcctaatttttatctcattaagatgaaaattggagccgcaaatgtatggcaacatttcgaattgtttctcaaatgatcgaccttggggacttctcaagaaaatttgatgaaaagagaatttttagtgctgggaataagaaccgaggatttactaatttcatcacttttgcggtgagtgataattaaaatttaaaagttcattttctca

SEQ ID NO: 78189 - DNA, 143 bp, Heterodera glycines
cataatgcactgttgcaactgaagcgtggctatggctcatatgaatacgaccgaatcacggcactccattccaatatcaatatgatgccatccgcgcacagtgggccaacatttccattatggcacagagaatacaataaacg

SEQ ID NO: 78190 - DNA, 72 bp, Heterodera glycines; identical to SEQ ID NO: 59613

SEQ ID NO: 78191 - DNA, 1427 bp, Heterodera glycines
atgaaagtggttgcgctggtgtcgggcggcaaggacagctgcttcaacatgatgcgatgtgcggaggaagggcacgaggtggtctgtgtggccaatttgcatccaccgaacgaggtagaaaagcaaaatttcaaaattccatattttacaaaatgcaaaatttccggtaatggtcccgttttgtcgcccattttaaatttaaatttattttcaaaagtcgtgtaaatatttttcaaggcttttcggggccgcttatcacaaatccggcacccgtttgactaactcagaacctcggattttttgtcagattctgaccctgggtttggaactggtcgaaatggatggatgctcttatgcagtttatttagccccacaaaattttttcacttttcaagcaaaaaacacagcaatatataggtttacggggtcacttgccacgaatctggaaccatttcgactaatttcgaaccccgaacccgaattcggataaaaagtcgaaaattcacttaccaaaattcatatttgcccaaaatctatttaaatttacgaaatggatgctggattcggatcatccatcaaccacaaaaatctctaaaaaaatattttcacaaccaaaattagcaaattttcagattgccgagttggacagttacatgtaccaaagtgtgggcagtgagggaatcaaggttagtgagactaaatatgtatgctttaaaataaagaaattgaatgcaatttaaatttttttaatgcatttgcaatccaaaaattaaaaaaaaggtgccataattttttttaattttcggcttcaaatttttaattttccttaaatttcattttttgcatttccgagggctcctttgtttggaaaaaaactcctaggcctgttttcctgcaattttcagttttacgcggatgcccttggcctgccgctgttccaacgcaaaatttcggggcgtccaaaatgtgtagagagcaacacttatgtgcaggacgaggaggacgaagtggaggatttgtaccaccttttgaagacggtcaaagaatgggacccggaaattcggggtgattttttaatttaactgtgcattttttacatcttttggcaaacaaaaaaatttttgctcaattttcttaaataaaatttcagaattaaatttacaaaaaaagaactaaaggaaaatggcattttttgacgaacgatagcaaaatgaaaatttaaaaaaacctacaatttcatcaaatatttattggaaatgaattattttttggattttaaatttaattttttgtttttaggcgtttccgcgggcgcgataaacagcacttatcaaaaattgcgtgttgaacatgtgtgcgaacggcttggactcgtcccgctgtgcttcctgtgggaattggaccaactccaactgttggacgccatg

SEQ ID NO: 78192 - DNA, 225 bp, Heterodera glycines
ggcacccccacaaagtgtccaagccacgaaatgtccaaaagagtaaaaacccacgaaatgtccaaaatttttcaaaatttataaaaacaaaatgagtctaatttaggatttttagggttttcggggtcgctgaatacgaatataccctttatattacgccttgcctaaccttaggcccatccgaataataaaaaaactcaatttcgagacttggacattttgtgg

SEQ ID NO: 78193 - DNA, 794 bp, Heterodera glycines
atggcccaagtgttttggggtcagcccaagtgcggcaactttgatcagcacggccttcacaccagcggaaatctgcgaggacggcacaaaattttttagcaatttgaaatttaagaaaaaaaattttttttttttaatttttgagtaaactattactagtaaaacatgtaagaattcaaatttttcaggtgggagagggcaaactgttccccctcttcaattgccattgaattcttctcaaacaataagaaaaagagaagctacgaagaatggacgaacatttgcggattttggtattcaaacagggaaagtaaaaagggctactaatttttgttttttttttttgaaaacatggattttttcttaatctcacagaaaactgtaagaaaaaacaattagaaaaaggaaaacacgaaaaattttaaactaaaaaattttctgtggcattttttcacatcgcatcaaaaagagcagcatttttcaatgctttttggatcaacattctcgagtttgcaaaatgtttttgtgtaatttttcataaatcccaaagaacagtaaaaccggaaaaactcaaaattttcttttgtcattttgtgcagcaccattcactgaccatggcgtccaacagttggagttggtccaattcccacaggaagcacagcgggacgagtccaagccgttcgcacacatgttcaacacgcaatttttgataagtgctgtttatcgcgcccgcggaaacgcctaaaaacaaaaaattaaatttaaaatccaaaaaataattcatttccaataaa

SEQ ID NO: 78194 - DNA, 327 bp, Heterodera glycines
atgcgaaacaccaaaaaatgcgaaaggcaaaatgcgaaacgtcggcccatccctgatccgtactattaccaaattgagcaaaatttttggaaaattggtgagattggtctttgagggggtaccaacaaggaaaatcgaaaattttcagcaaactttttttccttaaaaatttcaggtgtggtgggacctttggaggggaagggagtaaggacctcgcccccttttgggactgtccctgacctgtacatgggtccaggtacaggtcgatctctaaaagaagcaaaaccgaaacacacatatgtgaaccttttattgaatcaaacataa

SEQ ID NO: 78195 - DNA, 104 bp, Heterodera glycines
gtggaaacacttataccaattgtgaataacagctgcacagtgagcatttcaaacggagaagaggcaatgagcaaagattgctattaatatcgttttgcaataaa

SEQ ID NO: 78196 - DNA, 525 bp, Heterodera glycines
ttcaattgacccctccgacgatggcttttccttcaaagaccgccatggcttctctctaatgttggctaaattggctgagctgctcgctgaggacactggagaaagttgcaatttgagtcggaaaacaatttttgagttgttgggcagcagttcggaatggaatttgggcttaattggtccattgcttcccaaatattcgtttttttatgacaaagcggtaatgttgcacttcttccttttctggcattttcatttcttcaaaaagggcttctcggagcttctccgttcgctctttccatcgctcattcgacgtgatcatcagccgtgtgccgactcggccatttcctcctttgtcgaagcattgttcggcactgactcattctcggagaccatttcccgggcgtttgaccagttcattccacaccttttggttataaatggtccaatcattgcatctgttaatttactttcccgttaaggattcccgtctttcggcacgaaatttcttctgtaccttctgcaaaa

SEQ ID NO: 78197 - DNA, 699 bp, Heterodera glycines
atgacaaattctacccattttgtggttaaaatttcaaaaattaaggtaaaatgaaggtccggcggtgccgataatcgccgccggaaaattttttggaaattgtaataaaatatggtaggaaaagttgttaaattttcaaaaaatttactatttatttcaaaaaaataaatcgcaaaaaaggcaaaaaaatgctccaaaaagttcaagataaaagcttcaaaccaagttaaaaaacctggaccgggacttaccgggaccagaaaagtcgggaccgggacctcgattttcgtccgggactgggaccaaccgggaattttcccaagtgaaattttttgaaaaaaaaatttgaaaatttgagtgcactttgttacgaaaaattgcctatattcaaaaatgtacccataaaattttttaattctcgtttgtggggagaaattagaagaatttttccattatgcaattttgagtgtaatatgttaacagaaaataataaactgaagcattcgttttaaaaattaaattttcaaatatattcattcttagggggtggaaatttcgcatttcgcgccaaagagcgaaatgcgaaaagcgaaatgcgaaacgccaaaaaatgcgaaaggcgaaatgcgaaaagtgaaacgtcggcccatccctgatccatatccaactcatctaacaagggaacattccgagctgtga

SEQ ID NO: 78198 - DNA, 269 bp, Heterodera glycines
atggcatcggttcaaaaagacagaagagagcatcattcttcagtgggttttattgatatatttatgaggtcaaacgaaaataaatgaacggcaaaaatatgacccaaaaaattaaaatttgaatacatcaatttatttcagctaaattgtaattgtgacctaaaaatagatatacaggaagaagaaagcaaaattcaaaaaatcctaattaagaaatctcgtttttgactcaattctgtgctaaagcattagttaaacggagcaataaa

SEQ ID NO: 78199 - DNA, 1297 bp, Heterodera glycines
atgtcaatttctaccagttcaacaaatgctgatttcacaccatcaataggtgaaggagttaatgaaatgggaaaaggttgaaaataaatggatttttttggggaagggagtaaataaatattataattaaatcagggaattaaatttataaattttcagaagttaatgacgattcaattagtttggatgaagattggcaatttgatagaaaaaatgaaactgttgctgatcggcaacaattgctgatggtgggcaatgaaagaagcttcaatgaggcatttacatatatttttcgacaaaattatttatttttaaaggaatttcatgaaagttatgctaagaataagatgaaaatggaattcaaaattaccaaacttgtacttgagaaggtaagttttacaaagaaaagtttaaaaatccccatttaacgagcagaagaaaaaccattgattttaagcgggacaaaatacttcgcaaagtcaaacgcacactgtcgaattcaaatccttctgagttaaggcagtttccaacaatatgcgaaaattcgttccgcagatcaccattgtcttaaaaaaacttttgaggtaagggaagttcggctgtgctgatattgcacaaaaaagtcccagcgcctcgtgctatcgacacccccccccccctccacccccgtgatcggcgacttgaatgatgactctctcctgtatttacggaatttagatccatggcatatggatattttgtcgttgggccgccataacatttgccaaacaattttacaaaaatacaggtggagaaaaacagaagggcgggaaacgaaggcattggttgtgtgaaaatatactaataaattaaagaggctgaaataatttaaaatttaactcaattaaaaaaaaattaaatttaaggaaaaaatttatattttgaaagtacatcaattggggaagtgagaaggaatgtgatgaatcagtggccaaatcagcgagggacacataattatttatttttgtgcgaaatatatttatgttaatgagcttatttgtggtagaagcattttgtaattgaacaaatatttaaataattaggacggattgagtacaaacagttatcagaacagggatttgccggggccagaagcctggggaccgggaactgggaggaccaactgggaaaaacaacttaattaaattaataatttttttaagttaaaaattaaacttttctagccgacatttgcggaccgacatttgtgactaaattatcaaaaaaaagaaaaaaaaaatttaaaatgaattttcaa

SEQ ID NO: 78200 - DNA, 630 bp, Heterodera glycines
atgtttaaattgctaattttgtcattttttattctttttgccttctttggcttcgctgatggttagtcaaatttagggtcattactagggatgcgacttttagtgacgaaaaatcccaaaataattaactaaaatagtgagtaaaaatgccaaaatattgaagaaatagtgacgaagtagccaaaatagtgatttctagtgaccgatagtgacatcagaatcgaaaatttttaacgcagaaatgcgttttttgagctcctttcttcaaatcaagtgagaaaaaaatttagttaaaacctaaaaatcgcatccctcctagtcattacatataattaattgggtttttagttgtcggaacaccgatacaagaacaaggtgattaagctaaataaaaaaaatttaaaataataatatctaggtaataattctttttgtaccgacaattttgaatcaaattgtttagaatttgcaaaaatggtggcaaagcgtgccgatgggtttgatgagtgcttgttggcagcagggtaattcaaattataagcattttgatcattttatttcagtgctacaaattgtgctggtcgtttagcttgttgtgaaaagtatggacaacaaagttgcatttgttga

SEQ ID NO: 78201 - DNA, 513 bp, Heterodera glycines
atgacattattttttatttattcgttgaaaaaaacgtgaggctcaaaattgacttggtgtgttaagttggtagctaaatatttttacaaaatttataataagttatttaatttatttctgtcgttttgtggactttcttaataatgttgcttcctaaatcttttcattaattaataaacaaatgaaatgatttaacttttttaaacattattttgggttttattatttatttccaaaaaaaaattaatgactgttcattttaaatttatccgtttgtgtgaatggcaagacaaagatgcgggcactggacactgagcattggtacaaagaaatgccatgaaattggtggtataactaattgaaaaaattaaatttgatattattactaaaaaaatttaattaaaaatatgaaaaatttttatagatcaaaagtgtcgattaatagcgtatattaatccaaaaaacttactttaaaaagtaaattaaaattttgaacacaaatttttcaataaa

SEQ ID NO: 78202 - DNA, 162 bp, Heterodera glycines
gtgttgggccaggaggtcagctacggttcggatgagctggcggatgtgctctcccttcagtcctatgacggtcattattcgtattacgatgccaacaatgattgggaaaatgattacgatgaagacattgattatgatttgtacgactccgattattattag

SEQ ID NO: 78203 - DNA, 259 bp, Heterodera glycines
ccattttagtgcgagcacagccgatcgggtggagaaattcgcaattgggttcagttgtctgttcggtcatttcgactatggccttggcacttccgatgcaaaagcgatgaattggcacaatttgctccattctttgctcatttcgtgcccccaaattaaaaccattgacgtcaaaattttcttcgaatttcgtccgggcgaacacgagggattgtgcaccattttgctgaaatggtcaccccaatttgtggagacctgc

SEQ ID NO: 78204 - DNA, 451 bp, Heterodera glycines
tatttttcgaaaagctcaatcgcttggcaattactattttgagaatatttctacgatttccaaaatgattgtttttccacttcagttacaccaatgagaagctgcaacagttgttcaacaacacaatgtttgtgctggaacaggaggagtaccaaaaggagggcattgagtggcaattcatcgactttggacacgacttgcagccgaccattgaactcattgaaaaggtgtggtgcggatgacggactgaattttcagagtgtattctgtttaatcggatatgcggctgataattagccgaaaccgaaaatcccttttagtcgaaaaatgaagctccccaaaaaaatattaaaatttagcccaccggcattttggcattgctggacgagcagtgcattttcccgaaagaagcggacaaatcgttggtggaaaagctgatcttgcaccatga

SEQ ID NO: 78205 - DNA, 2441 bp, Heterodera glycines
atggtcaaacgcacatcaatcaccgaccccgcattacatgttagtcacatttccactcatctgtcattttaatcggaaattgacaccggaaaaacagatctccaaaaaaaatatttgaattttaacataacgctgtttttaggctgaatgggccagcaaacggctgatttgggtgcctcacgaaacagagggcttcgtcaaggtataattattttttatgacaccaaaattaaaatttttttcaccaaaaggccagcattttgcgtgacgacagcgagacgtacacggtggagttgtgtgagaacggccaacagaccaagctgagcaaggacgactgcgagaagatgaatccgccaaaatttgacaaggtactccttttttggacacccatttttagaaaattcatttttgggattaattttaaatgccttttcaggtggaggacatggccgacttgacatggctgaacgagccttccgtgttggacaatttgaagcagcgctattactctgatctcatttatgtgcgttaattagtttcaaatcggtgattgatgccaaagtgcaatttcattgcagaaaaatgccataaaaaatttgtttgttttttagacatattcgggtctgttctgtgtggtggtcaacccgtacaagaaactgcccatttactccgaaacactgatcgaggcgtacaagggcaagaagcggcacgagcgtccgccccacgtgttcgccattgccgactgtgcataccgttcgatgctgcagggtaatcatttttgagacaaattgttgtaatacaaacaatacaatctcaacaatgttagttaccttaaccaatgagaggcgggggaaaggcaacgacggccctaaacttaagaatttcggggtacccaatggaaaaatctaaagccttttcctcatttttttaagaaatttttacttttttttgagtgtttgcgtacttctggggatttggtttatgcgtaaatttcttacattagctaatttattaaaattttcttcctttaacaccgccaattttcaatgtttttgctagtctcaaaattcaaaaacaaatattgcaaatttctcaatgtgttcatgttgttagaccacgaggaccagtccattctgtgcaccggcgagtcgggcgcgggcaaaacggagaacaccaaaaaggtcattcaatacctcgcgcacgtggcgggcgccactcggcacgcaggcaacgccaaaatcaactcgtcctccacacattcggtgtcttcaccggccagggttattcttaattttatttttatttttttattccgctaaagcgaccattaaagtgccatgcctgaatttgtcatacctttttaattcatattttggtcgtaatttaatgggtttaatcattgagctttgatcaatgtcaacggccattaatttatgtcaatttcagagtcattcctcggctgaccacatcaacatggtgggcgagctggagcagcaattgctgcaggccaaccccatcctggaggcatttgggaacagcaaaacagtgaagaatgacaactcgtcacgatttgtacgaattcaccgcattcattttttcattgtctatttattattttaccattcacattttcagggcaaattcattcggatcaatttcgacatgtccggctacatttccggtgcaaacattgaattctatttgctggagaagtcgcgcacttgtcgccaggcgacggatgaacgctcttttcacattttttaccaatttttgcgcggcacatcgcccgaggagaaaagtgtgattttgttgggatttttacaaacatgcaaatttaaacattttagtattaaatttaaaaaattttaatttggctaatttgaaataaaattaaattcagccaattttttgctggaggacgtcagccggtacgcctttttgaacaacaattacatttcgttgccgaatgtggacgattcggccgaatttcacaacactgttcgctcaatgaagattatgggcttccatgacgaggaaattaattgtaaaatttttaattccaaaaaacattaaaaattaaattttcctttttttcagccgttcttcgcatggtcagcgcggtgttgttgttcggcaacattgagttcaagcaggagaagaacacggaccaggccacgcttcctgacgacactggtgagtgccatcattattaccagtgtcctggtccaattttttcaaacccaaattttgcagtctcgcagaagatttgccatttgctcgggctgccggtggccgagttcagcaaggcgttcctgaggcccaagctcaaggtgtgtgaatcggcatgggctgacttggctcacttcatggacatgcgtatgaattgggatgtgggaaacattgtcccgggatttttggaagtttggtgtatggaactttga

SEQ ID NO: 78206 - DNA, 598 bp, Heterodera glycines
atggaagacagcgtaaatccgagtgccaatttgaacagtgtcacttttgatctgtgagtttcgataaatccattgggtgagcagcagcaatagcatttgattttgccgaaaaataaaatatttaattcattttaggccattgtcgccaccagcggaagaagaaaaagaagaagataaagcggatcaaagcaacggaaatgtcgtctgattaagtgtgcggaaatgaataattaattatatttgagaaatgatcgatctcaatttgttgtgcttattttctctcagaaatgcttttgttaattgtttcgttccaattatataaaaatatgcttttttgttgagcaatttattaataattagggtttgtaatagagaccggataagagggtcggtcgaacggtttcggttaaaaaaccgaaaaaaccgaagaaaaattttcggtataccgtttcggtttcggtttttttgaatttttttatcaactaatatatttttctagaatcttgcaggctattagagaacacttagacctattttgcggcgccaaaatgtcccgcgccaaagtgaccccgacccaaaaaattttggtagaaaaaaa

SEQ ID NO: 78207 - DNA, 783 bp, Heterodera glycines
  unsure (1)..(783): unsure at all n locations
atgaatggacttgccgatgagtcggttccgtttggtgatcatttgaaaagtggatttggactcgtggagcacaatgccatgcaacccaatctgttttggaattttcattaccttttccccatgttttctccatccacctgcgttttgttcggtgcgtctccgactctcatcagtgctccgtggtaatcaaccctcaacaaccgttcgagcattcgcaggccgatgttattgagcacctttttgaagtaagacaaccacacagttgtagggggaccgacttgcttctacctaaagaaatgaaactgactcattcaaaggccgcccaactcgtacctaagtccgtacattcttcancccgcccgctttcgcagcaattctccggcgcccgacgccgaatccgacgctcacgtcgtttttgtttttcaaaattgaatattttgactcttttttcagcataattgtccatttcagtcgtcaaaataaaataatagtgagttttagagaaaagtttcaaataatttatttgttgtacataactatcaaatgatttcatttatgtcaaaaatacagatcatattacaacaacggaaaagaaaatattcaccatcaatggtgacaaagtgttccttggttttaattcggtgtcactttccatcagtgaggttgaagaattgacttgaacaaattgtctaacaatattagtggaaaaggaaggaaaactaatgggactggcagaggttaaacaacccaaaaacaacataatatatgagttattataataaa

SEQ ID NO: 78208 - DNA, 1144 bp, Heterodera glycines
atggggggacaaactgcattaggtattactgtgccaaaaaaatattgtcatttgtactttttctctctcccttctgctatttaaacttaactttttcttcacttacctatcactttttgggactaggtcgttttggcgccagccaagttttcggacgataactttatctttctaacacatttagagcatatattatttacctattctaaattttaatgaccaacgaagcaggaaattggtgtttgattgaaagtgaccctggccttttcacagaattggtatttcaattggcaccataaaattatgacttttttggatttatttggtcaatatgtggggagtatttttgaacacggcgattcaattttgggctccaagtacaaataagtttattatttatttagtaatcagaacgccaaaactttgcaaaactgaacattttttggggattttcccttgtaaaaacggaagagccgatctcgagttaaaaagcattttgataaaaaacaaagcatcatcctataggttgggttaaaatatgtagcctatacaaaattttaagaaaagttacccacaggaaaaaatcttttcccagggcaaagttttttctttttctctcattttgacgcactatttccatgtctctaacatataagataacacatggttcatttttttgccaataaacaatttttttaaacttttgactaattgagaaatattcttcagaattttcccttcaaaatgagcataaaatggttttatttggtctattattgaaaaagttataagctaaaaaaaattcataaaatcaagggtaaaataactagggatggtaattatatgcacataaaatcgcaaaatatgcgcataaaatatgcaccaaaaattgcaaaatatgcacataaaaagtgaaaaatatgcacataaatttttccaaattgagggcaaattttcaaattttaatatttatttattttgaagaaaattgagcaaaaaaaggagaattttctattttctgactatttttggcataaaattccaattttttaaaaaattacttttttaccagaaaatatacccaaaaatgtgatttttttgaaaaattttcggtcattagagcccaaatggccgcttcaataaa

SEQ ID NO: 78209 - DNA, 65 bp, Heterodera glycines
aaaaaattcaaattttaatttatatcaagtgaaaataatacaaaattatttggttttttataata

SEQ ID NO: 78210 - DNA, 734 bp, Heterodera glycines
gtagtccttacaacctcgtatccgaacgtgccgtggaacgctacgacctcgaaggactagtgaatcgaaacaatatttaccggttaagcggcgtcggggggacgcccgtgactacatgcgggaggtcattttattcttattaattttgtgaaatatatttatagttattttttttatcttaaaaatgccttttaattaatttaaaaaatgaactccgctttaaggtgtttaccctccgcagtcccacccttgaccctatttcctcattaaaatccgactttaatgatgaataaggacaaattagcaagcactaagggttcattaagatattaaatatgaattaagacataatttagtcgtatcgaaatacatcaccactgttgaaaactaacagctttttatttatcattaaaattctaaaccagttgaattattattttttgctcttccacaatttgcagcggtcgcattcatgcgaatttctaagatttttacttattttggcctacaatgctttttcaactttgggtattattatgaaaatgaagtaaaaataatttttaatttttttgttattggagtaatctattcactataaaatttatttcaggccgattccaatgcccaacaacgatttgatgagtggaaagacctttatttatgggaaaataactaataaaattatgttttatcctcagagacaaggtattccaaaagatcatagtctcgcttag

SEQ ID NO: 78211 - DNA, 1062 bp, Heterodera glycines
atgcgccggtgttcaactcaaaaaacagctcgtcgtctaacatttattttaaaagttattaaataataaaaatattaataataccaaaagatgttcgtcatatgacaaaaattcccatttaaaattatatatgaaaataaaaattattaatacttttatttaaatttttcttttttctgcacatcactgttgtcttaaaacgtaaagttttcaaccaatcaaaaatataaagactgagaagcaacttgtattattaaaaaagagaggattgctaaaatgtcttttttctccatcatttccaatcaaagaacaattcaatttttattgcttatggttttattaaaaatgacttaaatcgctaaatttggtcatttttggacaaatttgtttttattatgttttatgttttttgaaaaatttccgagttccgaattgcgatttccgacttccgaaaaatttttgggcctcggaattctgatttccgatttccgaaaaattttggacccccggaattccgatttccgaaaatttttggggcctcggaatgccatccctgctatgtaccttaaaaagttacaggctatttgtactccctcgtctttgtcctaaaagcctttgcttgggtccatcaattccttaattgcacaaattgattggtcaattaatgcttctggtcaattaattgtcacacgccgtaaaagtggtaaagtgtgggaatcccgagctgttcgacgtgttgttaaaaacttcgccattaaaatctaaaatctctattcaaatccgccacttcgctctttaataaattgccaatgtcactttgtcctctttttaactcagtaaattattgtttgcgttttgcttcagacggtgactggacaatcggacagtggacaatcggacagtggacaatcggacagtggacaatcggacagtggacaatccgacagtgaggacaatcggacagaagtggacaatcggacagtggacaatccgacagtggacaatccgacagtgaggacaatcggacagaagtggacaatcggacagtcaaatataaaatag

SEQ ID NO: 78212 - DNA, 278 bp, Heterodera glycines
atggaccttaacaatggtttttacgacagggaagaagacaaagtgaaattgaccatcgatctcacaactgttgatgaaccaaaagtggacaaattcaatttggatcaaagcaattcgaaaggcacactctttatggaaattgaaaaagtgtcggaatttgcgcgagaaatctttgagagtgaacgtaaaagcgaaactgtgcacatcaaaggaatgccatggaaaatatgggcagaaataaaaaagaaagatgaaagcactgacaaaaatgagaaatg

SEQ ID NO: 78213 - DNA, 456 bp, Heterodera glycines
atgcttggcccggcactgttcaaaattcgctttccgcttttgtcaaatgaggaatttacgaggaaaattggtaaaaaataagtcaaaatttcaaactcattctctgatgagatgccgtaaaatattcattgtttttgtggcgattttttaaaatgtttttaaaaatttatttttcaataagttaatacatatttacagttcccttcggtgttttgtcaaaagatgaagtgatcgccgtttatcagttcaaattccttccaaattatcatgggatttccgacggatttttcccaatgcaatttccgactaatggacggatttccgatcggaaaaaggcacacttttaattgacattgaaaaagtgtcagaatttgcacgagaggaggttgagagcagtcggtacagcgaaaaagtgtacataaatggattgccatggaatatatgggcaaaaataaa

SEQ ID NO: 78214 - DNA, 1214 bp, Heterodera glycines
atggcgcttgcggaaactgtggcgaacatggccaccggcgtgcggaatgcccgcaagcagtttgtgagtgctgtggccaggccggccactgggtgcagcagtgcaaaatcgaggctgcagccaaatgttgcgttgcatgttctgtccgccagcacaaggcggcggaatgttgggtattggaatcttggggtaattattaatcccgcttaaacaaagcccattgctataattattttttttagtccgctcgcggatccgagaaccagactgctgtttgttggaaaattttgtggtgcggcgcgctgctgagactgcagacggattttgcgtcctttgtttccaggtttttttcgctttaaaatgttcatttgccaaaagatactttatcttttaatgaatcattaatttaagaacgaacacgtggccgaaaaatgcccgcaaaaagattcgctggggccgctctacgctcaaatttgcgggtcgcacaaaaactcggcggttttgcgagaatggggtgagttggaaattgtttaaaaataccgtaaaacctcaattacaaccccatggggctctattgtttatatttaacccttttgtaattcgtctgtgggcacgagaagaagaactgcagtcagcaccgtctcagactgcagttcgagcagattcgggccctcttcggcaacttgcaacgccggacaaacgccaaaacgacggattcgacggcaagccctttttgggcgtcgtggtcggggcggcgtagtgacgacatccgtcgccaccgctacatgcctatcgggaaggaaaacaggtttttttttttgcataaaagtattagaaaaatccaatggtttacagagggagcaagacgaaggcggaggctgcagcagaaggcgattttggacagaatgctgcgaaaacgcgggggccacaaaagttagtggtttttggtcggttccaacgcgggtgggtggggagcaggaaaaaacgtcgccgccgaggtactaattcggccgatataatgctgagggttcggaaaatcacaatgtctttcatgttcgggtggaggattgatgggtgtgcctccaggcacagattggacaggcacgatggaatgccacactaacttatgcccaactcaacagcaccaccgaagatcagaagaaacgcttcagaatttggcatttttctacaaaatgctgagagaaaaaaagtaa

SEQ ID NO: 78215 - DNA, 1809 bp, Heterodera glycines
atgagtcatgcattccgtgtgccgccccgtcgcccacagtgagaatttctccccattcattagggaatcattttgaagattttgtttatctttttcagagcaaaagcgcatatcttctgtactacaaactgaccaactcaactaactcacaggccaagtgatattaatattattaatttattattattattatcattattattatttgtacctgtgttctgttcccgataccatccgattgtttctttaaaattaattacccatagttttttttaacctttttttagtcgccagtaatatttaaagacagcgccccctaatggtattaaaacaaaattttttcaaataaccacttcttaaatgaaatgacaaaaatctcctttaaaaattgatgaatttaattgagtgactcaaaaattgcattatttctttaaaattgcagaaacgaaggccagggcgacaaaaacgacgatgacgacgaagatcaatctgagatggaaatctttaacagacaaatcaccgatatttgccaaatgttgcttgctcatcatcacaatgaagttgagaaagttggccggctttgcgcacaaatgggcgaagcaattctccaagtattggccatccaacaacaaatcccaaatcccgacgaagttgaacaacaacatggggaggacaatggcagggacaacagaaacaattgttctttcgatgaagatgaaagtgatggcgaaagtgacgacccaacggtggagcatccgttgccagccgctcgtcgtgtgcttcgtcgtctcaaattgcccacaattcttgacattagtgccgcaaccgaagcagatgtgcaagaatatggcacaaaattaagtgacaccattaaacaaatcaccaaattacgcgttcaaaacggcggagcactgacaagcgaattggaattgcggagcaaacagaaacaagcacaaaatctgctgcaacaaattggcaatttaatgccacaattggtcgttgaagaagaggaagtggcggaaatactcaatttggccgaacaaagcgccgatcgcttttccattggatttctgaacaaggaacagaaaaagcaattcgaagaagcaattcgacaagcaaaaaaggtgtgcaacacaggggaatcaacgtcgggagggagcagtttgacccccccccccccctcttaaatttccttggctcccggacaatccatcaatggtaaatctctcagcgcaataattattttgtctggtaaatcttaagaaatatttaaataaaaaagtattgagtagctaaaaaagatgaaaaaatccttggaagatttttttaataaagtatttccttataatgtcattctaaaatatttttatcaattgtctgaaaaaaatttttaccgacggattgaccactgagcgattgtccgaatacctttccttcctcaccatcagtcgagtaaagcattttgaaaatgtagaaatccattgatcggctgagtcattaagtttaacaaataataatttgtccaccacccacctgtaggctttcgagatcctgttgaacataaattggacagtttggggaacaattttatgaggatgtacaaaaaactgcttcttgttggaatggaatattaaaacaaacaaaattgccaaaaaatttgagggcaattgctaagtgccggatctttggacaaacttggcggtggagatggggggtgaaaaaaccataaataagtttaaaaacaaaaaaatccaatgaatttttgcccgaaatttttaaatttttccttttttggggggggaaaataaa

SEQ ID NO: 78216 - DNA, 942 bp, Heterodera glycines
atggatgaaattggtggaagaaaaacgaatgaatttcttaggaaaattagccaattccgtgacgtaatgaataaaatgaatggaacaacaaaggatataattcgtgggagtgttgcattatatttacttagtagcttagtacgtttttttatttttattaatttagtaatttaaaattttcgctaaaaattctgcagacaaagaccaaattggctcagcgaatagtggacggaccgacgagttttacgaaaagccaaatggttatgcaaagatacgagagtctcgactcatcggtttaaaaggcccaaatttggcgatgtttcattttcaggctgtacaaatgcgcgtgcaaaatctatcggattgtaagaatgaactcatatttttcatgccaatggatctaattgttgttttggacggagaggaaaaaggtgtaaaaaagaaaagattttggaaaaggaacacaggaccaaatttttgtattaaaaataggaaaaataaaaaataaataaaataaaatttagatatataattgagcattattttcatcataaaataaataccaatttttttaggttttcgcattgttcgaatttgttttgtaattcctccagataatctcggagttacatattttgaagtgaaaattatcaaattacaaagagaaaatgggtgagttaacagttactaagaataatatattattaatagggcgaggatttctagttttttaactatttttttctgcggctttattttgatgagaaatgcacgaaaaacacattctttttcaaaaaattttcgtttttagtgccactattcatcattaaaaaaaattattttggaagttggccactaaaataattatttgtcactattggcgtttcgtcattatttttgccactattttggcattttttggaaaatttcccaaaaaatgca

SEQ ID NO: 78217 - DNA, 75 bp, Heterodera glycines; identical to SEQ ID NO: 54636

SEQ ID NO: 78218 - DNA, 783 bp, Heterodera glycines
aattcatcagctccctataactattcttacatcttcaagtacattatcatcggtgatatgggcgtaggaaagtgcgtgtgatcttaaacttgttactccaacttcgtcccattttcagatcatgtctcctgcaccaattcactgagaagaaatgtttgttttagtcgttgatatttgtttgtaattttttataaaatgcaatgagtccctttgtttcatcgcttctccgcccattttccctctaagtcatggccgattgccctcacacaattggcgtcgagttcggaacgcgcattattgaagtaaacggccagaaagtcaaactgcaaatttggtgcgagtaaaccccagcgtacaatgaatgcgaaattgcatttcagggacacagccggacaggaaagatttcgcgcggtcacacgttcgtactaccgcggcgctgctggggctctgatggttgactaaatacaaatgaatgcgttttgtaatcattcaacaacaaataggtctacgacataacgagacggtccacctacatccatttgagcagttggctaagcgacgccaaaactctgaccaacccaaatacggtaagagaatgagcagtgacacaatgggccaataaaatagccgaaactctcacaaattaccatccgtttctgtttaggttatttttctgattggaaataagtccgacatggacgcgcagagagacgtcacttacgaagaggcgaaagcatttgcagaagagaacggactcactttcttagaatgttccgcgaaaac

SEQ ID NO: 78219 - DNA, 75 bp, Heterodera glycines
atgggggaggggagggcgaggcctttgttgttttgtttgctcagtcaagccgtgctcgcccataacacattgtat

SEQ ID NO: 78220 - DNA, 1155 bp, Heterodera glycines
gcaaaggcgttggaatgcggttatactgtggacagattttatagagcgtggcactacgaagaggaggcgaatgatttattcaagggatacgtgcgattatttttgaagttgaaggaggaggcgagcggtttcccgaagggggttgagacgggggagcagaaggatatgtggagagaagaatataaggaaaaatatggaattgaaattgaattggctaaagtgaagaagaatccggggttgcggtacataagcaagttgatgctaaatagtttatgggtaagaaaattgaaaataaatttacgataggtaattttcactttcagggaaagttttcgatgagaaattgtttgaacaagaatgcggtaattgatagggcgtcggagttttataaaattgcgtgtgatcataaaattgaattatgtgatattgttgagtattcggatgaggcgattagattgatatacagggacaaggaggactttgtgatggagcacaagtcgagcaacatagtcattagcttatggtgagttcaaaaaattataaatttgtatataacctaatttttaggacgacgagtatggcgaggttaaaattattggaatttatgagggaggctgaaagcaacggaggggaaattttgtatacggacactgacagtatttttgttttgcacgatcgggatgtggagccgatcacgacggggaaatatttgggagagatgagcgaggaatacggcggctatgagattgaagaatattgctgtggaggggcgaagcagtacgcactgaagatgagaagcaagcagacgggggagactgaatacgttatgaaaattagaggaattacgttcgatgtggacaacaggaaaacattgcactacgatacattcagggagatggttttgaattatgggaaaggggaggtggacccggcattcttcgtctataagaatgattttgggtgagtttttaaaaattatttgcttcattaataaatcaatatttaggccgacaagggattcgaaagtggtgacgagggagaagcataaaatgtacaggccggtctgtcagaagggtatcatcgatgaggagcttaatgtgatgccatttggattttgttaattttgtattttatttttgttttttgttaaataaa

SEQ ID NO: 78221 - DNA, 1574 bp, Heterodera glycines
cttctcaacggactctctgaacgttacaacaattttcattggttcatctaccaatttttgtgcatcatcggtgtcatcgctaacatttgttttgttgtcgtacttttaaggtaaaaattaataaaaattaattattttaaattaaatttaaaagcattttaaataaatatttaattttatttgatttgatttcaaggccaacaatgcgcaaaaatccgttcaatttgtttttgattgtcatcgcaatctgtgacatgagcctaatggcctcatattttatttataaacaagtaaaaattagtttaaatatgaaaattattgttttattgtggtcatcatccgttttttgaatggcttcccgtggataatccgtcagtaaaatttaaataaaatttggcatttatcccaaacacgtaattaatggattaattaatgtacctttaatatgtaatctgacgtattatccggatagcattgaactgtatattcgacttactgccttctgttcagtggggacataatctgatcgaaattacaaaacaagaaattttaaaaagaattacgaaactgttggattttgttttgtttttttgtctcatttggcatttatcccaaacgcataattaatggattaattaacgtaatttaaattgtaattattactgacggactgtccggacagcttgaactgattaattcaatttaatgccttctatcagtgatgaaataatctgatcgaaattataagccaagaaatatttaaaaatcgtttaatttaatttttgttgccacattttttttggcatttttcacttttcatttattttaattcattcaggtggagatgtgccatccctggtatttcacatttttctggattgtgtacacctacgggtacgccgtgctgtccgtgttcgtccattccgcctcattgtggctgaccgtcaacatggccgtgctgaggtagaaaaattggaaaaaaaaacaaatttaatttgctaaggcttgcatttttatttaaacccttttttagggattggatttttgtaaaatttttaaatttcgcatttaaattattagttgaatttttcaattatggcaatgtaaaattttcctaaaattttgaaaagttattttcttcatggattctttaaaattataaatttttgaaaatttctaattaaaatacatttaattattttttgtattttttcgagggtactgtcaaattttagtaactttatgaatttttaaattttagtattttttactctttgaaaatctaatttaaaattaaatgcattaaattattttttgtattttttttcgagggcatttcaaaatttatttaaaattttcttagattttcttaaattttaaaattatttttttaatggctaatttataattggcataaattttttgaaaatttgcaggtatttggtgctcaagtcgggttcctcctcctcccggcggtgcctcgctagggctcgtacaaagccgcttgcggcgctgtggcggccgccgtcctgctcgccgcggtcggttcagcgccgagcatgctcagatacgag

SEQ ID NO: 78222 - DNA, 440 bp, Heterodera glycines
atgtccaagccgaacaagtgttgttttacggtagttgtcggagtcgtcgtggtactgggagttgtcgtcgtggttgtactggtcgaagttgtcgtggttgtggttgtcggagtcgtcgtgctagtgggagttgtcgtagtttcctccgaactgtccgtcatttcgtctgtcgccgaaatgtcagtagtttcgtttgtcgccaaaatgtccgtagtttcgtttgtcgccaaaatgtccgtagtttcgtttatagccgaaatgtccgtattttcgtctgtcgccgaaatgtccgtattttcgtctgtcggagtcggagcctccggagttggaataggtgttgttgtagtcgttgttgttgtggtggtggtggttgacttaaaagaatcgaggcttaagaaaaattgacaccgaaattaaaaaacaaattctttataaaaata

SEQ ID NO: 78223 - DNA, 1438 bp, Heterodera glycines
ttacgggactgagctggccggggactgagttgactcactctctcattcccatcgcagagattcgttgcaaacattttgcgcggcccttcaaaagaatgctttcccggcaaaggactatgttgtgcaatgtgaaatgtgcggacaagacaattgcaatgccgaattgctttatacaaaagcggtaaatcgaaattttttaaatttggtccctcattaaaaagataataattaattaaattgaattttaataataaaattgctattactagggttggaagttgaatgtattaaagaatgccaaatatgcactgaaatatgcctgaaaaatgcttcaccaaatcaaaaaattttaaccctagaaattcgaaccctaattattactttaaaataattaaaatttttattgtcaatgatcatataaacagtaatattttatcattcattcatattaattattataattaaatattttttctaaattttataccaaaatatgtatacaaaaaaatgtctgaatataataattattttataaaagaattatttagcgaataattaaaaaaatacacattgttattataatcaattaaataattattttgcttttaatttggcccctcgcatctttcaacaatgggctttccattcagtttgcacataatttttgccaggatttataataattttataaatataattagttaattacaataattttttaaatataaatttaataaatgattatttaaattaaatgtaataataatattattaaaatttaataataatatttattacttaaatataattagttaattataataattttttaaatttagatttaataaataactatttaaatttaaatttaataataattttatttattacataaaatataatcagcataatattaattattacaattaaatattttctaaattttataccagaatatacaaaaaaatgtctcaataaaataattgttttttttaatttggccccacttttcttacaaaatttttattatttttataaagaatttgttttttaatttcggtgtcaatttttcttaagcctcgattcttttaagtcaaccaccaccaccacaacaacaacgactacaacaacacctattccaactccggaggctccgactccgacagacgaaaatacggacatttcggcgacagacgaaaatacggacatttcggctataaacgaaactacggacattttggcgacaaacgaaactacggacattttggcgacaaacgaaactactgacatttcggcgacagacgaaatgacggacagttcggaggaaactacgacaactcccactagcacgacgactccgacaaccacaaccacgacaacttcgaccagtacaaccacgacgacaactcccagtaccacgacgactccgacaactacc

SEQ ID NO: 78224 - DNA, 175 bp, Heterodera glycines
atgtgcccagcgatcacattccgatcatgtcgcaatatgccgtcattccaccaaacttccagagatctttgccgcccattcaccattacggaggctccgcacattccggttccttctatgatttattggcagaataaaacattacattttcaggtggttttggtgcgatcggacg

SEQ ID NO: 78225 - DNA, 924 bp, Heterodera glycines
atggaagaagcatttgcgaaggcgcggtcagaggagaaacagtgcggcatttgtatggagcaaattgtggagaagggactgcgctttggcattctgcagaactgcacgcactgcttctgcttggattgcatccgaaagtggcgccgtcaaacggatgaggaaatcaaaacgaaaacagtgcggttagttggcaaattgggaatatttaacaaatgaatgaataaagaaactttaagtgggtatatatgaaatttactgaccatgagtaattttttgtgaaaattaggctattcccaaaatctctccaggtcgtgtcccgaatgtcgtgtccattccgattacgtcatcccgtccaaagtttggattgacctcaagtcagacaaggacaaattggtttcagtcttcaagggtaacacgaaaaaggtggttgtggtaaaacgattctgttttcctttaccatttttttaagattgcttgcaaatacgtcgtcaatggcgacgtggacaaatgcccattcggtccgttcattcgtgaagcatttcattaaaattttgtttttttttaattttaaattgatccttttcaggtaacaaatgcttctacaaacaccaattgcccgacggttccatcgtcgaaggcaaatcgccgacgcaattgcgcaagaaccgtcgcaacgatgccatcatgttcagtctgtacgactttttgccctccgattcggattgggaggacgactttttcaacgataacagcgatttgtacgattgattcgcctgctttttgtgttatttaaataatttgattgtgtaatgtaagcagagtttcgacataacaattaatacatcagtctttccggacataaaactttgtacgagtaaatggtccagattttcatgttatttgacaaagcatattttagcatta

SEQ ID NO: 78226 - DNA, 1489 bp, Heterodera glycines
attttttgtgggattggaactcaaaatttttggggatccctcgagattaatcccgcggatccagcaaaactcaactctgaaattcatggtcacgatcacgaaaaccgtgaatttcacggtttttggatcatggttacggttacgattcacgatgcacaggtttttttcaatcacggcacacctctactcatgctggagcgcggacagaaaaatcccgcggtcgcggatggcgcatcgcggattcaatttgccgcggtcgtggatcgcggtcgcgctccactcctgacctctactaaccacctctaggccattataacaacaatagaaatgctttttcctaaatttaagctcattgtcagaccaagtcttagaaatgtgtgttattttcaatctatagttcccattcggatttaaaagtcaagatcgagattggagttttgaaaaccggtgtcgaaatcgagatctgcttccgaaaaagtcgggattccgaccaaaaatcagtcgggatctcaatgccgtgcaactccactaaaaatcaaccgtaaaaaataacagcataactgtttgagtgaaaaaaattattttaaaaaataaaataatgttcccgggttattttaatttttttttccaatttgctattaaaaaaataattattttgctgctcgtggctgtgcaaagaaagaactgggaaaactctaataagcccaactttatcaccagacaatgaaaataagaaataatttaattcacattttaatttaaattgtattttataatataattttaattttataatattattcgcttatttccttcataaccattctacgattaacaatttaaaaatctttgttaattaattgcattcccttttaattttcgtttgttttttagcttccttactaaataatttttcttaaaaacatggcaattaattgtgctcctctcacccgttttccctatgacataatgatgtttttcataagacatttaataaatcataattaattggactaaagaacaagtttaatttgtgtcaaatcattccatataaatgcattatttgtcgtcattattttattttactttacatttttattcttttaaatgtcgctatttaaataatcatttcaatttaatgtcttttttaatataactttaattgctaattaatttatttttaatgtttcagttaaaatgaacaagatcccttttttatttattgctctttttgttgtgcaaattattgccgcttatgagccaagttgcaaagtttgtgatcaaaaaaataataaattcaataaataacaaattttagtgccccgaaaatgaggagccgggccaaaagagttgcaacggatgtgagccaagttgtgacaatccgaagccggagatttgcactgcgcgcttttgtgactgttcatgcgactgtgtgaagggattgttccgcgacaaaacgaaaaaatgtgtgcccaaatgcccgtattga

SEQ ID NO: 78227 - DNA, 737 bp, Heterodera glycines
atgtcttcttccccgtccgtctctgtgctcgccatcgtcgcaattgtctgtttgatgtgccaatgttgcttttcggcaccgcgtattatttttaatttattattttaatttactaatttgttgttttccgacagatccgtgctgtcccggcagccaaaaagtggtttcacttatgtccaattacgttggcacttttgccaattccatttccaagtcatcgctttgttcggatgcccaaaatgttgcggacgcgttgaaaggccaactgatcggctgctcgaatggcggtgatcgaactcttttggccgaaatcgaagcatcccttgccactcattctgctggtaataaccaattaatgggcaattgcctaataattatttatttatttttaaatcatttttaaatatctctttccccttttagatgagtgtgccctcagcctcggcttcgtccgtgccatgttcgccattgccgcctccgcttcttcccatgccagcaacaacagcgaatggcaggcattgagtacacagtttggtcagaaagtcactgaaattgactcgaaatgtgcagagtttggtattagcattggcaaagtgcccatcaacggtcccaagggtaaagtcaattaagaaaggaataatcaaatccatttaatctcttaaggtgtccatgttcaaaatgtgcccaactcggaaagtgtgatttctatgcctggattggccggctcacacacccaa

SEQ ID NO: 78228 - DNA, 1438 bp, Heterodera glycines
atgactcgaaatgtgcagagtttggtattagcattggcaaagtgcccatcaacggtcgcaagggtaaagtcaattaagaaaggaataatcaaatccatttaatctcttaaggtgtccatgttcaaaatgtgcccaactcggaaagtgtgatttctattcctggattggccgcgctcacacacccccaagataaaaaatgcatcactgaaaagatttggtaccttatgattattgtgcattaattagctgtggattttgtaaatttaggtaattatatgtaaataaatattaattcgttggagaaacaagattatttttcagaaatattttcttaaagaataatgtggaaattttgagaattataaaaaaatataattgtaaaatgacgataataaatgagaaaaccaactcggatcttactgctgtaaaattagtttttactctttttaactcaattttccaatgttttttttttaaaaaatgttggccaaaaaccggaagattaaaaatggcatcttttgtgttttgtcggcattatttgaaaacccaaagggaaattgagtgggcattaaaattgttggcacaaaatcaattacaaaaatgcgataaacttttattggaattttccaaattatttttatgtaaaacattaagtttaataaatttttcttctctttgatcaaatatttttacataaacaatagaatttttcatctgttgacaaatccgaatatgaattttaaaactaattaaattttttgagtttttctcaaaattggtgacacataataatataagcaatttattttttattgtgcatcttttttgagttaaacattaaaaaaagctgaaaaaaatcatttccgaagtaaccttatgttgctgatattcaatgttgttagcaaattaaatttttaataatttttcaagcaaatatatttgagaaaaatttaagtttgccaaaaatggacaaaatttatgttaccgtttattcttatttcattgaaatatgtattatgatgtttattcatttgattttttattgtttagctaattgatcatattttatcgtttatttcgatattttgttttttttcttcaaccccagcatttgtaatcgcaatcggcggagcattcgtcgaatgccgaaaggcatttcatgtggcattcggtggcaacaccgtggcacttggacaagcatttcacattttgcgcgttgcatccggtgcagcaactgaaaagcaatttgaataaacaattatatccacttccattagattagcataaatattttcataagatgtaatatatgaaaaaaaaatactctttttcttcagcaaatgatgaaaatgggaccaaaagcagtgccaaaagtgaaagccaacgcagaaacattggccaatatcaattctttgagaaagtctttataaacaaatta

SEQ ID NO: 78229 - DNA, 1221 bp, Heterodera glycines
atgcctatgtacgttttcctttgtatgtttcaccatgacacaatttaacatcatggtaaattgtattttttttattggtcttcgtcaaagtgtttcaatatttttacaactaaaaatcgggaaaattgaaaaaagtaattttttatttaattgaattattattaataagtttttttcttttgcttcgtttgcaaaatagcaaaaattaattttactttatatataagataacttttaattttgaatgaaattatcaaataattagatgaaaaatcatgtgcttatcaggtgtttgatttttgcacttttcgcggtcgaccaaccacgagaaaaaataacttgaatccgattcccgaaatgtcggcccgcaacgccccgaataacttgaaatcgggaagaaaattagctgtcttaacaaaatgttggcctttttatttcgttactctctgttatttcgtatgtataataattttaatcggtttatttctgtattttaaattgtttttaatttgtttaattcaatattttagtgatatcatttttctccataagaatttgtaggcaaaatataattatattaataaattcttcgcaaactcctttttttccttttcacattccataaaaagcattttattttcgctcgccacacagagagaatttttaaaaccacacagcttaaagaaaattataaattcccgatcaaaaattgtgaaaaattaatatggcttcacttttggattttttttatataattacgatttaattggacggactaaaaaaattaataagcaatcaaaaaagattaaagacaaatttttattaatttgtttataaagactttctcaaagaattgatattggccaatgtttctgctttggctttcccttttggcactgcttttgttcccattttcatcatttgctgaagaaaaagagttttttttttcatatattacatcttatgaaaatatttatgctaatctaatggaagtggatataattgtttattcaaattgcttttcagttgctgcaccggatgcaacgcgcaaaatgtgaaatgcttgtccaagtgccacggtgttgccaccgaatgccacatgaaatgcctttcggcattcgacgaatgctccgccgattgcgattacaaatggtggggttgaagaaaaaaaacaaaatatcgaaattataaggaaatatgatcaattagctaaacaataaa

SEQ ID NO: 78230 - DNA, 1853 bp, Heterodera glycines
atgtacaccatccttcgctttccattttggccttacgatggggcacaacacattttgttggacaacagctatttgcactatttcaaaacaacgtccgaagaatatacagaagggttggctctgaaaattgcaatttacacccatttttacatgctcaagtggaaaacggaacagaacaaagaaatattggagcagaggagaatatccggctcggaaaactcattatacacggaaatcaacaaccatttgaaaacgtaaataatttataattaattacatttttaataattagatgaaaatttttaggtattaaagtgcaaaatatgcttcgaaatgccaaacaaattttaaaaaaattaggaaaaaaatagtaaacaaatgttccatttgtaaatgaaaaagattaaataaagtgaaaaaaaatattagaaacacaaaatttttaattggaattttcaaaaatcccaaaaataggtaccaaaaatcctgaaatagatacgatttttgcaacccaattttttaaacggtaagattagaaatccgagcatttggtattttgtcgactcattaaaacattgctcataatttttttttttagaatttccataggtagtgcgcttaaaagtctcaatattgcgacagtttgtttactgttaagagaaaaatatactcttttgagtacattaaatggtgccgaattcaaacggcaaaatccgccgtgcccatcgtgtgaaacccaagagaaagcgcaacagacagtgaaagatcattttgaggaaatggcagaatggatgctcagcgatctgctcaaatcatttcactcgagaaaaagattaataaaatatttgaaatggtcattaaaattgtgaaacaataaaattattttttaaaaattcaaaaaacaattatttttcagcgaaattgcagcaaaaaataaccaatacgaaattgaaaaggcgtggaaaaagctggtcaatctgttcggatttgcacgtgctctacttctttgtagaacatttcggcaggaatttggcattttgtgtaagcgaaattagtggttcatttaaaattattcgtcaattatttactagggatgtcaattttatgtaaatacatatttttcctggcttctccatgctttgaatagtaggaaaaacactttcttttttgtgtcttcgaacaaaaaccgggacttttatttacatatttcggggttttattcatattttacttacattaaagacttattgttagaaaaattaattgctatatttttgagagattcgtgcgttttaagccattgaacggttagtagttaaccgccccggtgcgtagtttgggcgggaaaatttcccgcacaaacgccagcctattgggcggttttaggctttgaagttgccgccacctgtcaatcaaaaggtggcgggggaggggaggggtcgagagtgagtgatcggtggagagggtgcgcgggagggggtgttgggtttaagcctaaacctattgcgtagtttggggaggagtcccgtaggtgttgatgggtgggtcgggattttttttgaaactgagggggtcaagaggtcaatgaccaggtgtgaaattcacacctggttttggatgaagtggtgatgaatcggtgagggaggagggggacggatgagttaaggtgtgaaattcacaccttttttttgaacggtgacaaaagttggttggggggggcgttcggacagtttaaggtgtgaagttcacaccttgttctgagaaaggagggaaggggcgatgaaatatgttaaaattctcactaatctgacatttgagatcgcgtaattgatgctttatctgttgaaattaaa

SEQ ID NO: 78231 - DNA, 1310 bp, Heterodera glycines
atgaagggcggcagcagacgggtcccattcccgacccccggcacctatgtaaggacagacgagagtcccctccattcccggcgcatgatgagcgcaacaactcccccctcttcccccgcccctccctccccccacaagcgcgtcctctttaatcaacattatattttctcgccatttacacgtacatgtcgagagtcgagagtgcgggagcagccgaccaccaccaccacaaatacacatcccatttacgggggctgtggctgttccgcggctgctgctaccgctgcacaaataaatgcatgcgcttacattatgtatttgatgggtttgttttatttagaggttttcaaaaaaaaattctgaaatatctgcactatgtaaaaatggataagatgggatggacagcagcagcgccccattggattttaagctgatatttttaaaaaataatataatttattattaattattattattaattatggtgatcaaacggactggtggcagtttgtcgagatttttaagtgattaactagttcggtaccgaaagtcccgagaactcacaaaattgttgtcccaacgatcccttttcaatcaatggtcccgttttttaaacatttagattactctgtccgattttcaaattatcattcattggtctaaaatttgtatgactagtaggccatgaaacaagtttttatatacaataacaactatgtacagtaattgtgatgggtgcagtatcttgaatataaaatttcaaataaaaaaccattccaatttttaaattaattttttatttaaaagcaaatttccagcatcgaatgatttctttttaattgaggcttccataaaggccttagctttttttcaatcattttattagcaacacgtctccaataacgagcagcacggccacttttaacccgggtaaaatttgcgtaataaaatatattttaaataaaaattataaatttgaattcaaacttacaaaacttattttaaggtcaaaaacgtcctcctcctccacctaacgcgggtagtcaatcaaattcagtggttggttactaaaaatattaattaattaattagtttaattgtttttttaaattttacagcaccatcttcaacagcaaattttaagtgccagcagctgctacacagttcaacatcagcagcagcagcagtcatcatccgcttcactgttcacactggcggacgccactttgttgcaaaattcggcaattgtcaatgaagcattgaaaacgcttggcacatttcaacagcaggaaattgccgcaaagcggtga

SEQ ID NO: 78232 - DNA, 310 bp, Heterodera glycines
cactgaatatcgccaagtgttcaaaaaagaattccgttcattgtttggtcgtctcagaaaaaataatggtaacatttttaaaaattaaaaattaatcttttttcattttatttttaatttaattaaattttttaccgtaatcttttttagttgttcaaacaattggtatggcacaaatgtgcaatgtcaacccaagcaacatcaacaacaacaaagttaaccgttcaagtcaaatgacaattataagaaatgtgaataccatcatccaaatccgtcattaattttattaattcatttttagtgaaaaata

SEQ ID NO: 78233 - DNA, 946 bp, Heterodera glycines
atgcctaatgtatcgcgacagaatcgtgattccaaaaatcagtcagcagaagttggcccgacaacatgtatattcaccaaaattgtactcagaaatggaataatttaccaaaactgacaatcaatgattttgccaaatttacaacggcaaacggaattacacaattattttcagcatcatacatacaatgtctaatggacaagtggagcattaagaaggcttttcgaaagctaaaaggggagggcttcacaggatattgaaacgttcctggtcacttttctgaccacacccagtgatttgctcccaaacctaaactccccggttgaaatgctcttggttgcaaaacgcgaaccactctaaatttgctgaaactgccgccttcgcaaccctcgaaatgagacgagaaaatggtacaaaacttcaatcgacaatttggcacgaggcaacgacgttatacgcacgccatcgcctctcggagctagtgatcgcatttagatggcttgaaaccgggtcttgaaaatttatgaaaattctattttgcttatggcaattagcaatgaggcccacagtcttgaaatttgtggaaatagtatcgcctagttacctgattaattgccacgtttattttgtcaaaaatgcaatttaagataatcttttaaaagagtgcgggaacttttgtcgcaccagttttccattacttttatttattgcgtgaccggaaatttcaaatttcttgaatccttagaaaacttaattgaaaaaacgcagaacgagtttttaagcaattttggccgtttgtaatacaatacttaatgatatagtactttatttcagaaatataatattactgacgcattttccattgacacattttccgaaagccattcatcctttgtttttccacttttagcatacaatttaagttttaaattaaatatgaaataaa

SEQ ID NO: 78234 - DNA, 1980 bp, Heterodera glycines
atgtcctcaattaacaccagctcagacaatgcggtaaaacaacaaaaaataataatgaaaatattaaccaaatatttaagtgaataaaaaaatcccataaatttattataattaggtatttgaaaataaaaatttactttttcagctttatttggcctaccgttctgtgggtccatccgtcgatttgattgtgccggccgttgcgctgtatttggttgcgttaattggcattgtgatgaacggcacagctttggtggtcactgccaaatcgaggcaaatgccattggcattttttattttaattatcataattgaatttaatttcaatttcaatttaaatttcccatttttcagttccctccgcggctccgccaattttctgatggctctgatttgtctttgtgaattggtccaccaaattgggcacacttttttactggttgttgtcatttcgggcacaaattttgtcagtttgcacactgctgacttaattatagcggtaaattttaaatataaatttaaaattttcaaatttaattttgaaacttcaaaatttaagccttctgtttttgcgttaaattgcggcttaatggcaatgttttgtgctgcggttgaccgtctctttgctgtattaatgccttttaagtgagaaaatttaaatctaatttaatatttcttacgaaaatttattaattactttttttcatttttttaaaattttatataattatttttaaatgatggcttttataatttagacatttctccatttgtgcaaagtataaattaccatatttgtttggccatctgctcatttgcataatttatggtacttttatacagtatcatgtgctcgcatcggcattcgaaaatgcgggaatgtaattaaaatgcattaattaacattttaaatttaattagtcaatttcattatcttttttaggccgaccaatggtttattagccgatgcttttcaggatgatatttatcaatttttcatcggtggagtttacagcatttcatttggttgcatttgctgttatgtgaccatttttttgattgtcaggcttaaaaaaagtggtaaattcattggcatttgtcttaaagtgcctaatttaaatacactatacatttgttacagtaacccagcaaacaaatacccgactgttacgttctttggtcatcattttgtccataaacattggcggctatttgggcactttgatcatgagtcagcttattggaaccattggccaagtgtatttgtgagtttttttttctttttttccaaaatttaaacccccaaaggtccccaatccaagcttggcaatttactttttgtgcttacattcttttaaatgttgttgccggatcaaatgctattgttctttttttaaacaggtccaaatttaatttattaaaatatttaatttgctgatttaatttaatttaaaaaatttattttttcattttaaatttttttaagcactgaataccgtcattgtttaaaaaagaattacgtgcaattaaagatcgtttctttaaaaagaatggtaaaaatatagttaaatttctttaatttttaaaataatatttaatactttttaattgaattgcttttttagctgttcaacctatttgtacaatcaaagtcaaaccgaaaacataattcgattacatcacatcaaataattgtttttctcatgaaaattcattttgaactctttttcattatagaattcattggtttattctatgtattgtttttaatttatgtaaaatggcttaataataataataatagttaaatacatttttattattaattcctttaaaaaaaatttttcaatctctatgtatattaaagaatttggtttataatttcttttttcatttatagcctttttctattaatgtgctcatatttactttccaaaaaatgggggaaagaatggcgcgcaatttaattaattgatgaaa

SEQ ID NO: 78235 - DNA, 162 bp, Heterodera glycines
ttgttcttgactacgatgctgaggccagctccaaaaaggccaaaaaccgattggatttgaccaaaaaatatggaaaagcagcactgaggcagagctctcgctaagaaaaaattgatttaaaaattataattcaaaaatttttgaatttaaaaaaataataaa

SEQ ID NO: 78236 - DNA, 1635 bp, Heterodera glycines
atgagttttgtatgttttaataaattcactgaatgtatttgtcagtgtcgcgtcggagtgccagtaaatgttgtgccaattcttgcacactgcaaaagtcgtcggctgcaatgtaagcgtcgtccggcacgcccaccccacggagcacagtgcggtgcagcaccaccggcactgtcagtgcgcgaagcgcgttccaaaacttttccgtcacatattcggagcacaccgaattttcaaatgccaaataaaagaaatgggactctgaaggaaattcaaataggaatttttaactcatcattttgcttgatcatccaattaaatggtggaattaattaattaattggtttggttagcactcatttgttgcccatagcattgttcgtcacattcgttcccactgcatgccccaaacacatcgacagggaccagttggcccaattgcgcagtgagaatatcccttgcggaggatgcgccacatttggacacaatttgcagcgcaaatttgctcttctggccaacaagcgctttgatcttcaatttgacgcaattaggcactattcgcttctacgccgctgcccgcccattctgtctccgccagcaatccccgcgggacgagaaaaaattggatggaattcgggccgaatggcgaaaatttttgggttgggattcgggatgagaaaaaggcctggattcgggactcggttggcaccactgtccccagccaatcgctcggtaatttttgcgctgaatcggccactcgtccgttggcactttatgtttgtcatttgagtcccctgcaccctctcactttttgctcgttccaaaattggtcatcctcaatttgcgtgatttcgccacttcgatgctcatgtagttcatcatatttggtgcatatggtgctgttgccgtgataagtcatggacaaattgaaccaatcattgggcaaattatcgaaaactcttcccgcataatacggcgactcttgagtgaagaaggtgtaactaaaagagttaaaccgttttaattcccagatttgagcgtttgctttttttgttttgttgaatgtgctaaattttaatattacttttagaattgattttttataattttctaaaaaaaaagttttggttcaaatttttgccgactgagcaaactgtaaatattaaaaaagggctttttgggtcccaaatgaagataaaaatttttcatctgggttctgattttaaattaattttttaggcttatataataattattattttaaaaaaatttaaaataaaaatatataacaaaaatttacagttgctcttgactacgatgttgaggccagctccaaaaaggccaaaaaccgatcggatttgaccaaaaaatatggaaaagcagcactgaggcagaactctcgctaaaaaaaaatcgatttatcaagttttaattctaaaatttttaaattaaaaaaaaataatttacgcctttcgttccgttgtgtaaatgcattggaaaggacaattggaatttgggtcctcgccatatgacaaagatgatggccaaaaatcccattggtgagggtagaaaaactgcttgttccatgctaagattatgggcaatccacggtattgcttaaatatatttaataaa

SEQ ID NO: 78237 - DNA, 1368 bp, Heterodera glycines
atgggcgcggttgcggtcgtttactcgcgcagtggacctttgccggagtggacggaggaggagtgggaggcacggaagagaattgaacggtcgacggcgattgtaaggaaaaagaacaaagcatttttaaattatatatatttttggaaaccttcttcccagtctctgttaaggctcaggacggacctcgaggtagggatcccgtaatttaatcccgcgagatcccacgcacgtccggtctctagttcaaattggtgcaaagccttataagttttagtttgggtcttctttttttgttatttctttttgagtcaaaaatagccaaaaattcactagttttgagaaaatgaagaatttgcaagtccgacaatgaagaaaggcgcagctgattaaattgtagaagaatctggatcggtttatgaagaaaacatttgaaattttgattttcacatttctacggggagggcgtgacgagcaggggttgagctcagtttttatatccctgctcgaaaatatgtaacacccattagtaatatacccaatttgacaaaaaaaaagtgattggaaattcaagttaattagcaatattattttaatagatttttttctttttagaaaacttcgacaatgtttagcgctttgagcagttctaaacgggtgcaacaggtggttgttcaatctgttttccaatttgctttttgcatccttataaatgtccaacattttgtttgaagttgttggccctgcctgggataatcgaacggtatatgcccgaaccgaaagaccgggaaatggtggaggcaattcggcaaacattcgttggcctttgggggttggaaaatgacgacgaacagacgcaccaattgatcagggtaaataatgcacaaattaaaaactcactttaaattatttagcaaaggcgctaagaaaaaaagcgattatttaaagtgtaaaaacaattagaaacccatggtctttaactgttcattaatgtgttcgacaattacatgaacagatcagtataacaaattctaaactaaattatgtataaaatcaggtaacggttaacttttgttattaagccaatcagcagtttcattaagacacttgaagaaccatttatcaaaaaatagtgtttttgccatttattgaattttttcaaaaataacttatttgatttgctaccgaatctaaagaaaatatttttatttttttaaatgaaaaattacaaattctttcgtgaaatattcatttagtttttgaaaaatattaattcaggacccggttggacccgataccgggactttgcaaaacctggacaacctggacccggacccggcttttgtagacccggcaataccggaccca

SEQ ID NO: 78238 - DNA, 2635 bp, Heterodera glycines
atggcattatgcaataaaaaatgccaaatccaatgccatttgccgtcattttgtttaattgttgtccttctcgtcgtcctaatcgacgaaaaactgttgattttggcacaaattttgggcggacaacagccaccgcctccgccaccaccgccgccacaacaaccggctcctcaaggacaagcggtgggaccgggcgggcccggaatgctattcaccggcacagggaccaacatgtattatggaggtaattggacaatttttaacagaagtatacgatattactgtcagtgttttttgccaaatgattggactatggtaattatcattttattttcaataataattgaaaattgactgtgaaaaaaatattcaggaaatatctaaaataaaagtaaaaaatttactgtaattaatcatattcaaatttttcttagttaattttgtgaattttattctgaaaatggctgattattggtgcctagtcgttactgaaaaaacaccaaaaggaaatttttgacgaaaaattattctatttttcttaagaataaccaaatttttaatacttgatatctttcgtagctctaagtattttctattagatagaaatattattgacataagttttctgaaaatttttttttaattttgtagacaaatagaaaatattaggcttttgaatgataccaaaaattaaaatataatggtttcattgacaataattaatttgaaaaatacattttgtagtaaatttggtgccttttggacccgaaaatggcgaccttgaagtgtcaccagggttcctgacgtccggtcagaccattgaccttcatctgttcttcccattttacgggggcctttacaactacacaacagtaagaataagattattattatataatttatttttgtaattacctaatttcatatttatttttaagcaaatattaattttattttttgcatttttttatattaatgctctaaacatttaattttgaaatttatttttcaaaaattcaaatatgtttatttttagtgtaaaatatattttttaattttttaaaattattaaaatataacgatataaataatgctcagatttctgtgaatggatatttgggctttgccactgtgttggaccagggcccaaccatcaatgttggcccggacagcacggattggccacgggtacaagacccagcaatgattgctccatatttatgcaaacagcaggtcacaaattagggtaataattaattaagtatcgaacctaatgctttaaattagagccattatcagggtaattaggcaccaatcaagaggcttcccttaatgatgagtcaagcaacattaaaacactattgaattttttagaaagcaaaaagtggttcggttgacaaaataaatcaaaaaaccgaaaaactttaattttctaaatcgttttttgtcgattaaaatttgaataaaaaccaaaaaaaatcgagttctggtatctaaattgtatccttttttggcccccgttcagatcactcaggacgcaattcctggccttcgtgccggcgttttctttcgtctgatgatgcgccaaagtttgtttggccgtggtgttggcacaaatttgaacgcggatggcacaattatgcaatccgctttctttggacaaccggcaaatcagcaaaaccatttaatttttgttatttttaaaaaaaaattttacaggcttgtccaagcacagcaggctcttatgtacgatgtgatgcgaacagtgactattttttggacgaaatgatgcgatggcttcagggtaatcaaatgttttttttatttttgaaatttttttattttagagggtgtcgctggtgcttcggcatttcgtgcagatgccgctctggtatttattttttttattgttttcattgaaaaatttttagaattacttattcaaattatttagtggaattaaatgatcgactaagtattacattattaaaattaagcaaaaatgaaaaaatatttactaagtaacataacttttcgataatgaagtgtaaaaatctcaaaaagtttaattgcagaaaaatctttttgtgttattttaaaaccctcatatgtcctcactgacactaaaattttttgaatggtttttcaaactgacgagaaaaaaaatgctttaatcggttttggcaatgcaagagttcgcatcttaatctgtcaactctgcgattattttttttgaaatttggcttgaaaaaagcttaaaaaagttttttttcactctataaccaaactttttgagtttttccatttttattcaaaatatcgattttttgtgttactgcctagtaaattattgattttattatgatgcctataggtggtcacatggtacaacacgggctcagccgtgtcgggtcgatcggatttggacggaggacaattagccacttaccaggccatttggttgactgatcagccgggaaggttgagctacgtgatcatcaactatgataagctgggctttgatgctgctgattttcgtgccaactcgcgcagcggacgatgccgagtaagaaatgtcagagagtgaccattaggacacataaaatcgaaaaattttagcagcaaatgcaataaa

SEQ ID NO: 78239 - DNA, 497 bp, Heterodera glycines
atgggcattgtggcgcggcgtctgctaaaaaaccgggccattcaaaagcagttggaccgtcgacaaaaaagtcggttgaattatgtggaaaaattttaaaagaaattttttttttttcaagatatgaaaacacttcgccgtcagcaggcggcagctggtcggtcgcccattgttgtgcattcggcgggcattggtttgccaaggaccgagccggttcatcaagtaaaaagttttcacatttttttttgtttactgaaaacacttttttttttttttttttttttagcgccaggaaatctgcacagtgcccgcccatgaagtcatctacgacgtgccttttgatggaaaaagagaggaagacgaggactcattctgatggacgattaaatttaactcgataatcatttaactcattttttcatttcctttttaaatttaactccataatcatttaactcatttttcatttgccttttaattacatacttatatggaaa

SEQ ID NO: 78240 - DNA, 348 bp, Heterodera glycines
atgcccgatgaacgtgttctacacctcgagtgctttgagagcggtgattatgatgtaaataattgttgaaaattccatttttttccctcaattttaatccatttcagatgatggaattgtacgggccggaccgtgctaaagagatgctgatcgaattgcgcgactatgctgaggcgcacggaatgccatgtcagtatgtgaagatgctgctgtacaaactggacaaaggactgatcaaatggaagggaaccaagccatgaaatggatgatgagtgatcagatattttggtgacaggacgaaggggggatgattgaactcattggtgatgaatgtgattttaaaaaaaa

SEQ ID NO: 78241 - DNA, 1409 bp, Heterodera glycines
atggcgatcaatatctccgacaaaaaatcgttgttcaaccaaatcctcggccaaacggacctcaccgtgacctcgagtggtataaccatcagcggtccccgcctctcgacacctcgcttcatcccatttgatgaagccggtcgttgtagatgctgtaagggaactgagtccgaaattgacactgtgattacgaaagaaggcatcacgctttggtgcacgcgcatagagaaggcccaattcattccgttcgatgtggtgtacgatttgccgggtcattgctttttccgtttgaaaaataagtctcgagtgttcaacataccctacggcgacataccctcttctgacacgcacaccactaaacggccccgcaccaatgactatcatcaacatgagctgaagcgcaaagcaaaggtagctcttgacttagtggaggccggactaatggccgatgccatgcaggacggcgcacgctggaagaaggcgaaaacagcaatcaatgtgctcggcaacctccttttggcggaatcgctggacaccacctccgctactccgctgaaaaatgatgtcgcggacatcaaaaaagaagaagaagcaactgtggcggaagaacacaaagaagatgatgatgaccaacaaaaagaggacctcggagacattgacaaaacgcttgacgatttcttcaacagtattaaagcatccacagcaaacatgtagaccctcattttgtgtaaaaaatgttaaacagccaagcattcagcgataaagacatttgctttaaattaccatttggtctaatcatttcggggccttcgtcgtcgggaaaaactcaatttctgctaaaattcattgccgaatcggaccaattaatcacaccaaagcctgtgtccatgctctattgttttggtgaaatgaatgcggcggtgcctgtgcttcaaaaggcaggagttgatgtgtacgcgggagtcccatccgaggaattgattaagcgcctccctaagcctcttttgctcgtccttgacgacttgatgctgtccgttgatgagcgatacttgtccgatttgttcactaaaaaggctcaccaccatcagtttgcagtggtgtttgtcactcaaaatttgtttgagcgaaagataaaagtggcccgcctgtccgctcagtacttggtactgatgcgggccccaaattcactgctgtccatccgcaacattggcgtgcagctctttccgcgtcagcttgacttttttcttgacgcctaccgtaaggcgaccgcccggccctatggttatctgttgatcgacatgcatgcagcatcggacccatcgctgcggcttcgcacaaatatatttaaggatgagcaggaggaagatgaagggacagttgtgttcattcctaaaaatggagcggcataa

SEQ ID NO: 78242 - DNA, 561 bp, Heterodera glycines
atgcggcgagagctagcagacagaccggccaaagttgagctcaccaaagggataagcgtgctgttgaggagaggtgctgaagatgaagagggtgaagttgtggacactccatcccgtcctcccccaccaccaccacctccacctggaggacgccctcggctcccaccaagtcctccgggtcgcgctccgtccccaccagggagtcctccgcctcgcccacaacgtcctcccagaccgactagggcttctcggagagacgatcgcctggagcagtgggagaaaaggcgacacgatatacaaagacggcgaccggttgtgcgggaccttcttgcggaagcagctgctgcccccttaccggaaagttatacagatgatgagtacatgttggagagtgggttagcgctgccaacaccatcccaatactatggggacttgcctgtggtgccataccaacatcaaattgagcagatggacactgctgctgctcagcacaggattgccatcagaagaaaattaaaaaaggacgaagcatatgatgattcggaccgcaaaaaatacagg

SEQ ID NO: 78243 - DNA, 2298 bp, Heterodera glycines
atgattacgagatcacccccattaacacgacagcgagctctaaaccttggaattgaactagacaatggcggaaagcaaattttggaaagagtgaatccgaattcgaaccagaatccctctctaagtctagaattggggaatggtcacagagaaatggttgatgatggtggtggtttaggacaaagccgacttttgaacgaacaacaactgcgaaatcgtttgctgacagtgaccatgctcgacaacaacaatccagtcgtacatgtaccaaatgaaaatgtgcagaaccaacgcattgcaatgaatgctccgcttgtcaattcgggtatttttggctcaaataacgggaatgtgggtgactattctgaagagttaggaggtacacgaattttgcaaaatcgaccaaacagtaattcgggtgcaatcaatttgaataatgcggaaatgatcccaacatatccaccagcactcgcatcaacccctgttgaaaattttggcaatttggcacgaaattcggaaaatgaaaattttgcgttcatcgagcataacgaagtgcgcgcacaatacacgcagcctcggagtactgaaaacattaggcctatttttgtgcgccaaacagctattcattcgcatctaagtgctatgcgtttaccacccatccaacagccggttgtggcaatagatttccctgagcagtttgtccagagaaatacccaaactaacatgccgcaaccacctttctatggcaatcaacgccaaaatgaaaatttgcaccaaaatttacaacgagttgctggcaacgaagtacaacaaagaggagtgcatataaacccaggaaattttccggaaagggttaatgctccaaatgccgatgcttttcatatgcgacgggaaatgcatgatttagttctgacacaagcaattaaaagcttggataatttctcttattcaatgacgttgaattcactcccagagctgaaagggaatacaggctcagatgcggttcgagcatttttccgtcattttgatgttgcaactgaagaatggccagaggctaagcgccttagcgcacttaggtcaaagtgttcaggccgtgctgaacgcgctttcaatgtcgccgtctcgaacaatccatttcggtacgagaatgttaaaaggtctatggtgcaacaactggaagagacggatgcgagacaaatgtccgcatttgacgagcttatgtcagggatttctcgccgaaataatgaaaggattgacgatttggcagatcgggtctcttccctagtcagaaaggcttaccctggcttgttggagcatctttatgatgattactcaatccgtcattttatcagagcacttcagaaccccgaacttgcactcactcttaaattagcccgtagaccatcaatgatttttgatgagtttgtagcattagctgctcgggccgaagcaactcaaaaggcgtcaaagatttcattgcaaaaacaacgaaatataccaaatttccaagaccataatcagtctgttcactacaatccccggccaatgcaacagactttccgcaatgaaaattttccgcggatcagtcagagtcaaaaccgacaaaattgttacaattgtggtcgtttcgggcattttgcccgacaatgcaattacccgcggcaagttagaactgaaaatgctaacattggtactccagcgactggtgccaacaaaacatcagtcgaagtgcctaaagacacgtcacagccacaatacaacaaaccgctaccgttttcaagaaattatctccgtcaaaattttcttgttgaacaacaagaaaatcctccaccgacgtcacaaaattttttgattggaggaatttcaatgagtaatgatgaattggagaaactttttgaaagagacaaaagcgttgaagccggaaatagtcgagcaaagttgttgaatgtctctgttggtaaaatcatggtcattaaagtttttgtttgtgatttatcagccacggccatgttggacggaggagcacaagtttcacttgtgtcctttgcttttttctcgaaaattatgactgagaaaaacatcgataaaattctactttgtccgacccgcgaaagcactcaagttgttgacataaacgggaaaacagtagagtatgttggagttgtgtcattaccaattgtcagaaaaaatactaaagtttggatcagatttcatgtgacaaatgcgtcatttggttatgagtttctttttggcaccaatgcattggcgcgtctggttttaagctttatgacggcctga

SEQ ID NO: 78244 - DNA, 1438 bp, Heterodera glycines
atggaattgtcaaaatatttgcgacaagaatttgaatttgctcaaattttcggaatttcattgcatttgcaggagataaaaaagcattttgttggacaaaatggacaattaatggccaatgatatcgaagcctcggtaaatcggaagctgaaaaagcattaaaaagccaaaataatttaaaatattaacgtttagttggattcattcatttcaaaaaatggctttgggctcatagaaaacgaacagaaactcaaaattgaagaggcaattagcgaacttgaacaaattataaggaaatgggtaaggtaattaagaagaaaagaaaacgcttctcaaatttaagaattccatgtcgaaacttatcgtcacgggcgcctaccaattgggcgcactcaccaaaaagtcggacatcgatgccatttgtgttgtgccagaattgccctcatgggaagcggcacagttttttgggagtgcaaaatgtgaaattcagtcgaacggcgacagaaaatgcgccgacaattcactcttctgccatctctgtttggtgagtgtcaaaaaattggggtttaaacttaaaaaatacttctgctgagatcagtgacgggcgaaactttgggcttcgtactttaaagcccaatcgattttttgggcatcgaacttcgagcttcgttaaaatattcgaagttcaaattatgggctcaagaaagaagaatgacacttttttctatttttcaaaattgcagaaaatttgtaacaaattagaacaaaatttcgaaaactttccccggtggcgcctatcggcaccccaaaattgatttttaattttttaaattgattcaaaaaccgcgaagcattaagaattgcaacaaactttttcgagtttcagaaaatacatattgatcaaattcaatgtgaaattacggttattacaaaagtgctagtgcttgggcaaaattaaaattccgcgcccatcgtttaggtggcaaaagtggcgaagctcaatcggacgccggacgcgtggatgccgctaattgagttcaaattcgaaatcagtccgaacactttcgttgcttttgacattggactcaccaccttcgcaccccaagaagaaatttttaaaaccgaagaacgaataaattacgaacaaagtgacgcattgtcagcgaaaatggccaacgaaattggccaattggccaatcggaggagagaatttattacgaagggtggaggatatgaggaactgaaggaaatgaacaacgaggaggagaagctgagggtaaagctcagatcattggcaggtgattggcggtgcttaattaagtctgatagcgacgctaaactttttgattacggaaagaaccccccagggggaattgcctggggctatcttttagttgggtttctatattcactaagccttaaaaaataattaaataaa

SEQ ID NO: 78245 - DNA, 655 bp, Heterodera glycines
atgcgaattgatacatttgtgggcgaagtagaaaatgtcagcgaaattttcgacctggccgaaaaatgcaaagaaaaatttgcaaatttcgaagaaaatgtcaaaaatcaaaatgaaaatttcaatgaaaaaaatgaagaaaattactcggatgaaaaagaaagaaaaaatggaaataaattgggaaaagatgaagaagaagccgacaaaacaaaagtttttgatgtggacgaagcactgaaatatgtgaattcggaggagaataatgagggaaaagataaaaagaaaaaaaagggaaagaaaaagccaaagccaaacaaaatgccatcagaaattggcacaaaatcggaggaagaaaatcaaaacgaagacaaaatgccaatgaatggaatggaagaaaaaaagttgaaaaaagtcaaagtgtcagctgacagaattccatcagaaagtaatttaagcgaaaaggatggacaatttgttgagaaagaatcttatgcaaaattaatgccaaaaacacataaaaatgatggcacaaactttgaaataacacaaaaagaaaacgaaaaagacaatggaagcgaaggagaaacaatgagagaaaaagaaaaagagaaaaaggaaaaaataacacaaaagaaaaaagaaacaaaaaaaa

SEQ ID NO: 78246 - DNA, 1204 bp, Heterodera glycines
atgccagaggaagcacggattataggagaaagtgggataaagaaggacatgggtcaaaagggagcggcctccatagctcagtcggttcgagcattccacggtatgtaaaagccgtgtgttcgaatcccaccggacgagttaccttttatgttctataaataaaccaaattttaataaacaattttggaaagggcttaatctacatatgccgatgaaaaaaaggctgattgtacaatttttatgtgtgtatttagacggaatccgtgcgcggaaagcgcgaagcattcagggcctggataacgctcacaaatttcttggtaagaaaatttggcccattttttttttgctcaaccaatggcatttgcacatttttcacacattctcgcgcaggtggaatcaatgcgggttgcctacacgcagcagttcaagcgccgatcattgcatcgtcactcgagcagttcacaggtggggggaagtgccgaaattcatggcatttttagtggaaattccacactattttaaatcggaaaatctcgtcaggattttcatggaatttttttatggttttttttaaattttttgaaattggcattgtgttaattttttcgcattttctttgcaggtggttgtccagttggccacgctggaggagctgtcaccgtccgcgcagtcgatgatgtcggcacggcatcgagcgcacacgcccacagtgccattgacgaccctttgatcgactcacgaatggattgatcactctgatcacactgatcactcacatattaatgtaaaatctgatcacacactctcatcttgttaactgaacaaatgagtgatgaaaggcgcggttgtaggtggtataatcactactgtaatttgtatgtaattcgattgacttgcagcagaacagacatttgcagcacaagttacacaaaaattctaattctttttttacaaattaatatctctccccaccagggctgggcgaagctcggcttagcactcgaagccgaaggcgaagcccaatttttattcgaagccgaagccgaagctcgaagcccaaaaaacccgaagttttcgaagccgaagttttttcaaaattttttttaattctaaaatttttttcatcacataatttcggttaaatatcaaatttaatcaattgacgcagtttctagagcccaaccaacccttttcgataaataaa

SEQ ID NO: 78247 - DNA, 6710 bp, Heterodera glycines
  unsure (1)..(6710): unsure at all n locations
atgccaccggaaattgtacgtcggcaacccgaagtaaaaaactaatttcaagaaaatctcaaaatttcaaaaaaatttccagggctacggccaatgcgcggattggtggagcttcggtgtcattgcgtttgaactgctcaccggctgttccccgtttacggttgacggcaaccagaactcaacggaggacattgcacgacgcattttgaccaaaaaagtgccatacccaaaatggatggaccgaacggcgcgcgacttcatcggccaactgttgaacagggacccgaagttgaggtgtgatcaccgattaagtctgatctgtcattgatcaagaatgatcaaccactgatcaacaaatgattactcattgatcaaagcatgatcagtcactgataaataaggatcagccacagaccaataatgatcagccattgataaataatgaacactcactgttcaagtataatcagtcactgattactgaagtttgagacatttatggttcggatatttgtcccggtcaatttcctcaaaatttaaaacataattaaatgcaaatggggctcaaatgccaagggctggtttgatctgaaagaatattgaaaaaatgatcagaaatgttttttacaaccttagttatacattgaattgaagagtattaatgttttttttaaattcatttatttatcctaaatttcattataattttttatatacttccatattttaatcaaatgtaaaaaattcatattccccacagacttggcgcccggggcgctgccgaagtgaagaagcatcacttttttgacggcaccgattgggaggcggtggaacggcgtcagacaaccgggcccatcaagccgagcatggccggctgtgttgcggacgtggaaaactttgccacaggcaataaaaattattttttgaaattttcaaagaaaattttacagaatttactgcccaagcaccgctgttctcgcctgcggataaaccaccaccggaatgccacacattcttcagcggctactcctttgtgtcgccgtcagtgatttttgccagcgacaatgtgatcgggcaggagtgcctggagtcaaggtggcctccggggaattttttttaaatttttgatttgatttacatttcaaaaaattttcttaaaaattaatttcattttttaaattcaaaaattttaacttttaaattcttacatatcggcccgattaggagaattaaatttttgaattgattgtttaaaatttaaaaaaaaatttaaaaattttcttgtcagggattattccatttttatagtaaaattaattctttttttcaatacattataagccctaaatgtttgggaaatttttttaaatgaaaattggaaatagaaggaatttttcgacaggctttgaaaattaaaaaatgatttttttttttttttacaaaaaaattcacccattaaaaatttattcaattttttaaattcaaaaattaaaaattctaacatctcggcggaacaattcatgttattttaagaaataccgtaaccgaatgagttttataaccgtcactaccgggtgctttttttaccataataaatttcttaccgtaccattaaaatactaaaaatatttaaaattttgtcacagtgttcgcctcctgtccgcccagtcgtccccattttttgccaattatcggctggacatcacggcacagggactgctcggcaaaggctcattttcaatttgtcgcaaatgcgaacgcatcgcggacggacgacaatttgctgtcaaaattgtgtcgcaacgtttcgcgcaccaagcacgacgagaggtgattaaataaaaaagcaaaaggagataaaatttgaatttattattattattttttaaatagcaaattttaattaattttttaaccctcttgtaaaagaaggttttaaaaatttttgttccactttttattgattattcatttttttaacttaatttattgatcactcatatcacttttaaaagtgatcagtagtccgcaaaattttgcatgtgtacgaaaaaaagtgataattgtttatcccaaattaatttaaaaaatcataaaaaaaaaaaaattaaaaaaaaaatgcaatatgcaaaaaggaaaagctacatttagcgatttttgaattatccgattcgttaaaatttttattttttgtgtattttagaaaaaaaaaatgtttaatggataaaaacccaataatttaagcgcataaatccaacgggcaaatacaagattatgtatgtaaaatccattctcaaaggatatctccaatacaaatttggtgtgatgggagccaaaatttataggaattacattggcaaatactcttgcccattttgtgccaggtccgcgtgctggaggcgttgcaaccgcactcgcacattgtgccgttggtagacgccatgtcggacgcctttcaccattacattgtgcttgaactgcttgacggcggtgaactgttgcaacggttgcgacgcatggaaaagttcacggaattgcaagcggccgaaatcatggcacaacttgttgctgctgtcaagcacatgcacgaccgagacattgtgcacaggtagaaggaagaagcattgaaaatttaatcaatcagaactggtcaatttttttaaatcttttttttgatgggattaggaaaccccgtcaaaaagtataatttaaaaaatatataanatatttactattcattattgtcctaatataataattaaatataagtctgattagagtaaaatcacatcagcattttgatcattttccgatcatggtcaatagtttggaatctttcttttatatagattttagcggaattggaaatcggagttccaatgccttaaaaaaaatatcgggaatttttttgaaattttaatcaattttcttaacaaattgcattaaaattctcaaaaattttcccggcggcgcctaccggcaccgccggaccaccattttaccatatttttgaaaaatggagaccaaaatggcaaaaaatagtaattttttggcaaaaaaaaacggctaaaaattttgtaaaatacacccccccccctaatttgggatttcaaaaaacgaaaaatacacccctaaaaatcgactgaaaaaagaaaaatacacccctaaaaaaccaaatttttgactttagccccccccccccctctgaagccaagggtctggctacgccttttggttggataagactgatcagggagctctatcatttcagcagctcaaattttgctgtgttaatttctaaaagttagaatttataattaaacattaagctcatcagcattaagctatcctgttttaaataataaatatatttgataacattttcagggacctgaaaccggaaaacattctgtttgaacgtgatgggcccgacgacgcaaagccaagacttcgccttgtggacttcggttttgctcgcattttgccacggcctgccgccatcggctcaacaatgggctcccaatcgctgatcaccccgttgtgcggcacgcttcactacgcggcacccgaagtgttggacattgaagacgaattaccccaatacaacgaggtgggcgggtgcgaaaagtgatttgatcaaatgaaaagataaactttgaacaacaacttgatcaaaatgagtgaaaaattaatcaagggtttgatcaaaatgagcgaaaatagattagcgacttgatcaaattaagcgacaaaatcgatcaatggcttgatcaaaacaaacgctaaattggttaatgatttgatcaaaatgagcgtcaaattgaacagaacttggccatcattaaatcttttttactcgtaaatggatgatttttaaaaaatttaggtatttatttttcatttttaaatattataaaataaattaaatttttactcaaagccaaactatggcgattaaattttatttgtatgttgggattttttggatttttgtcagaaaatttttttataattttcttcattaccaaatgtttagcaatgcgacctgtggagccttggcgttgttttgttcacaatgctttctggcaaagtgccgttccatgcgaaaagccaagccgagtcagcggcggaaattattgcgcgcatccgtgccgcggatttctcattttcggaccccgtctggtcaatggtttcacaatcggccaaggatttgagtgagatttttggccaattatttaagtgttttattttggttggaatataaacaacattttgttggaaaagaaaagttacttagagaaataaaaatcacacccacacaacggtctcgtggtgtagttggttatcacgtcagtctaacacactgaaggtcgccggttcgaacccggccgagatcatttcttttttcaatttttttgttttttgtttggaaaagcggaaatgcaatttataattatttttttaaaaaacttattttgttatttgagcttaataaaaaaaagaataggtattagcatatgatatttttttctcctaacgaaatacaaaatttattaaataaaaaattttttaatattttttgttatttcttacaaaagaaattttaagtttttgagtcgtaaactatttttttaaaattacagtttgaaccaacaaaagctttaagcctaatgggaagaataggtggtggtacctcgttctcaaaataaaatacacaatattttttccggcgataaggaaaaaattagagtcgagcaataccggtctcgtggtgtagttggttatcacgtcagtctaacacactgaaggtcgccggttcgaacccggccgagatcatttcttttttaattttattttaatacgctaatttttatttcctaataaaaaaagccaatttaaatttgccactttttttacagtcaccggactgctaacagtggaccccacgcggcgcttgtcgttggcccaactcggtgcccatccctggctacaatcggtctcaacaaccaccgatgacggcactgtgccggacggcggtgccggtggtggcggtggcaccgaattgccaacaccgaccattttgccgtccagcgctgacgccacatttaatgccactctgtccgcctttttgcatgccaatcgggacggctttcaactaatggatgtgcagaccgcaccgctgctggtcaaacggcgtggcatgaagcggcaacgcggtccggacacaacagcaacaacagcatcgggaagcggaggaaccgcggcaggtggcgtggcattaataaggaaaaaaagctgcgggtgggaagacggaattttctcgaaaaatttcttttttaggcgtatttagaaaagttaattttttaaaaattatatagaaaaataattctctgctcggggtaacctgaaatttttaaaaaaattacataattctttttcaaaaaaaaaattttttttttgttctcaagaaaattcaaaaaaaaatttattaaattttttatcaattacaaggtttttcctgaattctcttattttttaaaaaatcattaatttttttctttttttgattttttcttttacttttcctaagaaaaaatgtattgtattgttaaagaatcaaaaaataaatttaaaaaatttacaaatttggcaaaaattgactcaaaaaaagaggaaaacagttcatctcatcaatgcatataatgtttaggtgccaacgacggcggtggcattggtgccgagagaatggagcagtgcgcggcgaacaacaccaacaacaacagcatgacaacggcgacgacactttgcactgtgtcagaatgtccagaactgacaatgaatatgaacagcagcggcggtgatcagcaccaccagcaacaaaaatttaaacgacgtccaacaacgctgaatttgttcggcaccatcggggaggtggagcagcaacagcaacaacatgaacaccaacaaccgcagggcacgccaaactcggcggcatttaccgagtatcgggtaaataattaatgggcgggcgaataatcagatttttatttaaatttatatttaatcgcattaaaattagttttttttggagggctaggttgtttcgtgaaaagtgccaattttacagattttagcgagaaaacttgtcaaattattcgtataataaatacgataccttttggatgctttcttagcatgaaaaatttaaaaaaacaaattaattacattttcaaaaaaattatgactaaaaatgctcaaaaaatgacatattatttcctcgattttttaaccagattttcagcaaaaaaaaaactagttttggtgaattttcggaaaaatttcgtgaatttctgaatttttttggggaattttagtggtagaccttggaggagatagtaccaagaagaaaaccgaaaaatttttagcaaaaaaattttttcctttaaaatattattttttttttaatttataattgtttaatcgtatttaaatattaactttttgtataggacaccaagccgccctatttgaagtacagtcgtgacgattttacgcgtgccgaatgtggcggaagtggcgccactgttgaacagcagcagcacattggcggcggcacacccggcatggccaatgatcagtcaagcgggtgctcatcactgtctggtgcatcgacaatccgactgtccaacgattcgaatgagtcccaatga

SEQ ID NO: 78248 - DNA, 1221 bp, Heterodera glycines
atgattaaagtaagtcatttaaatttttgaaaattaatcacttataaatacttttgatctaatgtaaggcaaaaatctttttcattttgcaattaggataagccaaacgaatatttagatttgctgcaaaaaataggcagcgattatttcttattttccaaaaattccaatttttgtcactgatgaattgagttatcccatttctaattatttaatttacaaaaaatttatttctaattatatatggttcaataaattatagtttaaaaacaacggcgaactcaaagtggcacagatttacccactttcaatcaatcaactcattgatcaggagataacagtggaacaaattgccacaaaaatccgaggaaaaagcaacgatttgtgggaggggcaagtggccaaatgggcaaaaaaatgggtgggaacgaaggacaaaatcagcgagaagaaaaaggcaaagggcaataatgggaaaagcgcgtacttctccaaattctatgacagtctgagaatggaccgtctcgtgctgttggccaacaacattcgtgaagcatcgataaataaggtgggggccgggtcactttggcgcgggatattttggcgccgcaaagtttaaagtgttcattctcttttctatgaaacgaagaaatggcattcggcgccaaaacggccagaaaatttgaattttttgaggtttttggccataactttttttgtgtctaactaaattttttgaaattttgcaggtggttaggggacctggatacccggtttttcaatatccggaccatgttttttgaaaatccaatatctggtacccgacccggtaggtccgggtctaaaagtacactgataagaatgggggtctggtcaaattgttaagcaaagttggaggagaaacatacaactgtatttaaattataattttatttgacctcgcaataacatgaatataaaaataaactttatttgtagaaatttactgatagtactgatgtgatcgaaatccttgtcacgacaaccaatcaggaaaaggacaagacggggattagtgagacattttgtcacaaattagcccaagaaaacgaagtgtccggcaattataaacacattttgataccgttatgcatgaacaggcgcaacgaagtgttcagagaagatgaagaagtgatcaaccaaacagacgaaaaggcaattttactgagaaattatgattag

SEQ ID NO: 78249 - DNA, 938 bp, Heterodera glycines
gttattgaacgattaaacgaaatcgtcaaagatcctcataacttcgcagaattgaccgaaaatgaccttttggtgaatgcgctagtcacttttagttttcccaaattgcgtcacattttcaaaaaatacgaagaaaaatatggggaaaaaattgaagagcaggtggacaacgcttacatcaaagaattcaaacatttatcaaaaaaccgaataatgaatctacttaaactggaccttcatgtcgagcaacatttttgggtaattattttttgtgttaaattttttgatagatgcattatgtatttgtttagcaaagttaattaattaaaagagattttagaaggaaagaatttttaaaaaatgtgaaattgctcacaattttttgaaagattcatcatgcatttgtttagcaatttttcaaaattttattcctttcgctttttagctttttctcaaaaacttttttctgaattcggaaaaattttcacattgcaaaaaatccttgagtctgacccggacgaaataattaaatttagcaaacattgaacgcaatcttaacggacattcaaggtcgcccatatttttttgcacaattattgaaagaaaagcttgacaaattgcgaggaaacgaaaagtgggcctcagcggacgcgctgaaagacgtgacgcgaattttgctcactcgcgcacccatcgatttggccgacattgaccaggaatttcagggattgagtggcagcttgaccataagaatttcgatttcggcttacatcgagcaaattatcggattcgaaaaagagaaaaagcaaaaaaagggaaatgtttttcgaagcttttccatacgttcaaaatcgcacgaagacattggcaccgccgttagtagcgaatccaatacggcagcagcagaaggaaagccatcgcagaaaattgaactttga

SEQ ID NO: 78250 - DNA, 1330 bp, Heterodera glycines
atgccagtgttcttcctttacttctctcgaacatacatcggcttgacacagcgccagttgttggatggtgttaacgcatttggagataatccactcaatttttcacccattggcaatcattgtttgtttaaatttatgcattttatttccaaaaatttaatttttagctgcactcgggacaacaatttcgaccatcaattcggaacacagctatgcggctaccccaatacagttcggcatcggcaccatcaactcttacgtggccaaccactgtgagtccacgggagcagcttgttcaatattcgttgagcccgctaccgactttgacagctccttcaggcaaaatctttaatcaatcatccgtttaaatttaataaaaaaattcagttccagcgtgggaggacgaaatcgttcgtgcgccacattttccaattccgctttggaacatgcactcacaggcaacatctgccctcgctcgtacaaacaacggactggaggcaactcatcttcattttatggtctttaatttattaaaaacaaattgaaaagaaacatttagaaaggcctctgtcaccaccccgccctctcggacttcatttgtggggttaataaaagcatcgacagacaggtggacgctgcccgatctgctcgccatttcattcacaagcgacacaaacgatacatcctccaggatgctgtcattatgcgaattttggcggacgcgtcgtacaacagcaatggtgaaattagtgatctgatgtcggcgcttggtctccaagttgaaggatatgcgggaaaattgagagattttaaaaattacgatgattcaattgtccatgttccgtgatgattttattgaatgtttaataaaattatttttttcaatatgtgaagctgagggtgtgtctatagagagaattcggatcacaataggagcattaaaaatttgttcgaattttggtcgcttagaaattaaaattttttcctatttcatggttatatttgtgtttagggttaggcaaggggctatataaatgtcgtattcgtattcagcgaccccgaaaagcctaaaacagacccgttttccggctttttatgagctttttagacttttggacaattcgtgggtttttactcttttggacaattcgtggcttggacaaaacgtggcttggacaattcgtggcttggacaattcgtggcttggacaattcgtggcttggacaattcgtggcttggacaattcgtggcttggacaattcgtggcttggacaattcgtggcttggacaattcgtggcttggacaattcgtggcttggacaatttgtgg

SEQ ID NO: 78251 - DNA, 396 bp, Heterodera glycines
atgattcaaaataacattactaatgacaacaacaataacaataataataatgccccgaataatggcaataatggcattttcaaccacattcatcaccagcagcccacaactgatgaagcaaaacaactccgtgccaccaatattgggctagccgagtgcttgaagggtggtgtgattatggatgtgatgaatgcggaacaggcaaagattgcgcaggaagcgggtgccgttgcggtgatggcattggaacgcattccggcactgatccgacaggtggtgtagataaaaactgagaaaaaaaagaaaattttgtgctaaatttttataaatcattttttttattataggaatattaaattatttaaaattaagatatttatatttttctcgttcgaa

SEQ ID NO: 78252 - DNA, 1061 bp, Heterodera glycines
cggtcccggtttgcccaagattccgggtcccgctcaactctagttaattcattttgtgagcaatatgaaagttaataattaataaaattaaaaagtatatattaatttaaaatcgattttttaaaataaataatgaacattccaaaattaaaaataaaaatgtttaggcagaaattcggaatctcacaaagatgaatgaagaggaactgatgagctgggctcgtttgaacagtgcaccaattgaattggtttttcaaactgcacgcgaaggtgggcaattaaagataaattaattatttaatttttaattcatttttattatattttctttaattggccattttttgtggctttttgcaaaaattataattatttttcaattttttaagggagtttgccggtgccaaactttgctgcaggcggtgttgccacgccagcagatgcggcattgctgatgcagttgggtgccgaagcggtgttcgtcggttccggcatttttgtatgttggcataaaatgtcatcatcgaaatttttgttcaaaaactttatgataatgtactaacaaataagaaaaattcttaattttttcagtaacttaaaaattaataaaaaaaaatcccaacagaattttaaataattattactataaaaaaccgaaaatttccttttattttttacgtaattttcgtttgtttaaggattttctatgaattgaagttttgttttttttaaatttattctaaaatttttattggctttctgatttttgttgcattttgctgccaaagacaaaaaaatgccagaaaaaatatcaaaattttttttaaacatctcggaggggtgagtaataaataaaaaaacgataaattttaaaaaccatttaaattcctaatagatgagcgacaatccggcaaaacgtgccgccgccattgtgcaagcggtcacccattttgacaagcccaatgtgttggcaaaagtgtcacgcggcttaggcattgcgatgaagggtatggaccgtgttggtgccggaaaaacggtcacattggaacaataaaaaagaa

SEQ ID NO: 78253 - DNA, 2257 bp, Heterodera glycines
gctttccacgtgtacccaatatcacatcagtcggggtaagtattaattacaattaccgtatacttcgcatatttactattcattttctgatcattttttctttgtcaatttgccaaaattcgtaaacaaactttttggaccaacattcttgaacaaaaagagaaatgttcaaaagatcataaatagggcttccttttttaggcaaatgcctaaaattttgcgcacttgatacgcaaagataagcacgaaaaacgcgttttccgcttggtttggggtgtctacgatgacttttataatgcctatttcgtggtttttgtgcctaaagtgcctattttaggctttttgaaaaaatccataagaaaaatgcaataaaaacgaaaaaaccacccctaagaaatgaccctaaaaaatttcagaaaatacacccttaagaattgagaaaattttcaaaaaaatgatcccaaaaatttaatatattttttcttaataaaaatttttggtttaaaattttgtccttatttaataatttcatttacaattgaaatatttaagtttttacttgttttaataccaaaaaagcgttaataaaaaaaaattttttttgcctattttagggtttttgtgcctatttaatgcctattttgcgatttttttatgcctaaaaaaggaagccctaatcataaaatatgacaaatgaaaaaatgatttcactcaaaaatattgtaaatttcagtaaaatatgctaaaagggattattatatacattaatttttaaaattctttttgaatattttttaggaaaaggcgtttctattccaagatgcgaattgtggtgacaatcccgaatacaaagatggtaattaattctcgatattggttgaaaatagcttagccttcttcccagcgttttattcttaaccgaattaaaatatcataaaaattaaatttttattcgaaattaaaaactaatttaagatttattcatcaatcatttatccttttttattttactattattctctgcttttgttattttaaagatagttttgtcaccccggtgtccagctgtcccggcggaagttgcatcgaaatgttggtcgtggcaggtgggaaaaagctgtggtgctattagccacacagaaaaaattatatattatatttagcacttaatttttgcgtaggggatgccattttgcctggaaagaaatcggcatttgccaggatttggaggtcatagttcttacgttcgatggcacccataaaagcttgaaaagccgccccccccccccctctaatatatcctccccgctcctaagaggaggtcgaacggtgccaggtctttactcaaaaaccatcaaaatgaaaattttgacaaaaaattatataatcttgatattattcgaattagccctaaatgttctattatcttgcaaaattaaaaaaaaaattcattaacattcaaaaatgttatgacctgagaaactcaaaaaagcaagtttttttgaacagttttggtcatgacataacttactttaaacttaactaaactttttgaaattttgcaggataatagaaaacacatagggctatcgaatgatattaagaattaaaaatttgattgcctttgagtaaagttatatcaaatattttttgattttggtggttttttgagtagcgcccattttgatggttttttgagtaatgtcatagcaccggtcgaacaacaggagcccctggggctttataaaagaaacaccggtttaaaaaaaaaaggattaccaattttcgtacatttaagacggcatttactcggtgctgcgcggctgtctcagcgactttttcgacttcccaccctccaacggagaggagggctgcacctgggggctgtcctcggagaatgcgctgatcgccaccagcgaaaagggcgaattggtgcaaaatgtgcgagtgggcgtcaatctgtgcccggcaaaagtgagacggacaaattgccaaaaattaatccgctcacatcaaatagtgtgaactggaattcaattaatggagttaattaattagatagctgatctgattgattatgctgctaattccagactttcttatcgcgtcagtcatttttctgctctattgcagttttatgcgactataaaataacatgactagggctgccaaaaatatgtacaaaaagtggtccaaatatgtacataaatatgtaagaaaaatcccaaaatatgtacaaaaaaccccaaatatgtaa

SEQ ID NO: 78254 - DNA, 989 bp, Heterodera glycines
atgcaattcgttgttgagaccctccgtggaatatgcccagggcaaacagcaaacggacgcttcgacgagcgccgccggcaacgcttggccgtacagctgccgaaaatcgacatcaagtgaagcatttaatatctaaatgagaccagcagaaagtaataacgcccaattgtcagattatatcatgaaagcccttttagagggaggaaattgccaaaaaaggataaaaatttgattaaattaattgcaaaattatgaaaaaatattaaagtggttcaatgcttacaatgctcgcgctatgattgggacggcgactgtcactggaactaccgggagtactgtaccggggcatggtaattatgcacagaaaatttcaacatactatctgaatatgtattttcagaagataaattaaaaatatttaggtgcacaaaaacaattggatatgttaacggtgtgtttttgcattaaatatatttttgataatttataaaataattatttatataaatgtttcattaatctgtttaaatttacattttaaatcgttaattattcatattttaattgtctttttaggtcgttggcttgagcagcgcggctgtgccccattcaatccgttgaacagccaaatttgcacaaaagtcgagacgaatgccgcgttatcagagcttagcggacaaaatattgacattgtgcgttatgcactaaaaacggcaattagtcaactaattaacattaattggctctcgattttatctttctttttttgccaatattttttttttcattttttagcatgtgagctccgaacaatgcttttgcaatcagaaccgatgcaacggcacttttacaccaaaaacgctgactgcgctttctgtgctgtggccgcttatgttggcatttttccttgtgaagaattattgaagtcgcatttcaaatcgatgacaaaatggcattttggattatttttaaatttttgttttataaaa

SEQ ID NO: 78255 - DNA, 724 bp, Heterodera glycines
atgagcagtggagaagatcgacaaatggaacaggaggacctgcaacagtcgacggtaattaatgaataattagcgggacaatggtgaagggaatgaaacattgcaaaatgctgtgccaatggcactagaatacggagacgcttttgtttattgttttagcgaattgtctttgctctataaaaaaaacttggggaaatattgatattttgaattgtactgcaattctatgttttcgtccattcgcaggttggaacgggcacaaaacggaagttggcagctcaggccagcttcgacgacgatttggacctggatggattcagtgagttggacaagttggagccggcggtcgctgccgcagcagggtctggcgcgaatgcagagcaaacgaacaacggaggcacaatgttgcagaatggcacggtttgtttttcaaaacgccaaaattttcattttttgtttacggatgtaatgtttattcgttagtttgttttaaaatgtttatttctgtcactgtttcacctccactttggcagatgatgctcaacggtggcatggccccccaacaacagccgccccctccgccgcattcgtcgagcagttcaaccgccggagggacaccgcaacagcagcaaagtgtgttgcaggagttgctgctcacccaatcgaccacgtcggcgacgatgcataacaacagcccgaggccgggcggctcttttgcaacaaa

SEQ ID NO: 78256 - DNA, 3490 bp, Heterodera glycines
  unsure (1)..(3490): unsure at all n locations
aaaaaaaataaacaaagtgctttatatcaagcggccaatgattcaagaaatgcaattttttattcactaagtgcttttgaaataatatgtaagaaatgtggtgctttgcattttaaagaagaaagtgcgacaaaaaacgccaacggagaagcattctatagctgctgtaaagatggaaagatttctttactttcagatcatttagaagaatatccaatggaattaaaacaattatattttatagaccatccctaccacaaaaattttattacaaatatacgtcgaatcaatagtgcattttcttttgcttctttaagttgtttgcgtttttcgttcaaaacacctgggcccccatgtttcaaaatacaggggcaggtttatcataaattcaatgaaagtgcaatgccaaacaataacgaattgccaacaaatggacaactttattttattgacacaaatgatgcggctgagttgcgttgtaaaatcaatataagttgtgaccaaaatttaatggaatacatcgaaaattttatgagagaacaaaataagtttgctaagtcttttttgttaatgaaagaagtttatgaggaacaaaatgaaatttctaaaaaagaaggaaaggaaataccggaacttagattgctttttagtctcaaacaaaattttgataaaaggcgttataatttaccacaaaccaatgaagtttgtgcaattatgttttgcgattctaatgatgaaattccaccggctagaattgttgtatacccaaaaataaataaaaaattaaaaaatttatatcctcttgataagtgtgtggaaccaatgacttacccgttactgtatccactcgataaagaagggtaccatattggcctaaaggataaaaacggcaaaaaataacactttgtgattattttaaatattttctatatttccgtgaaaaatttttccctcatttttatgcaaaaaagctctttcaacaatggttagtggattctgctgcaaaaatcgaatgggacagacttgaatacattaagactcatcaaacggaattatgtagtagcaattattcaaatgttgaggattttttaaaattgaaagcagaaaaaagtggtgccgaaatccaaaggaaaataattttgccttcgactttttccggtggccctcgcaatatgcatgagcattttatggatgctatggcaatagtcaacgaaacaggaaaaccagacctttttgtaacttttacatgtacccaaaacgaccctgacattttaaaatgtttaaaacctggtcaaacaccgtctgacagacctgatataatagcaagagtttttcaattaaaaaaagattatttattgcatttaattttgtctgaacaaatatttggaaatgttgtcgggtattgttgggttatagaataccaaaaaagaggtttaccacacctccatttattggtaacattagaccgtaattctaaatggcggacaaccactgaaatcgataaatttattgctgcctctattcctaataaaagtgaagacgctgatttatatgaaattgtttcgagttgcatgatgcatggaccatgctcagaaaaaacactttgttgggatcacgcaaaaaacaaatgtatgaaaaaattccctaaaccatttttagaagaaacaaaaataaatgaggatggttatccttattataaaagatcaaacgatagtagatttgtatttaaaaagggagttaaattatcaaatcaatttgttgtgccgtacaactatggtaaaagttttgctgatctaaaaactgttaatggtaaaaaatatgattcttttgcaaaagcatgtttagctcgagggctttgtcgagatgacgacgaatggtttaaatgtatggaagaagcaagtattttttctagaaaatatccgagaggacttagagttctgtttgcaaacattttgattcattgtggaccaaaatacccggaaaaattatgggatttttttaaggattatatggttgccgacataaaattaaaaaatccaaatttgacgacagatttccattatcaaattggcttacagctaataaatcaaatcctaataagccaagaacgttccttatcagattttaaaacaatgccacaaacaaaaatgctaaaacaaacttatcaagaaactgataattttaatcccatcgaagaaacaaaaattgcagataaattaaaaatgatgttaaatgaggaacaaatgaacataattaaggaactgactgatgtttttgaaagtaataaacaaaaatgcatttttattgatggaccgggaggaacgggaaaatcgatttactttaaaaacaatttatcattatgcgagagggaaaaacaaaaatgtttgtaatatggctttttcaggaatcgcagcaacaatccttaaaaaaggaagaacgctgcgataatcgttttaaattgccacttaatattaataaaaattcaacttcgggtattgaaattaatagtgaagaagcgaaatgaaattaaagaaacggatatttttatttgggatgaagctccgatggatcgcgttttattttggatataattgaccggaaactaaaagaaataatgcagaataatttgtcgtttggtgggaaaacgtttatattaagtggtgattttagacaatgccttcctattaaagaatttgcgataaggtctgaaataattgatttgttgattaaaaattcgccattgtggaaagaatttacaactttaaaattaacacaaaatatgcgagcaaatacgaatgaaaaacagtttgcaaaagatttaattgaaattggtaatggcacaatgggtaaaaatggttatttcaatgtaccggaacactgcatttgccaagaaaatttagtttgtgaaatatatggagaaaatttaaaaaaccataattatgatgaattaagcaagtgcgcaattttgtcaccgtataataccgtagtggataaatataatgtagagattttggatttattacctggtgaacaacattcatatttaagtattgatgaaacagatttaagtaaaaataacccagtaactccagaaattcttaattcattgaaatgttccagtataccagatcatgaaattaagcttaaaaaaggggcgatgataatgttattacgcaatttaaatgtaaaggagggattgtgtaatggaacaaggttgcaagtgattgatttgggcaaacatgtaataaactgtatcattaaaagtggagatcgaattggagaacaaacttttattccaagaattactttaattgaagagaaaaaatttccttttctactgcgtagacatcaatttccaatanagcttgcttttgcatttactatagacaaaagtcagtctccaacatttttcgaaaattgggtcttgatttncaatgatgatccctttttcacatggccaaacatacgttgctttatcaagagcgaaatc

SEQ ID NO: 78257 - DNA, 2314 bp, Heterodera glycines
atgcagctggtgcggcttgtcggctgcaaccgcactttgctcgcggatgccatccgctgtctgcgccgcattccacccgccgacttcacggaacagttgtggaacatgcagttgaacttcctggagtttccgctcgtcattgtgtcgcgggatgccaactttttcagcgccgaggacgcgtttgaggcgctgcgcaagcgccactacgcacaggacgtgaacctaatgatcggtaattagtttatggacgaagtcggcacagattaattaacatatttaaagcgtatgcctttctacaaattagattttaaaattttcattccggatctgtaaacggaataaattcggaaccgtattttctgggttgaattctagattttttcgggttttagcggcttacattaactgggttgagactgtatttcaacgcactcaatccgttttttaaatcaaaatacgatagttttccacaattttaggcattctctgcatttgggcaaaattcagtgttgcctatgggtggttcttatattagaaaatttagaaaattagatataaaataattgatttcttttaatttaggcatcaatcatgacgagggcactttttggtaattcacgataattaacatccaaattaaaaattatgcattttttgtatctaatttccaggaacatttacaacatcccaaaattctttgatgtgccacatcagccaatgcttagcctggataatttcaatgaatgcgtgaagacggcattttcgcgcttgccagacattgtccgagacgcagcatcggttaaaacaaaaaataattttttatattaattagaattaatgatttttattttatttaaaatttaatagaattttcaatttattaacattattaatatttctttaaaagcatgtttatttgggcgcacggcgttgtgagtacgagacgggaatgcacaaaaatttggccgatcaagtcaatcagatggttcgttcgaaatttttacataaatacataggatttaaattatttttttaaatactattaatttcttaatttaatcattctttaggtcggcgattattttttcacttgtgacagcatttggctggctgatcaggcaagaacatttaggaaaaatttattgtttattgaacataaataattatacactgatcaaaattgaaattttatgcttcaatacatcaataaatatcataaaattatcactatttttctgcgatttataaaaagaagaaaccatttttagcttgacaactcgccagcccgtgtttacgtttattactttgaccaagcgtcgagcgctgtaagtaaaaaaattaattattttaaaaataatcaaatctaattgggtaatttgttttatcaattaaaaaatttaaatttcagaatccgtggccaaaatggactggtgtaatgcatggctatgaaattgaatacgtttttggcgtcccaatttataatgagagtgccggatatacaaaaagtaacaaaaaatgaataaataaaaaaatatattttcaattttaggagagcaaattcttagccaaaaaatggtgaacattttcaaaaataattgaaatttaattaaaatttaattaattttagattaagctgtggacatcatttgcttccaccgggtattaatattttcaaatataattgttatttttaaaatgaaaataaattggtcaacttaattgcattagtttaatccatataaaaattacataattaattaattagtgcttaattgataagtttctcgggatttcttgttttcggatttctctgattattttcctattattttaggattccaagcttggaccatcgtgaaggcttctcggatcggcttcattggccccaataccattcgcagaacaaccctcgttggcttgagctccgagcatcgcacatcaggctaataaaattttacaaaaattttatttcgttttatctattttgaattttaataatttaatttatattttttgtaggccaatgcgcgcaacaaaaaagcaggaatgccgtatatggcgagcatcgcgagacatggaatacaacgaatacagtaaaacattattaaaatattatgcaatattaaaaattaaaaataaataataattttgaataaatttaaatgatttataatattttatttaaaaattttcagtgatggaaaaattgacatccgctttatctgcatcatttgcaaaaacgcgactatttccacagtcaattgtagctatttttttcacactgatctctgtgcaaaaaattctcatttactag

SEQ ID NO: 78258 - DNA, 147 bp, Heterodera glycines
cgccaaaaattgagtgaagtatataaaaagatatttgagaaagagatgattgctatgctgcatagagagttcactggcgacttttgggaactgatgtaatttttttaaacataattttctcattaaatcatgcatattttaaataaa

SEQ ID NO: 78259 - DNA, 1575 bp, Heterodera glycines
gttcagcccgctgctgaaagcagcagcggtagctcaagcagtggtagctacgacacacaggaggttggacattttgataatttaataaattcttttcaattaattacttcgctaattaagactcaaccgagcggcagcgatagcagcagcggtgcgtgcagtggagcttcttgcggagaagcggtaaaaaaacaaattctaaatttatttattacttttttggtaaaatgatttttgaaattattgttttttttttgcttttaagaatttagtaagtaatttttataaaaaagtttttttctaattctcaggctcagcctggcgccagcagcagctcctcatgcagtggtgcatcatgcggacaagcggtaacaatttgtataattttttgaaatatattttaaatatttatttttattatttgaaatttgtaaatttctttttttatatattatattagaaaatttaaaatatataattttcacttaaaattttataattttgtgttttttaattaaaaattaagaaagttgtttattttttaggctcagcctgccgccagcagcagctcctcatgcagcggcggcgcatgtggacagcaagtgagaaatttggaattttcaattttcatttttaaatttaaattttttttctatactagacttcttcatcttcctcctccacatcgtcatgttccacttgcggtctgaccagctacaacaacaattggtccagcaaaagcagttacaccacaagcaggtgggtgtttgatttagtggtgtttcgggaatacaaaatatacgggtcgaaaatttggtaaaaaattggcgaattttgtctaacccgaaccccctcgtgggatgaataaatgtatgacaagaatctaaaaaaaaaataatttgttagaatattaaattaattgcacttttttatattgtgtttttctctcaattagtcttcgagaacgagcgatgcttcttcaatcatatacgaagctgccgccaatttcccgactctagaaaggagtcctaagagatttttcacaaaatattcttaaaaaatatatataccgtttaccgtatttttttaaaatatgccctcgggggctctgggttcaaccccactcaaaagagggctctaatttagggggagggctgtattttagagaaaacgttattttatttagtaaaaatgaatttttctaggctaattattgtgaaaatgtcaatccgtgttttttttctgggttcagcgccgattcaaaaaatggtatccccgcgcgttcgggacaggaacaaataatgacattaaagcagagagatccgtaaccaaaatgttttccccatttaaagctccagcggcagtgccgcggcacccgcccccgtccccgcagccgcgccagccgcgggtggctacagtggcggtagctcagccggtggacactcctcctcctcttcctgctacgtgtgcggacgacacggcctcacctcctacccgcaaacgtcgtacacaacgcggacctacggtggcggaagcggatgcggaagcggcggctgtcgcagtctcggctgtccg

SEQ ID NO: 78260 - DNA, 1215 bp, Heterodera glycines
atgctggcaggaggcctgtccctaagcctcttgtgcttcatcttcaccatgtgttccatggtgggatacgccatggcaggactgagaatccttttttggattttctcagtcttgttcgcgcgcttattcaagccgcgaaaagagacatgggtattgagtgaggaggaggaaaacctcctctatcctcaccgacgaatacgccggcccaggccagcaacaagaaactgggccagtggccgagttagccaaatgacaatacttgtcatggcatctcttccgtttgtacacgggggaattgagacagtggccataatggccaaatcagagagctgtctcaacaacggcacaacgaaaatgtgccaagtcaagggaagcgtaacccttgcgcttctcccggcaggacaaccgaatgtcctgtcaatgaagaccgatgatggtctcattttgggaacccttcaagtgatcttgaaggggctctctctcgaatgccaagtatacaccaaggcttggaaacgatcatacgagatcgcttccgtggccagcaaacgatgtccgtcggctggctcatgtgtcggtgacttttgcacaaaagtccgaccctccacagccatccgagagctgagggagaccgaaacgttccccgggaacagtttctgcatcgacagcacggctttttggggaaaccaatgtctcctagcagccagttcatgtctcttctacaagtggtttgccaaaccacgctcatcagccatttacgaagtcatcggatgcaactcttgggagtttggcatccatattcaatttcgcctcgattctacaactggaagaagtaccacagtcgaaactgtgcttcttccaggccgtgtgctcaaatggcacaacatcagcatttcaacaataggggtgagccaagcaccgactcccctattgaacgctgacttcctgattgaaggacgaaatgtcgcccttgtccgtgaaagaatcacggactctctccattgtacagatttgaaagccgcccaagcttttaactgtactctgggaatcgacgcatgcacgggctgtcttcccgatcacacagacgggacagtctcgtgccattgtcgcgtcgccaatctcgagggactaatggaagaccttcagcggagacttccgctctcattccgccattacgagttgcggaatatcggaaggcggatattcgccataacctga

SEQ ID NO: 78261 - DNA, 1208 bp, Heterodera glycines
atggccaacggttggccaatgaaggaaaagccgatcagcggaaaaaggacagagcgattggagagcaaatcggtgcagcggagagagtggagacattccttaaacggaaggggaaggggagtggatttgatgatgataagcatgagggaagggggacaaaacgaacagtgccgaaaggctggtggacaaattgccaaagttgacggccgttgtcggaaaggacggagagggggagagagggaggggagaaacacatggaacagagaaaaagggggggagagaatggaagggagggatgaaaaggaagagggagaattggccaaaagaaacaaaaagagaagaaaaggaagtggataatgaaatgagaggaatttgctggagagagagagatgaggaaaaggaaaatgaaaaggggggaggcaatcgatgggggcgggggaagcgaagtctgttttaagttaaagtgcaatggcccagacagaccaatgagtcacgtgacagactggtgggacaaaaaaaggcggaaaggggaaaaaggaaacttttaaaaaaggaaaaaggaaagagaagagaagaaggaaaaggaaggagaagagaagaggaaaaaggaaagagaagagaagaaggaaaaggaaagagaagagaagaaggaaaaggaaagagaagagaagaaggaaaaggaaagagaagagaagaaggaaaaggaaagagaagagaagaaggaaaaggaaagagaagagaagaaggaaaaggaaagagaagagaagaaggaaaaggaaagagaagagaagaaggaaaaggaaagagaagagaagaaggaaaaggaaggagaagagaagaaggaaaaggaaagagaagagaagaaggaaaaggaaagagaagagaagaaggaaaaggaaagagaagagaagaaggaaaaggaaggagaagagaagaaggaaaaggaaagagaagagaagaaggaaaaggaaagagaagagaagaaggaaaaggaaagagaagagaagaaggaaaaggaaagagaagagaagaaggaaaaggaaagagaagagaagaaggaaaaggaaagagaagagaagaaggaaaaggaaagagaagagaagaaggaaaaggaaagagaagagaagaaggaaaaggaaagagaagagaagaaggaaaaggaaagagaagagaagaaggaaaaggaaagagaagagaagaaggaaaag

SEQ ID NO: 78262 - DNA, 1222 bp, Heterodera glycines
atgatcagaaacgcacagtgctccgctacatcaaggcctgtgagacgtcgccaagacagcgaacgagggaaaagctgcacaaatccttttgagcaaggaaaagcgacggatcatcttctgcactctttacttgctgaacagattggcacactctttgacgacaccgacatgatcattgtggacgagagtgggcaagcctcttatgtccaactgttatccatgctcaccaattttcccaatttgaacaaattgttggtagcaggtgaccgttggcagctgagtgtgaatttgaaagatgtgccggaagctgtacaaaatggctatggattggacaccgccattttaaatcttgacgcagcggcgggcgttgatcggacgactttgactgtcaactttcgatcacacccattcatcacggaatgcatttctgccggagtatatgccgcgcacaacgaaattctgaccactggacgaaccatcaaacagatggaccaattaacatcaaaaactcccatttcacttccagtgccgcagtgtcccatcatttttgtccatcaaattgatcgaatgcaagaggacccgacctcattttcggcaacgaatccaatgcaaacccggactgtcatgaagtgcttgactttcctacggccatgtttcaacggattgattcgcgttgtctgcttttacgctggccaagcgaaggaaattggaaccgaagtgtctgcgctcaacatgccgaacgtaatggtaacaacagttgatggttgccaggggcacgaggccgaattcgtcttcgttgtcacaacaaaaagcggcctgagctcgaatgacaacagcggcgccttttggaacgatgaacggcgtgttaacgtggccctcagccgcagcaagttcggcatgatggttgtcggcgatttgaagctgttgtggtcagctggcggcatttggcggcgattcctgcgcagagctctggacaaggccattgctgtgactccggagtacatccatgcgatgatggatccgcatccacaatttgtggatggcgtaattgccacccccaacggatcagtgaaagcattcgacttttacgatgattggcaaggctctgatggtccctttctgcctaggtcaattagacctccgcgcatgttattcgctggcacttcgaggcagcagcagtcagcacgtcaacctggttcagctcatccgaacatgcccgctg

SEQ ID NO: 78263 - DNA, 1515 bp, Heterodera glycines
atgattttggagacaagcgtggacccaatggccacgctgggggccaaaatgcttgaattggaaggagcgtcattcgtgacgaataatcctgagaaaagtggtgaaggaagtgaaaaaagtgccgggacaaatgatctcatggagacagaagaaggagagaaaaatgagggaatgccattcgtggcagaaatcctgaatgtggttaatgaaatgagtggcacggaaatgccagagaaagctcaaaaggcgggttttgggtttattttagatgatgaaatgcatcaggcattggacaacatcgacgaaagcaacgacaccgccggatttgggacttctcatcttcgatgtgccattgtccaagtgcaatcatccatggctgtcgcaatgctgaagcgattcaccaagaattgcccttggtttttcggcatttccaacggaactccgacagggagtgatcgccgtctccgattgggcgacgaagtcgacattgtcaacttcgcctggaaaagtggctacgaagtcctgcggcatttcgaccaggacggcacttctcctccatggctcaatgccggaaacatcaacatccaagcaacggcaatcaaagccaacatcgccaatccgacgaacatcgttcccaaaatcgggattgtgcttaatgtcaaacgccgtggaatgcgcaaaacgaacgtcatccaaagcctaacggttgtggcacccggcatgaaagttgcacaaagcttaccaggctgggctcttggtgagaaggattggtttagaaccgggcaagctgtgcttgtcgaaacggttgaattaatgagacctaatttgtggaaagtcaatcaaatttatgcactgccgctcaattgcccgtttggccaagtgaatgatcggaaagcctaccatccttttgtggctgttggcattgatcaatccccaattttgcacaaatttccattcagaagaggggatttggatgccaccattgcgcaaggcgaacaagcaattgccgcggcagtcacagcatgtttggacaagctggaggaggacatcctgcggtttaccatcactgccgaacctcaagtggaatatggagcggaagccgacactgccataatcaccattcgacatcgcttagacaacaagcaggaaatggtcgacatgtcgaaaatgtggactgaagaccagccaatccatgtgcgtgtggcagccaaaggggccaaaccatgtgccaccggcttcatcatgaatgttgaacgacaggaatcggaaacgggactcagcattgtcgccaaactcttcctagcgtaccaagaagccaagaactacgattgtgaggaggcatgggaccgaataatggacggggaattgaccgaaattgagcctttgcattctaggaaaatcctaatgcaaagggccgaaaaattttcagttaatttattcactgaaatggcgaaaaacacaacgacgggactcggcacaattatgtccattctaatggcacgccaaggggaatga

SEQ ID NO: 78264 - DNA, 2225 bp, Heterodera glycines
caaaacaatcattaatttttactaaatttaacctagaaatagacaattttcaatgaaagtctgtttaaaatggtcaaaagttctaatttttctcccggcagcgccaatcgcaccgcccaaccccaaaaaataacgcacaatttttcttaacaaattgacccaaaatcgcaaaaattttgtctttttttggtgaaaatctgttaacaaatcacaatcaaattttcaaaattttccggcggcgcctatcggcaccgccggcccccgccccccttgtaccccaaaaagtttttttttgaaaaaccgccgcaaaaaaatggttttgaaaaacaaaaaactctattcttttgatttgcaagttgacaacctgttgttgaggatgtttttgaaaaaatgcataaattgcttaactgaaataataaatatttggataaaatcattccggggaaaaatagaattgtggaaaattttctttttattttttttgtttaaatttttatgtgtacttggatttcacaaatttcccccgttatgcacttggaaattggcatgcctgtacttggaaagtgacttggtacgatccgagccctgccataaatcattaattaattttggcatttattaaaaaaacaattaaagccaaaaattgtattaaaaattaattcacaaaaaaaaggtttattcaccccaatgaatggaggacacaaaatgaattttaaatttaaaaattaaattaaatttgtcttttaggagcctgttattgctgaagcatttggccgccaaaatttccccccgctgaaacaaattatgcgcaatgtttccctgctgtttacaaattcaaatcaagtcggacaaaaacataatgccaaaaattgtcggaaaattaattttttagttctttgaaatgccgagaccaatttcgaacaaaattataaacattggaggaatcgtggaaatgaaagtgaaagaattggaaccggtaaaaattatgggataaaataatttttaaaacatggaaatcaattctttagggaattaaagcgatcgtggataattccagggatggcacagtgatcgtttccttcggcacttttgccgatattaactcaatgaaaagggaaatgacaatggcatttttggaagcatttgcccattttccgaactatgaatttatatggaaagttgaattgtccgataaagatgccaaagtgtttgccaagtacaaaaatgtacaccccgtgaaatggatggaccaaaaatcgttgctcagtgagttaaaatggaaaaagattaaattaggctctgttccaattggcgcgtctaattagtgaccgtttttagtttattgggctacaacttttttttactttgcctaaattctcggctaaatgcaacagacaaaaaattattcttgaatttactataaaattctgaattccgcatttctcattgctattttctatgtcaagattttgatgttttcttgagtttctaaattccagagactgagaaatcgtttgataccaagaatcaacaatataggcattgaaaatattgtggcccaagaaactaaaacgatagttactgattggacgaataaactgaatagagccgaaaattctgttaacatttgatcaattaatacatatcaaatgcactacagttaattacccttaattgcctaataaatttccttttctaatttgaaatttcatttcaaagtgcatcccaaaatgcgggcctttgtctcccactgcggtttgaacagtgtcagtgaggcagtccaatttggagtgccaattttggccattccgttgcttggagaccaactgtacaatgccattatggcacgtgtgaaaggcattgctgtccaattggacgttggccaactcaacggggacggggccgaacagctgctggtcgatggacttgacaaggctaattagcaccagctaattatgtctttaataagttaattgcttttgcaggtgctaaatgacccctcttatagccaaaatgtcaaattgttgaaacaaaagtttgcttcaaccccttttggggccaaggaaaagctgatcagatgggtggaatttgctgccgaatttcccgacctaaacgagttgaatttgccgtgggaagaagagctcggcacattggcctattattctgtggacatcatttttttgattgttgcaatgttggcaatatttgcatggattcttttcaaa

SEQ ID NO: 78265 - DNA, 911 bp, Heterodera glycines
aatatcacagatccgttggatgccatcgagagattttactttggtattacggatccatccggcaatcgttctgaatataaacaagaattcatttctcgctgtaaaggatattcatctcataggtctccgcatggtgttctgattgtgagtaatcggggttaattcggagtttgttgcggttgggaatgtgggatcggggatatccccaaaaaatgaccaaattgtcgggggccgggtgtgaaatatttgttacggcacaaaacaatgttttacagaaaatgaaacgtaacctattgctcaattgccgtttgccattaggcaacgagacggaaagttatgctgatgttcttgggctttttcacaagattgaaaagcaccttcataacatgtccatttcctcggaagaatacgaatttttaaaaaactgtaaatatttaaaattttatgatttaaaatagaaggcaaggatcgggatcgcgaccggcatttgttccagtttccttttttgggtctcggtccctttctcgtttttaaaacgcaaatcccgatcccggtaggcacggacttacgacaattaaaattcaatgttttgaatgtaaattttgggtcacttgtaagcccgattaatcttaatcacgatcccgacttatcaaaaaagcaaagcgcgttccagattcacaatgtcaatcccaaacccgctcccagctttcaaggcttttaaggtcctggttaaaattaataccgatcccgtacaaatctaattaaaaattaaaattttatttcatgtatattttcagcacttttggctaaatcaacgtgggtgcaagataaattaaaatcaagtagttcaaataatctaatgtttaagacgctactattctttattgaataaatactgctaaatatattta

SEQ ID NO: 78266 - DNA, 1239 bp, Heterodera glycines
agtggacatttcaacgcgctccaaccagccgaagtgatcgccaaaattggcattggtgccagctgtttggcgttgtgtgccctcctttggtcgacgcatagcattttgtgggaaattgagcagatccaagcggaaattgaacagaacgcggcagcttttagggcaagcacattcctttaaaatgactttaaaattcaataaataatgaaatgccattaagacaaattcggaaagaatttggccgaaaattctttttttggcatttccaaaagtcacaaaaagtggtgacccatcttcggcactccgtcatttggtcagcagaaggaacacagaagcgaaagaaacaatgaaagcatttggaaaaggcgccgaatttcaagcactgaaaggatgccaaagtaaaaagtgactaaaatagtcaattgaagaaaaaaacaaaggaatgccaaccgaaagtcgagagtcattctcgagacggagagactgaaacatcgcttaatgccccattcacagagtgcgcacgtatgaattgcccagttggtccaactggtctgcccggccagccgggcgatgatggcatccccggcacagtgggacggctcggagtgcccggcgtggatggcactgacattcaggaaaatccgttgccagacatgccgtgtattgtgtgccccgctggtctggtggttccattcgaattttcgatatttgttctaattaaggttaccccggactgcgaggaacgcaaggcgagcgcggattgcccggggcggcagggccccgaggcaaaggcggaccgcccggcaaatcgggcaaagacggaggctttggaaaaagaggcccactgggcaaaaggggtcaattgggcgtgccgggcaaagcgggggcagcgggagagaatgtcgtcggtctgttcttgatcagtgttttctttttgaactgatcacattttgattggaaccattttcaggtggcattggcgtgaaaggggcgcccggtcagccgggcgccaaaggccctccgggctttgccggcctcgcaggtcgtccatcaaagatggccggtcagcccggaaggcaggggctacgtggtccgacgggaatgccgggagaggttgtcaaaattattaattaaatcatttgaactttggaatttaagccgggtccgtacggtgtgccggggccgcaagcgccgcccggtgaaattggacaggcggcgaatttctgtccgatgcgttgc

SEQ ID NO: 78267 - DNA, 433 bp, Heterodera glycines
atgagcatctacttttctctatctcacgtaattggtgtatcagttcccaatttaaataaattttatacagtagtacattcaattatttaatttcctttaattcaataaatcaaatgaaaatgcacattaataatttggtccgataataaaatttttaaatgacaggctactttaaattaactttttttaattttactttgaaaaaaattttttttttataagatttttaattaatttgaattaggtccatgttatggcaatttaaaaaataatactaaaatatactttttagaaaacaaattttgctattattattcaaaggttatattacaacaatgtttaaaaatgaaaagtagatatttataaaagtttttcatttatttttttaacaattttcaagaaaaaaattaggtgagcaaaaaaatttaataaa

SEQ ID NO: 78268 - DNA, 192 bp, Heterodera glycines
  unsure (1)..(192): unsure at all n locations
atgccgaaaaagcaacttgttttggtaatttctttncattcttattcaaattcggccaattttntagcctgagtggagaaatgacacaaaaattttacttatcaaggcgaatatggatcagttgtttttggcaccatctactgagcccgatgcagaagaaaaagaattataaattgattatttggaaataaa

SEQ ID NO: 78269 - DNA, 1150 bp, Heterodera glycines
  unsure (1)..(1150): unsure at all n locations
atgtctgacatttggaaatatttcgacaaatcatcgaatgataaagcattatgtaatgtatgcgggaaaaaaattgtcagaaatgatggatcaacaatgggcatgtggaaacacttggaggcaagacacaaacaacaatttactgagttgaaatcctggaatttgcttgaaaagcaagaacaaaaggttaaccaataagctttttaaattttttgatttactattttagaaacagcgccgaattgacaattatgtggttccaaagaaaaatgaactggaagaagcggaagagagtattgtgcgaattatgattcgccaaaacaactcgtttttatttgttgaggacccggatttgaggaatttgacaaagaaggcatttcctaatttggtatttttttgtcatttttggttttcagttttcattattttaggaatttggaggccgcgatcactttcgacgtaaagtgatccctcgaatggctgatcaaattcgccatgcaattagaacgggaattggtgatggacattttgcaattacgagcgacggctggtctaaacccacgcattcacctcaattacaaaggtgaatcttcataatttttcctttagccagaaaaatttttccgttttagcctgaccattcactggattgatgataatttctgcagaaatgatgccgttctcggtgcctttcctatggacgaatttttccattctggagaagtgattgctgaaggaatagcaaattgtctgacagaaaatggatttcattggataaaattgcgtgatgtgtgcatgatgacgctcgtaatatgcagtcggccacacgccaattggataaggacaggcaatttttatcatttatttttgaatggttccgtgttcccttttaagtttccagtgttgttgccattttttaaatttggttattcaagatgcgatcaaaaatcaatgcctttctgaaattatctggaaggcaaaagagccaattttaagtcagttccgacgagatggaattcgacctaccgaatgttggcatctttcaaagagcagaanaaagttttgctggcaatgcaattttgaagagaccaagaaatgcccggaattntgtctgcacccaaaaaacctcgatgggccgagatggaaataa

SEQ ID NO: 78270 - DNA, 1383 bp, Heterodera glycines
atgccaaaaaagaaggaaagtgaaaaggaaattaaaaggaggcaagcgatccggtggtcaagtagttagtgtgccttcctttggtgctggcttgccatgggttagagtcccatttcttctgatattttaaagcaaatattatattgaaattatgtttttttaaatttatttttttaattaattaactttatggtattttaaattaatgataatgttttttgaattaataaaataataaatatttataattaatagaataataaagtctaaattaaatattaaaattaatcgaataaaaattaaaaataaacaaatattaataaatatttaaataatttataaatctcaaaatgagttaattttagggttagacgaatccgggtatttgggcaaaaccgggtccggatatttccgggtccagaaaagccgggtccgggtccaagtttttaaaccgggtacgggaggaagagaaagtggaagaggaacagaaagtggaagaggaacagtaagtggaagaggaacaaaaagtggaagaaaaagtggaagaggaccagaaagtggaagaggaaggaaagaggaagagaacgagaaataggaagagaacgagaaagaggaagaaaaagaagaggaaggaaagtggaagaggaacagaaagaggaagaggaacagaaagaggaagaggaacagaaagtggaagagaaagtggaagaggaacagaaattgtaagaggaagagaaagtggaagaggaacagaaagtggaagaggaacagaaagtggaagaggaagagaaagaggaagaggaacagaaagtggaagtcgaacagaaagtggaagaggaacagaaagtggaagaggaacagaaagcggaagagaaagtggaagataaagtggaagaggaacagaaagtggaagataaagtggaagaggaacagaaagtggaagagaaagtggaagaggaacagaaagaggaaggaaagaggaagaggaagagaacgagaaataggaagagaacgagaaagaggaagaaaaagaagaagaggaaggaaagaggaagaggaacagaacgtggaagagagacagaaagtggaagaggaacataaagtggaagacaaagtggaagaggaacagaaagtggaagaggaacagaaagtggaagagaaagtggaagaggaacagaaagtggaagagaaagtggaagaggaacagaaagtgaagagaaagtggaagaggaagtggaagacgaacagaaagtggaagagaaagtggaagaggaacagaaagttgaagagaaactggaagaggaacagaaagtggaagagaaagtggaagaggaacagaaagttgaagagaaactggaagaggaacagaaagtggaagagaaa

SEQ ID NO: 78271 - DNA, 921 bp, Heterodera glycines
cattcgctgaatttgttgtgcacttttgggtcaaaatgcattttgcagaataagtgagccctttatttatttaataaatttagccaaatctttaaaaaataaacattttttcaaaggtttgaaacggcgcgcaattttctcgaacttggcgtcaaaagggtgacgctgctgcccgaaaccgagtgagtaaaaagtttttagaaattttatcattttctaaatttttcccctcccccaaaaaaggccgaccattttgctgtccttttactgctgctacgctgaggcgctgttccacaccggcgacatcgaacgtgcgcttgactacgccaagcgggcgcaaaaactgtcgcaagggagtgacattgatgcggctgtgcgggcgtacgtgcgcgacttctcacggcaaatcgaacgcgacacactgcggtgagcagagagagtggcagagaaatggagaaaaagtcaaggggcgaaaagacaatgggcaacagttaggggaggaatcagagaaatagagaaaaacgaaagagtggattaggctaggtctaaactttcggctaggcataaggtttaggattaggcctaacaaaagcttatttaaaatttcatcggcaagattttggggtgctcccgcgaggcgcagggaaaattagcgggaattcctttttaatttttcaatttgtttctgtttttccctttatggcttttgccctttctgttcagggcatctgttcggtcaaacaacgaaaggacggcttcttcttcttcttcttcttcttcttcttcaacttcactttctgcagagggcgcagaaggcacagaaaagggaatttcgaattggctgtggcccttcaaataatttaaaaaattgttttgcctaattttgcatcgttttttataaacaaatttgttttggcaaaa

SEQ ID NO: 78272 - DNA, 924 bp, Heterodera glycines
atgtctttgatcacgagcatatcgctggctgtgcttgtctttgtggttgcaactgtgcgcgaaagtgaagccggctgttggtaagtttgcaaaaaaggcacttaattacagtttaattatcccgataaaaaaaactatattagggagtcttgagtttcggtcatgaccttgaaaatgaaaaaatattataaaaaattaaaattaaaaggcccccagcccttaatggtttttcatcggggtatttaaaccttaaaagttccgaaaaaattcaattaaaaaaatctgtatattttttagctgttgccactgctgcaagtgttgctcgtgctggttagaaacatttttaaaaaattaattttttttttttgtaaaaccgggaccgggatatcgtcagtaaaaaattgaattatttaaataatatgtataacacaaattattaaaccggacccccctgttcccccaaaaaattggaaaaagcgccgcaaaaatcaacttcgatttttcatgctcataatttcacaaaatgcttagttctaagaaaaaattgcaattgatcatggacaatagaaaatataacatttgaacattttaaacgtgttttgaataatttgtgaaaatgaggcttttgacccaaaatgaggcttttttgcctgccaaatgaggcttttgataatttcatctgcgaaccctgaacatagcctatcaattctcaaggaaaaatattattacaaactacgagaagacaaatcaatggcaatttacaaagtacgaaaaatcactcaacagttcgtggacaaatttttttttttgatattttcttctaatttataatttttttagaaatattttttctttttctgactattgaatatgatttaaaaattgactaaaatattcaaatagagtaattcaattggaaataaa

SEQ ID NO: 78273 - DNA, 651 bp, Heterodera glycines
  unsure (1)..(651): unsure at all n locations
atgaaattattaccactattctttttaattgtaattttaattatcaaaattgaccaatttggagcagagaagaaaaaattgaaacaaaagtcatttgacgaaatttttggagaaaaatgggaagaaaaggaagaagaaaggcgaaatgaactcaaaaaaagagaaataattgcaaaattttataaaataaaagagaaaataaagcaaaaaggaagaaaatacccaagaaaagaatggaataaaattgaaagaaaaattgcgaaaaaaatggggacatatcgcaaaaatatttatgaatggattaaagaattggggcttcaaaaacaaataaagaaaagctataaatcaaaaacggatgaagaaaagttagaaattgtacaaaaattcattgaaatggcaaatgagcttaaagagaaaagaaaatattcgaccaaagaatggaaacaaaattatgccgaaatttgtaagaaaattggagttagtcaaagaataattgagaaatggaagaaacaatttgctatacgcagtataaaattattcgttattttttcttcaattttattccattcttttcttgagtattttcttcctttttacttatttttttcttttattttataatattntttcatggnggaccattttaataaa

SEQ ID NO: 78274 - DNA, 1172 bp, Heterodera glycines
atggttcccattttgagaaacgacccatcattgacgacgaagctgagaattgggtaagccggcagaagtttgtgggagatctgcctggcctgagggctagaaacaaagacgtgtacacgcaagtaaagaagtctgagatttaaagttgtccgggctagtcgaagactaaagggacttttaaagaaaagaattgagaaaatctgtccgggctagttgaaaactaaagggacactgaaaaacgaagagaaagaggtacacaaaaatgtgcccagtctttctaaacgctaaaggggcgtatttgtaaggatgagagaaaagagaggaattaaagaagccaaaaataaccaaaaaaaggcctagtagcagccgaataactgaccaatttaaaaactttttgaacgaatgagaggccagaaacaagagagaaagaggccaaaaacaaaaaaagagagagaaaaagtgagacaaaaaaaggagaaataaattgcggtaaagcaaaaaggcccgggctgataaccaatcaaaggggtgcgattttaactggctgaaaatagagaaccaattgaaaaatgaaaattatgccctattattttgtttaccgtatgagttacaattttcagagttccaaagttcacttcattcatttttctttcgtttctcacgccataagaatattcacgtgatcacgtgccgccgcactttcgtcagcgagattatttcatttttgcggcgcctgagaagtttaattgctctcgttaggcggagtttaagcggagatggagcagataaaagccattcctggaaggcgttctcatccattcgattatccgcaaagaaattacaaaaatttttcaggcggcgcctatcggcaccgccggacccactcccatcccccgttctccaaaattccttggaaaaatgcgccgcaaaaaatttgtttttttagattaaaaatgcactgaatttgctaatttacttcccaaaatcgttaaaaatgataattggaggcgaaaaatacaaaagttgataatatattaattgtataaagtgttatacaagcgatttaagtattttttgttaaatgttcttatttttgaccctaaaatcttattttatggcctgtatgttcttattttgaaattttttcgatggaagccctgcattagaataaa

SEQ ID NO: 78275 - DNA, 1690 bp, Heterodera glycines
atgtttggcgccggcgagctcagtacccacaagctggtcggcctgccgttgacgtggatcagcaacatgttcttccagcaggagttcaaggagtggctgcgcattcggagcggactacgctcaaagggtgggtgggccgactaatgaatgatgatggtgcccccccccccccccccctctggctacgcccttgcctattttcgggttttaaagcctaaagcctacctattttggcttttttgaaaatttataaatcgatacaataaccctcaaaaacatgttaattttttgtgcgaaacattgccgcaaaatgttcccccgatcattttctgccaaattttcagcactgatcagctgcttcatcactttctccgtgtccgctggccaggccttccgcatttgtcgctttggtcgaaacagcataatgccatacaacggctcgcacaattcgttgtttgtgtacgcactgttgccgacgcccgaggtgaagaggagtcgaaaatttcaattttttatttatttatttttaattttttttgctctttaggcacataaaaattttttgatgttccttgattttttgagccattggaaaaagggaaattttagccatgttttaatgaagttttgtttaaaaaaatttgttcgagttttaaaaattttcctccactcaccttgaaggggggtctcccattttttggggccctttatgataacaatgccggcaggcctgaaaattctatgactggaaattgagaaacttttttaaataaattttttaaagacttttgtccaaaatggaaaatgtatttcaaacaaaatcaaacggaattttatttattccctgcggtgtcgaggaaatttttttttttgaaattgttaagagatttacgccgaaatgaagaatttgttttttttttttttttgttttaattatagaggaaataaaaccatcttcgtggccttattattttttcgttaaaatgaaaaagtttccaaggacaaggccccttcttacatacaaaaaaaaatgctaagagttttcaggtggcatggcacgtgtgctgggcctgcaaccaaattgacgaaaatttgggcaactattggccctccaagtatggccagatgaaattcaagcccaccgtgcaaatgtcggctcgtcaaacctttctggacgagacaaactcataaaaagtgagtggaaatgagtgaatttggcattctgtctgtcgccaaaaaaaattttgtttttttttgttggttttgtgaacctttgggcttttttcagtggataaatataccagggattgtacggaattatgctttccgaaattttttgagtcgaaattccgatttatgagatttttttgggttccatctcggcttcctactaaaggcttgttctatttcactttccaattttattggcatttttagatgcgccttatatggagcagaatttgccttcgacggattttttttagcatttgcattgacttgggctttttgacttcgtggtgaccttccgtaatccttcaatttttatatccgttttttgcgcaatctgatcgtaatttttgatcaaattttgtgagtcacaaaatgctttctaatttggcaacaaaagcactgcttccagctgcctatatttatttactaagtatttgagaatttttatttgagaaataaa

SEQ ID NO: 78276 - DNA, 535 bp, Heterodera glycines
atggccaaccgctggcaccgccaacaacggcaccgtacagacgaacggggccaatacggtaagcaatgacgaatggcattaggtggcataattaatccccaaaattgacccaaactgttgcagattcccgccactttgatggagttcggccaacaaaatgcgctctccgacaccgccgtccgaatggtccaacagcagcaacagcaaatggccgttctgtccgcgttggctgtccatcagcagttgcagcaccaacaccaaatgctccgttttggcgggtggggcaacgaatgaacggagaaaagacgaacaaattggagcaataaatatctacgagaaattgttttaattgaatcttatacaaaaatcgaattgacaaatttggaatatgccaaaggcgaagaaattggggggtgggagggtaacacaacaggccaaggtggagaactccgttttccccttttttaatgttcgacaaaagtcacacataaatcgttttccaataattgtttcccaaattaattggattttaaaa

SEQ ID NO: 78277 - DNA, 1266 bp, Heterodera glycines
atgatgctgttcacttgcaaaatcaaactttgcatgttgaaagaagacgaatgcaacactttgacggtgaccgaccaaagaatgcctttggcagtggcactttgcttattaaccaatcactcgcaaattaagccaccaagttgcaacgggaagcgagcaaagagtgccgcgaatggcaatttcaatgtggacaacgcgggggcggaggtgggcacggggacagcggccattgggggcagaaacggtggagggacaacgggaaaagaggaggaacagcagacgatgagaggaaagggcaaaaagcaaaacggcggcagagggagcagaacggaagtgagtggagaggtggcggagggaacggcacagacggacgactcgggaccaacgacggaacgaccgaccgaacgaacgacaggggcaacgacagcaagcagtacagcaccaacagcaacgacaacctcaaccgagagaacgacagcaacagcacaaacaaccgaaacaacaacagaaccgacacaaagcacgaacacgacaacgggaacaacctcatcaacaacagcaacgagtacgacagcaagcagtacaacgatgacgacgaagacggttacggaggaacaactgctgagcagcgtggaaagggcggcaagtggggagagcagcgaaggcattcaaccgaaagcatcatcgctatcatccgcagcagaagctgctgcacaaccatcgtcctcgtcagcgtcatcgccgatcacggcacaaacaacagaaacttcgccaattactgacggcacaacaattcactacaaaaagagcagagaagaaatgacggaggatttccctcggccccaattgttgcttcaaaatgatcatgccaaaacggcggaaggggacaaaaagcgcatggagagaatggaaagggcggaggagggaagttggacaatttcggcatcggaggagggcgaggagaagggcaaagggaagaagaaagtgccgggaggggaggaggaggagttcggtggggtgacgaagccagtgcaagtcttcaagaagggcaaattggagggaacggcgccgacggaagagggaaaagcgaagccacaaatggcggcggcgggacgcactcagcgggacacgcccgcggcgggcggaagggcgggcggaagccgacgcaggatggctgaggtggacttcgacatccaatcgccagaactgatgatcttggacgattacggtctcgaaatcgcgagcatttcgcctagtggggtgtga

SEQ ID NO: 78278 - DNA, 2337 bp, Heterodera glycines
atgttcattccacgctcacctccattgactcgccaacgtgcacgaaatatccagcagcagcaacaaaacgaacaccaaaacacacaaagaccgcataacaccgctaacaccgaaaatgttcttgaaaattctgttgttgatggagaaattttaaggacgaacggaaatatggactcggcacaaattcgaaatgctcttcttgagttggctcaaccgaacagacaaaatgaaggacaagagaacggagcggaaaacaatggaaacgaagaacaacgcggaggtttgcgaatgagattccgaaatgtgggaacaaacgacggaagagaaaattggttggttggagacgaaaatagaaatgatggtcatcgcaatctcaaccaaaacttgttgcctcgaacatccacgcctataagtggcccaatatttccggaattactcattcaaaacgtgcatcagtctgtacaccaaaatttgccaaacagacaaaatatgggtgacaaaaaccaacagcatggtattcctaaaaccgcaatgccgcaaccacaagtcgttcagcaaccaatagcatttttcccgccggttcagcaagcagttccagggccctttttgaattacccggcaataaatccattttaccagctagcaccattacccatgcagcttccaaaccaacaaatgattggttttatgagcacaaatgcgcaaaatccaccacaaatgcaaaatgcttataacccgcaattccaacagccgtatttgccccaagggaaccaccaatttggcatgataaaccaagcacacattccgcaagttgttcagccaatttcgcaaccacaacagcaacaaattaatgccgctcaaaatttggctcgccaaaatttcgaaaatcgtccaattgagaatgtcattgaacggggaagagaaccgggaatggaccaagtagcatacgcactcataatgagtcaaatccccgctctaaaaggcaatgaaggtgcggaaaagttccgtgaatttttcaagcgttttgattcgaatactggcgaatggacaaatgcgaaaaggataagttcgctcgagtccaaagtttttggacgagccgagagggcctttaggtcggcatgttcgacagtacctttccgctatgagttaatcaaacgtgaaatgttgcggcaattagaggagaccgatgcacgcgaatggaatgcatttgatcagttgatgtcaggcattcggcgaaaaaatggagaagatttggatgatttggctgatcgcgtaattactttagtcagacgtgcctaccccggattaactgaccatctcgttgatgactatgcaataaagcatttgatcaggacctttgaaagctctgagttagctttaagtttggaaatgggcagaaggccgggaatgacattcgatcaatttgtggggatggctgcgcgcgccgaggcaacgcagaaagcaacgcgtcgcattgcatcaaataatgcttatggaaaaacgaactttggagcaactctaacacggcaaggtcctgaaccgaaaaccaattttcaacattccactggaaaccgtccaaaatgtttttactgtgaaaaagagggtcatattgcgcgaaattgtttccggcgtcaggcggaagaaggcaatcagaatcataattcgcaacaaaatcataatgtgacgggttcaaataaaaccccgttgtccttgtacccaagccaaagtcccgcttataaacccgaaccgaacaatgcaaatccgcaacgcccacaaaatacgcaatcgcgaaattttctcaggcaaaattacttacaaaggaaggtccccaggtgtccgtgggatttccgaatgaaatttggtgggtggatagagcacccacaggttcttaagaaaagtgattttattttttgcggaatgaactcgagtgccgagttatgacgtgccaaagtttttggtgttttctaattaaagaaaagaaataattacttcgctacgcaacaagcatctattggtgtagaggtagtgcgttagtcaaatttattttgtgtctcagattcgaatcctctgcatgctaatacattttacaatttttatttttgcttttctggtgcagtctattattaaaaatattttttatgaaatagttattttaattttatttcattaacacccaaaaaaatcattaaagataaagacgtaataatttaatttaaaagatacacacctttctgttaaatttttattgaatatcttatatgttaaaatggtaaaaaaatttagttcataaaaaaacatatttgattatttacttttgcataaaaaggcaaaaataaa

SEQ ID NO: 78279 - DNA, 2357 bp, Heterodera glycines
  unsure (1)..(2357): unsure at all n locations
aagcagagacataaagcgaaatgggcagcagcagaaccgcggtcactgatgaccgggagaagcggacgaaagagacgaattgcgatcatttcccactttggtcgaggcattacaacgagtggatgaacacgcgggattcaatgtggagatcaaatacncaatgagaatgaaggtaattgggcaccggggggggggggagtcgagaatagcattttcttaacgttttcgaattgaatgccctcccccctntcaattgaaggatgggtcgcacgaatgtgagaattacttcgagcgcaaccagtacatggaccaactgctggtggacgtgttcagacacgccggcaaaagacgcattgttttttcgtcatttgacccggacatttgcacgctgtacgcatataaaaaatgtcaaaatgaatttgctcagttcctttttagactgtccgtcaaacagaataagtacccggtgctgttcctttgtgtgggccaaaccgacaggcaattaacgattaattgactgacatattttaaatgtcctatttcaattgaactctgttttaattgttacatagatatgtgccatttctggatgaacggagcaaagtgacgagagtgggcaccaactttgccgcctgctccaaccttttggcaaggctaaaatgccattctttgaaattgctccgcctcccaccgccccttagggcatcaatttgcacagcgaagaattgctctccgacccgtcatccctgaaaagggccgttgcaatgaaactgatcacttttgtctggggagaggacttggacaaattggaacacgtcgcatatttcagacggcaaaatgtggacgcaattatttacgacaggtgaaatgcgcaaattcatttttgaattgtcagcccaatattttatttcttgcatttgaaaatcaattaaccccaaggcgacattttcagaatcggcgaattggaaacacggcaaaatgtgttcgtcgtggaaagggaagtgaagagcgccctgttcaagtcgccccgcacttcaccttctctgtcgcgagcaaattcactgtttcgcaacagtcaaagcccgactatgccggtggaagagccaaggcggtcaccgtccaacagaagaatgttggccaacggatttgcccggcaaatgacaattgccaacactgactttttcccaaccaaatgagtgaagaaatcttatgtttactcttccgaagaatatcgaactgaattgagcatcagaattgaacaaatgatttcatttcattgcgatttgtccgtccttttccttttcgcgcgtttctccgtctctgtccctcggctcgtctttctctttctttgcgttttcacacttcctggtttattttttgtcctaaacgggaaaaggggtagaacgacaagatgaagcagcagaggatgaagcagagattgaatcagttaatggattcctttttagagactcaattgtttttttcttaaaccatccccgccctttgttcgacgaactgtcctcggcgtttgccaggcgtcgtgctgagtccattctgcggctttttgtgccgaattttcgtccctaattttttcggcagccatttcttcccgccggccatcatttcgcgcttcgttttctccaatgcctcggcatttccgactctattctttgtttgttgtttttcctcctcattttcttcgcttttcgtttctttttgctgccgtctttccttcactctcaacgcattcaaattttcaattgaaaattcgacgattggcctctttaattaaaaatgttttctccaagttggcattccaatcgttcaccaaccctttcgtcagagaatgtcgtcggattgttgttcaacttcctcaggcagttcagcgccaaagtgtgttcggtgaaggtgacaaagccgaatccgctggattttcccaaaatggcgcgtcccttttcgttttggcccttcagttgccgcattatccggcactctgagatggccgtcgcgggacaatcgccggccgcttccgaacaaacgcttttcagttggtcgtccttccacgagaagggaatgttgtgtatctgagaaagcagtaaaaactttaaacgtttctccgctgatttgccccttttggctgaccacaagtcgatttggtgagacgaacatcgtcaagtttttgagtttggtcttggccacttccagcatccgttgtctcaatttcgcgtcctcttccgacattcccttcgccagcgctgtgccgggccgtaacaacgacgccctcattaggtacaaattgcgtttgtccttcaccggctttttgtctgtcacattgaacttttttgcctcatttcgtt

SEQ ID NO: 78280 - DNA, 416 bp, Heterodera glycines
aatttgctgtccgatgccgacccattctttagagaacagtccgaaaatggcgaacccttccgaaacgacggcgaagattactttgtgttccgcacaacttcagtggccattgagtttttggtgattttgcacaaataaactgtttttatctacatttttctttttcgttttaggcatttcgaattgaattatttatgctccagcaacggaattgggcttcgacagaatcaaagattggcctaactccgtcccgatttgcgcttgcttattgtccgtctgctgctatcgggtcgggtgccatcattgtctgctgtcccttaaggcatgccctcctcaatgccggacacaattggctccctttccctgccattggtcgctgtgaaaacgcagaagccgatgggccaaataaaagttga

SEQ ID NO: 78281 - DNA, 668 bp, Heterodera glycines
atgaatccaatttctgaattgtttcgcattgcaaatggacagggaaatgatggaaatgattttaaaaaattacaagcggaacatgcgatcgaccaactcaatgatcgtttacataacatcaccgaaaaattaaaaagtttgctgcccgagatgcaatttgatcaaattattccattttcggatgcaaaattttttgaaatttgctcagaaggcattgtcgagaatggcatcattaagcacattcgagaaagtctcgaagagattgtcagaaatcaagaaaattcacaacagagcaaaaacaaggcactgaatgccataataattattcaagcaataaaaagtgatttggacatttttgcaaatttggcaattgaaaatttaaacattctgagagaggaggaacaaagcgatgacaaaattaaaatgaatttatctaattagtgatctttagttacttaataatatatttcatgtagaaatgcttcgattgtatttttcaagaaaatatggaataatcaaaccgaaaaaaatcaaaaaaaaaacgaaatttttccatcgatttttttcgagaaaatatttttaaaaaatatcaagaatttagatattcaaccgataaattaatcagcgaaaggatgtgaaaaattgatgatcatttttgcgttaataaa

SEQ ID NO: 78282 - DNA, 813 bp, Heterodera glycines
atggaaataataaattattttttatttttcacaatttttctcttttatccttcacaaagctccgcgtcaaaaaagctccgtttgtgcgttatctgtgaacattcacgagaagttaaaattgtgttggaactgttttatgaattaaatggtggaatatttaaaatatattcggatgtccaaattggagaaaatttcgaaatcaaaattaatgaaaaagatgaaagagaaattgacaattatattttgcaatttcatgtgtcggtaaatcccataaataatgaatttttgccggatgaaaatgacgaaaacccggcggatgatcagccatacgaagatcaatttgtgcaaatggacgacatccggtccctgcaccggaccgtcaaagtcgagctgttcaggccgaacttctcgcggctgtacgtggtcaatttgggcagtgccgaccccccgggacggctcaattggaaccgaagagtttttgtggaagcggaaaacgacgcgggcaattaccacgcatttgtgtacgcttttgtacagaaaaaccgacgcggatttgagttagaggacgagagaatacttttgggatttgccccactcgaaaaattggaaaatgcaaatggacagcaaatgccaaaggcaaaaaataaatgccaaataaataatattaataatttgatattttaagttcacagaatacaaactatcaatcccggtcaatttgaatcgctttttcaaacacaaaatttggtttctcgacattgacatttatcagtatgaagaggttgattaactttgattattattgtaaataaa

SEQ ID NO: 78283 - DNA, 343 bp, Heterodera glycines
atgttttattatgcatatttaataaataacggatgccgaaaaaaaatcgatgctcattgtaagttaaaggcaaacctataaaatatttttattttataatttaaatttacataaattgagaatttggaaaggaaatttaaaaattaattagaaacattcctaaaaaagcaccattaaatttttcttttccctttatttttttgcctaaaatatttcgctgtcattcactgcgctcaattaaccattttcagtcaaataaattcgattagttgctgctaattgtcaattaaaagaattttttttgtttttttaactttttattttcttcattttcaatttaaaa

SEQ ID NO: 78284 - DNA, 177 bp, Heterodera glycines
atggaggtggacaaacatgaaaaatctgaagcggtgccaaccgaagcaaaaaatgagtcagaactgatcaaatcaactaaattggaggacgaagaggaattcgaggagtttcctgtttacaacaaaggcgaaggaatcgacacggtcgaagcacaggcggcgattaatgtttgggag

SEQ ID NO: 78285 - DNA, 3154 bp, Heterodera glycines
cagagggccaagtctcgggaatttctcacgctgagcattccttaatttttcaggtcagaatcaaaactttggacggccaactttttcctcggcacgtgtgtgttgtacgcttcacgtgttgcgctgccaatctgtgcggtggcgatggcccaggagtacgggtggaacaaaacggactcggcaagtccaattcggaattctttcgcaaaattaaatcccgagtctaatccccttttaagggtactatgctgtcctgctttttttggggttacgccttcactcaactcatcgccggaagttgcgccggtctgtctacttttttgggaccgtaaaatcgttaaatattcatccactctcatggggtacctaaccgctggttccattttcgacccacacacattccatttaattttgagaaactcgaataccaacctgaattccaacaaaaagcctagtcgcgattttattttttgttaaaattgtgcaaagtcgctcaatttatccctaatttgtccgttagatttgctgggcggtgagcgtatccttcccgtctccaccctcgtctggtcattactcactctgtgcacgccacaactgtttgacattgcctattggacaaactctccgctgctcgtcctcctctttgtacgcgtgtccaccggcgttggccaaggtgggcaacagttttagcagtttttttgtgggaatagttgcagggaatttacatttttttaaattttttaaaatgcaaaatcaaacaaaaatcgacagtgtatcgggtaaaatgtgggtttgtcaggttcacaaccagtataaatactgaaattctggaattttacacttcgtttcctcatttttagggggtcatttgttagcaaaaggtgccatcatttctcctttctctcttttgccaggctttcatctgccatccatggccagcatgatcagtcggcatttgaccgcctcggagaagggccgcgtgttcggcattttgcttggccggctccactttgggctcggtggtcgccggcggggtcggctccgtgatgctcgaatggttcggctggcggagtttgttccattttgttggtaataattccatgtttcttttgttggggtttcggataattttagttttggcttttttcactccgtttgttgtggttgtgtttaattgtatttaggcattttgagcatcctgtggtgtttgatgttcaattttttgagcaaagacgcactgtccgtgcggcagcgccggcgcattttcgactcatccgccaaagtcagaggaaaggcgccgcgggggcgggggttgttatgataatcgaccctccaaaatcgaggatttttcgtttttttaaatcttaactctcgggatttcccactccgaaaaacaaaaaatatccaaattagcaatttgtcaaaaaacctgggaataaaaagaatttgatttaattttattaaaaaaaatttatttggaattttaaaaaattccatttttattttgtacacttttcaggttgccaatccgaatagtgaggcgaagaaaacggacagtccgccgatgactccatcgccggcgaccaccgcgacaaatggcggcactgtgtcagcggcgggaaacgaaagcgctgccgtgccatggggcaaactgttcaggcacccctcattttggcaagtcttacagtgaaaaaatgggcataaaatcagaatgccaaattcaaagaaaactaaatcactgtagtctgcactcaatttaaatttttttgatttaaattaataattttattaaaaattctcgagggtacttaaaaggaaaaaaattataaaaatccattctgaattgtaacaatagcattgatttttttcctcttaaatttttgccctaatattgttctctcgtctccccagggccgcctcgagtgcgcagtattgcggtgccaatgcctacttcaccatgttcagctggttgccctcctatttctcggacaacttcccacacgccaagccgtacatttacaacgtggtgccgagcatggccattgtggtcacttcgctgctgtcgccgctggtcgccagccgaatgatggccaaggggcggtcggtgacttttgcacgccgctgcatggaggtacggtgtttattgttttgtatttgtggtggatatcaagggcgtagccaaacccttggtttcggaggtgggctgaattcaaaaattcgattttaggggtattttttcagtttttgagggtgtgtcccctgactacagacctgaatttctaaaaacgctaaaaagccatggtttccctccccccccctctccgcccagtgctgctcccttctcggcatggctttgtgctttctgtccgtctcccttttgcccgactctttctccgcttcgcttgcccttttcactttggcaatggccgtccggggctttcaccatggtcagtttttgatttgaatgcattaaaaataaaaaatttctttgaaaaaattctcaatctttgcagaaaaaactcatgaaaactaacttttttgtgagaattactttctttttatgaaaatttcgttaaattttttaaaaattttcaccaaatattttatttttattgtcaaagacttttcaattctttcatctttaaggcggtgtcgcagtcaatccgactgatttcgcgccaaatcacacagggtcggtgttcggtgtgttcaacgctttcgccgccatcaccggctttatcggcgtttatgttgcgggttggattttgcaggtgtggcaaaataattgttatgtaaaataatattttaaaataattcccccaccgaaattgaaaatatttttttgacagagaattcggcaacttttaaaaatgtttttgctgttatcaataatattataaaaacgtggcaactaaatttcaaaaacaatggcccatttcctcgcatcttttcggaaaatttcaaaaaaatttttgaattactaaattttcattttcaaattttgtttttatttttgactcttatgcattttcccctcttcccgggttcgcagatgaccaacaatcactggggcgttgtgttcatttgcaccgctgtccaatgcgttgtcggcgcggtcgcttacggctttaagggcaccggaaaaaggataatt

SEQ ID NO: 78286 - DNA, 229 bp, Heterodera glycines
gcgattttttgctgctttccgttgaagaattttccccaaaattaggagtgcatataagaacaagcagaaatgcaattttcaagggaaacattttggtggtttttgaatttggtggggaattgcaagcttttctcgggtatttaaacgaaattttttcatcaatttttcattaaattcttgaatttcatccatttctggctttttgtgttcccaggccgttcctctgcgg

SEQ ID NO: 78287 - DNA, 918 bp, Heterodera glycines
atggaggaaattttgagcgaatgggactgcaccgaaatgcaggccttcaatgaattgtgggctggcgtgaagcgacaaccggacgaatctttggaccaattcgccgaacgacttcatggagttgttgaatgtgcttatccaggtttgcccccaaatttcgtcgatgaatttgcagtaaagcacctaattcgtgctatggaaaatccggaaatttcggtgggattggaaatagctcgccgtccaggcatgagcttctacagtttcgtcgctctcgcagtacgcgcagaggcagtgcaaaaagccactaaatcggctggatttggaaaagagcaccggccaaattttcagcaaaaatcgacagttccgccacaaaaaattttcccgccaaagacaaaccgaattgtgtgctacaactgcaacaaaacgggacacatttctcgccattgtaggttgcccttcgcgcggaagcaatccaactgtgcacgaaaaccgccacaacaaaattttgcgacgaaaagtgccgattttcgaaaaaattcagaagctgagaagaaattgattgatttgcagttgtcgaaccaaccaccggcacaaccaacgaacgtggaagctggaccaaaacggaaagcgtccaaccgacagcgcaattcgtcgtcaagttgcagcgtaaaagcaacaaaaatggaggaaaaatcggcggaaattccaaaatggtttttgaatgctattttcgctgcgttggttgtgttcgccggcgtattttcgaaggaaaagtcaaagtgtggacaaatttggaaaagtaaaggctcaatgagtcgcaccgacgaagtgaaaggcggaaagcattcggaaaattggggacaattttttcgccgaaggccggggaggaattggcggatgtcgcagccgccaatctga

SEQ ID NO: 78288 - DNA, 981 bp, Heterodera glycines
atgtgctacgaaaaagtgttccattcaaagaaaggagtgccaaaagttagcagtttccaacaatcaatgcttcttccttcgccctccgtcttccatgcttcttctcggccactttcgtcccgttggtccgcacttttgccaacgattggacaccgttcaatcaaaaattggtcgtccttcccaattcttcggcctgtcaaccgttcacgagtgcacgaattcaccagctcaaattggcccccattcgcagcatcatgttcaaaggaatgcaaccaaatgatgaagctgacggcaatggtggcactcatcagaaacagctaaaagaaaggcggcgcacgattttgcggaattttgagaaaaatcacagaaatttggtcggctgtggcaccattcttcggttcttttgggacaacgtcaaaaaacgacgacgccccaacaaaaaagaaatgtaaaaaacgaaaaaaatatataaaatttaaattcctttttttcagcttcatctccgccgattgttggctcgaagtgttcgcttttcttgcgccttctcagcttggcctcggaagccgcggtcgagaatcgcggatcgcacaaaaaaatttgctgggaatcgcgcatttaaaaccccaaaaatttccaagtttttaaacataaatttttttaaactttttaaaattttcctgattagaaaaaataattaatcaagtgccggtcacgggcgaaaagaaaaaaaggtcgtcgctagcgcggcacaaaatgggaatatttctaacagagttgagcgggaccgggaattttgggcaaaaccgggaccgggacctgagaagccgggaccgggacctcgattttttttcgggaccgggaaccggaaccaaccgggaatttttaaaaattcaaaaaatttttaaaaaattcaaattttaattttttttcaactgaaaataatacaaaattaaatttttactttgttttttattgaataaa

SEQ ID NO: 78289 - DNA, 648 bp, Heterodera glycines
ctctttggcatttggctttcactacactctccgacacaatttttttttctatcatgagactttttgcttaggtgtgcccttctcggacccgtcgtctccgtctgtgtcctccttcacctcaaatgttgctgctaatgacggttcatcatcatcatcgaataacaacaaccacctgctacaccatcatcaacagcagcttaatcaccatggttctgctgctgctgctgctactgctcacacaacaagtctcaacaatgacgcggacacaagcaaatgggtgatcaacgggtacacaacggtgtacggcacttacattggcccaatgcgatcgtcaatggtcggcacgacgacaatggcacaatcagcagcgaacaataacattggccacttttttgcggtcaatgaaagtgttgtgcaatgtgtgaactgcacctttgctggtgatattgcaggtgcagtttttgactttttttttggtcatattggtttaaactggatacaacaataaaattggccatatttcatcaatcaggcccgagaatattgagccttactttcatagtggtacggaccaaaacaattttatgcttaaagagtttctctataattaaggaaaatttgaaaaaatttcgtttatttttttaaaaa

SEQ ID NO: 78290 - DNA, 1188 bp, Heterodera glycines
atggcaaatgaatttaaacaaaaaggaaaatattcaagcaaagaatggcaacaaaattatgccgaaattggtaagaaaattggagttaattatagagcaattacaacatggaaaaaacagtttggcattagtcttaagagaataacggaaaaagaaaaaatggcaaaaatgaaaatttttggcaaataaaaagagaaactccaaaaataagtgaacagaaattgccaaaatgaccaacacttcggcgaagaacttttggaaatggaaagccaaaaaagaggacaaagaaattgttgaaattctcgaaaattcggaaaattatattttatgtgacttttgtttttggtcattaacagggctgcaaaaaatatgcaaatgcataaaaaacactttttttttgtgtttgcgtataaaagtcgggacttttatttgcatatttaggctttttctgcatatttcatgcatattttgccatttttcgtcaaatattttccgattttttgcatattttgccatttttcgtcaaatattttccgattttttgcatattttgccatttttcgtcaaatattttccgattttttgcatattttgccatttttcgtcaaatattttccgattcgaatatctcttaggaaaaaaatttgattatgcctaaaattaatccaaatttgaatgggtgcgcgagtgggtcaacagtgagcttctctgccgaaaatcttgagaagattttctacttgatttattgtacatatgaattactattaatatacaatttgcatatacaaaatttagaattgagtaagtggtaataataaagatgcgtatgattatttttattaaaaaatcttatatacgattctcgaatcgtgtgggaaaatatgctaacaaatgctggcgttgagtgccaagatgcaaatatctacaagctctttcttatagcagaattcgaaaatcgcaaaccccgctgcaatgtaaagagcctgtcctaatcattttaatttttcaaaatttatcgaaactttaccatatagaacaagtttttaaaaacaaactttactgtcgagatcaccactgtcgaaaactaacagcaccgatggaacgacgagttgtcgaccctacactggacaacactgaactggccgctctcaacagctaaaattgctcaatttccagaaaataattaaa

SEQ ID NO: 78291 - DNA, 249 bp, Heterodera glycines
atgagcagggaaatgaaatggaaatggaaaagggaaaagaaaagtaaaaagaaaatggaatggaaaagtaaaagaaaaaggaaacgaagaaaaagaaaggaaaaggaaaaaggaaagggaaaggaaaaggaaaagggaaaaggaaaagggaaaagggaaaaggaaaaaggaaaggaaacaggaaaggaaaagggaaaacgaaaagggaaaagggaagagaaaagggaaaacgaaaagggaaaagggaag

SEQ ID NO: 78292 - DNA, 700 bp, Heterodera glycines
atgcacccggtataatggggagcaatcagttcgtccccctcccccccggatctgtccccccccgcattgtaactccctcgagaatttttttttaaattttactgatctagaaatttttgcaagaaaaatttaaaaataagttttaaggggttttagggtcgttgatcacgaatccgggctcagatcagcgctaccgttcactacatgagctgtacagggacaaagaattgataggtttcctgtaccaataataccctcattggcaaggtgcccatgaggatttcgaattttattcttcctgtaccaaggttaccctcatgggcaagatgccaatgaggatatcatccatacaaattttctatttttatttttgttcgagtccgggtcagaggttcgaaattggcaaaaatgggtgctgtattcgtgatcagcgacctcaaaacccccataaaactaggcatctgaaaatgtatgtgaaatctgccccttaaactagataagtaccgggtataccaacacgaaaaacccataaattttcaacaaaaaaattattgttttcaaattattaatttccagttggaagactgcgaagatttggacaacgaaattgacgaggcgctgtccgagttcgaggcgaataatccggagcgcaatttgctgcacacaatttgcttctattgaccccccaccccccaaaaaa

SEQ ID NO: 78293 - DNA, 1612 bp, Heterodera glycines
atgaaacaaacggcgccgatcacaaagacgggcctggcaaaacgcagtctccgctcgggctacgccttctcccactgcagtggctttggagaactgatcgccaagggcacgatgttcaagaacatcgaacacttgcgcatcccatcattgtcagtcagttcaatgatccatcgattgggtggattgattgattgattaaataattgattggttgaccaatcattggttggtcagattgaatcccttggttaatggtttctgccctttaagtcagtttgcccttcatcatgattcccactccatccatcgctctcgtcgccactctctttcccgggtccatcctgcactttcctcggcaaattcttcaacgggtcacagttccgatcagcaaattcttaacccgatcgtcctcaactctgataacgacgatggcgaaggtgccgcagtttcttcaatgactcatttttcgccgacttcgtccaatatgaccaccaccacgacattgggaggtggcaacgccaaaagccaacaaaaggtcatccaaactcacacaaatgacgggcggaacttcggattgggatttgtcaaaaatgaattccaatgctttaccacggaatataattgagagctttgaatttcagattcggccaattttgccccctcctccggcggtgccaaactcttctcgactccatcagtcccaacaccattctcatcaatatcggcaccataagcatcatcaaccgacttcaactcggcggagtaccattgaatcattagtcattgagcaaccgccgtcagcggacgatgagaaggacgacggaatgacaccaatgatcacacaaatcgtagtagtcaaagaagaggatgaggagggagacgaagtgatcagagcaacagaacagcagcagcgagttggaagcagcaattatcagcaagggacaacaccaacagaattgatcagaggaagcgatcaatatgggaaacaaacggaactggtcgattcgactgatcagcattggtcgtcagaacgggttcaggcttctgatcactatggcaaatcaacagcagatgatcgcccattgtctgagcgtgacaacgaaagtcggcggatggtgacggcttattccgctcgtcctattgacatggcacggccgaattctgagctgaaacacaatttggtagtaaatgccgaattggaggacgaagaagaccaaaggtcggaaatgccaacgccgaatacctcccacagttttgtggtcaatgctgaattggacgatgatgtgccttctttgcccagcaattggtaaatttattcggcactttttctttcaaaatttgtgaatttgccaagaaacgttctttttgctcgaatgaattttaattttaaatgttttaaggcttcgaaaagccgacacaatgccaaaattattcgatgctaatgaattagcgatgacgagcgttgaacagacagcagcagctgaacatggcaaaacattcgtcagcaaaacgagacgaaagagttcgagcagttcggcaacgagtcgaaactcgcaagagatgggaacggtgaagatggacagccagagaaacagacagacggttttcacgg

SEQ ID NO: 78294 - DNA, 748 bp, Heterodera glycines
atgcgctcattggtgcaaattcaaacggacgaatggtcacagctgttgaggcgacttgagcaggaggaatttgagcagcacaaagaacaaattcaagaggaaaatgcactgctaaaacgactgttggccgagtaaaaatgaattgtttttgatttaataaaaatttacgggaaactccactcccctcacccctaatcttgtggatatatacaatccaatttcgggggttttaagatttcggggattagattttggagaggattttataaaattccagagtttccgccccaaaaattagggtaaacattgtgaaataattcattatcaaaaattaatgttacaaaaattgtaaactttttaatagaattacaaaaatacaaaattaaacaaaaaaaatgataaatgcaattaaaatggccaattgtgtgatcagaaatgataataatatgaaatgatcaatcaaatgtcagatgtggcagacacgaggaacagctgagcaaacggcacagtgagcagagtcatcagctggaaatggaggcggccaaagtccgattttggcacaaatttcttttcttggcaacacatgtccaagcagggggaaatgtgaatcatgggatcatgggccctgtactgtatgatcagctcaaggatggaaaagaaattttagattttccatcaaaaagaactaagaaaattaaaaattttccgttacataaataatttgaaaatcccgaaatctaacaataaa

SEQ ID NO: 78295 - DNA, 63 bp, Heterodera glycines
tcccgattggtcccgggttttttcgcggtcccggtcgaaaaacttggtcccggtcccgacttt

SEQ ID NO: 78296 - DNA, 1253 bp, Heterodera glycines
atgggaagagataaagcgcaggcatcagaaaatgcgcgaatcagtgcaaaaacaacaggtgggcgagcaagaaaaactcgtttttcgattagttgagctcggagagaatcgagattttcccaggatcctgcttttgaatttttttgaaaacatgtcggggccaggatcccgaataatcgagctttgaattccgataatcctatcctagtcagaaccggtcctgatcacaattcggaaacgtcaggattccaatcccagcatgacatgtaatctcccgatcctgttcccgactttttcgaaattctcggctctatattatgcggctgttttattatatcctattcttgactcccaccctgactcaattctcgaaactctcggaaaattctatgcacgcatttccaccctaaattttatgttattttcctcaccccgccttcagcaatgcgttgtggaacgactcgttgaccaaagtcacaaaatgtcgctgaaaaagcgtaaccatttgaacagcaccagtctgggggagaagcaggccagcaatgacggggacaacaaggacaacaattgccaacaaaaccaacaacaacacaattcattggcactacgaatttcggatccggcacataccgtaacaacggtggaattgaccggggaccagaaacgggtcggtcggttaccgggattttgcaaaaaaaaaaaaatgaacaaataaatttttaaagacttttcccatttttaggggagtttttttttaattgacctttaggggatgtatttttcgctttttataatatttttgcaatcagttcttcgaaaatatgaaaattgtttaattaatgaatgcaagtgaatatatattttttatataaatcagtatttgtgatcaacactatagcctgtatgactaattagctaattagcacctaatgagctgattgactaattagctattatcatttaataagctgagtgactaattagctaattagcatctaatgagttgaatgactaattagctaattagcacctaatgagctgattgactaattagctaattagaacccataactgtttgcttgtttgtttcagatgcgttcattggtgcaaattcaaacggacgaatggtcacagctgttgaggcgacttgagcaggaggaatttgagcagcacaaagaacaaattcaagaggaaaatgcactgctaaaacgactgttggccgagtaaaaatgaattgtttttgatttaataaa

SEQ ID NO: 78297 - DNA, 143 bp, Heterodera glycines
cggtgcaaattaataaggcaaaggaattcaggggtttgctaaaagcaatgagttctgagtaggagattttctgttctgtgccacatttacactatattttaatcgcctgtgaatttttaacctttgatttatttttattcatt

SEQ ID NO: 78298 - DNA, 151 bp, Heterodera glycines
atggaagaaaaagatgaagaaatgtcgcaaaaatttggtcagccacaaataaaatgggcccattcaacgagggaatggatgaaaattgccgaaaagattggcacttcccttacatcaatttacagatggaaagcccaattgggcttgacca

SEQ ID NO: 78299 - DNA, 433 bp, Heterodera glycines
atgcgaaaagatgtaagaccaattaattaaacgattaattagtggtagcaaaaataatcaaaaaatcacgaaaatttgttttttgatgcatattcgaattatacacataaaacataatattaattttttccataacatttaattctcttttcaatacaatttttaattaattttaattagcatttttaattatgggtatgtttctttatatttttttaatattttgatcataatattttagtcacttgctgatcataaatttgttcgtgggtatcttttttttggggcaataagtcaagcagcaaaactaaaaataacattcaccaatcaccggaaacttttggtatccaaaaacataaaaattttcaatttaaatccttattaataaatctataaagtaattgttgatctcttgtgaaatcatataaataaa

SEQ ID NO: 78300 - DNA, 1323 bp, Heterodera glycines
atgattttacaattggcaattgacacagccaaagaaagcccaaatgaaagtgttgatgaaataataaaacaaaattttgatcgaaatttatacgaaatgtttaaaaaagcggcaaaaatgacacaagaaaaaaatggcagttcatcatcattggatgcttttgatgataagcatttgataattatcgggtcaaaatttgatgattcaaacatatgggtgagcattcaattaaatttaacttaaatattatttttaattatgccaaattaagtgtgatgatgctttattcactgaatttttgaaaaaagggcagtgaattttgggaaaatgcgagtgcaaggagagtgtgctcgaatagtatggcttcattcaaataatagttttcaaatgagttgaaaagtttgcacgacaatacgttaacagaaagtctaaaacaacctgcaaaattcatgatttttaatcgctcaaaaattttgaagttttctaaaagtaaaaaaatttcaagtccaagtttttcaaaaatggcgaattttttttattatatgaaacaaattgaaattttgcatgaagtcgcgcttatgccaacgtatttgaaaattcgtgtaataaggcatacaaattaaatccgattacaactgaaaaaaataattagaattcccaaaattttgaaattttccaacttgctgcttcatatggaaatccaggccccggcttttctaggcccggcatgtgtcggttttacccaaaaaattccggtctcagcaaatctaatgtgttcaaaaatttagaacaaataaagaaattagcgaaagtgttggagaaaatttagtttatttcatcgtaatgacagaattaaaattaaaccttcacaatggtatgaaattataaaattcactaattaattaaatttgttcgaaattaattaatgtattttctcacagatatacaaaaaaaattgtcccaaatttggtcagggaattggaagaaatccttcggactgagaattggcatcccattataaaacatgaaaaaataatttgaaatttgggctttcattttcatttccaaatgttttgctaaataacatttcgtataaatttcgatcaaaattttgttttattatttcatcaacactttcatttgggctttctttggctgtgtcaattgccaattgtaaaatcatttcattaatttacttttttggtccgttttccgatttaatttcatttctcaatttattctcattcaataattttggttcaacattatgatggtaccattttttaaattgatatttataatatttaatcggattaaaataaa

SEQ ID NO: 78301 - DNA, 405 bp, Heterodera glycines
atgctaattgcttttatgaaaggccaacaaaaaaatcttcaaatcagtaaatatgcaatccaaaaatatgaggcataccttggcattttgtattttttgaaaaagaattggcaatgcaaaaatatccttgaaaattttgatgaatttgaatggaaaaaatgccaaaaatatcgcaaatatttggtcattttgtacgaatatttgctcagagagtacgccggaattccagcagtgaaggcaaaatacgtgaataaaatgtggtcaattgaaattgaaggtttttatgttctttattcccttaccaaaatttcgtagttttattttaatccgattaaatattataaatatcaatttaaaaaatggtaccatcataatgttgaaccaaaattattgaatgagaataaa

SEQ ID NO: 78302 - DNA, 364 bp, Heterodera glycines
attacatttttattcataaattttgagcaaaacacaaaaggtcaaaataggttttgttaaacttcttagggttcaaagaaaataaaaacgataaaataagtgctaataactcgaagagttgcttaacaatcaccaaaaaacatattttccatgctttagggccactgcaagttcaggaaaaataagtaaaatctaaaaaacttatttctatgtagtaatattatttagcaatacacattaatatgttaattaaaaagaaatttagtaaaactgacaaacaataacttgtttttatgattactgtcgaaaagtccattttatttttctgtcgaaaaatccttcactgtcgaaatgtcctttgctg

SEQ ID NO: 78303 - DNA, 1751 bp, Heterodera glycines
atgttttattccgtttcaaccattctcctttttattactgctattatacatctttatttaattcatatttcatgtgcaattccatcggtgagttaattaatccgagtaattaattttacgggtctattttaattagtttgatgacaatattctaattgcatttatgaaaggccatcattggaaatgtgacaaaatagcagagaaatttgaagaatatgaacgcaccgaatgccaaaaatatcgcaaatttttggacattttgtacgaatatttgttcagagaatacatcggtattcacacagtgaagccaaaatttgtgtttaaagaccaaattgaaattaatgggccaataatttatgtggtgcattgtctagcgaaaatttcgcaattttattttaaattatcttggaataaaaattatgaatataaattaaaatctctgttcaaatggcttgacaatatttttgaaccaaagttgttgaatgagcacagattgaattatgacgaaacaaaattgccaattaatgaaattattttacaattggcaattgaaaaagcgaatgaatggcaaataaataaaagcttagacggaataattgtacaaaaatttagcaataaatttgaagaaaatttggaggaaatgtttaaaaaagcggaagaaagggcaaaaaacaataaatggaaagcaaatctaataaatgatgacaagcatttaatacttgtggacccgaagtacgaagataaatggacatgggtgagacttaaaattcaatgaaattatataaattcaaaacttagactgatgatgcgctattttctgaatttgtcaaaggattagcgacaaattttgagaaattttttaaaatggctaaagaatattcaaattatttaaatcgaatgaaagagaaaggagggaggaatttaaagaaaaatgccaaaaacatcgaaaacatttgcatattttatatgaatatttattccgattatatgctgaaggtttgttggaattttagtttattttgatttttacatttattaaagtaatataataataataatttaataagctaataagctaaaagtccgaaattgtcgaaacaattgcccccattggtgaagccaatttttattgttggagggaatcttcctgacagtttaattggtcttgtcgaaaaaatgaatgaaatttcgaaatgtttttggggaaaaaaggaaaaaactcttgatgaaataaaattagtaaatgagtaggaattaaattttgaaattaaagagcagaaaaattagtcccataaaattaaacaaaagagaaaacaaattttaaaaggacaaacggacactgaatgaattcggcaagaatttgaacaaaaaatggaaaaaatatatgaaaatacgaaagaaaatgccaaagaagaaaaggcaaaattggaaaaagcaattgaaaatgcgacaaatagtgaagaaaaggaagttctgggagaagaatacaatgacaaatttggcactttcaattcatcgccatttattgacgaaatttgacaaatttggcactttcatttcgtcgctctttcataaatcgttccttctttcccatcagatccatggcatttctgatgatgggtactattttttcttggaactttcattcaaatattatttttaggggttgattactggtttatttctctaaacttttggcttaaaacggggaaatttactatttccccgggaggggaaaaaaaaaagggtca

SEQ ID NO: 78304 - DNA, 431 bp, Heterodera glycines
cgacagatggctttgatccgcttgtccgattctgcgtttaaacaccgctatgtgccggctgagcgccaaacttattcagagcaacaaccgtatgaacgcacgagtgccaatggggacgaaacgatttcaaccgagaaaaaatgggacacaaaagcgatgaattggccgaaaatgttgcttgatgaagaagggaagagatgaatgaatgaatattgggaaaatcaaacaatttcatgatgaatttatgcacttatgatggatgcccttgattatgccatttaaaaaagaattttacatttttcgctttaaaattcaaaatcttttttttgtgagatggaatcccgagggataatcctgctaaaaccccagttaaattttatgggatcacgggtgattgcggaatttttgcatgttcgaaaattctaacttta

SEQ ID NO: 78305 - DNA, 509 bp, Heterodera glycines
ctagacccaaatataaagattaaatagcaaaaaaatattcaaagctcttacaaagagtgctgatcaaaattcgaacaagtttagggctcctatgtgatccgaattccctctatagacccaccctcagcttcacacattgaaaaaaataattttattaaacattcaataaaattcattacgggacatggacaattgaatcatcaaaattttcaaatccttcaattttcctgcatatccctcaatttgagagtgccggcggaattggaaaatgtggtgcccgaacgatttcgtcctcccatgctgtaaatgaatctttttattgagtttaaaacggtttaattgattaaaagaattctgcctgaaggcgctatcgaagtcgatagcggactcaacaaatattgaacaagctgctcacgtggactcacagtggttggccatgtaagagttgatggtgccggtgagccggtgccgaactctaggggtagccgcatggcttgttccgagttgat

SEQ ID NO: 78306 - DNA, 625 bp, Heterodera glycines
atggacataccaacatacactctaaacaaatattcgtacaaaatgtccaaatattttcgatatttttggcattctatccgtcatattctgcaaatttctccccaattttgtcacattgccaattctttctcattaaatgcacaattccaaggtaagcctcatattcttgcgttgaatattgacaaatagtggtttttatgctctttaataaatgcaattagccaattgtctgtcacctaattaatggattaaaatagaattttccaaaatttaacccatcaatggatttgcatttgaaattggaaatgagaaatggaaagcaaaaataacaaaagaaattaatggagcagaaaaaatcattttgttttctttgtctaaatatttaattaagtggaataatcagattgaattaaagtccaactaaacgatttaataatatttcaaagttaaataaatgttttcgaaagtttgaataaaaattaataatgtcaggttttgtaaggatttttccaattgaatttatgatatttattttttaaattaattaaacttcaaaattaattttttgacaactatttttcatgagtaaattaagacttttgcttcaggtgggggtcttaataaa

SEQ ID NO: 78307 - DNA, 517 bp, Heterodera glycines
atggacccaaaaactttgcaattggcaattgacacagcgaagaaggttcagcatggagagccaatgaaatattcgaggaaagcatttgataattttgtatttagaattccaaaattcagacatttgggtaatattttttttgattaaaataaattcaaaattagactgatgatgcgttgttttcagaatttatgaaaggccaagcgacaaattttaagaaattccataagctgtttaatgaaaatgaattaatgatttttgcaaagcaaaagaacatttgaaatatgaagtgcatctcggctttgtatttgatgcgacaaaattggcaagtgccaaaattggagagaaatttaatgaatatgaacgagaaatatgccaaaaatatgacaaatatttgcgtattttgtacgaatatttatttaggctttatgttgaaggtttgctcaatttccattaattcaaaataattttttgattttaaataataattttaaaggaaaaaacgctgaattggcca

SEQ ID NO: 78308 - DNA, 818 bp, Heterodera glycines
atgcggctacccctagagttcggcaccggctcaccggcaccatcaactcttacatggccaaccactgtgagtccacgtgagcagcttgttcaatatttgttgagtccgctatcgacttcgatagcgccttcaggcagaattcttttaatcaattaaaccgttttaaactcaataaaaagattcatttacagcatgggaggacgaaatcgttcgggcaccacattttccaattccgccggcactctcaaattgagggatatgcaggaaaattgaaggatttgaaaattttgatgattcaattgtccatgtcccgtaatgaattttattgaatgtttaataaaattatttttttcaatgtgtgaagctgagggtgggtctatagagggaattcggatcacataggagccctaaacttgttcgaattttgatcagcactctttgtaagagctttgaatatttttttgctatttaatctttatatttgggtctagggttaggcaaggggctatataaatgtcgtattggtattcagcgaccccgaaaaccctaaaatagacccattttccggctttttatgagctttttagactttggacaattcgtgggtttttactcttttggacaattcgtggcttggacaattcgtggcttggacaaaacgtggcttggacaattcgtggcttggacaattcgtggcttggacaattcgtggcttggacaatttgtgggtcagcggaaaagataaagctaaattgaatatcaaaattgggcaatcattgggaggaaagccgctaaataatttacaaatgaaaaagtga

SEQ ID NO: 78309 - DNA, 1326 bp, Heterodera glycines
atgtcgacgacactcaaaccgtcggactacaaaatattcccaaaaagtcagaaatgcgtcccctccaatggcacggaatcaaccgccagcggcgcaaccgaagattcattctcagcagaggatcgaaaaacggactggcgctcaatttatttggccgctttggtgtgcttttttggccaagttcagttcagcattttcctcaactcgcaattcgcctttatgaaaacggtaaaattaaaaaaataaataaatatttatttttgaatattatgaaaatactcatttaaaattattatcattttagcagaatatgtattcattttctgtaaaatttgaccatcatttccccccttttctgttctctcttttcttatcatttttctgctgaattttcaattttcagtgctctttatgtttatgctttctatttttgactacagaatataaaaaataaggcgattaaaccaaaaaaaatgcgacaaataattaaaaaatgttaaattcgttcaatgccttccgttcagcttgaccccaccgtttctgagggcttcttcggcatcatcgtcggctgtttctcgctgatgcaaatgattttctcacctttgatgggcatttgggccgaccgcattggtcagctgcgtgtgccgttgttggtgtgcaacgccatgatgttgatcggcaatatgttgtacttcgtcatcgagtggttccctgtcgaatggatgaagcatgtgatgttgctgtccaggctcgtggccggaattgggcccggtaatttctcattcgaatttggtttttgagcaaaccaattcaacagcccaaatcagtctgctggttgctttttcgaccattgccagtgtggacaaagatcgctaccgcgcaacggcgtggacgacctttggcacagcgattggcattactcttggcccgagtgaggagaaaactcatgcaagcaaatccaatttaattttagccttccaatggtttttcacttacattggttaccccgggtggcggctcaaccgatggatttcgataaatatgttcactgccacggcactttttgcgatttgcaccaatgtgttgattcattttttgctccaatttttctttcgcgaaagttccgtcggcattttagacagtccaaaaagcaaggtgaaaattggaagagcaaataaaatttttcaaaaattgtttgcttaggcaaattcgtccgaagtcgagtcggccattcaaaaattgccgccctacgaccgctgggcattggccatttgctgtgcgatgcgattcacgcagtatttgatcttcacgaatttggagacgtaa

SEQ ID NO: 78310 - DNA, 917 bp, Heterodera glycines
atgggtcatgggattggttggttgtggtcattgcaatgattaatgttaatgagtgtgtgcacacacaaaaaccaaatttatttgaaatgacaaataaaatatgaaaataaaagaaaaataattaaaatactaaaaactctaaaattccaattttttatgttattggaactttcgacaacagaataatgcaactttattgcagcaatggccttctccatttggtgctctgcttcaaacaaaatgttaaaaatagcggcgtttgtgtgtaataatatggtaataattgtggattaatcattatgcaaaatattttttcatttttatattaaagaaaatataaaaaaataaatcaattagggaaaagaagagaatttttatgttaaagtgcctatgaaaaaaagttttaatttaaatgcaaatattgtgtttcccgttgaattgatggatgaattaaagacaattatgaaataagaaacaatgttttttttcattaaatgatagtgaaatgaagagactcccaaattttatagcctcagatgtaattgatgcaatttggccggttgatccacctacacttcgaatggctttatcacgggatgaaactgacaaatgaacacattggggagaagaaacattgacgaactgataaaagacaaacgaatggaagagataagagataagcagcaaagctaaaacagaaatttgatcaaattaacaaatgttttgaaatatcaacaaaatgaaatgagtacatttgtacgcagcgattgggggaaacatagggacaaatgataggagaaagggcgaaaagaaagaagcacgaacagaaacatctgaccacaacttacgggaaggcctgtgctaattgaacgttacaaaaaaatgttgaaaggattaattacactatttggagtgga

SEQ ID NO: 78311 - DNA, 445 bp, Heterodera glycines
atggcaatacgtcaaatatttcagtttgggcatcaactttgtatgaatgtgacggcattcaaaaatgaattctttgggtaagtatttgaaaaagtaaataatattattattaatatacaatatatatacaaataaataattaaatttttttattaaaattaatatataataattttaatcttttcagaaatgatcagtcacacaaattttgtgtgcacacccgcaggggagattttgttaaaagaggttgggactcgaagaaggaacctacggagaaaggaattgatttgggatttgaatatttaaaggtgattcaaatgatgaattatcctttttaatttttaattaaaaatttaggaaaaatatgacaacatttccatttctgttgttttgcttggagaagacaaacaatttttggcgaatttatcattcaatcagcaggcaa

SEQ ID NO: 78312 - DNA, 273 bp, Heterodera glycines
atgtataaaaaattatttactggtgcagcaagtattcagtattctgtccttagatgacaaaataaacaattctgaatttttaggtgagtttttaggatcaatttgtgtaatcttattggaattttaaaaaaaaaaaatcctctttctaattttttataaaatggacatttgcgtcgctgagtcaaaaatatattttaaaaatattattgcaattttcagaaaattttctcaaacgactgtgaaatgatttttttaatttatttttagaataaa

SEQ ID NO: 78313 - DNA, 103 bp, Heterodera glycines
atgccaccattatttcgtcgacatccacgacgaagcggatggtgcgctttcaccgataagaattcggaaggcattccgaattctcttggaatgtcagggaaaa

SEQ ID NO: 78314 - DNA, 229 bp, Heterodera glycines
ggccgatccatcattatactgggaagttaattcacaaaaatggccaatgattggtgccgttgtacggaaatttctttctccgcctgcaacaagttcagaaagtgagaggcttttctcaacggccggcctgatttcagatgacttgagaaagagtttacaggcggagaatctggcaaagcttttgtttcttcatcacaatttgcttttaaccggtttctcaattgaatga

SEQ ID NO: 78315 - DNA, 1003 bp, Heterodera glycines
atgggttttaccagttttgtacgggctacttactacaaaaacaaaggagacctatgcccgcttttttcggatggttgtgtctttctggcctaattttcgtcctgactcaatttcggttgactttgaagcaggaatcatcggtgctgtaaaagaagtgttttaggattgtgaactgtcaggatgcttttttcatcttgtccgtaatttcaaaaagcgtcttgctactgaacaccttgttgaggtttttccttcaacgctgtgtcacttttaatttccattccaattttagcgctacaattctgacccggtctttcaaatgaatgccaaaatgattacatcattggcttttttaccaattgaacatttgacgcttggaatcatggcacttgaaagagaacttcctctcgaacttcagccagtttttgactggtaaaaattcaattttgaaagttgcttaaatgttaaatacaggttcatcaacaattacactggccgaccgcgttttgacggaactcgaaaccctgcactgtttgatccggtgatctggagtgttcatctgcgaaccatccaaaaacgagacaggacgaataattacgcagaagccgcacaccgatcacttcaacgcgcatttggctgtgaccatccgtcaatttggttatcgacagactccgaaagtgtcagaaaattatcgacgccgattttgcaaaattttcgatgggtaattcaaaaataaatcaaaaatttttaaagctgactttataggcgaacaaccttcaaagaagcggaagcagtacagagacgccgatcgccgaattcttactcttgttgaacgatacgcccaagaaatgggagtccaaaatccgttagtgcccattcattacgatcaccaatactttgcaaatcccggcccaaattttaactatgtgattgaatttcttcagggaatatcccacaattatgagatgaacccatgatttgttatttatgttttccaattaataaa

SEQ ID NO: 78316 - DNA, 1831 bp, Heterodera glycines
atgccgactgcgacgacgaaaacaacagtggtgccaagagcaatgttggtggacgacatgccgacagtggccgtggcattctcgagactttggctgatcagctcgctgaacgaattgaacggtttactgatctgcacagtgaggtgtgtttgtggtccggtccattacccgattcttttttggctctttccatactcccgacaattttaatctcgatgggttcggggtcgtttgaacgttttcccgttccggtaccgcgtatatttactaggcttaacattttttcgtaagtttgagactaatttctggaaacctaagagaaattaccaactttgaaattttaagaaaaaagcttagaaagtttttaataagaaaattacaaaaaaaattatagtgaattactaagttttttcaagaaaatcgctaaaaaaaattttcaaaaactttttttcttgcaaaaagtgtctaggtttggaaaaaattgttatataaaattttccgggggggggggggacaagctgctcccgatgaaaagacctgtaaaattcagccaattttaaaaacattttagggataggcatcaataactgatcaatctgatcaagcccattataaaataaatttattcagcgctttgttcaacaatttattttccgtctggccgatctggaggatgtccaaatgcaaccagagcacagacaagcagaaattgaccaacaaaagtgcgagacaaacaaacgattgggcgtcgcactgcgcgacgatttggcggcacttttggacaaatacaaaaagtacggtacaaaatgtgtcatcgcgagtactgtaattggaccattaaataaattgaggtcattgaatatgatggcaaattttttggctaaacaaagctctgcaaatttgtaaccgaggtcttttgaaattaaaacccgacagatcattcgggagtttgatacctaaagtaaatatacagtaaatattatttttttaatttcaaataaaacattttcaaaaaattcagaaaagcaaaaattcttattttttttcttccataaaaaatatctaagatttaaaaatttttaaacggagagtgggatcggcgtgggactgggcgggaaacgagcttctgctctcttttaatgacccgcattttaatccgccgcagggaattcacgtggtcgcaccttttcgccaatgttcaccagtgccttcttgcggaggatgcgcaggaaatgttcatggttcagcagcaggcgaattccgacccgtcttcttcgtcgtcctcgacacgtacacggaaaagggaagtgatcttccggggcaacaaccaatcgcaacagaacgccgccacccaccaaagtcagcaccggcccgagtccgcaattgtgccaaccgaagacggtagggcaaccaatccttttctacggtaaaaacactcttgaagcgtagaatttgtggagtcaatcactatttccttgacatttctcgtttatccggagcacaaaagcccagttatcctgtaaatcctgctttaagaaaagaatacagtattccgtgcatgattaccgtaccatccctccttaatttattcgttctcagttcgtacaaccgcagcggatgcgatggcctcgctgttgctaatgtctcgcagcgtcatcggcgactttacgcatgtgagcgacgccaaccaaccagggcgagagagagacaacggcagcaacaacggcaaactgctgacccatttggccaaacagagaccgaaaccggcacggctcaatcgcagtcgcattcagccgaccatggcaacggtgacaagcccgacggtggatga

SEQ ID NO: 78317 - DNA, 230 bp, Heterodera glycines
atggcttcttctgtttcttcttcatcatcactggctcatcaccatcgttctcattttggcattttgccactaattgtttcgccgcttttcctctgcctgtcaattttcggcaccgatgccattcccatcgacggggttgacgatgccgcgtttcagccctttcagcagcgacaaccgttcgcactctttgccgtcgcgcaggaagcggacgaaaatggcggcattggaag

SEQ ID NO: 78318 - DNA, 351 bp, Heterodera glycines
atgtcatttctcctccgctttatccttcagctcggtttggcccttttccatcgttgcacttttggcattggcacttggagtggccctttccttttcgtcgattgcctcaaagtccgttcgatttgtcgccgccgtgggattgttaggcaaatggcgaaggaaatgatcagagtaatttgaaaacgaaaataaatcactgaggggataaatctattaaattttgagttggcatcactctttaatttaattcttttttagatcgccgccaaatcgaatgatccactgatcggatggattgccaaagaggacgcgaccacggatgccttcttccaatccgttttttaatacgaa

SEQ ID NO: 78319 - DNA, 300 bp, Heterodera glycines
ctttttcacttccctttccaatttatcatcgatggaatgcttctgattgccatccaaaaattgtgatcaatgaaagcacaaatgccattcagcgcaatacgacggggacagaaggtgataaaattatcaatgaaatttcgatattttctcaattttaatttttttttaagaatttcttggtggtgatggccttctaattcctcgttcatgccgagcagggccaattcaaatgtcatatgcttctgctggtcgcattggcattatttatgcggaatatcgaattcttgctggaaatggccc

SEQ ID NO: 78320 - DNA, 1331 bp, Heterodera glycines
atgcgggattgcgggatttgcgggattaatcccgcgggatcccgtcccgcaaagaattttgagttccaatcccgcagtgggatccgcaaatttgattttttgtgcgggattatgcgggattttattgatttttttgaaaatttttctaagacagaatgccaaatatttttaaataaattaaataataaatttaattaaagttaactcatttttcgtcgcaaatttcattcaaaatttgtgaaattttcccggcggcgcctatcggcaccgccgtaccctcctccaagttcccaaaaagtttttgaaaaaatcgcgctgtaaaaaacatgtaaatagtcactcctttttccaaaaatgttctaaaataatgaaaaatgacaaaaagaaatgattaattttaaaaaacaatattttaagccgaaaaagggggaaaaaaatattaacgaaattttgggacatttttttttgcagaatacagagaacatatagagcaatcgctatctgtgactttgttttaattcgagcaactatacaaacgaattatgcactagaaaaccgtgccatcgaccattatctgccaccggtccgggttatcccccctcccaaaaaaaaaaatcaaaaaattgcttatttgcagagaagcgtgtttactgcgcaagtgttcgaggtgccctgctttgctgtgccaatgacatccttgaggaaaatattgcgcgcaattggattgaggcggaggaaaagaacgtggacataatcatttccgcccgaattgccaccactgttgaaacggaattatttgcactgacctatgagactggtgagtgagtgggggctgccgagaaaaattttggaaaattaggggtatgttatattttcatcaaaaaatgacccaaaaattttgtgatttgagcaataaaccacccccccccccctccccacctaaaaagtgtataaaaatctcgtcccgcaaaaaatgttgtaattttttgaataatttgtggacaccatgtgccataccatatacacttacgcatatttacggacaaaaaatcattgcgtatttaaaacgaaattttaattcatatttgatgcttaatgtaatggtgccaacaatttcaatcgcccaaaaacagcagaaattaatttaattaattatcattttaatagacggcgccaaactgttgccctcttgcgactgtaccgaccctcacttgctttttgatgggaaaagaagtcttagccactattgcaagcttccttgtaaggccgactcgacatgcaaaatattttccctttactaaagtaaatttcgatttgagtcttttgtttca

SEQ ID NO: 78321 - DNA, 1752 bp, Heterodera glycines
atgccatccgtcagtttgtctatgattgacttttcacatgtatttttcattcaaaagacggagacaaaaatggatgaaaattacatgtttggacttcttcacatcatcaaattggttggtaaatgttatttaatttcaactcatgaccagtttttgcttttcaaatttttaaaaatttagtttcgaaaaattcgaatggatttgttgcttgccatgaaattggaagctcaataaccgtacgaggaatgctacaatcaaatacaaataaaatattgaaaatgataaattcggtgtaccaaaaataatgatgaccaattgaacataatcccagcagatcattccaatgccaaaaacaacataaccaaccatttcatattgatttgtttgttcatttgtgttttatttgatgaattttattggcataaacattttgaactctttaataaactatttaactcccgttccaatcacttttcgacatggtttttgaccattgccttggcatttggccattctatcggtttttccacttcccattcctttctaacaaatttttcagaaaaaaatttttgtgatgcgaaagggctaatgagattctcgcccagaatttttccctcatttttgcagcaattaatcaacagaaattttctagccttgcactgtccccttccggcaacttcggcgggtaaaagaaaatggacaattttaacctaaagaatcatgttttctctgaatcttcgggtgctttatcatttaaacccaatttgtgttagaatttttcatttagcaaattccgtttcctttttttcactttcagccaaattctcaaccgacggaaagtcggacgtattttgcgcttcgcttttgcacaacgaactttgcgaaaagctcgataagcgtaaggaagagtggaggaagcaaaggccgggaacgaaggaatatacggcgaccaaagaacagcttaaccaattgcaggaaggcgagaaattctttttttatttgctaaatattattttcaatcagtccttttttacgtcaaccatttttagaaatcatcaaaatcgaaaactccaaatacgaatttttgcatactgaaagggacaaaatgagcattgctaaccttgttttggcgccaactcaagtcacactggaggcacgtattaaaaaaagggttaaaagtgatgaccagacccgtaacctgggggagggggcaagtgagggcgattcccccctcccaaaaaatgaaaaaaaattttcagaaagagtaattcctacgaatttgacccaaaatttacgcaattttccctagcagtgtctaaaggtatcgccgggtcccaatttcttatattttggccaaaattggtctcaaaatggccaaaattttgcgaaaatgactggctaaaaatttcccattttcccacagcgcaaaaatctagcaaaatctcactgggcaaaaaatgtgggccggaagatcaaaaaaaaattcttgggtgtccctcccgaaattttatctgattatgggcctgatgatgacccattttcctataaaaacacactttttctctacttacataggtgatcagcaacgggaccacccacctgcgcccgtcggtggtgctccgtacgccgttgaatgcctacttgttcaactgccccgagggcatttgccgctttttgcccacctttcggctgaggacaaatgccatcaacgacatgttcttcaccaagggtgctgcttcaatcatcaataaa

SEQ ID NO: 78322 - DNA, 158 bp, Heterodera glycines
tcggagtaggacaaaacgtcgtcggccgaaacgtcgtcgaacgaatttttcgaccgtaacttttttctttctcaaccgaattaaacgattcttggtattattcgaaagcgttcgaaaggatactattagcctgcaaattttcaaaaatttttatttat

SEQ ID NO: 78323 - DNA, 196 bp, Heterodera glycines
  unsure (1)..(196): unsure at all n locations
atggacaaagacattgtgccaaaagaaggaaatcgctttaaaaagcacttcgacccattgactaccaaagaaggtgggctttgcataaaatgacatcattatttaattttatcctaatttgttanaaatttaagcaaagtcttccgtcacttttcgatccaccgaaattactggtgattattttgttctaccataa

SEQ ID NO: 78324 - DNA, 1887 bp, Heterodera glycines
atgggtttttgggctatgggttcacatcctgttgcctgtaaaaattgtgttttaattattttggggtttttgggccgctgatcacgaatttgatattaatttctccctgtaccgaacccctgacccaaactcgaacattttaagaatttaaatgagaataaaaaaattttttggtaaaaataaatcggagtcttcaatgctattaaaaaaggaagaatcgtaccgaaacaattgtgggaaacaccaaaaaatgcaaattaggtatgcgagtgggatctagaccccgatttaaatgaacattttaattttgttaaactccccgaaaaaaccgcctctcgtattcaacctttagatcgttttttcaacaaacaatttaaataatttattcgcacaattcatgaaaaggtacgccgatcttactcaaactataatttgtctaatcgcaaatttatcggtcgcatattaaatgaaattcatttccaactttctgcgccaatttttgtcaattttattcgttattcatggaaaatttcggggtatttgggcattgtcacaattccaccatttgaaaccccaccccaattttgtttccgaaatttggatgtttatctctcatgccaaaattgtaatgtgcctgaaatctgtccgcaaatttggacactgacctcccctccgcccattatgcacccctaagaaatgaaaatttctcaaaaattcacctccaaaatttatttattttattttcttgacgataatttttgattttgaaaattatttatatccttaatgacttggcaaaatatttttgctttttgatgaaaattttcaattttacacccctaaatttggaactttttggcacctattttccaatttttggcacctattttgggctttttttagggcctaaaacctacctatttcggcattttttagcacctataaatattagccctagtcagtaatgaacaaaatttatttttaatttcaaaatatgtgctaatattgagattttcaaatgtattttggcatttttaagcaaagtcttccgtcacttttcgatccaccgaaattactggtgattattttgttctatcataacgatcaaaatgggctttggataatttttgaaaattttttaccgaaaaaaaattaaattttctattttattttgctttaaaaatatatgtcataatgtgcgaccaaattttaacaatggatttcttacaaattatggtcctaaaagttcagaattttatcattttttcaaaatctttcaaagaattcctaatttttagcccatgaatatttggatttttcattgtttcgtttggtgccaccgcatttggtggaccctggcacaattgtggtgaaaactgtgcgacagccaaatgttcttgaagagcacaattatcacaagcggccaattatgtacattatcaatcaattaattataaaatcaatcaatcatctcacacaagggataaagccaaatgccttatttttgacataaaaaattcaaaataattaaatttgtgtagcgatcgatcgctgccatcggtgccaaatttgcctctctttcagcaaaaccctggtcagaaaacggttgtattggctgcgttctccctccccaacttttgctgattctgatcactcgcaaaacaatgaatcgtcgatagaatcagcggagaatttgcatgagaatacggcgacggaggggagaccgcgcgcagaaagttaggcaaaattttcttttggaaattttcgtgttttcctttaaatttaaaaatttaggggaagaattgatgttttgtaatccattgataactttcaaaatttaaagatttaatatattaatgggcggggaaaacattcaaaaagaagcga

SEQ ID NO: 78325 - DNA, 387 bp, Heterodera glycines
atggcactttcccaactgaaggggaaggagaaaaaactgctggatgagaagacaaaattggaaaaattgtccgaaattgcgcggccgtcccatcgtttgatgccaattttgttgcataggcaaccagagatagatgtaaagaaagaagcggaagagacagtgttggacggaggagagagtgagaaagatgtgaaacgagagactgttgagaatgaagagagcgagaaagaagcggcagagaaacagccaaaggaagagacagaaaagggacgagaaacgcaagcagaagcagaaacatcagcaacacaacacacagtcagggaaaaagaaaatgacgacaaagggaagagagtggacgaaagaaggcaaagcattgaccagaaataa

SEQ ID NO: 78326 - DNA, 612 bp, Heterodera glycines
atggccgaggcaattgtgccaaagtttggcatgctcaccaaagaggaaatggcacggatgaaaatgctgcaacagcaaatggagcggaaacccgaactcgctgctgctgtgaagagagctcggctcgagcaggaacataaaacattgaagacggacgaggaggtaatcaaccggatgggcgggcggggtaaagttgggttggaatttttcctaataaaattaatcaggaataaaaatatacataaattcgaatggctattgaatgtctgctggagaatcatgttttcatttttaaagattttgaatacagtgttccaaaattaaaggaaaagcaacaagtgcaggacgttcgtgagaaatatacgacatggcttcctcccgaagaccaatcgggcgacggttcgacacgtttaaatcgaaaatttgcaggaaaatattaaagacatatattttcttgttctttcgagtttatgcttttataaagcccagaaattgctttttaaatagaaatctgaaaaaacattcaaaatcattgcttcacagggttcgactacactaaacttaacagtccctggtcaggaaaatacaaagtagcataagaataattctaaa

SEQ ID NO: 78327 - DNA, 828 bp, Heterodera glycines
atgtatttgcgatctgcggaagatttgatcatttggatgggcaaactcaatgatggcagcacaaagccgcaattttaccatgcaggaaaggtgaaaatggttattcattaaagagagcacccactcccccagtcggtgcatagtttcggactacaaacctgaattctaacatctttaaagttcggaatttgctgaactcagattcaaaacttgccattgaaataattcctgtatctatattccccaattgacctttatctgttttttcgatctaaaaatagaggaaaaatacaagtgaccaacaagccaatttcattctttagtttcagaataaaaccacaattttttcgctattcaagttttttaaataaaaaaatgtgttctttcggttgtcattgatcttgcatggtttaggaaaaatacaggtctggatccccaggtatatttgtttttcaggttcaaattggcgatgagctgctcgattcatacgtttctcgcatcactcatcagtttgtcgatggtgccgtgaccaaaaatgagagtgccgtcgttgttgtcgaagttcttttggcaaatctaacgattggaaatatgcccagtgatgccattcgatcggtggtccattacactaaaagcggacggacgaatgccgagttcatagtcaatcgggtgcagcagctgaatgcatggcaaacgctggcggggaaactgaggggatgcgtcagaaggacgacggccgactcggcctggggatatttcgtacggatgggaaacggtgagacaaaaaacacggcaaaggcaactgagaattgtccaaattgggtttag

SEQ ID NO: 78328 - DNA, 765 bp, Heterodera glycines
atgaaagaagaagacagacactggaatttgattgtgcaagattacaacaataacccacaaaatggaatgcgtggcaggggaatggcaaggaaaaacatttacgtacagcaggaccaagcaattcgcgccattttcttggatcgtcataacagaccttttttggcctatctacgtgcaatcgcttatcgaatgccggaaccaaattgatttgattgagatatttttaggaaataatccgttctaatgacttgaaaatattttttaaaatagaaatttactgtcggattgtccactgtcggattgtccacttctgtcggattgtcctcactgtcggattgtccaactgtcggattgtccactgtcggattgtccactgtcggattgtccagtcacgtatccaaaagttattaaatttaatgatgagaaataagtaaactaaaaatagttcttcggttagaaatcttggtcaagcagtaaatacagctaatcaaaaagcttaagcaaaacagtgatttatatgattcgaacccggatttatttggcttttcattttttacatgatttttttgatgtttctaaactggttttttctcatttccatatttctgattttgtctatatttccatattgtacattcatattacggcatttttacaaatctcaaagacaccactcaatattttttgtttttgtaaaatacgaccttaaaatagaaaaattttggaaaaccatcataaatgtaggaaacgaaaagaattgcagaa

SEQ ID NO: 78329 - DNA, 296 bp, Heterodera glycines
ctggatttttgtccaggaaatcaaggtccaggtcaaatgtgaaaaaaaatccaggtccaggtccaggcaaaacaggaaaaaacctggattttcctggacaaaattttagaatttattttttcaagtgaccgatgttttttcaagttttcgaaaacagattaaataaatttaaaaacacattattattattaattagatatttttagatgcttctaagcaaataattaattttttcaaacatttttttgatttttaaaataaatttaaaaaaatccagtccaggcctggatccaggt

SEQ ID NO: 78330 - DNA, 75 bp, Heterodera glycines
ttttactaaaactataaattaaacgcaaatgacaactaattaaaaaaacacaacaataaatcactaatcacaaag

SEQ ID NO: 78331 - DNA, 1403 bp, Heterodera glycines
caaacgccaagtgtatgtggtggaggagccccgtgacacatttgttgtgccgttgaactcgcagcatgccaacgaaaaggaaaatgccacttttgaatgcgaagtgaacgacaaggacatcgatgtgaaatggttccatgacggtgccgagatcgggatggacgggcggcactttaaggtgggaaggagggggcaaatctcttgctaatcaaagaatacattcatatttttgtgttatgattaatttcaaaaattgagtaggagtttaaattacctattttgggattcctttaatcccaaaaatccctaagtatggatatttccaaaattcaaaccaaaactagctcaaattcttcaattcaaatgcctatcagaaatttaaaaaatatattagaaaagtcagaaacaaaaccatttttttaacaatattttttttaattttatatttttttacattatctaaaatttatttttatttttttgccaaatttcattttgtttttctattgtgtattttatagatgcttcttgttttacaggaacgggctggatgccgtcgtcgcctgctgatcatcaatgtactcattgaagaccacggggagtacaaatgcacagccaaagacgacgaaacaatggcccaactcattgtgcaccccaaattcgtcaaaaaagcggagcgcaagccggtgacctgctggttggacgatgagttgtattaaaattttttgtttttcactgttcctgttttatttgtgcccatctcttttttaaactctgtgaattgaagataaaattttattttcctttaattgtcctaattttatggtatatcccaaccagggctggccgtgattgaatttccaatcacggaaatccgtgagccgtgatcacggggctttaaaaaaaatccgtgatccgagatcacggcaccccaaaaactccgtgatccttgattaaaaaatttttttctaatgatttttttaatttaaatttatttagaaaaacggaatttaatcgctggaaaaattcctaaaagatattttaaagaaaccaaaacacaatccgctttttttgctgcgtaccttttccaaaaaatgactaagtttaccattttgagcaaattttttgatgaaaattaggcctttttgtagaaatctccaaggaaaaattttattttttaacaaagtttattaagaaaatttttcaaatttttcttaaatttatatttaactgtcccataatgtttctttaaaaattttagacattgcaattttgcgtacttttccaattttttgcaaaattaattcatgaatattttttcagaaagtgctctgaaacgcatctaattttatttacatgttaacaaggtcctcttaggcttatattatgaataaggctaaaga

SEQ ID NO: 78332 - DNA, 216 bp, Heterodera glycines
atttgaaagagaatagaaagaaccaggttcgatgaagttttggtaagccaaaaaaaatccaaacatttaaaaatctataaaaaatttaaaaatgagaattcatgcgagattttctggaaataagcttaattgggcctagttaagctgtaaaaaaaaatttggggcgatttgaaagagaatagaaagaaccaggttcgatgaagttttgttaagcca

SEQ ID NO: 78333 - DNA, 364 bp, Heterodera glycines; identical to SEQ ID NO: 62360

SEQ ID NO: 78334 - DNA, 648 bp, Heterodera glycines
atgaacatttatttgggaaattccggaacaagtgaggcttattgggcaactcatttccctgtcggtgattttgtggcagaagtaacggagaacgcaattgtgttagaaagcgaacaaagcgtgttttattttgaaaaagaaaagggcgatgaaagagagggtattgttggcgtaccagacgaggcgtataaaatgtcaaatgacgttttcattctgatacacactccgagtccacaaaaagcgagaggaaaaagggaaacaaagcagaaaagtgaacctcagagaaaagagcgaccagcgaaacaggaagtgtttctgaaaatcaggccgggtcaaaattcaaaatttgaaaatttggacccagcgtccagacccaaaagcaattggacagggacaacttgggctccaaaaaggaacacaacggagctaataattttgagtaccccggttccccagtccacaagtacagtggggagtacgataaaagtgaccatgacaatttcgacaaatattacaagcacggttccaacgactataaggcctaagatagaagtcaaaaaaccaattttcaagaaaattcaaataaaaaatgagcaaaaactcagtcagtatacaaggcagttgggaaaaaggtggaaaaattggtag

SEQ ID NO: 78335 - DNA, 462 bp, Heterodera glycines
atgaatgtgactgagattccagcacttatgactccaattcctccaaccactcaaaaaattgtggaaaaggtggaattgccgaaagagaaaggggaaaacaaatcagacagcattaaagctgaaaagaaaaatgaaaagttattaattccatccacggcaattacggttgtgaagaaaattaaggacgaaaaagtaagagacgtgtcggaaaagacagtaaagaataaaaagagtgaggaagaatacagtcaggaagttgaagctgaggtcattgagagcttagctaatgatggcaatgaaatggaagaattcgaaaattcattccaggatgaaagcgatgaggaagttagtgtggaattattcgatgagaatgaaatcttcgacatggatcgaagaaaaagaacgacagttacaacacctgacgcccggtggattaaaaaagtagagaaaagcaaagtgtga

SEQ ID NO: 78336 - DNA, 345 bp, Heterodera glycines
atgatgcttgaccagaatattattcgtgagtcggaatctgagttcgcttctcctattgtgatggtcccgaaagcggacaaaaaatcatggagatttgcggttgattacagggcgttgaataaaatgaccaaaaagagagtttttcatcttccgaatattcaagagcttttggatttaatgggagccaaaaaatattacacttgtatggacatgatgcagggatttatgcaaatcccaatggcaaaggaggacattgaaaagacagcttttatttctcatttgggcatttatgaatttatcacaatgccttttggtttaacagcagcaccggacacatttcagagg

SEQ ID NO: 78337 - DNA, 965 bp, Heterodera glycines
atgtttaagcccagccagatagtcggtctggtgtggacgggggcccttcactcgctggccttgagggtgaaggtgtgtctgttcctagcagcgggggtggcggttcctagccctaatgtgccctgcctacgggctgcattggtacagcgagagaataaccgggactggctggcccggaggaccgcgagtcactgagcagtgtcgaatgcgcagctgctcaaactcaacaccccggattaaaatccgcgttgacggaactcatatgtgctgtgggcgttggcgcaagtgccttatggagggagtaattacccaacatagggaggcctagaccaaaccttgcactttgggatggtagtgccacacactttgagttccatgagcggttccataatcgcttgctatgatagtcatagttggtgggcatgccctccattgtgatggcttgggcaggaaggttaaaaacacgtgtagggggtgacctatgcgcgtttttgactctccaaaaatggcccaaatcatcgctcaggagaggggtcatgcccgatttttttttgggtggcccttttctttgtcattttcgatcaaaattgttttactcttttcttaaaattgatcaaaatcaatttcagaaaaaaaaatgagccaataatccgacgattccctcccccctaccctcgatggaccgtattcccctgttggggatgatgatggagccgaattgatcgacgccgccccgccgctggaagaagtcatcatgcacttgccaaattccgtacgttttgcgaaaatgtttttaaattttttcatctaattttgcgaggtcttttcaggttgtgccgtctgaagtgaatgaacgaaaggcccgcaaggaaccatcaataactcgcgaattggacaccaagttgttcaaagtgatggctttatgtgtttgtccgccgcgcaggcggaagcggggcggttcaaag

SEQ ID NO: 78338 - DNA, 331 bp, Heterodera glycines
gtactcaaacaattatggggagcaaaaatccaacgcagaattaaagtacaggctatagggaagctattcccgaaggattcggtctccccataaatctgggcgcatcggttcggggggactgccccgaaaacaaaaataaatcgattttttcaagtgtccgtttggggtactcaaacaattatggggagcaaaaatccaacgcagaattaaagtacaggctatagggaagctattccggaaggattcggtctccccataaatctgggcgcatcggttcggggggactgccccgaaaacaaaaaaaatcgattttttcaagtgtccgtttggg

SEQ ID NO: 78339 - DNA, 739 bp, Heterodera glycines
aataatttttaaatttgaaaaaacagaacgccataatttaattttgaaaaaaaagaatgccaagaatttaaatattttttaaatgagaaaatggggaaaacaaatgcaagaaattggcaagaaataaatagggaaatttggcacaaaaatgtgcaaaaatttggcaagaaataaatagggaaatttggcacaaaaatgtgtaaaaattggcaaaagatagggttaaaaattgtggcaaaataatgccaaaaattggcaagaaataaataaatagggaaatttggcacaaaaatgtgcaaaaatttggcaagaaataaatagggaaatttggcacaaaaatgtgtaaaaattggcaaaagatagggttaaaaattgtggcaaaataatgccaaaaattggcaagaaataaataaatagggaaatttggcacaaaaatgtgcaaaaatttggtaagaaataaatagggaaatttggcacaaaaatgtgtaaaaattggcaaaataaagggttaaaaatttgggcaaaacaatgcaaaaattggcaagaaataaattgggaaataagggggcaaaacaatgccaaaaaattgcggcaaaatggcacaaaaaacggtaccataataatgccaatctggcacataaataataaatggcaaaaagtaatgggtaaatgggtaaacaaatgccaaagaaggaaaaaattaaggcataaataaatgataatggattattgattggct

SEQ ID NO: 78340 - DNA, 3863 bp, Heterodera glycines
atgccgggattccgacaactgaaccggaatacgatgcagaaatatacatccatcaagtgcaagggttatggaacgtcaaatatcccggtgagtacaaaattttcatatttaacgattaccagatacgaccaatcaccaaatctgatgtcaccgactaccaattccccattcttctctaccacaacaacaaccactttgacggcatcaaaaccctgtccaaattcttcaataaacgttactattgcctctcttgtgaaagcgtctacgagcgcaaatctcaacattcaatgaattgctcttcactctgccatggatgtcgggaggttggcgtcgactacccatgcgagccacaacagggatacttcaaaaaatgtgagcactgcaacaacaatttctacaacaaggtctgctatgaacgtcacctacacaaggatctatgcaccaaatttcagcgatgcgaggactgtggggtaatttataatgtaaagtatcacggtaaaacaggtcaccaatgcggggaaaagttttgtcgactttgcaagcaattccatgtaaaagaggatgatgaggataatccgtgcagtagctgttttatccaacccctaaaaccccataaacttaaaccatacaggatcatcgcttatgattttgaagcgacacaggataaaaaagtaggtaataaattcgaacacgaggtaaactttgtgtcggctaccataatttgtaccgattgcatcaatggaaattggaaggactcacttaaaggatcctcttgcaaaatttgtggaccccaccgcacaatcaccttcgcaccattcgacttctcaaacacgatagtggaccaaaaagtcaccactaggcacccgctgcgcgactttgtccaatggctactcttcgaccacaacaaaaaatttcccacggttgcctttgcacattttgggggccgctacgacatgaccatggttatcaaggaagtcatttcgcaaggtaaaaatttattaaatatttaattaatttttatcaatcaaggaattcacaaccccgacatcatcaaacaagggaaccgactctacgaactcaaaattaatcaaaatgaacacgggcctcaaaccatacttcgcgacagctacaaccttatgcccatcaaattatctggcctcatcaaatcctttggtctcaaaatacaggtgaataatattctttaaaattcaattaatttttaattattaggataaacaacattttccacacatgttcaacaaagcatcaaactatgataatgtcctttcccatcttcctccacgtgaagaatactgtcctgatcaaatgaaaatccccgatcaacagaaatttgacaattggtacaatagtaattacaaccaaccttttaaccttaaggaaaaactccctgaatattgttgcaacgacgtacaaatactcacccatgccctagtggaacttagacgtgaattcaagcaactcaccaaaagagatggaaaacacggaggaattgacatcctgtggcaagcaatgaccatcgccagcgcatgcgtcaagaactttgcactcaatcatctgaagcctaactcgcttgccatcgtcccggaaaaaggctatacacctcaacagaaccaaagtgcccttgccatcaaatacttggattggtactcacatattaacaacgtcaacatccaaacagcacactcccgctatggtgaatatgtctttaaacgtgagggtcaggtgtatcaagtggatggttatataaaagggactaatgggaagagggataaaattattgaggtaaatggttgtctgtggcatgggtgtggggaatgttttgaggacttggacgaagagacgaggatgccaaatgggaagacactgcgtgagataagagagagggaggtaaggaagcacgagattattcgccggtacgtcgacttggaagttgtatgggaacatgaaatcaatgagcagctaaaaaaggacgcaacaatgaggggctactttgacaattggaaggaccgctcaccaattaaaatcagagacgcatttcatggaggacggactggaccaatgaagctactccacacagcaaagccgggacaaaaaatcagctacaaggacttcaccagcctttatccatggaccaacttttctacaagttatccactcggtcacccaaaaattatcaactttagattaaatgagcaaactgtcaactggcgagctccatccgacaatccatacaagggacttttaaaagttttacttttacccccaaacaggaatatcaatgtgaccgtaatgcccgtaaaatttgatgagcgactcctctttccactctgcgaaaaatgtgccaaacacatcaccaatgaacacccgaatggcctcaaagacgacaactactcgtgtccacacttcaatcccaatgaccgtgcctttgtctctacctgcactcaccttgaattgaatgctgccttggaggtcggctacaccgtcagaaaactcttccatgtcctgcaatacgaccaatggagcgacaacatcttcaaatcttacgttagcgaaatgatggccctgaagatccacgcaaccggcttcccttcatggtgcagcaacgaagaggagaagaaggaatacattgaggagaaccgtcagcgatttggaattttgttagacaacgaaaagatgaaggctgaaccagggaagcggtacatcgccaaactttgcctcaactcactctggggccgcttctcgatgcgaaatctactctcaaaagcaataatcaacaacgacgaaagcctgattcgccaatataccgacgacaagaaaatcgaattagtggacttggaaatgatggacgacgacaacgatgtttttatgctgacttaccgaccaaaagaagaatttgtcgacgaaaataaatactccaatgttgtcatctccctcttcacgacatctgcagctcgcctctacctctacgatgccctcaaaaaagttgccgacacccccgactgcgaaatcctttattacgacaccgacagcgtcatctacgtgcaccccgaggacaacgacccactcccgacaggaaagggacaccttggagaactaacagacgaaaaccccgaccacaatatcttggagttcatcagcgctggctgcaagaattatgggatgaagctgcaacgcaaggacaccggtgaaatagaacacgatttgaaaataagagggttcacccttgatgcacaaactattcaaaaaattcattacgatactgttaaggaccaaatcttacgctatggctccgaagacccccctgaccctatcattgtaacatatccccattttattcgtcccaaccttatccaaggcaaagtgtacactcaatctctaactaagcattatcaacctgtcttcacaaaaggtattattaatgattcattccaagtcctcgaatttggttatcgcaaatgataagtatgcattctcaattaaattttctgtatattagttttcttattgttcccttcttttctttctctctgtttatatcactcatgtgggacggaatgacccctggttgatcctccccatcactccaggccatccatctgagatgaaggtggacgagctgctcattattgtaatgcgcagcctggtgcgtgagtgtttgggttggggaccgaagggtgaagccgttccctgggtgtgtttgctcacttttttcaaagggaactctaagaattctgatattccttcaaatctatcaaaagagttgtatactttctttttatcatttctctttattctctattttacacttgtatttttcatttgaatgtttattcagaaataaa

SEQ ID NO: 78341 - DNA, 1050 bp, Heterodera glycines
  unsure (1)..(1050): unsure at all n locations
tgaaattcaaaagtgtgctgatcctcttaccgaattccgttcatgtgtacaccaatctgttgaagaggccattcagaatgcacaaaacaccattggaggagcaaataaagtaggtgtaattatttcttcggagcttttagaccagggagacatcatcatgcctataactccaattacatcaaatgtcgtggacgccattttcaaccagttttgtaaagtggagcagagcaagtccaaacacgtcaacttatatggggccccttttgttgtcaccgtaactgttctaaacactgaaggcctaccacgacgacgaacgaccaaaggaagtgcccctccaattcactcttcccaatcacacatcttcaaaattaacaacaacgacaattattgccttttttatgcactggaactgatgcgctactactcattatatatcaggggagtaatttcaaggaaacaatttagatggctcaaagataatcaaacaactgttcttcgtcaaaaagtactacttttactccgcgatgccgggattccgacaactgaaccggaatacgatgcagaaatatacatccaccaagtgcaaggattatggagcacaaaatatcccggtgattattttactttttatattgatttttattaatgaaataaattacattatttgttacaggcgagtataaaatattcatctttaatgactaccaaacccgacccatcacaaagtctgacgtcaatgaataccaattctctattattctctaccaccacgacaaacatttcgacggcatcaaaacactttccaaattcttcaataaaaattattattgcctctcttgtgaaagcgtctacgagcgcaaatctcaacattcaatgaattgctcttcactctgccatggatgtcgggaggtgggcgttgactacccatgcgagccacaacagggatacttcaaaaaatgtgatcaatgtaacaacaatttctacaacaaggtctgctatgaacttcacctacancaggatctatgcaccaatttcagcgatgcgaggact

SEQ ID NO: 78342 - DNA, 1237 bp, Heterodera glycines
atgaaagaatattttgaattagaaaaatgtaaattttatagttgtaatagaaaattattgaaaaatttttttttttttataagttgaatattggtaaaatattggatgaaagggtaatgtagttgcaaatttgttagtttaaatattttttgacggagcgcacaagcaaagaatgttggtagaattttcgcgaatgaatgggagaagttgaattttgctagtaatagccggctatttataccctcacaagtgggcggagcttgaccttcactcaagcatgtggtcatttggcacattggcaactaaattgttcatgtcatggcatatgcgctcaaatggcctctgcgtgcggtcaaatggcacgcgcgagcgctcaaatggcctggcatcccttcactccctaaaaggcacgacagctgatgtccgtccatccaatacgatttgactttaataattatttaattaattaattttatatttttttcatttatttttaaatttttatctattattttaaatttatttaggtaataattttttaactattattattttaacaatttaattttaattaaatttaattttttaattaatttattattattattatttatattttaataatataacaattttaattttactcttaccttattttaattttatttattttaaccataattaattttaatttaattttgaattatttgaattttatttcaactttaattataataattcatttaactaaaattttaaatttatcacaatcgggctctcaaatagcccctgcgggcgctcaagtggtagcatacctacactcaatagaatttgagttacctctgaccaacagctggtgctttccattatcaccagcgagcgctcaaatggtccctacgtgcgctcaaatggcatacgcgagcgcttaaatggcacacacgcgggcgctcaggtggcatgcgtcccttcccttccctataaggcatgacagctgacgcccatcctctgcctccctttccttctctaataggatttggcgttgggttttatccttcagatgttttttcaattatttacctcttctgggattggatatatttattataggtgttttttaaaggtttaaatttggtactgaaacgtccctttccattgggactgaaatggcggggctgaaaattaagggccaaaatcttggggggtaactactaatattaaccatttttcattgcatata

SEQ ID NO: 78343 - DNA, 266 bp, Heterodera glycines
atgggcaataaattagaaattgaacaaaatgtttcaaaaagtaactttttgaaatataacattttttaaaaatattttgaaacaaattaatttgaatattcacagagcgcaaattttatacaattgctgataaattggaaaagatgaagcattattatcaaatgaaaaaacaaaatcccaaactcacggatagccaaattgcccaagttttgaatgtgtcaagagcatcaatgtacagaattaaagctgaattggagaagttttga

SEQ ID NO: 78344 - DNA, 138 bp, Heterodera glycines
caaaacgtcgtcggccgaaacgtcgtcggaagactttttgaaccataactttgttcattgtcaatcaaattaagcattgttggtgttgttcgatagctctgtgtgtttattattaatagcttacaaatatcttcaaaa

SEQ ID NO: 78345 - DNA, 1202 bp, Heterodera glycines
atggacgcacaagcacaggacagatgtcacagagtgagtttaatttaccacaacagggaacaatttgaggggaattcatttgctatttctttttcagattggacaaactcgaaatgtcaccatttatcggctcatcagtgaaaagacaatagaggaaaatattctgacgaaatccatgcaaaagcgacggcttggggagatggccattgaccagggcgaattcacgcccgacttcttcaaaaacaccggcaatctgcgggatttgttcagcaacgagacggccgttgccaaaataattgcgcccgttgtggacgaaccgaagaacatcaaagacgtcgaagcggtaaagaagggaatttttaaggttattttgcatatatttaggcaatgaatcgggtcgaggacacacaagatgcaattgctgcacagcttgccaaggaggaggacactgcagaagtggccgaatttgacgagacactgaacggcgcttctaccagctacgacctgagagacattgacagtccctccgagcagtacttggaattaatcagcggggtattacaaaaattagttgaaattttcggaaatcttgcatttgtagctgaaaccggtcgagcgatatgccgtcaatttcatggccgacgagtataaaccaatgctggacaaagaagtcgaggaggccgaggttggctcaatccttcaatcattcggaatgcgatcgtatttcacaggcaaaaataaaagcgaagcaaatggagttcatggaaaagcaacggaatgcggacgtcggactgttgtccgacacaatcgacgaaaatggcagcgccgtcgggggaaggaggcgacggaaagaggaggaactgctcgacatcgcctacaacgcctccacgggccccgccgctgtcgatgaggtagccaaaatggcgaaacgaaagttggccagcgccaagagggtgaggggggcgcagacgacgacaacgacggcactccgttgttgtggcagaagatgtcctccggggaaagtgtaggaaggacggccaaacaaaacaacatcgaacagcgcttattacgagtcacacagtccacaaattatatacctattcaccccacccttcgttttgttgctgaactgttatttcctcccccaaacgcacggcccaacgcatcgcaagactttgctctttttgtttgtaccatagaaa

SEQ ID NO: 78346 - DNA, 1831 bp, Heterodera glycines
atgacaacaaaagggtgcacaacaaattcattatggaggtcagaaaggaaatgttatcatttgcatccaaaaattcaaaaggaactgcaaaaactcgattatcttacggttatcgacgatggctctcacgacgatttttttctgctcgaagtggcaaaatgcaacggaggctttgtgatatccaacgacaaattcagagaccaccgcgtgaggacggaagttccggacggacttcgccaaatcattgacaatcgcagcgtccccttctcttttcattatgtcccaattgacaaaatcggaaaaacaacgttggctgatcccgcaaaattgggctatttggaattggaattcactctcaaaccgccgaatatcagtgagtcatccaacaccaaaatccgataagaagggaaacaaacgcatattttgtattattttgcgaatttaaaaaatgcatgaaaatctatgagtccggatgaaaaaggatcagaaaatggagacatctaagaaaatttagtatcaaattaaattctatagtgaccgttaacttgggatagaaaaaacttgcaataaattgttcttgtgcatccaattaaatcaaataacgatcccaggattaacactttcccagttgatattcactgaaaataatttattatgacaaaaaaattttgaaaccctaaaggccaaactccctttggttattagcggcgggataacaactggaaaagtgtccgaagatttacccccattaccggatttatggcttggagtatctttttgaaaaaaacttaaattaaaaattataattttgctgggggaacaaaggtcgtggacatttgtccttttttcaggtgcaatgttttcactaagtccttccgacccctcttatggcatggtcttctcacaacgaattctcagaagtgagaaacgcgccctcgaaatgctggaaagattggatgtaatgtcggagtaccttttggtgagttatttgccaaaaaaccgcttaaatgtgagttttagcaattaatgtgcgaaaacctcggagtcaaacgctctctcaaacacttaaaaatgcccgaaatggaaagaatgccgatagagttcgaaagattttggcgtttttatgatttgcatcaaaaatgatttggtcattcatatttttaccaaaaatatctattgtttttgttttgttccggtgtattttacaaatagaaatataattgttttctctccctccttccactctcacacaactatttctccctctctctcatttctttgtcagttagcaaatcggacggtctcccgtgtctctgatttccactctgttcaaatgcacttccgcgtctccgaactgctcgcttttgtcgtgtactgccaccaatgaaaagtgtctcaattccgggtccaattggacgaccatccgctccatcctccattcttccaccttatcaaggagatcttcgatattgtggtgacgattggttgtctctcacttttggaccgattagcaatacataaaattcaataggcctcacctgaatcaactgcgctccattgatcaccgacatctatattgataaactcagcaaccgaactcgccgatgtttaattcgccgataaattattgaagaaaaccgaggaaaatattttctttattaattttaaaaaaataaccgaaaaatgttcattgaggaactaattggggtggccggaatctttataatacttttgtgatcattaagaccggatgggatattgtgagttatatttcacaatttgttaagatttttgggattttcacaaaaatgttcgagaaacaaaaactgca

SEQ ID NO: 78347 - DNA, 228 bp, Heterodera glycines
atgcgtcgtgcgattctcaaatcgcgtcactttcgccttccctccaacgaacaattggaaatgcatcttgaagcgagtctgtccaccttcggctctcgtctttacatttgccctgatgagcagcaaaagaccgtcgcgaggctatcaatggaaaaaacggggccaaatggagtggagacggaccccctgagggcatttggatactgcgaattgctaatgggaccaaaa

SEQ ID NO: 78348 - DNA, 1047 bp, Heterodera glycines
atgaattctcttaaacgctttcaactcccggagcaaggaacacgccagcaagaagagttggattccgttgaaccgaaaaacatcagcgatgtggtcaacttcaattcggccggcgttttttatgttttgggaaaagtgacaaatatgcagtaccgtgtttacaaagtccaaattaattaattaattaaattattattaatttttctgtttttaggcatgcccattccgttccaaggggctcatttgtcgccgaaaattgtccgatgataacatgtgtgaggcttgcggccaaaaagccattgcccccatccacacggtgtttgtccgtcttctgctacaggatgttgaacaagcagacattgctcaacgtgtcaccatgttttcgagtgttgccgaagagtttttgggaatgaaagctgctgaattgctcgccaaggagaaggagccggagagccttgcgaaacatttggacgatttgattgctgtgaagataattgcgaaagtcaacattaaggttgttttttttgcaatttattacatatttgacaaaccacaacataggcgaacagtcagacttacactggatttgattggattgtcaatttgttcaagaagtgccctggaaaaaatgacagtgatgtgccaaaagaaaaagatgatgatgatggtgacgttgatgagattgctaccaaaaaaacaaagaaaaattgagagagagagagagagagagagataacggattcattttgttgtgagcttcaaaaaaaaggatttaatgtgtcctttactcttttaaaaatccattaaaaatgcattttattgttgaagatgttgagacacaaactccaaaatggtcttgatgtgattgcaattttgttttttcttcgtgaattcaccatgagacaggattgcacgttgacaatttttcgtaatgagcacagagagatttgcagttggctctatcctagtggtggatcgtcaactctcctcataacaatccaattaacgttgttggaaaagcttggcccatatgcgtttgtcacgtaa

SEQ ID NO: 78349 - DNA, 948 bp, Heterodera glycines
atgctcagttctggcagtgaccctaatgtgcatttggtacttttgagggatttgttcttcgcctgctccacccaaatttcctcttcttttcaacccgtgagtcattcatttgctatcgtagaaacccattttggaacacagaaaaacaacgaagaaacagtgcaaaacattgccgaaaatgaggaaaacatcagtgaagaggttgctgagggaggagaacactctctgaaaaatgaggagaaagtaccgaacaaatcggggcaaaataaagagaaagcagcgaatacaacgcaacggacacctcccagtttaggagtgttgcaggtattgtaattgcccagtttcgttcgtttgaatgtcattatcagggctgccagctgatttggtaacagttttacataaaaatggctattttaaggattttccaaaaaatcagcatatcaaaaaaccagcattgatccactgaaagcagcaaaatgctgataaatcagcagagttggcagccctgtcactaattctatgaagagagattcgcatttaatcattggcaattggtttctctaatttcagctttttttaattgaacgcctcaaatgtttttgcctttcgttggaatcactgaacgaccaattggaacttggccttcgttccgtttcctcctgtttcacgcctttcaacttttttacctccgttcgtcttgaaaaggtttattttttattttttgctgtttcaattttattttaaattaaactttttattcagcttattccaaatgttttcacaataattttgactttacatcgtccattgaatgcttcccaacttaccgtaacggcactgctggacattgccgaacaattggttctcttttacccacaaccaaaatttctgctcgagttttttcgactttccatgtcggatgctctaatgacggtaaatgaattataa

SEQ ID NO: 78350 - DNA, 1286 bp, Heterodera glycines
atgagtgggcgaaatacttttaggactaaatgcattgcaaacaaggcaaactgcgcgttacagccggctctgtcatttgtgcagacattcggcgccgacattctcagctgtatggtcaacccgtggcatttgatccatttgcaactgcttggcccaagggattttgaaaaggtggcgattggactgtacgtgcgttgcaaggtaaattctttgttattttttttcctgaaaatggataggcggggtgggggaatctgtcggtgccgaaatgtgtcgccggattcaattgctttccccccccccgagaatttttttatatttgttaacttagaattttttaaagaaaaatcggggccgttcgcttctcccctctggacaaattttcctgaattttttagttttctaaatttggggcggggatgaggaggggggacgaaacaaaatatcgccgccgaaatttataaaaaaaatttcaaacaaatttttaaaggaaaaattcttagaaaatttttttataagaaaagttaaattaaaaatttttgaaaaacttcagcgattttttcgaaaaattttccaaaaaaaaaatatcaatgattttttcatcgaaattttcttataaaaaattttctacgatttttttcttgaaaatttctaactttgaaaaattttctttttaaatttctgcggcgatattttgggctggggaggaggaggagtgggcttagcgcacccggccaggatcgattgggggttctgtatgtacatgcaatagaagacttgtttctcttctccaactttctcttcaaatttcgcatgtcccagtgaatttggtaggaagtgggagaaaaggcactttttgcgtgaatttgtctagttaaccatttctgattttcctttttttttgcaggttaaggaactctgttctgtcgagcgcatcgaaagggtctcatgggatgcgagtccgccgtacgaaatctatggaaggcaaatgcaagtgctgctccatttctacgggcccagccaaacgccgccttcgcccatttcggccgttcagtttccaagcacagaaattgaccgtcaggtggtcgaacagcagcggaaggttggtcatcaattaaattatgaaaatctttcatttaaatggattttcaaaagcttaaactgaaaaattttaactaatatttttgttcccgtttcagtgccgcacttttgttcccccgtcgggcaatcacattaagcgcaagagtgaagagttgcaaaacgcgttgtacaaaatccattattaa

SEQ ID NO: 78351 - DNA, 1134 bp, Heterodera glycines
accgatttgaattgtataattaacattaaatatttttcatttttggcacatattttagccttttttgagttttagcacatattttggggatttttggcgcatatatatgtacagatttggcgttttttagcacatataaatccgttccctgctaattagataatttttatggcattttgtgcctttttcaagaaaataaccattttaaaaatttatttacatatttttgtacatatttttggcagccctactaatatgaatgatgctttttggcaaaagatcagtccgcggaagagtgtgtccaagtgtggcacccgtgaaacagaagaaatcactaaaatgattatacacaaattttttgatcggctgaattttgagtttaaaatgaattcgccagaagaaagtgccgaacaaatgagtgaatgaaagactttggttttcttatttctaagtaatatgaaaaaaattggacaaaatcttccttattttagctttaaatacaatgcctgccattcgctgttgttgattaattattaactaattaaaagcaataataaattaatgatgctgattggttgatgggattagcttattcgttttgcttaaatacgtttttagtcggaaaaatgccatccatagaatggcatatccgatgttggcatttgtagtcaaatattttggaaaaaattggttaagtctatgcatatattgcaaaattcaacagcttccagccttcaattatttaaaattcagaggaaatacaccagtgaaatatccaacaatttcctcttaaaaggaaaaaatgttgcgtttcggcaccgcgtaattaattgttttcatttacaccgtgccatgttcgtcattgccgcctccgcttcttcccatgccagcaacaacagcgaatggcaggcattgagtgcccagtttggtcagcaaatcagtgaaattgactcgaaatgtgccgagtttggcattggcattgccaaagtgccatatgacggccccaagggtaaaactaataagagacaataattcattaattatgcgatctcttaaggtgatcactcccaacgaaatgtgcctggcacggacagtgtgatttctatgcccggattgaccggctcacacaaacaa

SEQ ID NO: 78352 - DNA, 251 bp, Heterodera glycines
  unsure (1)..(251): unsure at all n locations
atggctaaatgggtaagaattgggaagaaaaaggcgaataattagtaataaactgcaaaatggcagcaattttcacagaatttaaggatgaacctttgtcgatgttcggtgaattcgaaaaacgcagagaaaaagtgtacgaagagcggagagagaaaatggaagtttggagtgaacaaaagcggaagcgaaaggctgatgaagaaaatgaagaggaggagtggnaaaataagngaaatggtgataattga

SEQ ID NO: 78353 - DNA, 645 bp, Heterodera glycines
atgaatggaggcattggaccgcaaggcaaatggtcgaatttgtccgtaatgctaatgtaattttatctttattttattttattttaaatttattttaattttattttttagattttgtcttcagtcaattgctccgccaattcttcgtctcgtcttcagcaaagttcttcggcatcagtttatggcacatttgaggctgaaatggccggcaaacaatggcactccgccgccggttggtgccggcatagcactgaagcaaccgaagcgaattggatgagaactgtgccaattacaccacaaaaatattaattttgattaatttgtttattgtattcattggcttcgaatggataaaatttgtgtattatattaaaaaaaaaataataattttcggtttataaaatcatctaatttcaaaatgccaaaataggcaaattaaataacaatctattaaaaatatgcatgccattataacatatgcccatgtattacagttataatttaatatatattaatttagggagaaataattttttaacatttgccaatatgtacgtcaaagttaacagctgcgataattggttttagtaatagaaaacggataaagtaattacaaatttggaatagttcaaaagagaaaataaa

SEQ ID NO: 78354 - DNA, 1073 bp, Heterodera glycines
atggaaatacagtatgcacatttggcgggatactgtgtggtttgctggttgttacatgaacctgttgatcgcgatcacacggtttgcctgtgtgggttcccgctccaatttcgcatgctccggcgccagttcacttgttggctaatcggaatggccgtatgggcggtagcattggctcaatctttggccacaaacagtgcttcatggtcagaattaaaacacacatacaagttttatagctgatcatctattagtgccattccaggaagggcacaatgagtggggaaacaacagaccccacctcaccctcataatgaaatcagaaaattaaaaacttttaaacaaaaaaatggaagataactcaaaaaattaaattaataggttccatttaacggactgatttaatctctaattttatatctacattcatatgtatttagtggataaaaattagttggtgactaagaagtgatgaatcattttatgccatggtagccttaggtgttctctaatagattgcaaaatgtaaaaaattgaataaaaaatttagaatttacaaatttaactgttttttacaaacaatctagcaccaaaaaagtaattttatcaaaacatattaggtttgttgccgtttggtatacggtcggaacatacggaatgagctgtgattggtcggcatatgccaaatcaggcacccgcacttattatgtgacgttgaatttgctgaccattgtggcatatttgctcatttacatctcgacagctgtgattattttcacgaaaaaggcggtaaattaccatgaaaatattattaaatttttaattaccatcaattaggtccgattgcgatttttcaaagcaattttgaagccaaaaagttcgtcaaatgatggccaaatggccaatggtcagcagcagaaaaataatggccaatttgtttcgaccgttggtaaaggagctaatgagccaaaaaggctttctgttgctgtcgacgttgttggacttcatccaaaaaatgctcgagtagcgctgcaacaacgaagcctgaggtgttaaatagaaaaagaaataaa

SEQ ID NO: 78355 - DNA, 1891 bp, Heterodera glycines
ggtgaagttgtccgccttgtgctcgaggacctgacgaggcgcggcctgttgttcagcggtgaccattcacaaattgcggagcccggctgcttcccgaccaaattggtgtccgacattgaggggtaattggatttttgtacgtattttttaaataaaattatttaaaaaataataataattaactaattgctgcaggcaaatgcaaaatgacgacgaggagaacccgttccacaaaattgaggagctgctgcaggacattggtgcacattttattgttttaatccattgaaattgataacattcaatggggccgtttaataattagtctataaaattgaaaaaaaaatatcccaaaaaagttgtgccgtaaaattttcggggaaaaaactcagttttttttggtaaattttttgaaattacgggaattttttgcagactaatagaaaatgggagcaggttgtttccccccgcatcgtttccccccccccccccgagaaattaaaaaaaaattactaacttcgaaattttttaaggaaaaaatcaaagtttttttataagaaaatcataaaaaaaatttcgaaactttctttggtgaattattaagatttttcaaaaattttccaaaaaatctgaaaatttcatgaaaaaaaatttttcttagaattttcttataaaaaaactttctggtttttttctttaaaaatttagtaaatttgcccccccccctcccccgaattttttaaattttcaaacagtgtaatttcaagaagaaaaagttttggaaaatttattcccaaaaattgctggaaattttacaaaacgatttgttttaatttttcgtataagttttttaaaaaaaaatttctgatcatctaccaatgtttaccatggtttattttttgaccccactcccattcgggtaacttgacaaaaaaaaatttaaaaaaaaattttttttgaaaatcttgaatttcttaaattaaattttttaaatttttcaggcatttggaactcgacgcccgccgactgtgccaacgtggcctacgtgtgttcgctggtcagcgcgcgtgccgcccacttctgcgcctgtggcattgcggcgctgctgaagcgcatgggacggcccaccgtaacggtgggcgtcgacgggtccgtctaccgtttccatcccaccttcaaattcctgttggaccacaaaattgacgagctggtggagggcaagtatgaagtgagcgtgtgaggggatacggtagattactgtatttttgagagacggtagcataccgtatttggtggccggcgtttggcgaattaaatttttcgactattaaatgccaataaaccacatttgtcctaaaatttaaaatatttaagagcccctcccttttttgttgatttaagtaggagaatacttttgaagcaaaatttaagcatttttggtaaaaattcgactgttttgaacgggtgctctacttttgccccctccccagatttttttttaaatttactaactgaaattttaaaaagaaatttagtaagttttttaataagaaattttaagaaaaaaaaaaattttcgaaattttttttcttagaattaaaacacaaagattaaaaaaaaatttcttgggcgcaaaggtgggcgctgccgacaatgtttgaattattcaatttttttttaccaaatcctggaggattcaaagcaccgaaaaattggaccagcggagttcaacctccgctgcttgcagcaattgccgtaatatttcccctaatttcccccaccaattccccctcagttcgtcctggtgctcagcgaggacggcagtggccgtggcgcggcagttgcagcggcggtcgcctcacggatgaaccgcattatgtgcgagcatcat

SEQ ID NO: 78356 - DNA, 450 bp, Heterodera glycines
atgtggtggtttcacgaaattccaacaccaccgcccccgcaatttcttccaacccaacaaggccgactgaaaatgcgctaccaagggcacgattactacaaaaaatttgaaggagccaatgggcaggtgtactggaactgcgtccgttttccgcagaggttgggcgcgtgcaaaggcaaggcacaggtggtgaacggaattgtacggcaacgaatccgcacaaccatccgcctaacaatcatccgcctgccgaggaatgtaagtcggaagaatgagtaatagtaaactttggatataatttggccaatttttaggacccaaaatgtgacaacacacaagaaacggtggaccgtacgcaaccaaagaactgagcacggaatttccctaaaaatggcattgatcagtcatccccccaattgttatttgtgatcggataattgaaagcgcaaa

SEQ ID NO: 78357 - DNA, 1186 bp, Heterodera glycines
gaacgagaggaggcgtggaaggagtacgagagcgaaagactgccccgtcaacttttgccgctgccaatgccatcccctttgaccatggatggcactgccgcagttcctggcacgtctcagcagccgcctttcggcacggccactgacatggcgcacttctccaacgcattgcaactgcgacaactgcaactgttgcagcttcagaaacaacagcaggcggcacaggtcgcaaaaaatttgtcatttttggtgcaacaacagcagacggttcggtcgggagagatcggctacttcacgcaaggttgggctttttgttgctattgggagttaggggacactttcagacgtcatttgccccgacaaacaattaaaaataatttatatggagattgaattttttgaaaattttaagccccaaaatattttttcagtgatgggccaattgactgttgcgtacaacaacgaccccatctacaaactctgcttccaagtgccgggaatgcaggccaagaccgcctacagaatcttccagatcaagcagttcctcagctatttcatcaatctgatccctgccgaggaccttggcgagatgaacagcgcaaatgcatttgccaattatttcaacggaattttgcaggtgaaaaaggcgggaatataagattttttcttgaaaaaacagtgaaaaatgtactccagtggggaggttttgcggtaccgataggcaccgacagggaaatttttgaatttgagtgcggtttttagcagattttgtccaaaaagaccaatttttgcgatttttagcaaaatttttcactttgtgcccactctcaccttgagatgggaacgtagtgccattcgataccaaatttatttattgctcatttttccttttgcagaatgccatcaaaggaaaacagtctcaagaatctgtagaggagaaggccatggcaagttgttttttagttattattttgtttaaattgctacatttgtgactgtccggcccggtttatgtatatttttttccggaaagataatttattttaccatcaaaaatattataaatcagattactctggccactaccatcgaaattgcaaagccccatcagcggtgtcaagcgggaattttgttcatccaacagacgttccccgaagttatgcaacatttgaatcattcccagtga

SEQ ID NO: 78358 - DNA, 584 bp, Heterodera glycines
caaactgattttgttgatggaaattatcaaaaaatgcgaggccatcggagacaaactgtgagcacaaaaacccatataaaattaaacttttaaaatgtaaaataagcttctttttttattctaggctcgtgttctcccaatttctcaactcaattgcactcattcgccgaatgctcgccttttacgctgacaatggcaaatggtttgtggacggacacgacgcactgatgcgacagggcgaacggtggtcgtggaaaatgagtcagtcacttcttttcacaaagacaccaagcccaaagacgacaatatctcaaattgcataaaaatgacatttcaccattttaggacatgactatgacgtcatcgaagggtctgtttcatccaaagacagagataggtaaaacgacagaattcgttcgacccactctccgtttaattattttctgttgttttagaattcaacgggaatttaacgaccctttgaatttgcggtgagttcatttaaattttcaatttatttaagtgaatactttttcagaaaacgtctgctgctgatctcaactcgtgctggatctcttggcatt

SEQ ID NO: 78359 - DNA, 1061 bp, Heterodera glycines
atgagtcgtcgtgaacagcttgaaaggaacatgaatttgaagaaaccacgcatggcattaaccgacgatagcattgtagctgatgagatagcggacgcgcgggaggcagaaatgcgagccgctgccacagccgattcagatgcgagcgcattcagcgacgaagagaacactgagccagtgaaatttgaacgagggacaacgcaaaaaggggcactgtatctttggcagagaggtcagtcagtaatttagagcattcgcttatttactcccaattttagggtacaaatttgtcaaaagaagtgcatttggttcagctgttgtcagaagacatgtcaagctaccgtccgccttgatgatgagcaacatttgactggtcgtttgggctcaaaggaacacaatcattgcgttgtatttacccaacaatcagcagacgcgggaagggcacagatcaagcaagccatcgaggtgaatccgcaattgaggccatctcaaatgcgagcacaagtcagagcaggaacggcagatgagacgtttgaccagttgggcacaaatgatgcgttagacaggatggttcaaagttcggtcattgatacaaccaatggaaaatttcaataatttgtaactttagagtcaaaaacaagctagtctgaaatgtaaaccgagcaaatccgctcgaaattcgattcgcgccagagttattgaataaggacggtgaatcaatactgatatacgacagtcggacggcgcgagtaaacgaggaggatgttgttatggtgttcagccattcaaaagttttttgtttaaaattttctttatttatttttgtttgtttgtagcttctcgacgtattgagacgtaatcgccgttggagtttggacgggacttttcgttcagctcccacacaatggacgcaagtcttcatcgttggagcgtacgttgacaaacggatggtggtctgtgcacaagcgctactcccagggaaaaacagtcgattctatcgagaagcgctcagtgccatcaggaacgccgtcgcatctgctcccgcaaaaatttacgcttaa

SEQ ID NO: 78360 - DNA, 2644 bp, Heterodera glycines
atgaaacgctctgcttctgcttcttcgaaaaaacaactgattgataaaaaatatttaattaatgttattgacgacattttttgcttcttttatgccttggaattgatgcgctactactcattacacaaacgtggaataattaccgaaaagcgatggcgatggattaacaacaaccaaacaacggttttacgacaaaaggtgctgcaactactccgcgatgccgggattccgacaactgaaccgaattacgaccctaaaatatatatacatcaagtgcaaggcctttggagcgtcaaatatccaggcgaatacaaaatattcattttcaacgactaccagacacggcctattattaaatcagatgtagtagactaccaattcccaattctactctaccacaaaaacaaccacttcgacgggattaaaaccatctccaaatttttcaacaaacattactattgtctctcttgtgaagctccgtatgactctaaatcaacacatacaatgaaatgcacttctttatgtctcggctgccgggaggtgggggtcgactatccttgtgaaactcaacagggatactacaaaaaatgtgaatactgcgtcaatatattctacaactacaattgttatgagcgccatcttcaaaaagacttgtgcaccaaattccaacgctgtgaagattgtggggtcatttacaacattaacgttcatggtagagaaggaagaaatgcgcaccaatgcggagagaaattttgtaaactttgcaagcaatttcacgtaaaggacgacgacgagatgaacccctgcagtagctgcttcatacaaccgctgaaacaacataaaatcaaaccgtaccgaatcatagcatacgactttgaggccacgcaggacaagaaggtggagaacaaattcgaacacgaggtcaacttcgcagcggctaccatcatctgcaccgattgtatcaacaatagcagttggaactactctctgaaagggaaaaactgtgcgatttgtggcccccaccgcacaataacattttcgccttttgactacactaaaacaacaatcgacaaaaaaatcgtcacacaaaaaccactgcgcgaattcgttcactggttattcgttgaacacaacaaaaagtttccaacagtcgcctttgcacactttggtggccgttatgatataacattgtacatcaaggaaattattaaacaaggtaataaatttttaataaataattatttagtttattcatataggaatgcgtaatcctcaaatcatcaaacaaggcaaccgaatttatgaacttaaattaaaagaaaatgattgcggacctctcacgattctgcgcgacagctacaatcatatgcccatcaaattatctggcttaatcaaatcgttcggacttaaaattcaggtgattaatagtacattttttaaactataattatcaacactttaaaacaaaaaaaatttgcaaaagtttaggtaatcattttctttgtacaaaaaaatttctttgacaataatttattactagggttggagaaagtatggatttctatatttttctgggtgtttattttaggctaataaacatataatagtatttgtagtttagtttgaaggttctaggacatattttttatttccatattccatatttttgtcaatatttcacagttttgtccatattttatccatatttcaacattttttttcggaaagtatctaaaaaaattcccaacttaatcaattttttcaattttcaaaatgcataatttcttaataatgccaaaaaaaacgtcaaaatagcactaaaacctcgagatgtatttgatctgtcaacaagagaaggaaaattattgattttatgattaaaaataaatgtttttatgtaattttacccatgaattttacataaatattttggcaatttcgtccatatttttagagttcttcgtccatataatccatatttttaatcgtttttgtaatccaggaaaagcttgagatgttttgatctgtctataagagaagaaaaaaagttaattattttattgaaataaatatttaaaatgagtctacttgtccatatttcttagaactctatttattacttatattaatgcataaaaaattttttgatctaaatataattttaggataaacagtacttcccacatatgttcaacaaatcggctaactacttcaacgtcctaccacacctccctccacgtgaagactactgtcctgatcaaatgaaaaaagccgatttacagaaatttgataattggtataactacaatcgcagtcaaccattcgaccttaaagagaaactacctgaatactgctgcaatgacgtccaaatccttacccacgccctcgtcgaactacgccgggaattcaaacaacttacacaaagggacggaaaacacggtggaatcgacattttgtggcaagccatgaccatcgccagtgcctgcgtcaaaatttttgccctcaatcatctaaagcccaactcacttgccatcgtcccggagaaaggctacacccctcaacaaaatcaaagcgcactcgccgtcaaatacctcgactggtactcccacatcaacaatgtcaatatccagacggcacactctcg

SEQ ID NO: 78361 - DNA, 967 bp, Heterodera glycines
atggatgaagaaaacgaggtgtatctgataagctacaaagagaaggaagaatttgtcgaggaaaataaatattctaatgttgtcatctccctctttacaacatctgcagcacgactacatctctatggaattttaaagaaagtggcagacacaccgaaatgtgaagttctatattttgatacggtaatttgacaatttaaaaaatatttaaattttatgaatttttattttaggacagtatcatctacgtccatcctgaggacaacgaccctctgccaaccggaaagggccacctcggtgagctgaccgacgagaaaccggaccacgacattttggaattcatcagcgcagggtgtaagaactacgggatgaaggtgagacgaaaggaaaccggtgaaattgaatatgacttaaaaataagagggttcaccctcgatgaaaaaacaacacaacgtattcattatgatagtgttaaaaaccaaataatcaaatatgtatctggctcacccgcatcaccaatttctgtcaattacccccattccattcgccctaatttgattcaaggcaaagtgtttacccaatccctcactaaactttatcaaccctctttcactaaaggaattgtaaataattcttatcatgttcatgattatggctatcgcaaataattgtctattttttcattttatttgtaagagaattaatttcaaaatattaaaaaattaattctcatttgttttgattctcgtttggtttgtgtatctaatttttattgtttgccttctatgtacaaaaatataaatatgtttgctcagagatacgaaacttagacttgggtgtagtaaagtatttaaagaaattgaaaaggaaaaaaacaatatgtttgctcagagatacgaaacttagacttgggtgtagtaaagtatttaaagaaattgaaaaggaaaaaaacttaggaagatatata

SEQ ID NO: 78362 - DNA, 425 bp, Heterodera glycines
ctttattctcttgcattttccgtggaccttcaacacttaacccacaaaaacaaatgaaccgaattcgaaaagcattcgacagtactcagcggcaatgaatcaaacattccggagaagatcgcaaaggccgaggtttggtgaaagaatttgaaaaattagttttggagattaaataaaaaaacaaccaattagcacgtgtcatttcccagtcttttagcctcaacaccatgacattgagaaaccggtgtcctccttgaaattcggtggtggcgcaacattgttccccgctgaatacgccgacgacgttgacctctacttgcgacaactcgaaagacgcaccccgctggacttcgactttctgtccgtgcacaaaaccattgacggacgaatgcggcaaattctcgtcgactggcttgtccatgtcc

SEQ ID NO: 78363 - DNA, 301 bp, Heterodera glycines
atgcatttgtggatttatatttatgggtttcgacattgggctagatatggtaacgctatatttgtgacacttgtgtacactaaatttgggggaccagacacttgggggtggggccgtgactcgacacttggggaccatacagttggggaccctacactttgggatcgtacagttggggaccctacgttaagggacccgacaattggggacctatacatttgggggaccgtacatttgagggtttatcatttgatgacttgactcttggtgacccgacatttggagatttcaaacagaaaaa

SEQ ID NO: 78364 - DNA, 1544 bp, Heterodera glycines
atggaaattaattttgtaattattttcatcttatttctaatcgtactaattgacggaattgatgaagatttgtttaatgatttgtggaaaaatcttaagccatcgacctcaaaaaacatcaaaaaaccgatatttggagaaattaatgcgataaaggaagaaatagttgttaaaaatgaaaatgatgaacaaggaaatgccaatcaaattgaaacggaagacataaagccaaaattattacaaaagattaaaaaggaaaaaacattggaagaacaaactaataatttaaaaataaaaataaaaatgccaaaaattgaattggacaaattgagcgaagaatcatttggaaatgagtttaatgaggaagctgatcagaatgtttcgtctgctgatcacaacgattctgttgatgaagcgtattataatattatggtaattcaacaatcctgtaaaaaattatttaaaaattcattggttctaagttttgcatttctaaaaattttaatgatttaattaggagtctgaaacaagaaatgaaatggaaattttgaataaatttaatttaatcaaaacggaattgcgaaaagaaagtgtttataaaaatttgacaaatgttcaatttgagtgcgaaattgcgaaaaaattgggcacaaatcgaaacaaaatttctaaattgaagaaaaaattaggacaaaaaagagagaagagaacggaggaaagtgaagaaacaaaaatggaactgattagaaaatttgatcaaatgagaaaagaaaaaatttgtgggcttaaatatgacgagaagaaaagatcagtaattgaacgtgaaattgctaaagaattgggaacaaatcggaataaaatttataaattgaagaaaaaattaggacaaaaaagagagaagagaacggaggaaagtgaagaaacaaaaatggaactgattagaaaatttgatcaaatgagaaaagaaaaaatttgtgggcttaaatatgacgagaagaaaagatcagtaattgaacgtgaaattgctaatgaattgggaattaatcgtcataaaatttaccaatggaagaggaaatttggtaaaaaaaaacaataacaaattcactttatacttactgtctcattaaggtataataaagaaatttttatttacaaacgaagaaaaaatggaaaaacttgagcaatttgaaagaataaaagaagaatttaaaaaaaaattcaatttcgaacccaatagaaaaattgaatcaaaaatagcggaaaaaattggggttgtgtttgtaacaatttttaaatggaagaaaaaattcggtttaaccactcgtaatattttaattatttatatttaaaaaaaataaattaaattgcttttattttaaggaaagtccaaaatttattcggatgctgaaaaattggaatatgtgaaaagaagtgaggaaatgacagaaagaaaaccaatgatatgtgagaaaaaaattgccgaaactttgggcattccatataccaacttaaaacgatggatgaagaaattttgcagcaaatag

SEQ ID NO: 78365 - DNA, 254 bp, Heterodera glycines
  unsure (1)..(254): unsure at all n locations
ttttgggttgctatttatagaaggggtatataaagggagtgaaaggaccatttgattgatacattgtatcaaaaatgcaaaaaccgataatcgtaaatataattgctctcgctaatctcggtaccggaattaaactaaactctctgacgatcaccgaatgcgaatttaagtataaccctagaaaattcaatgccgcggttatcaaatgtacaactcctatcaaagccacggcattattatgggaatccgngaaa

SEQ ID NO: 78366 - DNA, 219 bp, Heterodera glycines
atgcatttgccggatttatggacaatctttatcgagaatacaagaagaatggaaaaattggtgagtttattgcaaattcaaaaattattattatgtttaatatttattcttttaaaatatatcctaataaattgaaaacttaattttttaaattattttaattgtcagcatatagcaattaaatcttttataatcaaggcctggatttatatttattaa

SEQ ID NO: 78367 - DNA, 366 bp, Heterodera glycines
  unsure (1)..(366): unsure at all n locations
atggganaatataggatagtattgaaaaatctgtgagtcgaaaccttaatatatntaaaagcttttctaagctattgcttcgcgattagacaatttccaaaaaagttatacatgaaaattgcgaaaaagttttttcttaataaaatgttttccaggcttgaaaatcttttcgctttttgtaaggctaatagagcatgtgaagagctttcgaatgataccaacaatgttggatttggattacaaagaaaaaagctatagtggaaaaggaaaagcattgctgcgacccaaccgtgccggcccaactgagcgagtccgatatttacccatatttagcattttttaacaaatataaatccaggcaataaa

SEQ ID NO: 78368 - DNA, 91 bp, Heterodera glycines
aactagcggggtcagcgccttcggcgcatcccccgctaggtaatacgattgtattgtaagattatgtttgataaaatcgactggctcggcc

SEQ ID NO: 78369 - DNA, 925 bp, Heterodera glycines
atgtccgccgacagcacaacgagccgtggaacatctgtcgtccccggtggtggccatcgctgcgttcattgcactacttggacagctggcgcgtgtacgcactgcgacgtgaagcgctgctgcaaaagcgacgccgccaaaacaatcgacaaccgacgacaacgacgcgtaggtgagagagagagagtgatgaagccaaatgaatttgcaatttttactacataataatggctaattttattggcaaacagatggacttttattaatatttttctatatttggcaccagaaatttgcaaaattgggttatggttattttggattaacaataaaataaataatctattaaaaaaattcatttttgttttttcagtttcaatgattcgtgttttgcctatgaactcttccctgatgaacgggccagtacgaagccaatctacagtgtgctcattattgagtaggggaacattttaaatttataattgaaacaataagcaaacaaaaacaattagccaaatgtttttaggcctttctccattgccggtgcttctgcgcagccaaactttgcccttctgcacaagttggccaccgattgcagaagccgtggcacacagctgctgctggccactgggacgccgagttgtgtgaggatcaatcaggcgagaaagaagagaaaattctaattttgttttttttatttcatttctccccaattcttttcagttcgttgccgaatctgatgaaagtttgcgcgttccgcaagatgtgccatgatgttttcttatttatttacggacaactcattttgttgattgtttgccttttcacccaaagtttgtccccatcttgtttattatcacacgcatttttgtttattgtgtttctattttcaccactttcacttatgaatttttattttaataaa

SEQ ID NO: 78370 - DNA, 1766 bp, Heterodera glycines
atggccgatgtgctcgcgaaacaaatattcatacaaaacatccaaacatttatggaaatcgcgacgctcatttgcattttgaactttgtcattggcattggcactttgccattgcttcctcatgcggtgcaaaaggccaaggtgtgtgccataaatttgtgccaacatttccttgctttgtgcattagtgatttctttgtccgcacaaaatttttcaaatgcggcaggccctttcacaaaggcaaggaatgcattctcatcaacctggtaatagaggttaattagttttgttggtgtggataattagcttttaattattgccgtctctgcccgatcattaagttagaacaaatttgacacaacttttgcaaagaatttaaatataattaaacaaaaaaatttaaaaaaaaaatatcaattttccttgtcctaactaatttgaaaattgggcgatttttaaatttttggactaattctgaactcgaatgagaaaatctttttagtttaattatgttaattctaaagaaagtttcgactaattatttttctttttacaattttttcactttataaaattcgagtcactaaaaatttgccttctataaatacaatatgcttcttttaattatttattaatttaaatatataattaccgctgatgcaaaagcaaatgaactgggcaaaattgacgaacaaataaaaattagagcaaaaatattggaaataaaaacatttctttccatttctaggggaataaataataaatgaatatatattttttctatatcttacccatttaatagaactatttcttatgtaataaagcataaaaatattttatgtaatgatttgctaaaatcaataaaagaaattaaaaggaattttcttttttcattttacatcgcttcttctttataattgacgtgtattttataattattccaataaatcaattcatacataaatcataatttaaatgaaaaaataatttctttttttttgtcttttttcaatcaattaattttcgtaattctaacagataattattactttttaaaaatttgcaaaaaaaagcacatgggttttttttttgctataattaggaattttttaaaattttgcattcagccaaaaaatgaaccgagaatgtcaatgaccataacatcaatcgcccaagacaactttatatgaatagtatatttaaatctttgcaaattcccaagtcgcaacggtgtatgacgtcactcaaaaactaatgaataattttctgtcaaaaatttttattttgatgattctttgagcaacgatccggcacatcatttaaaaaaggaaaaaaaataattaaaaaaaaataattaaattttaaaaaactcaactgcgcaagttttccttgcttctgcctaggctctccttttcgttttgctttgtggtgtaaataatttagatggtagaatatgaaggtctgagtggagacaaaaagaatttatttttaattaatttttgtgggaaataattcaattgaaattttcggttttttttttcttgggaaaatactcggttggtcccatttgaaaacccagcagctctctgtactggatgtcttagtcccggttttgcccaaaattatcggtcccgttctatactaaattaaccaaaaagctttattatttttcgcttgccaaattttatacaattttatttatttacaaaaaaattaatttattcttcatttatgaattttcttttctctcgttattggaaagtca

SEQ ID NO: 78371 - DNA, 630 bp, Heterodera glycines
atgaaatcaatgtcagcatactgtatcatattgttcagtgctcttgtgttggcggtatatatttaatttaacacacaaaataactaattgttattttcctccagaaacgacgaaagccgaagagccgaagatgggtttgtgggatttgttgtacataaacacaatttaaattcaagttaggcacaaaatcctgtgtttcctggacaaaattttagaattaattatttcaagtaacaaatattccatttaaaattatcaaaaaatgatttaatagatttaaaaaatatatattttgctaattaatttagattttcctaagcaattaattgattttttcaaagatttatttgttttttaaaacaaaattcaaaaaatccatgtccaggcctgtatccaaggttatttataagtagggatacgatttttaggcaaaagcctattttttcctgagatccccgtggcctgaaacgcacgaaaaacatgattttttgggctgttgttaagctacttttcgacttattaatgcctattttctaggcttttatttttaaagcctaaaaagcaaaaaaaattttgaaagttttttctgactattttggcgtttttccaaaatttgttaaccaaaatgca

SEQ ID NO: 78372 - DNA, 345 bp, Heterodera glycines
taatcgccaattcattaaatgtttttttgtcggagattttatcaacttaaaagggaaagaaggaaaagtgagagactaacgaccaaacgaaaaccatcgattcgatcgtaagaaagaaggaacgcatttctctctgttcttttgccgtcccttctccgatttttccctcctccccatttattcatttctcctcccaatttcttcctcaaaatgccctcctccgttggcccctcttcctcttccgatttgctcatccgtcttttcctcctcctcgactcggccgttcactttgccctcggcgctttcctcttcttctgtccgtccacctgtgcccatttccttttg

SEQ ID NO: 78373 - DNA, 982 bp, Heterodera glycines
atgggcgtcgggattggaccagccgaaatcggagaaagatgtcagctgtgccaacgacggaagtgggacgaaggcgaatgggacatatcagcagaagaaaatggcctagagaacggtttttgctgattgagacgagcttttgtttccaaatgatcataattttgaatttatctgtcaattggcgtaacgacagtctgcccgcgtcccactcaaatttcggaccaatgatattcgatccgcaaataaattgatcacacaaactcgcttgatccttccgttccttcccttcaaccgctctcgaccgctttttttgttttcctgaatcgattggttacgctttcccatggcatattgatcagcaaaagcatgggtctgaccagcggattcgccactttctctttcccttcgtcttttcttgcttctttttagctttcatctgacaaatgttttggcccaaatccattcactaagccgccagcattttatgatttcatctcggcatatttgataaatcattcgttttaatttttgataaattcctaaaatgtctgaagagcaatggagcggcgagtcgagcaacagcaacgaatcggagggagtgcaccacagagaggacccccattttgaacaggtcgaggaccaaatccgcgacattcaggcgagccgaccttcccctgtcccaatctctgctcgctcttaagacccaagctgaccgtttgctcttcggttcagtatttttgcggcggcccaaaggattggctgaaaatgccgtcggtaaaactttgagagtaatgagttaaaaaatgccgaattctttggacatttgttttacagtccccgaaacgccatcggaagtggcggatttggaggggacaacgcgccaaatcgcagagacaatcgaacgcatcgacgatttggaggagaagctgaaggaattgttggagcacaaagacaacgtgatgggagatgaagtggacagaaa

SEQ ID NO: 78374 - DNA, 106 bp, Heterodera glycines
atgggtgtaggagagggaacggacggcggagaaagttgcggcgatgccaccgaagcatccgaaagaagaaaaatattgcattggaaaatgaaacaggcggacgatg

SEQ ID NO: 78375 - DNA, 2617 bp, Heterodera glycines
actgcattcttccaaatcagcccaattttaaaggagaaggacgcgtttcaattaatgacattgatgctaattatttgcgaagacaaacggtaaaaacaatgagcaaactttcataggtacctaatctaaacatttttcattttaggcattgaaagaaaccacggcacaaactattcctgctttgatggatgcgtggaatgatttgcttcgggctcgtcagggctgtttgattgtttatgtgccaaaagaatgtctttcccaaatccgtgaccaaattgtggtatcgctgcacattgatattattgtttgttcccccaaacaagtgagcttcgtattttatcgttttttaaagataatttagggaatcaaatttgtgtttacaagaaatcaagaaaatgacgatggacttccttccggcgctcatctgttcacttatcgctcaaacccacaaagttcgacgaaggaatggttgccatgttctgaagaacccctccaattgtgtgtttggcgttttgagataactgtgccaaagcaattgacggccgtgtgttgtggcgatttaattgttagaattttgctatagaattttgggtacttatgcagtttattacagattaccaaagattgttaataaacaaaatatttctgacaacttaaactgcataagtgcaccgcatcttgagctaattcagttcctttcttcacttaaacttatattttatgatacaattccaaactccgacgatgattcattgaagacgctttgttatcagctgctcgtgccaacttctgctgctaatatcggtttcgcaatcggtgattttcaaattcacgtgcagccagaaatgcccgaggcatttatttgtttccgtaacatttaaattcctaagcatttttcagattattaactttgtcgttccggagctcattccgctcttaaaacacacaatgaaatcgctgaatagaatttttgtctttttcgaagaacttttgtcatgccgatttccgtatagtacctattggcaaatttttgtggatcaggtccttgatggagtgtccactaaaataataataattttaattcaagactcccgatgaggtcacctctttcgccggacttacaattttttccattcgtctcctttatcataagaaaattttggacatggttcaaggcactcgaaaattgctcgccactgcaattgctcagcagttttttggctgttttatcgcccaaagaagcttcaacgaactttggctcctcagaggactctctgggtttttttctattcaataatttcgtgttttttttttttttgcagttttttgacaggtgtttttgttgaacgattttttggtgccactgaaagcaattaccaactgaacaaattgctgaaggattcgtgtgattacgaagctcgttttggtgctattgctcttcgtcccaatgccaatcacagccaatttttcttcgaccccaattgtcccgaaacgtgttctccattttatttggatgcgctcttccgcaaaggccatttggtcattcgaatgttggagaaaaggttacccaaggagcagttcgttaaggtcatttgtgtttctttccggttaaaaattcatttgaaggttttgcaacgaattctttccctgggggtacagtacagtcagaatttgtatcggcctgtcgaatggacgcacatgctaattaacacggcgatgtttttgcgggttatgactgatgttactgggaaggaattgccttcctttgtcgaacaatggatcgattttggtggatttgttaattttcaggtctgggatttaattgttgcttatgtaattgacataatgctttaaggtttcccacattttcaaccgcaaaagaaatatcattgaattggagttgcgtcagacagttccgcttcaaaaaggatgtcagaagtatgttttatttatttatttttgcacttttccatttattgctcttttaattttttcagttacaccggccctctcacaatcgttgttcaagagcttgaagtatcatacgttaattcttttctttcaaatagttcattttcagggtcattttgctcacactatccaaatagacgccgccgtttctcgccacgacatccaatgccattcaaaggggcgtaaactaaagaagaaacggataatgctcgggaccggagaagaggtcgacgtcgacctaaactcgatggacttcgattcgccagtgctttggattaggtttaatttaaaaaattcgatttaaatgctttcttacaattagagtcgatcccaatttattactttatcgtcaaatgtcaatcaaccaaccgttttatcaatgggaacttatgcttctccatgaaagggatgttctagctcaacaacaagccattgaaacactttgccgtttttccgaacacaaaacaaagatacttttggaagagacagtccgaaacgacaaattcttctaccggttggtggactttcatggcgggtgcaccccaaaatttcgccgccgaaatttcgccgggaaaaattacgccgccgaaatttcgccggacggaatttcgccaaaaatttttttgaaaaaatttggaaattttca

SEQ ID NO: 78376 - DNA, 315 bp, Heterodera glycines
tacggaaatcggcatgacaaaagttcttcgaaaaagacaaaaattctattcagcgatttcattgtgtgttttaagagcggaatgagctccggaacgacaaagttaataatctgaaaaatgcttaggaatttaaatgttacggaaacaaataaatgcctcgggcatttctggctgcacgtgaatttgaaaatcaccgattgcgaaaccgatattagcagcagaagttggcacgagcagctgataacaaagcgtcttcaatgaatcatcgtcggagtttggaattgtatcataaaatataagtttaagtgaagaaag

SEQ ID NO: 78377 - DNA, 632 bp, Heterodera glycines
atgccttcttttctgccaatgcttttcctcctcctctccgtccaattgctctcctttttgccctgctccttctccgcttcgctttctgttgctcccgcttacaccaccaaagacacgtgcctttccgagtcgagtgccagcgattcgatcagtgcgcagctgaacaaaccgatcaccgggggccaattcactttttacggaatcggcggacaaggcgcgtgcgggttggacattgccacggtatggacgatgatcggacaaaattgtgaattgactgatcaaaaatagacaccgaaaagtgatcagagacaggcatttggggcaacaaatttgacaattattaccgtaattagcaaactttcgtgccttttagcttaattaatgcaattacatagaaacaattggtgcttataatttatttcttcaaaagtacatcaattttaacattgaaaggtcacaaatttgaattttccgcccaattttagcccacaaaatctgccgctggctccggcacacttttcaactccgacgccgcgtgggttgagtcgtgtttgccggacgcgcgttacttgctcaacgatttggtgtgcattaaccgatgcgtcaaaatcgaatacaaagggaacacgtaa

SEQ ID NO: 78378 - DNA, 1659 bp, Heterodera glycines
atggccgccttgaacgcagctgttggtggtaaggaagtggcgtcagccacaccgattattgagtttttggaagtggcgtcagccacagagcaaattgaattgattgagacggagactattccgcaaaatttggagtcatttgaagtagcgtcagctatacagaaaggagtgataatggaaacggcgttagccgtcgagaaagtaattgaaaccgataagactcgtggtatttccgcaggtcttgaagaagaatttgaacgaggcatggaattgggagaaggtcagctgtggaaagaaacacagaaaatattgaaatcgaaactattcaagacttcactgcgactcaattctccaatgtctcgtggtcagagccacgtgccatcgcttcgcctgtgccaatgtcttcaaatgaagaacattgcgcggaaggcggtgttttgaagtatttggtgtgtcaaaccgacgtgaaaagtgtcgtgggtaggaaaaagagtggacaaggtccattttttatgggaattcctgatattttggtaagtgccgagagacgccttcaaatgggagacacagttgtggtcagtaagtttgagtggaagtagggatttgaaagattgtcctatgacttaaacccggttgattcgttgcgctcgtggttcgtacaaggcaggatcaacgttcaagcggttgccataaaggtggaggtgataaaataggtcattggttcatttcaacctggttttgtaaccgacttaaaacgatacagaggtggggatttcagatcagccaccgtcatatctgcgcaaatgcttcgcccccaaaccatctatgcccggcaattaaccgaaatcagtccaggttgaattatgcttaaccaactcctttaccttaatttggccaaaatcacaagtccacaagcattggttccacttaattcttcgtgccattaatcttaattttaataatttttatttaatttaaaaaatatatttaccaaaatgcgttcacttcgcgcatttttataatttgttattatgaaattttttcatttcttattgcaatgcatatggaaattaagttaaaattaatgcgcttcataattcttcaagaaaagtaaatgtgtttaattttacaataatttatatttaaaaaaatattatattaaatttgtgaaagtattttttaggttttaaaatatttgcttgagttgaattggtttgaaaccctctacaatttattttattcaatttgaatttgtttgccattttgtttaaaattcataacacttatatttttggttttctatcgcattttatttcatttttcaatgatttgtttttgatatcaattttatttttaactagtttaatgtcagattttcagaaaatatcaatcatttaaatttggtagtttaattattttaagagatttttatgttaactaactcacttctttttttatttagataaaatttccattaaaattaatagagccaggaattttgaaaatgccgggcccgggctcgggcttcggcaattggccgggcccgggccgcccggtcaaaaaaagcccgttttaccgggcgttccgggcccggtccaaaattttggccgggcgcccgccgggcccgggcttttttcaaaatttttggaattttgatta

SEQ ID NO: 78379 - DNA, 411 bp, Heterodera glycines
ccaatgcttgtggacttgtgattttggccaaattaaggtaaaggagttggttaagcataattcaacctggactgatttcggttaattgccgggcatagatggtttgggggcgaagcatttgcgcagatatgacggtggctgatctgaaatccccacctctgtatcgttttaagtcggttacaaaaccaggttgaaatgaaccaatgacctattttatcacctccacctttatggcaaccgcttgaacgttgatcctgccttgtacgaaccacgagcgcaacgaatcaaccgggtttaagtcataggacaatctttcaaatccctacttccactcaaacttactgaccacaactgtgtctcccatttgaaggcgtctctcggcacttaccaaaatatcaggaattcccataa

SEQ ID NO: 78380 - DNA, 1336 bp, Heterodera glycines
atgttaaacaaaattaaaatagctccctataaaaatatttgttccgaacaaattcgcaatggagagaacgaagaagtcgaaaattttatgaacacaatttcggaccttgttgttggtgagaacatcacaattgattcggtaagaagcaggtcaactgcctgtttttatgaagggtcaattcgatttttttggcaaatttaaaaaaaagacgaattcttcaattttgaaaattttatagaaaataaagattttgggatggaaaaaatacaatttgttaatagatttttactaaaaataatttttttgtgatttttaattcaagcggtgattttaattacacggagaatgagccgatatttaatgaacaaatagggccacaagatgacaacttgtctgaattatccgtatgtgcggcggacaaaagaagccacgggagggcttctcggttagaactgctcggttctgacgtttaaatttattcttgagttaaagggcacgctcaaacagtagtgtcagtgtggcgtcaagcaaaagtcagcgaaaaagtgccaaccgagctgatcggaagaaatccggagggcgggtgaattaaatttaaaaaagcataattaaatgaaaatgttaaaggttttcgcaaatcggaaggccctaccgaacgaattggcacaaataattgaagcagaaagggacgcatttgaaatttcaaacgtttttgcggtttatacccatcagaacggggaaaaatggaaaaatgctattttgtacgatggttaggtacataaatgcggggtatttgttggttaccgaattaaggggaagtctctctctctttctctctctttcacctttctttctcatgaatcccgacccattggattatctgagttatcatatcttttttagatatgcagagctttggtaattcagtttttggggaaggattctcatcccgacccattggactatctgagttatcatatcttttggtatgcagagctttgacaatccagtttttggtgaaggatctctctctctatttctctcgctcgctctctctctctctctatcattctctctctcagtttatcataatgatttaatttttacaaattgaaattcaggatatgacgagtcgaaggatagttgggtgttatcccaggatacatatgcattggaatccgtggccaatttttcaattagtgtctcagcggagctcaccttgacagcattgctcggggggccagtacccgaaagttttaaaaagatactaatggcgaacgataaatttgcgcagggtaataccttttcggatacttttctaaaattttgtatgtga

SEQ ID NO: 78381 - DNA, 205 bp, Heterodera glycines
atgggcattaaaaccaatatacaagggggatggatcaaaaaattcattatatgcgtttttcttgaaaatggacactgtgggatggtaaatttaatcacttgaaaaattaattttataatctaggtctgaaaagtgtaaaacaattcttcaacattaaacattattattgtatatattgtgagcagacgtttcgagaaaaaataaa

SEQ ID NO: 78382 - DNA, 467 bp, Heterodera glycines
atgggaaaaaatgaaaagggttgggtaatagaaaaaatttcgtatgatctatactgcgaagctctgagtgatcagctaataattccgcctagggatttggtacaaaataacgcagatgtagtgctggaatccttctatcatattcagcaaagttttgatgaaattgatttattgaatgaggaaatatctttgatcataactacttatgcagccccaaaaggatctggtattaaaaaaaattgagtataaatcatttttaattttagcgcaatcaataaatcatttgtttggattaaaagaaagcgggagattgttagtcaaaaattctgataattactgtctttttttacagtataatgttgagcaaattgtaccaaataatagggactgaaatttcataatctcaatttaggaaaatttatagcaacggaaaaagacaaaaaaattttgctgatgatttaattaaa

SEQ ID NO: 78383 - DNA, 390 bp, Heterodera glycines
aggacaagaaaagaatgaagttgatgcctcatgaaactcgtgaattggttatgttttgtcgaaaatatccttacataatactcataaaaaatacaaataattcaacccacctattctatgaccacattctgaaaaaaatcccagaaatacgaggaaagatatgcttggtcacaataaaataaaaaatggctagtatgtaaaaatttgcggtcacaaataaaataaaaaatggctaatatgtaaaattggcgtccagaaatttttagactaatccgaagcaaagcacgaatgaattaaagaggcgaaagaattcacagtatcgtttctaatagggaaatattgacagaatattcggctaaaaacgggtttgatcatttttagcgcattttt

SEQ ID NO: 78384 - DNA, 3417 bp, Heterodera glycines
aaccctgtccttatgggcaaaaccaaacgattgtggtcccgcggcattccattctcgacaagcaaagccgcctgcaactccacgtgttttgcgacgcttccgaacacacctttgccgctgccgtctacatccgaagcgagactgctgacaactcccaagcgaacctaattttcgccaaaaaccgcctccggccacgaacagcaaaccagcgcttcaccatccctcggctcgaactcctcgcaatcctcgtcggcatccgcgccatgcgtttcgccgagaaagagctccgccgtccgatcgaagagcgacatttatggtccgactcccaaattgccctctcatgggtgaagtccgaggagcccaaagctcaattcgaacagcgacgactcgtcgagattcggcaaggaccaaccaccaccttccatttcgtcagaaccgaccaaaatcccgctgacatagcgacgagaggctgtactccggccgagctctgcactcgtcaaatgtggtggaaagggccggagtggctcacgaatccggaaacggaatggcccgacgagttaacgttcgcaacgccagccgactccccttctgccgatcccccgtttgaaaaatcggagaccaagaccctcatggccaaacaaagtccgctgccccctcccctcattgatccggctcgtttcagtactatgctgacccttctcggaacgaccattctcgtcctccaattcatcgggcgtcgtcgaccaaaatggctcaaaatcggcacctcgtcaatcccacggggtggccctccgacgggcgattcgttcagagcagccaggactttcctcatccgacaagaccaacgaagctcgctcgacggctacgacaaacaccccactgttttcaatgaggatggccttttgtgcctcaaaacccggctcttgcacgcgaacggtccgcccactctcgcctctcccgtccttctcgaccgccactcatccctgactcggctaattgtccaagaaatccacgccgacctcagacacgccggcgttgactggactctgactgagttccttggccgttattggatgcctcaagcacgacgaaccattcgtggtatcctccgaggttgcccgtcctgccggcgaatcacggcacccccttttgcgaggccaaccatgccccctttgccctctatgcgcgtcaaaccggctaatccctttgaattcgtcggcctcgactttgctgggcctacctcatctcgactaagcgacggatcgctcgccaagacctacttggtcatcgtcacctgttttgtcacccgggcagtatatctagaggcaaccaccgatctgtcagccccgagcttcatcaatgtcttacgacggttcatcagtcggcgcggccgaccaaagcgaattctgagtgacaacgccccgacattcgttcaaacgagcaaggctctcgacattctgaccggccctccgcccgaaaccgacgccgtcacctttgccgcgcgccgaggcatccagtgggacttcattcccgcctatagtccatggatgggggcttgctacgagcgactaatcggcctcgtcaaatcctgcatcaaaaggacgatcggtcgacgaattctcgactacgacgatttgagcgcattccttgccgaaattgaggccagcgtcaacagccgcccgatcacatgggtgtcagatcaaccggactcatcgaagcccctcactccgaaagaccttatccagcccggcctccccaacgacttggagatcgtcgactctgatctcgactacgacgattgcctctccggtcccgcgcgtctcgcagcactttggaaagcttaccgggaggccgccgaccatttctggctcaaatggagtcacgagtacctcctcgccatcagagagcgcgccggatggactcataaaggtccccgccttcgaactcccaccgccccccacatcggccaattggtcatcgtcgaagaggacctccgccccggaatttatggccgatgggcatcgtcgttgcactaaacggctcactccctaacgtgagaagcgtccagttgcgaatgccaaatggacaaaccgtcacgcgaccaatcagccgtctttgccctttggagaccgaaaaccagatcccggaacccgccccggacgccaccgtgtctatcccgactgatcaaagcggcaaagaccctaaaaccgccgaatcgcacgcgcaagagatgccgcctgtcccaccaccttccggagaaccaaggatcctccccggcatgcttacacgacgcaaggcgcgacttctcgggattgctccaaccacaatgatgatcaccatcatttccatcattttagtgtgggcccaagcctccccagcacacgggatttggccatttgacccagaccataccgaatcaacccccaaatccgattgtgtcggaaaccatcttaactgcactcgacgaggcgtcaaaatttcctctaatcccgtcgtccaaaagataacgatctgctgctccaactcgtgtttcgatcggttagccgcgtctaacatcaattacgaactgccctccgatcttatcgtcaacgattacggctgttccgcaactttcggcctttcatcgacccatagttgcaccgccgaaatcgcctgcccagccatagacgaatgcgaattgataggttgctccctctgcgtcgatcagcttgctaattggagatgtaacccccggctctccctggtcttgctcttcatcaccgggtcgttgatcagttgtctgatcgggtgggtcgtctgtttctgctcctctgcccgggtggtgttaaatctcggctaccgactcaccgcactcctcctctcctggcctctacgactagcgttcttcatcgccggccgaccatggacacgagaagaccgagagcttgttgccgaacgcctcgaactcggggttcaacgggtcagacgacagacgcggcagcacggtcggcgagctcagcgagcggcaacccgactcatcggcattttaaaaatgcgctaaaaatgatcaaacccgtttttagccgaatattctgtcaatatttccctattagaaacgatactgtgaattctttcgcctctttaattcattcgtgctttgcttcggattagtctaaaaatttctggacgccaattttacatattagccattttttattttatttgtgaccgcaaatttttacatactagccattttttattttattgtgaccaagcatatctttcctcgtatttctgggatttttttcagaatgtggtcatagaataggtgggttgaattatttgtattttttatgagtattatgtaaggatattttcgacaaaacataaccaattcacgagtttcatgaggcatcaacttcattcttttcttgtcct

SEQ ID NO: 78385 - DNA, 515 bp, Heterodera glycines
gtcagagtccagtcaacgccggcgtgtctgaggtcggcgtggatttcttggacaattagccgagtcagggatgagtggcggtcgagaaggacgggagaggcgagagtgggcggaccgttcgcgtgcaagagccgggttttgaggcacaaaaggccatcctcattgaaaacagtggggtgtttgtcgtagccgtcgagcgagcttcgttggtcttgtcggatgaggaaagtcctggctgctctgaacgaatcgcccgtcggagggccaccccgtgggattgacgaggtgccgattttgagccattttggtcgacgacgcccgatgaattggaggacgagaatggtcgttccgagaagggtcagcatagtactgaaacgagccggatcaatgaggggagggggcagcggactttgtttggccatgagggtcttggtctccgatttttcaaacgggggatcggcagaaggggagtcggctggcgttgcgaacgttaactcgtcgggccattccgtttc

SEQ ID NO: 78386 - DNA, 5634 bp, Heterodera glycines
atgtcggaactcattcgtcaacgtctcaccgccgaagtccgaaccctttcggacctcgtcaagcgcctccgacaaagggtcgggaggctcactgaattcaccaggatggcgccagaggaaatcccgctcgccgaggagaccaaactcgccaagggcgtacgaactgaccgacaattgctacagagaagcatcgaccgcgtcaatggcatgctacgagaatgttttgaccatattcagctgctaggcgacccgtttctgaagcaggcggaggaggacctcctggccgcactcccgaccttcgacgacgagcaagccgacccaaatgtcgaagaatggccagtcatcactcttctctctaaagcccagctcatcctcgacggcctccaagtctacatcgaggctcgattcgacacgacggacgccatctcttctcgcagcagcagtcgtgtttctgatcacggggccgacgacgaaaaccggatccaccgccaacggcaatccaccgacccaccgactcaggcacagccagcgaatgcacatcagccgtccaattcggctcgagccgatcaaaacctattcaaccagcgaaccccggcattcccgcttaatctcacatttccccgagcatcgaatcgccccacccatcgatcggaacctcaccatggccacttccgacagtcgaccaatgacgacgacgcacttcgggtcagccgaatcgaaatcccgaggttcagcggatcggcagaagaatggatcacattttgggccgcctttgactttgccgtccactcacgccaataccccgccttccaaaagcacctcctcctcctacagtacctcgagaagggatcgccaccacgacggatgattgaaggttacccaccgtcagacgccaattacagcacagtcgtgagcattctacgagaccgctacggcgacgtcggcaaccgacgagaccaactcaatgcccagcttctccacctcaaacctgcccggaacaacctcaaggagttgcgccaactccagcaagagatcgagcggatctgcacccaactttgcagcctcgagcccgagggggagctctcgccaatcgccaacagctcgctggtcaccaatctcatcaaaagcaaacttccaccaccagtactgcttgacctgatccgaatggagcgcgagagctacacttcctggacggctcgaaattggcgtgagggatttgcgacaatcgtcaccgacaaagagcaggtggacttgtgcgtccgcacattccaggacatggacatccagccccgcgaacgtcctcccgaacgggccccctctcgtccgggtggtcgttcttttcgaccaccagcgccggagcgacgttatttggagaacactcgggcctttcctgctctcgcccaacccgtctctgccaatggcatcagttgctccctttgtgagcaggagggacaccgtccgagtgcgtgccagcgatacaccaccgtcattcaacgccggcgacgacttgaggaacaggggcgctgcctgcgttgcctccgtcaagaccacgtcactcgcgattgctctcgtcaagatcgatgttcgaaatgtcaggcgaacgaccatcacttcctcctctgcccgtcaatcgaccccccggggcgaaccaaccatcgacaagagaatcaagagcggaatggaaatgcgtcccgcaacgtcagtcgtgccacgggagccaacgccgaaccggtccgaccgagagcgactcccaccacaaccgcactgctcgtgtgcgacgagggcgaaagcattcccgaggcggtatgcgccgccgcctttgaccccctccccgtcgacagcggcagttttcccgtccccaaatcgacgagagtagctcatttgatgactcagacccttaaggcgtcatgccaagggggcccacccgacggaattcctgcttttgtcttccacgaccctggcagccagtccggctacataagccgggcaatgacagagaagctccgaccccctcgactctcagagcacctcctccgaattcacaccttcggagactcccgccctaagaccgtccgatcagcaaaattcgccattcaactgcagcgcctggacggaggctgggagaccctcgagctcaacgtaatcgacgagatcacgaccaaaatcaaggccctccagtgggacaccaccgatggacccctccccccaaatgccgtcctcaaggtcgtcgaaaaggcgccggacattttgatcggcatccgggaattttggcaattctttattggccgttcaacgcttcactccgggcttcacctcatccaaacaattttcggcccaatggttggtggtgaagcggagtttcccgagaccccacggcacaccccgacaattgccatgctgacgtcccaccccagtaacgtcgagtcgttcccctcatcccgcgccgtcaatgacttttggagtctcgaggcgattggaatcaccgacgaccccaatcagaacgacgaccaagttgccatgcagcaatttggcaataccgtccgccaattgccgtctggccgttactccgttcgcctcacttggcgggaacctcggcctcccctcccctcgaattgggccatcgcatatcgccggctcctctcaacgaccaagcgtctgcaatgctctcctgagcttctcgaccgttactccgccgaactgacacggcaaatggacgccgacattattgagttgaccgggcgagacaacgacgagcatttcttgcctcaccacgccgtcatcaatccaaagaaactgcggatcgtcattgacgccagtgctcgtgccaagggcaccccaagcctcaacgactgtcttcaccgcgggccagtgttgctccccgacctttgcgggattctcctccgcttccgttcagcgacaattcctgtgttggccgacgttcagggcgcctttcatgccatcgaagtcgaacccgaggacaggcgcttctgcaaaatgctttggctgaaaaaccctgcccgtcccgtctcaggcgacaatctcttgatctaccgctacaaacggctagttttcggcgcgacatgttccccctttatcctcgccgctgttctcctccaacacttcgacaagcacgagcacccattcgcccaagcgttggccgcgaatatgtacgtcgacaatctcctcatcgagtgcgagacggaggaggaagcaatcgacaagtcgtccatcgccaaacaaatcctcaaagacgccgacatgaacctcagggagttcctcagccactccccaaacgtcatgaagcaaattcccgaggacgaccgactcgacaaaacaccggccaaagttttgggcctgacgtgggacaccctaagcgaccgcatcactttcagtctcccaaaagacacagacgccactgctacaaggcgctcagtcctgagcatcatcgccagcacgttcgacccgctcggactcgtcgggccatgtcttctgcccgccaaacggcttttccaacggctatggggagaaggaaccgcctgggacgcccccctccccgacaccgaggcgcaaacttggagccaaaccctctccctctggcaagaccaaacaattttcgtccctcgacactccattctcggcaaccaaagccgcctccaactccacgtgttttgcgacgcgtccgagcacacattcgccgctgccgtctacatccgaagcgaggctgccgatagctccgaagcgaacctaatcttcgccaaaaaccgcctccggccacgaaccgcgaaccagcgcttcaccatccctcgactcgaactcctcgccattctcgtcggaattcgcgccatgcgcttcgccgagaaagagctccgacgtccgatcgacgagcggcacttatggtccgactcccaaattgccctctcatgggtgaagtccgacgaacccaaagcccagtttgaacagcgaagactcgtcgagatccgacaagggccgcccaccacttttcatttcatcagaaccgaccaaaatcccgccgacgtagccacgagaggctgcacaccggcggagctccgaactcgctacatgtggtggaaagggcctgagtggctcacgagtccggaaacggaatggcccgacgagttaacgttcgcaacgccagccgactccccttccgccgatcccccgtttgaaaaatcggagaccaagaccctcatggccaaacaaagtccgctgccccctcccctcattgatccggctcgtttcagcactatcctgacccttctcggaacgaccattctcgtcctccaattcatcgggcgtcgtcgaccaaaatggctcaaaatcggcacctcgtcaatcccacggagtggccctccgacgggcgattcgttcagagcagccaggactttcctcatccgacaagaccaacgaagctcgctcgacggctacgacaaacaccccactgttttcaatgaggatggccttttgtgcctcaaaacccggctcctgcacgcgaacggtccgcccactctcgcctctcccgtccttctcgaccgccactcatctctgactcggctaattgtccaagaaatccacgccgacctcagacacgccggcgttgactggactctgactgagttccttggccgttattggatgcctcaagcacgacgaaccattcgtggtatcctccgaggttgcccgtcctgccggcgaatcacggcacccccttttgcgaggccaacaatgccccctttgccctctatgcgcgtcaaaccggctaatccctttgaattcgtcggtctcgactttgctgggcctacctcctctcgactaagcgacggatcgctcaccaagacctacttggtcatcgtcacctgttttgtcacccgggcagtatatctagaggcaaccaccgatctgtcagccccgagcttcatcaatgtcttacgacgattcatcagtcgtcgcggccgaccaaagcgaattctgagtgacaacgccccgacattcgttcaaacgagcaaggctctcgacattctgaccggccctccgtccgaaaccgacgccgtcacctttgccgcgcgccgaggcatccaatgggacttcattcccgcctatagtccatggatgggggcttgctacgagcgactaatcggcctcgtcaaatcctgcatcaaaaggacgatcggtcgacgaattctcgactacgacgatttgagcgcattccttgccgaaattgaggccagcgtcaacagccgcccgatcacatgggtgtcagatcaaccggactcatcgaagcccctcactccgaaagaccttatccagcccggcctccccaacgacttggagatcgtcgactctgatctcgactacgacgattgcctctccggtcccgcgcgtctcgcagcactttggaaagcttaccgggaggccgccgaccatttctggctcaaatggagtcatgagtacctcctcgccatcagagagcgcgccggatggactcataaaggtccccgccttcgaactcccaccgccccccgcatcggccaagtggtcatcgtcgaagaggacctccgcccccggaatttatggccgatgggcatcgtcgttgcactaaacggctcaccccctaac

SEQ ID NO: 78387 - DNA, 515 bp, Heterodera glycines
gtcagagtccagtcaacgccggcgtgtctgaggtcggcgtggatttcttggacaattagccgagtcagagatgagtggcggtcgagaaggacgggagaggcgagagtgggcggaccgttcgcgtgcaggagccgggttttgaggcacaaaaggccatcctcattgaaaacagtggggtgtttgtcgtagccgtcgagcgagcttcgttggtcttgtcggatgaggaaagtcctggctgctctgaacgaatcgcccgtcggagggccactccgtgggattgacgaggtgccgattttgagccattttggtcgacgacgcccgatgaattggaggacgagaatggtcgttccgagaagggtcaggatagtgctgaaacgagccggatcaatgaggggagggggcagcggactttgtttggccatgagggtcttggtctccgatttttcaaacgggggatcggcggaaggggagtcggctggcgttgcgaacgttaactcgtcgggccattccgtttc

SEQ ID NO: 78388 - DNA, 837 bp, Heterodera glycines
atgttttccggtgccactgaattcatagctaaccaagcgttcacaagtgcactttggaacattgccgaatccggggtacaacgagcagaatatttggtgcacaattacctgctatcaccgacagcaggtcagggaaaggaaaaaaggaagtgtaaataaatgtcaacttgtcttttttatgttcattttgttttgtttttttgttaaatttttcattttccgtctttcatcttaacatattggctgctttgaaaactaataatgtcatctgttaacaactttgaaatcttttacagccttttcaaaatcatttccacctcagagaacggcatggacacacaaaaacagtcgccttcatctaaaaagatttattatgtctcattcaaccaagactgcaccattcttgtggtcggacacgacgacgggtacagcttctacaatttgcgctcattggaacgactggagaaaatttcggactcgcgaggtccttctgatattcacatccccatcctcaatttatttatttatttttggttttgttttcagtgcctgaacgcgcatgcattgttgagaagctgtacagcagttcattgacctgtgttgtgtcgatgaaaagcacgcgaaaacttcaggttcatttttctccaaactaacataaaaaccgatgtttcctggcgtttatattgggttactatctttctaggacgctcttccgatttgtaccaaaaagcaaagttaaaaaagtttctttacataatcactgtaatttcatttttcatttattgtaatagcagaaattcggacgctattttaaaagggacgatttgatttattaaa

SEQ ID NO: 78389 - DNA, 830 bp, Heterodera glycines; identical to SEQ ID NO: 14355

SEQ ID NO: 78390 - DNA, 1702 bp, Heterodera glycines
atgtccaaaattggcaaattgattaggaaaagcagaaatttggaggcaattcccgagtggtatttggacacgaagcacttcaaagtcgacgtttgccccaattttgaaaatggaaaagttgtcgacacttaccgaggtttgtttatttatttattgaatgtcagcactttccaaggctaattcttttttttcatcaataataaattatttaattatttttgttttcttcagataccgatggaatcgaattggtcaaaatgtacgaaggttttctggaggacagcaaattgtttctgtcaatccatgcgaaaggcgtgagcaaagaatcgctttttggggaagaaacggtggaaattaaaaatgaaaatttgaaaattgtgaaaaaggcagccctttggctaattgacaatttcgttgatgaatttttagcctatttggacaatttttttgaatttggcggcaaccaaaaggaaaaagaccgaattttgaatgaaatttggcaaaaatgggtcgaaacgaatgcaaaaatgcaaacattcaaggaacaggggcaattgttttgccatatttacgttttttcaatgttttttctgagtacaatttggcaaagattgggagagaaggagcgaaagaaaatggcaaaagtaatggcggaaaagcgatgggatcaaattgtaagcgaaagtcactttggcacaatgttcggttttttgcagatatttgaggacaattttcggaaaaaaacattttgaaaagatttaaaacaatttatttttgtatttcttttgacattataagtcgtcaacaaaagaccaaagaacttaatttaatcaccaattaattttaaattgtaaaaataagctcgtgttgacgacttaataaaaaattaaaattattattttttttattaattttagaagtaaatttttctgtgtctacacaaaatataatcctttttaaagaaaattttatgttttccggaaattgtccgcaaatgtcccactgcgtttaaagtgatttaattaagtaaaactaattaatttataatattctttataaataattaatttttttacatagaccattttcgcgcttcgctggtacggcaaatcgtccttagaattcggccgttcgtccgcggcctttgcgacttgcgattattctcagtgggatgaactgcttcatcaccgcaacgcacaattagtgcacagtttgaccctttttcggctcatcaaacgcttcaaaggatttgcgcattttctgtgccaaatgattaaaaaagatacagtagaaacaaaggaccgtcttctgctgctgttccgatccgtggccgaatttgattggcttgagaagcaattcccaatgattttgcgcatcggtaattaattaattattcatttgaatgaccctaattatttaattaacaatccctttaatatgctaattaatgaaaaatttagaggaattaaactttcgttgtcgtttacatttctatgaacaaatgttcaaattcaaaagttcaagtgatttgcacagatacagcgaattccgaatggctttctccgttttgtttaaacaattgtccgttcgcttaactgctaaatcggccaaattggcccatccgatgctcacagaagtaatgtttgtagttcatgaagacattttccgagaaatggcacttgcgttggcattttgtcgctga

SEQ ID NO: 78391 - DNA, 1358 bp, Heterodera glycines
atgaagaggaatcttctcagggaaaaggaaatgaaagggatggatgggaaagaggtggaagaagaggaaaaggtggaagaaaagagtaaaagagaggacgaggaagaaggtaaaaaggaaaaggaagaaggagaaaggaagaatggatggctgagagagaaggaagaaaggaggaaggaaaatatgagggaaaaagaggaaaaggatggaggaaaagggaaggatgagagggaggaaaatggcgaggaaggaacggaggagaaagtggaggcaatgaggaggaaggccgaagatggagagaatggaaaaaaacatagcgacattcccgtggcaaaatgccaattttttgggatgaatggcaaaattcaaaaagcgaatgaaagggtcaaaaaggaaaaaaatgatcaacggaaaggaggaaggccaataaatgcaaaaagtgcgaagaaatcagagacacatcaaacaaaagaaggaaaagcatcgaatgaggaggaaaaagaagcaaaaagcattgatttgctgatcgaaggttaattcgggaagatcttcttggccagtaattgccaatggttaacttcgctcttcagactagtggggtccgatactaaaaatcccgagactcgaaaccgagacgaagacccgagaatcgagacttgaactcgggactcgagacttaacccgagacttgagacttagacccgagactcgagaccgagacttaaccccacgattcgggagattttcagacattaccacggacgaattccttttggaaaagcaccgcaaaaatatgaatgccaacaatgatcacaatttggacaacgaattgttggccaatttgagtgtttacgcacacgaaattaagcaacagatggaaacgtacaaacaattgtcaaattatggcactgaatttcgaaattgggcgaaaaatgtggcgaatgaatggcaaaataaaatgagagagaaagtgccaaaggagagaaatgagcggattgaactaatgaacgaattgtgccgaattttgcacagaatggcaaattttggggagaaattttatgaccaaaattgggacaattgcacagaacaaatgcaaattatgtgctcagaagtgaaaggacagctgcataaaaggcatttgtcacggcaaatcaccgaaaatgaccaattagagaaggaatgggccgaattgactaaagagggacaaattaaggcaattgacacactttggggggagaaaaatgggaacagaaaagccaaagggaacagacggaaagaatttgtggcatttttggagcaatggaggaaaatgagggaccaaatggaattgggtgagggatttagttaatgattgggca

SEQ ID NO: 78392 - DNA, 1850 bp, Heterodera glycines
atgccgttttcccccgttcagaccgctgcactgcaggcgcagcacgcggcattgcacgcgaactcgacgaatcggccaaattatggtgcgcttgcggtcacgtccacgacgacggcacgccaatttcagcagcagccgcaacaccaccatcatcagcaagcagtacttatgccagcaatggcggcggcggcagctgctgcacaacagcaacaacaccatcaacagtttcagcagcaacagtcatccaatgcatgccatcaacaaatgcagcaacaacagcaaactcagtaccaacaacagagtcagcagcaacacaacgccaatcttggtaggtgttcatgtggacggatatgattgaaatcttgacaaaaacggagacggaaaaatcaaataagttgtcaattgtcccaatttttttgaaattttgcattttttagcccactctatttttggaaatttctaatcaaactaacctaggagaagaaaaaaaatcgggcttggttttcagatcgattcgactaaaattaagacaaactgtttgggtcgcaattttggttaacttaacggcaatctgacacgaaaccgccaacatagccaaattaaatgtaaaaatggtcatggcagattatccctaaatgaattgttgatcaatcaatcaatctctatgctctcgctgaagttgcttctcctttttgtaggactgagtttgggtgatttgaacggatgcttccgcagcaaccaaccacaacaacatcaacaacagtcacatcttttgcatcataatgactttgtgccgtcatcacatgacatgatgatcggtgctggcaccatcggcacgaagctgtacagcagcgcagccgcttcaccaccgccatcgtttggcccaattggtggcactgcaggcgctgtggcaccaccaacaacaaccagcacagcgacaacggcactgtcagcgctcggcacttccgtgtccagcaacaatttgcacgcaatgcttggcgcgttggagttggacaatggcgggacacctccgcagcagcagcagggccatgtaagtttaccaatttattttacattcaaaagccaatttttcagggttaaatgggatttttaaaatttaatttaaataggtaattattaatttgcaacgaatttatgtatgtatatacaatcattcctttttcgtcatttttagaaattttacggcattttttgaatgctaaaatttcattgttaaggacttacataaatttgttcaatgtaaatgcctgttttttttttaattttcatttaacttaacatttttattgcgcgttggcatcgatcgctaatggcttagttggttaactgtttgttttctctattgttttcatgccggttcggtccctcgccagtgctcatgattattacaatgttttggttgtctgtcaatgattatcaaaaagatcaagctcaacaggcttgaaccgaccctgtagacaaccactttaactctctctatgagacagacatttaaattttttcaaaattagaacctttttttcaaaaattgtttttggtaactccgtcactcactctctctgctctttcagttctcttctgccatcagcaccgatttcaagctgggcggcggctcctcctccttgcttctgttgcgctccacctccaatggctatggtgccggtgccggaagtgccgtcattcaacaacagaatgccgccaacaccaacaccacgagcgctttctcgccatggcgtatgccgtcgagcgctgtcgatgcaatgtcgcagaatgacttcctggacattctgtcatccaccagcccgtcaccttattgtcagcttccggtg

SEQ ID NO: 78393 - DNA, 440 bp, Heterodera glycines
ctccgaaatgtcctccacaactttcggcccaatcgctactccgtcttggacacgcaaatgctcagttcggcggatggttggcaagacattgagggaatgccgaacggatcggaagcattgatcagcgaaaaactaacagtgccgaaaacaatcgtaacgaaagagcaacaaaaaagaccaatcggagggcaaagggcgaacgattacggaagcgtaagggaaatgagtggcggaaggagcgacggcaggacggagacggcacaaatcggctgacaacgatgactttcatccctcccttaacaccacaagaaaaaacataatttttgtcccatttttctttttgctattgtccattttgaaagcgcaaattattatagttcatgtttagaaacggaataaaaaaaaactataaccaaaacaaaacaattggaaaatatgaa

SEQ ID NO: 78394 - DNA, 1637 bp, Heterodera glycines
atgggtgcgaccgtggcacttgtccgcctttagttgcctttacgacccgattggagtcggcacttccattattctcgccatcctccaaagcttcgtctccaattacttaaagcgtcgtggcatgctcgacttgctagagaattccgaccgcactgatcactttcaccaatcgatcccaacgcattcaggcggctgaagaagcctccaaaatgggcaccgaatctttgtaatatgtgcggacagtgcaagcattgaatggacagggaaaagcgtaccggacattctccgaggcgatgcgaaagccccaccgaatggccatcacccgaggcactcactcacttcgatgggctcccttttggccattcattgagaagcaattgcctttaggcctttggacttctctgtcgttcgccctcacttcctccttcgtcagcttcaacttcggcttcacctattgcctgggaatgcttctgatccgtgccggtcacaccaccccttttgtactgttccaagttgtcgaagctcttaacatggcctccttcatgataatggccgcggcagcgtatttccccgaatatttaagggcacgcttttctgcggggtgcgcccatttgggaagggggcatgaaatagcgcactttcaggcttatgttcgcaatgatacggctaaagccgcgcattaacagtctctccgacaaaggaatcaaaacggcatgcacattttaattcaaagtttttattttgtggtttttaactttagcccatcgaaggccgtctcgaactcaaatccgtccaatttgcctatccaaatgggcaaaaacaattggcattggacggactgtcattgtcagcgtcggtgggcaagcgaattgccgtggttgggcccagcggatgtgggaagagtacggtggtacaactgctggaaaggcattacgatccaatcggtgaacggacggacggagtctttgaatcgaaaaatccccttcaggtggctcaatttgtgtggacggcgtggacattcgccagcttagcatcaaacacctgcggcattgcatggcgctggtaaatgaggcaggggcatatatcatcaatttgaccaaaagtgcgcacagacgaaacgccaaaaaaccccgttaatttaaaaaatttgtcaagatttcccttgtaaaaaaggaagagccgatctcgagttaaaaactagacagctaaaaataaactgtgattcgatagagggggtcaaactatgggcctatgcaaaatttcaaaaaaagttaccaataggaaaaaattttttccaagggcaaagtttttttctttttctctcattttgacgcactatttccatgtctctaacatataaaataacacatattcatttttttgctaataaacaattttttaaaacttttgattaaattagaaatattctttagaattttcctttcaaaacgagcagaaaaaaaaaatcttttggtttactatagactaagttagaagcatacaaaatttaattaaaaacaatgataaaacaaatagtgtctaacctcagctgtctgttttttcattggtgcattgttcactttattttcattaacttttaatagtgtctgactcttacagtgtctgttgtttcttca

SEQ ID NO: 78395 - DNA, 284 bp, Heterodera glycines
aaatttttaaaaattttccagcaaataatggaatttttctcgaatttccccccaaacgaaaattaaaaagtttaataggcaaatttcgtaacaagtagcactcaaatttccaaaaaaattttccggcggcgcctatcggcaccgccggacctacattttccactatttttacaagtttttttccttaaaacggccaaaatttggtcatttttagtgaaaaaaaagtgcagttgttacccagcagtggaaaaaaagtaattggttaaatagcaaaaaaaaaagaa

SEQ ID NO: 78396 - DNA, 1561 bp, Heterodera glycines
atgtgtccatcgctttggtttgggccgtgtccatctccgtggccattccgctcgccttcggtgggttggacaaatggctctaaatttgatcacaattctgataaattagcaaattttgttcaggtgccaatcacattgagagtgaacacgagtgcgcattcacaaacccaggcaaatgatgaagcccaaatcaagcatttaaaaacaatactatggacaatatgaaacatataatagtgatcaacccttctcgatcattctatcatcactcatccgatcagtttttgtaaataagaatcgaaaaattaattaattaattaatcgaacttaaagacacccaaagaatttaaaatttttgaaaaaaaatcgaacgaccctcactcatccatctgatcaatcctttcccgatcacctctcttccttatcaacatcgctcagtcactcttatttcgtcgctaactaatcgtatctgatctgttttccttgctgggtcaacatcctgtccaatcatccatattctccattttcactccgataattctcccaatcatctgatcagtctttgccagatcacttccatgccccaatttgtacagtgttcatgatcagctcctcggtgttgtccttctttttgccctgtttgaccatgattgcgctgtacgcggtggtgttcaggcgattgcgcgaacgcgaaagcgcacgcaccgcgcggaagcgacacgccgcactcagcgggactgagacggcactgatctccaacgcactgatgggcggcgcgaaaatggcaccatttttaattaaaaacaaatttatataaataatttatttaatttttaaggcacgccaaatcgcgcgcagccatctaaaggatcagctgctgttggagctgagcattcaggtgggacattggcattgccatgcttaattacttttttgaattgttggccataaataattaaatttaaaatcgtttaaatttaattactttcaatttcattggttatctccaaatttgctgcttcattggtgctaatttcccccttctgcttcttcagacttcctccttcccaaccgccagtcgttctgatgaggaggaagacgaggaggacgatgacgaggaggaggaggacgaagaagcggtggacgcgggcgaatccgtcgccggacgaacgcattggcaccgcaacgacaagcgcggtttggcggcacaagtggcgcaagagtgccacaaacagcaccagcgaaggcccaccttcggcctaatgatgaacggcggcgcaatgccattcgcgacggcaccgatgaatccactgcaggtacatacagccgagggaggaacagaaggatgaactgacacaatttgggaccgttcgggtattacaatcctcgagcattttagcacattgacatacagatagactaattaatatatatcaattagcgaatgtttcaagcttttcttccctgccgactcaattcattaatcaatgtttaattaactgtttgtttaatcttaattgcttctgaccagcagataatcagtcaaaaattttccttttaa

SEQ ID NO: 78397 - DNA, 1339 bp, Heterodera glycines
atgcttttgatgccctttcagttgccttccaccgctttgacggacgcggagcgtcgcgtgaaggggtggcagcgaaagcgaacgctgcgactgatgcgccgctgcaacactttgccctccaccgtaatgcagcgacagacgacgacgacggcgccgcatgggacgacacaaaaggcaacgaaaaggacgacaatggcacggggggaaagcgatgcaacccaggaacaacagacaaagtcggacacgacaaaatgccaacagcaaaggcatgagtcaccaaaacggcaaaaaagtccaatcggagacatacaaaacgcaagcggtgttagtgttgaacgggtactgctcgaaaatgatggtggccgggagcaattctgtaaagatgttgttgccacggcggatacaaagggccttaatgagtgggacggcgaggaacggtccccttcgcccacccttgtgcatttgtgcagcagtttcggcgatgagttgggggagtgcttcccattcatcgaccaaaatgagcaacaacaacaactacccgaggaccacaataacaacagcaacaaaaatgccgtgagtgtcaaactatacccaaccaattaattaattcactaattaccccattagttattgcttggtgacgagtcgactcccgacgacacgcgccgctgtgttggcttgtcaaatggaaaagcagcagaatcggatgacccatcgtcatttaatgccgcggcacttaaaatgcaacagcgaaatggcagcagcaaacgcggcacagtgaggcgaacggcgacgacgaaaaagctgcagaaaggcgcaacggaaaagacgtgccatcgaaacggtgatgggcagggcaatttcggcatgcgacgaacgcactcggaacggcatccagcggacaccaaaacgcagcaacggattaggcggttgtcagccgatggaagcgcgtgtgcttcttgcgcgggatgggttgtcattgtcgggaacgaagacgaaaatggtgccaaaaacaatggcaccgacaatgatcgactaaatggtgccgaatataataattatcgtaatgataatgacaatggcactaccgctgcgggatcgccaacgtttggcacaaacattgagcaacggaaaaagaaaagcaccgcgcgacaagtgacgaaaggtcggcaaagtggcctttcttccacttcaaagcacttttagacgctaaatacgggtcaaaatgcgccgctttttccacaggtgccactttggcacttcgcaacggcggcggatgcagcgcgacaccgccgctcctcctgcaacaacgacagctgcagcagaagcggcacaagca

SEQ ID NO: 78398 - DNA, 1297 bp, Heterodera glycines
atgaatgaagtgaacggggagggtcaacatcgcgggtatttatgggcggaaaaaggggcgtgacataaccaagggaaaagggaaatacaataaagcaaagggtcaaaatgggtaccggccaattgggtcccaaccctaacatcattaaatattttaagtggcttaattaagcattaaatttaaaatataaatttatttaatttttatattgtacttttaatttatttttttatggacaaatttcacaatatcaaaatcatttcttaatttttagcacaaatttcacactgcatgcgttgatagatggtgagaataatattaaattacataaaataatggttttattaattagagctcgatatataaagtcgggacggatgattttttgtaaaacattagttaaaaaatgagtcaaggtttagaaaatatgaaattttgtaaaaagcctaatattattattaatcaaattattattttggcttggatctttgccaaaaaataaattaactgacggacggactgtccactgatcgagattgcccactgttcaggacaccaattacctaattacctaggcttactcaaaacccatcttgcccggtctgtcgcacgagcgttggtgggggaggaagcggcggcggcacgtcatccgcacgaaactcgtcaggaggatcatcaagcgtaatttttttctattatttgaataatttaaaaactaatattggtgagccggtagcattccgggttttggctagatcaattcaaaattgatattgtttaaaaaatttataaatattttattccgaatatataatttcaagaaatgttgcaaaaataaaatgttacaaaaccaaaattcaaagggtcgattttttagaattgtatttttttgaaaagaacaaatttttggaaattataaattcttctagagaatatcttaaagctatcaaatgatactaagaattaaatgatttaaatcattttatgatgtttataaaaagctcaaaaatgaattaaatatgacatgagactttaccaatttgcacttttatcgtttcttaagaaaaaacatatagtctcacaaattttgagtattatatatatataattttaagactgataatcatatatcaccagtgcgaggaataccaccacatggataccatcagcctcattatcgttagtaattacttattttgaattcaaaattgttaaaaaatattttattttatttcagagtcaggaatggatgactttcctgttcacattcctcccgataactttcaacatagttatg

SEQ ID NO: 78399 - DNA, 377 bp, Heterodera glycines
atgggagacgcatcaatccaacgattgacggatattttgcagcagttgttgactgcacaacagcaaaacgcgccaccggcacagaatgcctctcaattgccaacacttccggacgtggaatgttttgatgctagtcagcatagtggctgtgaaattgaggactggctcaagcgatttaagttcgctcttgactgtgccgcgccgaaccttcaggacgagttgaaggtgaagctgttgatgaccaaattgtttggtccgacgttcagcgaatattgtaagtccgtcttaccgagagaagtgaccgacttcaattttgtggagactgcagagaagctgaaggcattgttcagccgacctcaatccgtctggattgacag

SEQ ID NO: 78400 - DNA, 67 bp, Heterodera glycines
acgatcgatgcgacccaaaattggtggaattggccaaaagtgttcgatgggataagctgatttgtag

SEQ ID NO: 78401 - DNA, 661 bp, Heterodera glycines
gatggtgactccaatgacttacccactgtttatctttctggtacgcttggttgacaccctgaaatgaaacagagaactgtaacagaagagtgacaagactacagtatttgtgttatagtttggcaattagagaaagagaatttaatccgattttatatggaggaaagctctttcaacagtattgtgttgatgaatatgttaagattgaaggagacagaatgagttggataaagaacaatcagaaaaggattttagctgatgcttacaagaatattgacaatatgttgattagaagagcacaagaaagaggtttgccactgggaaggaagtttttcttcctccaagtgtgacaaatagtccgagatatgttgaaaagcattttcaggatgctatggcagttgttcgacggtttggcaagcctgatatatttttgactatgacatgtaacccgcaatgggaggagatctctgagaatctgtttcatgaacagacatcaattgatagaccagatttggtagtaagagttttcaatttgaaagtgaaagcgattatgaatcagataacgaaagtaaagatttttggtgaagtgattgcgtggatgtacccggtagaaaaccaaggaaggggactgccgcacattcatttgcttttgacattggct

SEQ ID NO: 78402 - DNA, 1363 bp, Heterodera glycines
atgccgaaggactacgtccacgaattgtacaaaacaacgatcaaccaaacgaatagcaatttggaacttcatccattgatcttccacgcatggcaactcgacaatgagtctgaagcgacacgcttcccgcacatcaacgaattcatcaactcggagcagttcaaggacaagctggaacagcacattacggcaaggactgaagctttgggcgcgttgaagggcggaatagaaggattcaccatgcgctggctaaaaggcctgatcgacgaagcaatcacatggtggattcgagtcgcctgcgtttattcaaccttcctcatgctgcgcgacattgttctcccatgcactctggcgtatttgctcaatcccatccgagtgactcttctcagcctcgttggagtacgcccgcatccgacattccgacccaccgtttccaaaccactcgggatcgaagagggaatgccgctgcgtgaaatgccacgaacccccaaaccaccagcgcgcagggcagagcaccgatccatgtcaccaatcaaattggacatgatcgccagaacggctcggtaccaacaaccacgaacacagagccatctcgacctcacagaagactcgccctttgggaggcccagacgaaaagaattctgacgggcccatctttttcacgccggaatgtcggaactctgggattccgactgccgatcaattgatcagcagaattgaagaaaggaagtggcgacccttccccctccctttcacatgcgtcacaccccgttccactcctctgcccccatttccctccaaattgttaattgtttttctgcgttccttccatgcctcgcgcacaattaatgaccaatttgtcaaaaccgcaacttttctgccgccgtccccaattcggcgaatgagactccaaagaacgatgaacccccaaatttcccgttttccgcccattttgttcatctgttcattttgtcccccgtttttcatttcgtgcccaattttcggcccattttcgttctgctcacatttgccactttttatttaactttattgttatttaagcggccaaaaatgcccccaatttcacaaccaaaattcattaggcatttttgccgtttctctcccctcccttccatttgcctttaactgtgataaccccattcgtgatcattctttgacccccggttattgatttttgttctgtggccccagtgccctccatttcctgtcccatcccggtgcccaattccatttgtgataattccccggtgatggcatttctgtgatcaatttgtgataattcgttcaccatttcaaaatttttgtttaattacccaagtttgaggtcatttcccggaataaa

SEQ ID NO: 78403 - DNA, 1240 bp, Heterodera glycines
atgacgtccaacaagcaacgacaattggtccataaggacgttaaactacgtcaccaattcaagcaaaagcactcgagcatgcagctgacagcacgtttccggaagcaaattcacatgtcctcaacgattgaggaggttcagcagcgaatgaaccacaacagaccgcaaccgcggaggtcacaacagaggggactaaggccaactcaagcgcctaaaatatgccaatccgggatggcacagtacaagcagggtcgagggatccgccttcaccctgcgtcttctgcaatggcactcactggaccacgacgacgactcagcgaacaacccttgcaacgagagcaaggacacgaatccagtacgtcaccagggcgagaacgcagaccacgaaagagccaacgacacgccccagatcgcctcttcgcaaaaaatcatcaagcccgagcagatcacctttgcatggcattgttccttcgtcaccatcgagaaggaatttccaccggtcaacaagcggatctgcaaacaaatggccattcaccaggaatgcccattcgccaagtctgaaatgacgaatcacgaagcacaattgtggtcaacgaatgacgaattggaagtcaacttccctggaccaatcgccggacttttcaaaggcgaacaaatcagcacggcgacaaactgctttgctcaaccagcaacacttttcgtaaaacggcacaatctgcagatgttttcgccagtccaccaagttcagaactgtcaatacgcaaccgaattctgccaactgcccgacaactcaactctgatttggaaatcaacctgcaatggcaacgaatgccaaacatgcgactacgagaaggcggaagtcatcaacggaaaattcactgcggcctacggagaatcaatggccatttggatctccgaagatcaccaaaaggcattaactttcgccaaaaatgcgccagaactcatcgcctgcgatggcacacgcatcgtcatgtccgaacagaacttcggaattgccaaggagcaatacgacgacattgtcagcaccacgacaagatggaagaggcatccgaccagaacagctcgcatcacagctctcggcatcccaagtggcaacaagcgtggcgttaaatcagcgaaacacgagggcagccaacccgactctccaggccagacgcttactacggcaaccaaacgtccaagctcgttggatcggcgaaacgacaatggaggccaatga

SEQ ID NO: 78404 - DNA, 1822 bp, Heterodera glycines
atggccattcaccaggaatgcccattcgccaagtctgaaatgacgaatcacgaagcacaattgtggtcaacgaatgacgaattggaagtcaacttccctggaccaatcgccggacttttcaaaggcgaacaaatcagcacggcgacaaactgctttgctcaaccagcaacacttttcgtaaaacggcacaatctgcagatgttttcgccagtccaccaagttcagaactgtcaatacgcaaccgaattctgccaactaccagacaactcaaccctgatttggaaatcaacctgcaatggcaacgaatgccaaacatgcgactacgagaaggcggaagtcatcaacggaaaattcattgcggcctacggagaatcaatggccacttggatctccgaagatcaccaaaaggcattaactttcgccaaaaatgcgccagaactcatcgcctgcgatggcacacgcatcgtcatgtccgaacagaacttcggaattgccaaggagcaatacgacgacattgtcaccaccacgacaagatggaaaagaggcatccgaccagaacagctcgcatcacagctctcggcatcccaagtggcaaatagaaggattcaccatgcgctggctaaaaagcctgatcgacgaagcaatcacgtggtggattcgagtcgcctgcgtttattcaaccttcctcatgctgcgcgacattgttctcccatgcactctggcgtatttgctcaatcccatccgagtgactcttctcagcctcgttggagtacgcccgcatccgacattccgatccaccgtttccaaaccactcgggatcgaagagggaatgccgctgcgtgaaatgccacgaacccccaaaccaccagcgcgcagggcagagcaccgatccatgtcaccaatcaaattggacatgatcgccagaacggctcggtaccaacaaccacgaacacagagccatctcgacctcacagaagactcgccctttgggaggcccagacgaaaagaattctgacgggcccatctttttcacgccggaatgtcggaactctgggattccgactgccgatcaattgatcagcagaattgaagaaaggaagtggcgacccttccccctccctttcacatgccccgcgcaccccgttccactcctctgcccccatttccctccaaattgttaattgtttttctgcgttccttccatgccccgcgcacaattactgaccaatttgtcaaaaccgcaacttttctgccaccgtccccaattcggcgaatgagactccaaagaacgatgaacccccaaatttcccgttttccgcccattttgttcatctgttcattttgtcccccgtttttcatttcgtgcccaattttcggcccatttcgttctgctcacatttgccactttttatttaactttattgttatttaagcggccaaaaatgtcccccaatttcacaaccaaatttcatttggcaattttgccgtttctctccccgcccctccatttgcctttaactgtgatggccccccaattttgatcattctttgaaccccccgattgttgatctttgatctatggcccggtgccctccatttctgtttctcccggtcccattcattgatttctgtgatttcccatttgccccagtaccgaatgcttcctttctgaaaattttcctgtcccatcccggtccccaattcatttgtgattaatcccccggtgatggcattttatctgtgatcaattttgtgatattttgttcaccatttttaaatttttgtttaattacccaagtttgaggtcatttcccggaataaa

SEQ ID NO: 78405 - DNA, 2772 bp, Heterodera glycines
atgtctgggccaatacaaaaagggatcatcaatgcactcaaagctctcgacaatgccaaaagcgccacttcactccttctacaccccgacccggacctgtcaaactgggaaaatgccgtcaacttggaggctcaatttgatcgcgtcgtcaaggaaattcgctcgatggaaatgcagatggacagtctacgagacttatccaacgcttggattgaacttctcgcccgcctgaccggagacgacaaagacaacggcgaaaaagaatacatcaaattcgacaaaaatgagaaaatcgccgaacgatacgacgcagcatcaaccaaacttcgggatttgcgagatctcgaagcaacactcagtgccgcagccaaactgcacagaggcagagccgacagggaagcaaaggcggatcaattggccaatccgcagcaacaaccgcccatgccaccagcaatggcagcaccaatgacaatgccaacattcacagcaccgctctaccaattccagccaattcaactggataaatttttcggccaaaagcgaaaatggcccgaattctacgaatccttcaaatcggcaatcggcagtcaatcaatcagtaaagcgcagaagctgaacttactccgcaatatactgggcggagaagcgcgagaactcatagcgggcttccggttggaagacgcaaactacgagacggtccttcagctgttaaaggacacgtacggagctccggaggaacacatcagaagtcttcacttcgaactggccaatctcaagccgtgccgaagcctccgtgagaccaaagactttctgcttcaacttgagcggcttacaagggagctgaacaatgccggagaggacatcgagggaccgcaggtgttcctcatgctggagaagaagctgactccaccattcctacgaagcatcctcacaaagaaaggagaggatccggcaaactggacgacaaccaaattccgggatgtgctaaccgaagcagtccggaaagaagtccaaatccaagaagtgatgggagaatatggccatcactacgtccaaccaaaagcagaagtcgtctcagcagcacctgtacaagcaccgagaacaccaaaccaaaggtcacgaaggcctaaccaaccaatggcactgcgtgatatgacatttatcgcctcatcactggacgagggtcacagacatcaagggtatgtaagccaacagcacacacaacaagcaaagaaacactgccaacaaatgcgaaaccaagtacagagcgtcaaaaagggtccgccatacccctgtattttctgcaacagcaatcattggcatgacgaatgccaaaacgtcgacacactcaaccaacggatcagcatcgtcagagaaaagaagctgtgcttcaagtgcatgaagccaaaccaccgcgcatcaaattgcgctcgaccatctaagtgctatcactgcaaacgtcggcatcccacggcactctgccgagatcagtacaaagccgagaatggcatcaacacgcctagcacctcttgcagtgaagagaagccaaatgccaacgattgcaagcgatcaacagtgatcgaacaacaacaaatgtgtaatgccatccaaagcaaggaaaccagagcgttgctaatgacgacaaaagcaacgatcttcaatccgtcacggccatccctcagcatgatgggaaccatcttcattgacccgggaagccaccgatcattcatctcgagcagtgcagctgaacaattggatctgaacgtcctcagcacggaagaatgctacttgtccagcttcggtgaacgagaaccgaagcgatacataagcgaccgcgtcgcaatcggcattttatgccccgaccaggacaggttcattttcaacctgaacgctttgaagttcctgctgaatgatttgccggtactacaactaaacgcattggataatgacgaacttcgacaaaagaagctttccctgccgaatgagtcacggcaaccggacattctcctcggaatggacgtttggcaccagctgaatgttcaaccaattgaacaactgccaagcggatttacgatttgccaatcgaaaatcggcaatatcatcagtggaacagggcgaatcaagctcaagcaaccgtccaacatctctttcgtgctaatggtcaacaacgatgaatcgccacaaagcagtaaagcggctcagaggcagaaaaacattcaacaaaaagaaaaggacgaactgagacggcatcaacgcaacaaactcttgtctagcattgcaacattgcgatcaagacggaagagagaatcggctcccatcagctcaaaatcaatcgtgattgatctttcatcagacagcgacgcatccggcattgagatcatacaaaatccagtcagggatagacaagccaaatcaccaaatgagcattcaacggcaccaattcctatggcagtgcaatggctaacaccaacaaggaagagttcatcagttgccaagcgaccagcattttctttcagcaaacaaccaaaaggaaaagcagcgaatcccgcacaaacaagccaaacaaatgaactcaacagaaaaatgaaagccttgtcgccaaccgcaagtggatcaggcgccaaccatcattgcgtcgctacattggccagaagctcggactcaacaacagtaattgataagggcagtcaacagaattgcccaaacatgagctcggcaacaattagtaagacaccatgccaacagcactcgtccgagaagacgttaaactaa

SEQ ID NO: 78406 - DNA, 957 bp, Heterodera glycines
atggtgtttgaaatagcggggattttacattaataaataatttatggcgtaatgtatttaataatatatacgattcaaaaaaacgtttgttgattgtaaacacaataaataatttgaatatttgctatgtaagctaattaaaataaaacattttttgcgatatttttatgcaaattttattaatatatttgtctaattcaattcttttttagcattgtatttttaaagtcgcaaaatctggaagtgagccgacaatttcaaaaatttcgttcgtcaaaattattgacaaattgcaacaattttaccaaatcaggtttattttttaattaactttttttccagcccttaggcttgggtaatgatttatgagagatgtagagagtaaaaaaaattgatttaaattaactgtttctcatcccttttttttgatacagcaacaaaattcgatttgtcgctggccagttggaccttggtaacaaaaagatgacgcgcctgtggacattcagtcgggcgctgcactgaaagatgcgacgtccgctttggtcggcatcggcgtaatattcgccgtcattagattgtacgaaaggcactataaactcaggtaaaatgcctaaaaattaagttttacggggaatgggaccaaaaaaaaaaaaatttataaaaagaaaaatgctgctaaatttcttgcgaatttcaggcaccacaaagcaatgaccgcttcctaaccaactcggactctccaaaatgtgtatccacataattctcttccagagcctctcagtttgctgctgtgcaattacagcgacattttgatgtgaaaatgatttttaagcgattataaaatttgatttgaaattctaccatttttgtgtttgattcaaatataacgtaaaaaaggcatatattcaagagcggaaaaaaactttgtaaattgaacgacccaaaagacttaaaaca

SEQ ID NO: 78407 - DNA, 2009 bp, Heterodera glycines
atgtttttgagtggaaaggatgatgagtcctcgattacggctattgatagaaaactttggcaaggaaaggtcactgtaaaaatttctgacttagaaaaagttcaaaatgacatggggaaattggaagatggagtgaatagagcttttcgccacttgaaccgttccttaaaccaaaaagtcacttgggtgaatgatgttgtggctaatacaaatgccaattttgaaacgctgaaggtacaattcgagaccctaaccgaaagagtcgatattttggaacgtgacaatgatggggcgacttcaggtggaacttttagtcttaataatcaaaacagagcatcgctcgcaccgtttgtgatgccaatgggcaatgcacagcccaaccaactcatgccgaatcaagtgccaatccagcaactgtcaagcgaagacgaagatgacgggccgactctttttggcctgaacatgctaatgagtggaccggcagtagggtcaggtttggaaatgttcagagaagagtcagtttttgcatttgacgattgggctgaacgttttaaggactacctttctgtgtcaggcaaggcttacactgagcgcgaaaaagtcaccagactcaaattggctctgaaggacacgccactggcattgtttaaagaattattaccagcacaaacggacactctcgacacagcactgagtgaacttcgacggaaattggactcccctcaacgtcgggaaattacaaagcgaacattatcattgtgcaagcaaagggaagatgagacagtggcacaatttctgaggcgtttaactccgttggtggatgcgacaaattcgtcattgaccggtaattcgcgaaaagaaaaaatttgcgaagaatttttggatagattgaaaccaaatataagctttctcattcgtttggtgggattgtcacgagcaaaagatttggacttggtaagagcacaagctgaggagttggaggctttactgctgatgagcaagggtgatgagacagtgcgcctctctgacgtagtcaacgcgctaaacaatcagtcatcacagtcccgttggtttacagaagcgaacctgaacaatgactttgctggacagtgggcatcaggtaacaatgtcagaggattcagttctttttcaggatcggatgaacaaacccagcaacaagggggaggagaaggacaaaatcgatctcgcaactggggagaaagccatcaagaacaatttagtcaaagaaattggtcaagcaatcccagatgcgattattgtgaccgcgttggacatgtggcttacaactgctatcaacgccgtgccaatttcagtcaaggaagatggtccaaccaacagccacagcaatcgcaaggacaatggcaaaataggcagagttccgttaacatgatggatgtcccaagttcctcgaatgcttcagctgaatttttcaaaaacttggctcaggctttgctagatcttaaaattcaggagcgtcgcaattacaaagacgaagagccgagatccggagcaatgaatgcacttacacacattaaacccgaaacggaagtaaaaaagtgtcaagttggtgaagaactgtcaaaaaaaatcccaagcctgtgggccggaaacaaaagcaaaccgtcttaaaacagcaaactgggaacggccaaatgtgcgttcgaaagtcgcctccttaatgcaatttcattaatgcttattggaatgactttgccactcactgctgctgttaggcctaatctgccgatgtctccttgtctatagcaaaagtctggcaatttactggtgctctaataccgatttgtaggtaataagttattcaatccatgcccttcgctttaagaaatatgttcatgtgaatttgaacattgcttgatttagaattcattatttaatttttttttgtgaatgattccgaattcaaactggggcccaggattacaatgtaattgttggttctgatgtcatagagaaattgcccaaataaa

SEQ ID NO: 78408 - DNA, 541 bp, Heterodera glycines
atgacaaagcccaaacaaaatgagaaggacgggaaaagcgtgaagaaaggacagcgtgaaaaggccggacaaaagacgacgaaaacgatgacaaagcccaaacaaaatgagaaggacgggaaaagcgtgaagaaaggacagcgtgaaaaggccggacaaaagacgacgaaaacgatgacaaagcccaaacaaaatgagaaggacgggaaaagcgtgaagaaaggacagcgtgaaaaggccggtggacatggcgagaaggccggcggagatggcgacaaggccggcggagatggcgcgaaggctggcggacatggcgagaaggccggtgaacagagcgagaaggccggtgaacagagcgagaagactggcggacagggcgagaaaaaggccgatcaaaaggaggaatgggcgcatcaaacacgatctccgattgggtacagcccaaaatctagcaactaaataaaatgttttcttttcaggctgttccaaatacgattgttgcaactacgcctgctgcaaatatgccaaaaaaaggtggcaa

SEQ ID NO: 78409 - DNA, 508 bp, Heterodera glycines
atggttgataaatgccaccctctttggcgctttaaggagcccgtcaatggcgaagaatgccacaatcgacagccatcggcggaagagtgccaaaacaacggcgtcgagacggctcacaatcatttatctccgactcggaaccgtacaattatcagcctgaacggaaacgacgactcgctgacctcgtcgaacaccaacaacgaaacggggcaggaccaaaatggggaagcacagcgccaaggagcgccagcgttttccattgttttggaccagcaacaagttaaggtagtacgggtggtgggattgagttgttactttttggtttgttgctatttaatttcatttccaggatgaaatcaacacattgcgccgatcgaaattttccactctgaggacaacgaaaatcattgcccaggaagtgcaggattaccaagcggagaacaatttgtacgagcaaatgtgcggctacaaacggttgcgacaacagcaccacaaggagttgaagcag

SEQ ID NO: 78410 - DNA, 52 bp, Heterodera glycines; identical to SEQ ID NO: 52019

SEQ ID NO: 78411 - DNA, 1132 bp, Heterodera glycines
atggccgagcgtgaacgccgggcgccaccacacctgaacgtcgcctccaacttcttggtgagtttttgcatggaaaaaaccacgagttttggttcacctatgttgataagcattaaacagtggtcgaattcagtgaaattgcggtccaaaatttagcatatatgccaaaaaataccacaaaattaataaaatggtacacaatttttaggcatataaacgcaaatttatagggcaaaaatatgggaaaatgtttgttcagctgtgctggccaatttttgaatactgatatgatatccgctgatgccccccctgcctcaaaaaaaaacgaaaaatgttacaaaaattattttcacctcggcttaagttttcaagtttgtgctaaactcttgtatctccaatttgttatgcaaatgaaattttatattttccaatttgccaggtttacatgtggaatgtgccggtgggaatgcgcgggcgcgagctcaaggagaaactcagtcagcaaatcgggccggtaataaaaagggatggaaaatatttaaatgattttgtccccattttgcaggtccgtttcgttgaaacgttcgaggtgcgtttatgcgctttggggttgggttgggctgcagcaaaaaaaaaaaaaaatttgacagtttacaatcgaataaaaaaaaatcccttttcatagggaaatttaattgttgtgccaaagattgtattcggtttagaatttaaaaaacaaaccgagttttatctatttttttaagaattgaactgcatatgttctgtatcgggtgcattacgatccccacatcgaaaattgaaaaaaaaatttcaaacaaaaataatattaaatttaaggctatattattatttattcaaaattgttttttattaaaaaatctaacgatatgaattttttttaatttttgggcgaagctgctcatttgaaatctctggtgcacattgctctctgtataatctgtcggtgttttaggcgtggaattacagacaaagtggccatttgatcgtcgagtttggctcgttggcttcggtggaattttttgttgagatgatggccgccgatcgcattccgtaccttcacaagcccgtgggcttccaggatctcatcacg

SEQ ID NO: 78412 - DNA, 1212 bp, Heterodera glycines
atgttagaattctcttgttttctcgtattattacattattcagactttgtgctttcgaatgataccaaccagatagggtttgtttgaacatgaacaaagttattgtataaaaacccgggattgtccaattgattggactctcataaaagtcgattggactcataaagtgcattagagccaaaataaacgcattttttgggggtaattttggcggttcattcattgttcataaatctgagagtaaaattcaaaaaaataaaaaaattgccaaaaatataacggtcattcaaaataacaactaatgcaattttgtcattattaattgtcaaaagtcaagaactgttttaggatacatgacttgtgttttacaaaatgttttcatgcgagtcgcccgaaacttttgtttttatttttgctcttccgtgcaatgattttttctccatttttcctaaattttagcaccggggcagaaaagcagggatttgtagtagtttttgcgccgaaaactgaattcacaaccagtggaattttttaaaaaatgttttttcttgtcctaggacactcatgcgcacaacaaatgtcgtcagttggttggcgatcgctatgacgaggagacggacaccgtgaccttcaaggcggacaagtccggtttttctaactataattggatctacgaaatatgaaaaacgaaacttttatgagggtataggcatatttttttggcaaaaatactcctttcatataattgtacaaactggaccgaaaaaggccagcctttcaaattatcgttaatcattagagttggtcgggaccgtgaccaaaacacgtaaaactgagtaccgaagtcacggttttggccagtttgaccatgaccgggaaattcccggtttttcaacctcaaaattcccggtcccgacaaaccctaataattatcacatttcatttgttaaattttaaaatttttcgttactgaaagcaattttttaaaataatctcagctgccccctgcggcgtcagaacctcgactacatcgcatatctgctcaccgcagtgtaccatgagtcgcaccgagttgaaccatgggaggcgtcgatggtggaccaggttggacggtggtgatgatgggcttgataaaaaagacaggaatgtgggggagtaggcctctctgccagaatttttaaaattaattttcagacaaattcgttgccatga

SEQ ID NO: 78413 - DNA, 338 bp, Heterodera glycines
atgtcccaactctaccgtaccattccaacggagtttgatgttaaagagaatacggtagcaacggtgccgaaaggacgtaagagaaagagacggtaagaattggcagaagaatgaactctaagaaaattcaaaaagatgttaagttgttttctacttctaccagggaatttcttaatctaatttaatttaatttaatttatcgagcaaaccaaaggcacattagtgctcttacatggtatcaaaaagaaaacaaataaatttgatcaaataaaaaatacaaaatgaataccgtaataaaatatataaaaataaatcaaatgttaaaaattcacaggtga

SEQ ID NO: 78414 - DNA, 1341 bp, Heterodera glycines
atggcttaccgtatatacatttcattacggtgttaccgtagggcggtgctaatcgaaattttggcgacgcgcataaaccgacaaataacggcgctgaagcaggcgtatgagcagttggacagaaggcatcagcacaatcagctggaggaggacatcaaagcgaagacgaagggacctttccaaaatctgttggtgtctttgctcagctgctctcgcgaagaaagtgcgcccgcaagcattgtattggcacacgacgtaattaagtggcaaattggaaaaaattaataaaataatcaattagcacatacataaacaacatcattaaatggcaaattgaaaaaataaaactattatttcaagaaaacaaataaaataatgaataacatgaaaaatgaaagcaaataataaaaaagaggccatgaaactgttcagagagggcgagggccgacggggcgttaacgccgtggtgttcaaccaggtgtttgccactcgcagcttcgcccaggcaaacaaaacttatcaaagcctttgccattaccagacaataattaattaaaattaatatataatcaattatttatagttgaaaatgtttcacagttttaacaatatgattgcaaataatttgttaaaaatttcagcttcgggaaactttcgagttttaccgacaagccgcgcaccacgagattgaggagggaattaagcaagaattcagcggtcacaacgaaacggggtaatgggagaaggggcgggaaccaattagtgatgatattgtataagagaaccaaggggagacagtctaattaggctaattggatccaatgtttataattatttggatttttaatgtcatttgctgttaatgctttcatttccagtttcttggcactaatcaaatatgtccgcaacgcttctgtgttttttgcggatttattgttcaattcgatgaaaggtaaatttaataattaatggatcaatcaatatttattaatcagaacaatttacttatttaactgcattaattatttattaatctctctgctttttcagggctcggcacacgcgactcggatttgattcgtctggtcatttctcggtctgagattgacctggctgacatcaaagtgctttcaaatttaaattctgttaattgaatgttcaagaaatcaaaagccttaattaattcttatttatagatttaacaataatatttgccatcccattaagcacgcttttcacacgttgcacaagaagagcctggaggaggcgatcaaaggggacaccagcggagcttaccgagacgcacttttggcattggtcaagggcaacacggagcagtga

SEQ ID NO: 78415 - DNA, 418 bp, Heterodera glycines
atgcatttgattaacttaatcgccctctttttcatgcttttcggtaagtcaattgtttaaattcattagcgggataattgggtaattattttgctaatcgtttcaaggcccatccgtccagcaatacacaaaaacgccaacgaatgaggacaaagaagcggctgtcaattgtcacaacaaattccgatcgcaattagccctgggcaatgccgacaataaattgggcggcaacaaaatgccaaaggcgggcaacatgcgcaagtttgaatgggacgaaaacttggccaaacttgcggatgaatgggccaacaaatgcacattatcgcactcgtggaacggctgggcaggcgaaaatttggcaatgaatggcggaacattttcgaacagttcgatacaaattgataattgtggctactaa

SEQ ID NO: 78416 - DNA, 3521 bp, Heterodera glycines
atgggccgaattggagtgggagctgccggcatccaacggcggggcaaaaattcgtggctacgaactacagcacaaggaccaacattcgaacgaatgggtgagtttatggagtatttggtgtgtattgtaattattgttgagttttttttctcgaagtgagcagctcgcttcccacacccgaaatttaaaaaaaaatttagaaaaaaacgaaaatttttataaaaaatacaaagaaaattttcatagcattaggattatgcgttgaatatcctaaaaaaattgccccgtttttgtgaaaattcaaaatttaattttttttttttttttctttaggttacatgcaaaaaatccgcgacctggtcaacaaatttcaaagtgcaaaatctgagcgaccggggcgagtacgtgttccgcgttgcggcaaagaatgcggcgggttggagcaaaccgtcgccccaatccgaccgaatcaaattgcgacaacgctatggtccgccgggaatgccaattcaagtccacgcacaatccattggtagagacggaacgccaaaaataatatttttgattttttacaaaaactcaggtcctaattgtgtgacgctcacttggcaaccgccagctgaggacggtggctgcaaactggagggctaccttgtgcagaagcgagaatggggtcacgaacaatgggagatggcaacaccggatatggtacggtatttccatatacaatagtcacaacgaatattttaatgggtcccaataaaaagatttttttattttaattacaatttcgttaaaatttcagtgtccattgaccgagtttttggtgcccgggttgcgcgagttccaggcctacggtaattgtttttaaatgtgtacttcactttctcccgcgtcgtcccccccccttcgaaaattttcgtgcgatttttctaaaattttatgatgaatcattaattttttttttaatatttaatttgttagtaggtaaacaaaaaaattttttcaaaaatttctttttgaagaattccgtgtcattgcgctcaactcgcacggacgcagtccaccgtcgttgcacacgttgcccatcaacatcgaggagacggctggcgcttgcccgaccattgtgataaagtcagcagagaaatttcaaaaaaaaaaaattagtgcctcttctttttttgatggtgacacaaatttaaagacatggcaaaagaaaattattgacaattcaattttttcgattaaataaaaatcgtgaaaggaaaatgcgtcagtgaatcagtgcaatttcgaccttttgtaatacaatacttaatgctacagtagtaactttattataaaaatactgtattactggcaccttttccactgacgcattttccaggagccctcaaaatattactattttttaaaattaattttcatttaaatatggcacaaaaatttccagcaaagaagtgtctgtgcagaagcccagtgttgtgccgttgaaatcgcagcgtgccaacgaaaaggaaaaggacgccacgcaaatccgaactcctaaaacggcacaaccttcgtctgcacatggcatcggaccatccttgggtaagaaatgagtttggatggaaaatcttagataaaaggctttctttaccagttcggcatttagttcaaaaacgattatccgcttgtctctttttcaattttaatttaaaccgtttcattttttataatttttaattagttcaaaatagttaaacattttccacggacatttttaatttttaatttaatgataatttaattttaaaatatttgtactttaattatattatttcttcactaaaaaaggaaaattaaaatttacttttttatcaaattaatattttcatttatttaaatatatattttttaaattatgtatatatttataatattaaatttatattaattttttaattttttaaaaataattatttcaaactaaagaaaataaattattgttttttttttcaaattaaataattatattttcacataattttatatagaatatgttttattaaaataatgcattttgtttcagactcatcagcaggccaaccattgtcctccaccgcccgtcgtcgccagccgcgcagaagtaccagaaaggatgccattgaattgacccccttggacatacagtggttggttaaacaaaacaaaaaatgaaaaaaaaaaagtttttaattcattttattttttagttgtagcaagaacttgacgctgccacgacccaaaaatacggtaagcaaattcggttttttttaattatttattgggaattttgagaaaaattattttttaaaatttttataatgaactgaaaaaaaaattttttttaatgatgcatatttttgcattttataaaatatttacaaatatttttttttgattttttttcaatgattcctcttctgttgatcatgtttccgctaaagcatcaatattcaaaatttttttctaaaattgatcttttttctttgtaaaatttttgctttaaattgtccccataatcgaaacaaaacttttaaatatttaatgttttaaaaaatcatgaacaggagcggaccgcgtccggtggcggaaggcgacgcgttggcagcaccgcggcggaccggccggcacaggcggcagcagcggcttacgctggggacgaagaggcaccgaacgaggaagtggccgacagtgagggggagcagcagctgctcgacatgacgacggttgaggtgggaataattttgaggcgggagggggtggggccaaattttgcttcttgccactttttttctctgtgtttttttttaattttttttggaggggggggggtggtaagatccaatggtgccaataggcagacgccccgtggaaattttgcaaaattgaatgcaatttgctaattgattttatttaaaatttatttagttttataattaaaatttttgtatttttttttatttttaaatttttaaataacatttaattaatcaactttaattgatttaatattaattaaacatgcataattatcattaattaacgaatttatgataacaaatattattatttttatccgtttttgggtatttataaaatccaaagcttttttagactcaaattttttgtgtttaattttttattacaaaagacccagaaattaaactttactctttgttgaaataatgagttaatattttccaattttttaggtgcgctgcgcggacgaaccgctgctggccaacgcgccattcaatgtgccagggcggccctacccaccggattcactgtacaccacctacaactcaatcatgctccattgggcaccaccgttgcgggacggaggcacgccgatcactgaatacgagctggagaaacgcgagcatggcaccaagctgtgggagaaggccgacaccaatgccgaccccaaagccaacaccaaaaagcagtgggagaaggacgcatttgccaatgtgccggacacacgattcaag

SEQ ID NO: 78417 - DNA, 492 bp, Heterodera glycines
atgattagggacaggtatcgaattatatttataccaacgatcaaagtatgtatttaaaatagcaaaaaattgacgaaattattgaataaaaatgaaaatttgcattgcaaattttaaagaaatcaaaaaatttggaaaagaaaaacatataaatttgttgattaattttagaaaaatttctttttttatgtggatggattttacggaggtttttaaatgcatttttgaaaatgagcaaaaatataacaaaaaattttagttaaaaaataaagaaattttagtggatttgttggattgattcgaatatgcggggttttttcttctcaaaaattgtgttcatccttctgagtcgcatatttacgtttattcaatactttgtttttctttacatctcaagtcagtaaattgaaattttcagctgcacatttaattaacattttcattgaattctgtttaccatttgaattaaaaattatatgccattagcgtaaa

SEQ ID NO: 78418 - DNA, 1183 bp, Heterodera glycines
atgaattcggctgcgctggcactaacagattccgacctaaatccaggccgtggctttctaaaattcattacaattatttttggattgatgctgtgttacgagattctccaacaatgttatcatgctggtggactcagcctattagaacgccaattaattgcaaatatggttagaacgcgaacgcctcaggcaattaaatgtaaagagaatttgcagggggaggggggggggagggtaaatggaaaaaccctaacccgaatattcgtgatgttttttacaacacaaaagcggcatcgcgagggggtagtactgtaattcaattaaaatatttcatttgagcggcgattgatgctttcaatgcgttggacgaaaaattttatgtggcgaatgaggaaggcaattcttgcccaatttgtaaagagattgtgcccgggacaatggccaaaccgttgtcatgtaatgtaagaaaaaaaacaaaaaaaatttatttatttaaatttaaatatgcaaattttagcacattttccacaacgaatgcattttagcatggtattttttgtatttgtacatttttaaagagaaaatcatttttattaaggcttagcaatcatttcacatgtccatactgccgctttggtaatattttaaataattataaattattcgatttttaaattattaaattgggaaaacagttttcctgaaatttctttaattgcctgaaaaattttgttttatatcaattcctgcagtaatgctttaaatcaagaaatggcaacccaaagtgccttcggcgtttcgtcaaatggccaagagaatggtgccacaaatggaaacggagtagcccaaagtactgctgctgtgggaaacccacccgaagtggtcattgatatgccatcggatgggcaaaacggtggaaacactgttggaacggggacggacggtaccgaaacaaatcgacacaacaacggcacggcaaatgtgggataaattggtggacgaattaagcagatggggtcgacgaacgggtgatagattgacaaacagtgattgttcattgacaaatgacaaattgttgtcatttgtcaaactccaaaaaaatgttagagataaaaattagaaaattctaattttttgtgcgctgcttaatcccttagaaatagcttaaaaattcttttaaaca

SEQ ID NO: 78419 - DNA, 656 bp, Heterodera glycines
atgaatatatttctagtactattcttgggcacttcgcgacagtgcaaaaatggtgtaaaaatggggcgtttcgcgacagtgcaaaaatgggcacttcgcgaaacgtgcaaatttaaccgaaagagaccgggcctcatcagtacggtgtctctttgggttaatttatttaaattaattattatttgtgtttcggccctaaaccgtatacacacaaagccacagcaatcaagcaaagcaaaataaattttattaagcaaactaaatattttatattggtttttaatttaatcttttaactaattatatttgaatatgattaatcaacgtaatttgttagtagcattttttaaatttattttgagtttgcaaggcttcaacatttgcattattctgtgtagaatcagttacacaaatacaagtctaaacgttttccattggctaaacaatatagcaagataaggggaaggttttcttggcctttgtggatttctttctgcttcccgtttgcatcctgaaaacagatcttatgaacgtggtgatgttttgttagtcgttcaaaaagatcgaagatatattcggttttaaaatcttcttcctgtataagcatttcaccgccgctaatggaaaatgtcaaggggaacaatgccgataataaa

SEQ ID NO: 78420 - DNA, 248 bp, Heterodera glycines
atggaaatttggtgcaaagtggaggaaggaggattagtccttctgggaaagtctatctttactttgtgtgtttatttaacgggtgcaggcgcagagggtaagttttttgggccagaggtttagtttgaatattaattgttttaggcgtgtacatcgcaatcataacgggacgtggcagtggggattgtgctatgagcataacccgcacgaacaattcggctggctttgaggtttattacattttttga

SEQ ID NO: 78421 - DNA, 635 bp, Heterodera glycines
atgaatagcagtgaagaaacaacggaaaatgttgggatgggcggaaataaggacgaacggcagacaacttcaaaagatgagaccgacgaaagcagcagcgaaaatcaacggaatgaacaacgccaacgacaaatggactgcgaaaaggaggactcgaggtgagcatgggctggacaatgcaaaaacagtcaatgaaaaactgaaaccgaaacatcggaggggggggggtgagatgaatttgaccaccgaaaactaaaactccatgctttgaaacccaagacgaattaacaaaggaattgggctaattgagcatatttgagggcaattaacgcaccaaatgtgtattttccaattaacatttgttttcatttgtccaggttcgaatgcaatatttgtttggacatggccaaagatgcggtcagtttaccagcgacgatgccttttcactacgttttcatcaaccgttccatttttgccttaggtcgtttcgatgtgcggccatttgttctgttggccatgccttttccaatggatggacacgcgtccctatcgccagctgtgccccgtgtgcaaatcggcgattagcaaagacaaggttttccatttttactgaatttatcggaatggacaaccaa

SEQ ID NO: 78422 - DNA, 167 bp, Heterodera glycines
tttctaacggaccgtacacagcagggatgtgccgagccagacaaaatccgattccgattaaatcgccgattccgattatggccaaaaatccgattaattgcgattccgattacgattccgattcggcacatccctggtacacagctcaacagtgttcttcagtctga

SEQ ID NO: 78423 - DNA, 1318 bp, Heterodera glycines
atggtgatgcgacgactacagcaacaacaacaacaacaacaaccccaagaagtgcgcgaaattgtggttgaacaactgctggacccgctgtacaaggacacaaggtcggccgccgccttcaccagtgtggagccgctactgcgtgaggcacagcgagtacatccaacaaggggcatacgacgggcggaggtgcgtcgctatctggcgcgacagcgagtgtacacgctgcaccggcgtgccgttcgtcggttccgtcgcctgcccacgctggcgtccggcctgcacaccgactggcaggctgacctggccgatttcgtctcgcttcggcgcaacaaccgtggcaatgcctatctgctggtgtgtgccgacacgctgagccgccagctgtttgtggagccggtgaagagcaagcagtcagtggacatgatccgcgcttttgaccacatattcaaacgggccggctacgtgccatggaagctgatgacggaccagggcaaagagttcaccgccgccccagtgcagcgctttttcaacaaaaaagaggtgcaacaccattgcatgcacacctcaccccagtggcacgccgggattgcggaacgggcaatccgcagcatcaaggtggtatagactagacaaaaaaagaattgttatttacttttactattcataggagcgactgtatcgatacttcacccaccgtggcacccagtgctggaccggtgtgatacagcagttggtgtcggcgctgaatgcgtcaccgcatcgtgccctgtctgggctacggccccgggacgtcaattttgcaaacgcggagcaaattcgacgccaacaactgcagcggttagccaacaacgtacgcaaaaatagcaggcaggtgcggggacggaatccgcggcctcctcgcttccacgctggagaccgtgtgcgaattgagaagcacaagcatgtgttcaaaaagggctacttgccacgcttcaccgatgaggtgttcactgtgacagaggtgcgagactcacgtacgcctaccacgtataaattgcgcgacgacaccggggagctgctcaccggctggttctacgcacaagacttgtgccttgtgctcccgcccccagccccaccacagcgcccaacacaacaaggggcagaggcatctgctgctgctgccgccgcagccgccgtcgtcggtcccgtttatgacattgaacgggtgctgaaaagacgacggcaaggacgaaatggtgtggagcattgccttgtcaagtggaagggctactccgcagcgcacaacagctggatccctgctacatcaatcatataa

SEQ ID NO: 78424 - DNA, 1146 bp, Heterodera glycines
atgtcctcatcatcctccttctacattgtcttaccgtcaaacacacaggttgagggcaaccggaccaactccttccgcgtacgtttgccacgcaagctacagttcggctcacagtggagcgtggggttggcagtgctgctgtacccgcactcttggccctctctgggcacaacggaggagcaatttgtgcgggtcgaatggcagaccggggaacaggtgcgcatccccgtcccggccagcacagtgcgaaaccccagcgaactgctcaccagtttgcatcgcgcattgggtgaaggcagtgagaaattggccactgagctgcgccaaatccagctcacctaccaccagctgatcagcgaagccgagtcaagtgccaaaacacaactggaagcggcaatacgtgaccgtaaaaaacagcagcaacagcaacaacaaaaacaacaacaggagaatgcgacggagaagaagcaattggaaaagcgtgaaagtgcaaaacctaagcctaacgagaaaggaaaagatgatgatgatgataaagaggaagaggaatggaagcgtgccgcgtacaacagtctttaccgtcaatcgctcgacaaattggttgtggaccgaatgagtgaggcggagcgtgtgcagcttcaacgacacctgccagtggggctggagctgtgggtgcagtcctaccgcaaggcacgcctgtcttgccgcttcaactttgacgtggagcagcagcgcttccgcctggagcttgaccagtcacggatcagacaggtggagctgtcggatcaactggcctacatccttggcttccacaagcgccacctgtctgcaccgctgaacgtggcgcgctaccagccggacatgaaaggcggtgtctcatccttttacgtgtacgcgccgggactcattgagccggtgatcatcggcaacgtgtgcgccccagtgctgcgcatggtctgcattcgtggcgcccaaccggacgacatgatcgaagaggcatacaccactgtacaataccatcagctgatcacaaaagagattgccgagattttcatcgagatacggacccccaccggcgcccttatgcccttccagtatggcacctgtacactcacactacattttagaaaatcacactatttctga

SEQ ID NO: 78425 - DNA, 1014 bp, Heterodera glycines
atgaagcacacaacccgcatgctgctagtgccggaggaactgtaccgctccttgttggccaggagctcggctcctgttgccgacgcatcctctgcgaggggcggcttaccgcagcataccacgccaattgagcacacggcaaagcgcatggcgcgcgctgcacacagcggcggcatcacccagagcacggatggcgtatctccggcatcgaaacaacaacaccttctgaacgatgacgaacggttgatccattaccaacaggagttcaagaggttcaaaaaattgctggaggatgagcaggagcgtccagcgcctgttcgtctcacccaactgcccaccgacgaagcctcgaaggggctgctgcgcgatgcactttccgaggcggcgcgaacaattcaacaacaacaacctcaaccaaaacagccggcgctgcaccaacaacaacagcagtcgtcgcagtctgattcgtcaacaatgaggcagcctccacgtcgcagacaacgaccagccaaaaggacacaccgtacgacatcagcctctacggatggcgccgaagctagccgcttcccgtcatcgtcatctgccgtctcattgttgacacgcactgataatggaggaggaggaggaggagctgagacgactgagcgtgaagacagccccaacgacgaccgaccccaaaatgtggcggcagttgaccccgcaaggaaaggacagcgggaagaagcggacgtgcaactgcatccatcaacatcaacagcaccagcagcagcagcagtcttacgtgacactgagcagaggaaacgacaagccattgactatgcgttacgcaacgcgggcacgctgggcatcggagatggacagcaggtgtaccggctgatgcaaggcgcgtaccgtccgatcaagaacagcgatttggatgctttactcacttttcattttgctgagcccaaaccggagaaggcaccgcctgggtacaaaacatttattggcaatgctcgacaagacccgcgcatg

SEQ ID NO: 78426 - DNA, 1230 bp, Heterodera glycines
atggacacgtcgtcacacgaatctgatcgcaaggccggcgatggtgctgataatgctgatgcacctgcagcatgccaacagcagcagcagccgagtttgaccgcggacgaaccgctgttggtccgacagccaaaggaagcacctgcgcaccagctaatgaagaaagaggaggaggaggagaaaccgcgacaggaaagcgcgccacttcctcagcccacacacaatgatgacgtcagcaaatcggtcagtcagtctgttgccgtccaccacaatgcacagaacaagaaattgtcaaaacaaaacaaaaaatcagtcgctcgtttgttaagatgacgaagctgagcagcgatagtaatgatgaacatggcggtggcgatggtggtgatgatggacaagcgttgccgaccgaggatgacggggtgggcggtgctcatctcccgcccctcttgttcatcgatgaggaggaggaggaggagagcaccgagtcgcgcactggggatgacgtgggccgagacggtgacggtcagattttcactgaaaaagtgaagcaggaaggggaggaggaatcaaccgacggtgacgttgacatggattctgtcagccatgacacgtgcagaagcagcagcaacagcagtagcagcaccatgagttcgtcgttgttcttgctgcatgactgtcatatgcaccaccactacaaccgccaccaccaccacgacaacaacaactgcaacagcccgccgcgaaaacaagcggcgacagagctgctcaagcttccgctcatcgactatttgtgtgggctgaacaacgggtgcagtgtgagagagctccacacgctgcttcagaccaagagcccacgtgcacacatgttggcccatctgcaacagcgctgtctgctgcgcaccgtccatttgcggcccgccgagcgcaacattgcgctacatgcgcatgccctaagtgccctaagtacaaacctgacctttgcatgcggcggttatctcaacctcacagtaataattttgtttaaagaagcgccgcccgcattctgtttgtttttttttgcctaggtgcgtcagtacttctatgccaaacacggtgtccgtttgcgccacccaaacctgccggcgctggttgagcgcggtggtggcgcacacatgtcctattatccgctagagtgtgtgcaggtgcatgtcatggtggcatcgcccacggaccccaacgagacggaggaca

SEQ ID NO: 78427 - DNA, 1529 bp, Heterodera glycines
atggtcaaagaattcgagaaggtccgcgaccaccccgacccgagtgcgatgctgttcacctgcatggactcaaggtgtgaggcaggctgaatcggaatcccggactttttttgggctaatttgcaatttgtttttttgaaccagtaattttattcatattaataattagggatgtcaaaaatatgtacaaaaagtggtcaaaatatgtacataaatatgtaaaaaaaatcccgaaatatgtcccaaatatgtaaataaaatttttaaatggttatttttttggaaaaaaaattcttcggaaagcgtgaaataggcacaaaatgccataaaaatgacctaaataggcctagaatcacattttagtattttaaaaattagtttggttaatttttattttcacaagaaattttataaaatttaaaaaattctcaaaatatgcaataaaaatttgaaattatgtacgaaaaatttgccgaaattttggatttttttttgaaaatttccgaaaatttctgtaaaaaatccacaaaatatgtaaaaaatgtatgaaaaagtccgaaaaagtccaaaatatgtaccagatatgtataaaagcccgaaatatgtaaaatatgtaaattaaactcccggtttttgtttgcaaacacaaaaaagaaagtgtttttcctactaattagagcatggagaatccaggaaaaaatatgtatttacataaaattgacatccctattaataattttttgttctaatttttatgcgcattgatctctcatccattgaaatgtctttgcttttcgtcctcaggttacaaccgtccaaatttatgggtgctcagatcggcgaattgtttgtcgtccgcaattccgccaatatggtgccggtggcaaaaagttttggtgtgcaattaattaaatttttctaaaatattttaaaaaagtgatttaattgaggcgattccggcggagaagtgtccgtcaccactgaaccagcagcactcgaattggcgattaggtgcaaaaacagtttagttgattatgttgtatccatgtaattaaaaggcgtggaaatgtccgacgagtggtcatttgtggacattccgattggtaagcagcggacggactgacaaattagcccagaaatatttgtgaaaatagttttttcaaagggtgaaatcattttcaaaattcttttggttaaattccgccgattggcccattcgccattcattcattttccaataaaatttcgctctaattttctgctcgttcagcaaggcgatcaacacactttacgacctttaccatgggcgtccgtttgacgccgagtcgccgatggaccattggctgcgacggaacggacaccaaagtgtgcagaaattgacccaactgctgatggcggggcccggaacagagttggaattcgcatcggagaacggactgatggcattctgcgctcacattgaccgaacggaccaactgagcgcggtggacaaactgtcgcaaattaacacacttcaggtgggcaattga

SEQ ID NO: 78428 - DNA, 968 bp, Heterodera glycines
atgccctccttaagcggatcgaattggtggtgggcaccgggccaaaaagcagctgaggaagcagaagcattcagtgccgctgctgctggtcaacccaccaatgagcagatgcaacaagcggacaatgagcaaactgtgcatttcgtggccacaactgttgaagcaatgctttcacaaattccgggcatttcccgtgacattttggcgtcgattaatctgtcacaactaatttattgccaaaattttgctgcgatggttggcaatttattgctgcaaaattatgaagagaaaatgccacagaaaattctcaattcactgactttgcccaatgaatatttgcaatattttgagaaaatttatcgcttaaaattattaatttggagaaattggcggacaagggacagatcggaagatatgttttggagaaaaaactgctgaatttgcgaatattcgccgatttctttctgactctgtccaacatttgcaagacgaaacagaaccaaaacaacgcattggccaacagagaaattacgtggataaaattggcaaattcaaatggctttttggagatttgttttgagcagttttacaagcaaatagcacaagcaattattgaacagggggacacagaaaatgaagtgatcggtgtgatttgattggcattttttggtaattagtttagccaaatgttgacacattttaactagaatgccacgggaccgggacctttttgggttgaaaaaccggaatttttggctgggaaaaccgggaaaaaaccgggactagtcccggtcccggtcaaaaccgggaccttggtactcagttgtccgctaccaggtcccgatcccgtggcactctaattttaacaaaatatttgattgtattgtaaattaatataaaaatattatagggtaaaatgagcagcaaactaaaattcataacatttaaaaaagttctaaataattaaa

SEQ ID NO: 78429 - DNA, 458 bp, Heterodera glycines
atgaacaaaatatttgccaacgattctaaggctgtttttgaggatgatatgcatatcggcgaagccttcgatgaagttttcaaacagatatacgagcaggaaaacgaggtatgtaaattgttactctttgttggtcactaaaatagtatttttgatttaagatgccattcgacagatgtagagaaatctggaaagaagttgaacattctgaaaaaacgcttgtccatgaaaccaatcatttgttgaaaaatcaaggtgttgattttactatttctggtcttttaagttttacgataggtcttcaaaattccatcgaaaccgaaatgaaaatgctcaaggatgctgaggcttctttggatgctttgaagaaacgtgaattggagttggttcgccattacaaagacaaacaaagcaaaatcctgtcttcgctggaccatggcatgcaaatcttgatttaa

SEQ ID NO: 78430 - DNA, 956 bp, Heterodera glycines
aaccaaaataatggctttttatttcaaaagaataatttattatttataaacatataaagtcgtataactaaataacttccggcatacttaattataaaggtaaaacatttttggaaggtcacaccggcactaatcagctgggaggtgtcttcgtcaacggaaggtgaccgacccatcggcacaattcgccactaaatgcctttcccctcttcagaccccttcccgaccaaattcgccagcgaattgtcgacttggccgaggatgggatgcgcccttgtgacatttcgcgcaatttgctggtaaattgggggggggattaatttgcgatcgcgaagttcgaaaagggtgatcagaggaagagatttcagagaatattcgacgataattgggtgatcattgtgtttgcaaatgttaaggtgtcgaacggatgcgtttccaaaattctcgcgcgtttctaccaatacggcacaatcaaaccgagggcaatcggagggtactgaacggaccgatcaaaacattgacaaaaatggcaaacttaagatcaaagccacgagtggcgaccagagaagtgtgcgagaaaataaaggcgagtttaagacaaacggagaaagaaaacggcgaaaagacatttcgggcacaaaacaaccaaaaaaaggaattatttggtccacaaatccaaggcattttgatacacttttcatttgccatttttcgtttgtttttccgtctttcgtctcgtcctattggttcgttttaggtgtacaaagatgcgcagccgtccattttcgcctgggagatcagagaccggctgaagcaggacaaagtgtgcacggacgagacactgccaagtgtgggtggccaactcagtcccgcattttgtcattgtccctccgtttgttcaggtctcatccatcaatcgggtgcttcgttccatccaaacgcgaaaagaatcaacg

SEQ ID NO: 78431 - DNA, 706 bp, Heterodera glycines
atgtacattttaaaactgacaacaatcatcctcttattttgtttaatttattatttcaatgttatgtcagtgatcggcgaagaaagtttttttttattaatttaattaagtcgaaaaaaataaatgtttattgaatttagtacctaaaaatctaagtttatgccgtaatgtttttttttcaaaatttgaacaaaaaattgacattttaggaattctttcttttttatattaaaacctgattttttggataaataaagtttctgaggttatgttttaattaataagagctcagttaaatataaaaaattaattatttttgagattttttcattttttatttaattatttaatttttttacaggatactcaacagccaccggtcgaaacgacaactgaaatgccacaaactgcagcaggagaagcgcagcttggtgaattgaaaattgtgcccgaattggccgactcaacaccaacaaaaaacaatggtatttttaattaaaataaattttttaaaaacaaaattttcagcgacaaattcaagtgattctaacgatgaatccaatggtatggatggaaatgttttttgcttatatttattatgaatttaataaggaaaggtattgaaaattataatgcttaaatatttttaaaaaatttcgaaaattcatttttctcgttcaaaattatacaaattttccgaatttta

SEQ ID NO: 78432 - DNA, 1421 bp, Heterodera glycines
atgttggaccacataaagtctatcatactaagtgagatgttataccaacgacgtgttgaccaattcaagtgccgacatgacttgaaataccggcttcaaagcaacttggaccttgtcaagcaaattttcatgaaaatactgtacaatgacagtacacaggatggaaaagaaaaatttaccatgtccaaaatgttggtggacggtggcttgaacagcttgaaattgttgctctcatttgctgctcgtctctcagccgctgtgggaggtgtactatccaattttttgtataaaattgcgactcatactgtagtatctctcaaatactgtgagatccccaaaaaacggtgatagattttagacagaaaaattataagaaatgagaaaaagaataggtagaaattttcttggaataaattgctataattctaattgtttttgacagttttgtttttttttaaacttaataaaatcagactaattctcgattgaaatcatttaggaaacaatggcacaaatttgcgttcatttttggctgcctattcatgccttaaaaatgtgtcagcggatgaaatgtaaaataaaaaactgaagattgtttttttgtaaacatttattttaaattatacagaatttttggctaccgtattgaactaaaagtggacacaaatggtaacacaattcttgtccgccttggctggaaggagtacacagttggccaacaactgatcagcaaaagtaactaaaaaatttattggcgaaatgtttttttttaattttgagattaatgcaaatattttcaattttatgttgttattaagctaataggcaatacaataaactcccataaaaagattaaagctttaaaattcaaaaaaatcaagggctttcatatttttctttaaaatttggaggaatttttgattttttttgtgctttacattaaattatttaaaatgattaattaataaaattatttacaaaattagaaatccaggaaaagtaaagacctttacaaaatttataatgaacaattttaaagacaaatttgatttttttttaaatcttaaactatcaaaaaacaattttttagcaaattcaaagtttacaaatttataattgacaattaagcattaatattttttttaatttttaaattcacaaaaataatttttaattttaaaatgattttttctagccaattttaaatttcttcaacaattggccaaaacggaactgagcccgcaggatgtcgtcaatgtgtgccaaaaaattgacaattcggttggcattggcgctgccatggaaggcacagaaagcgcagcaacaaaattattttcggcagttgcagcacattttgaagcgtcaaacaatgaaattcatcaaaaaaatccatctggaaaaggctaattgaaaaaatttaa

SEQ ID NO: 78433 - DNA, 827 bp, Heterodera glycines
atggacaaaatgccaatgcaagtgttggatgcaattgtgccgttcattgacttttacgaccatttgaacggaatcgactcgcgcaaaagcattttcctttttttgaggtaataagttttcttttcaattagggatttttgagtttaattttttcaaatttttaagtaacggcggagccaattccattgcacaacgaacgttggaatattacaacagaggaaagcccagggaagagatcaccttccgagaaatggaggagatcattcagatcagtgcatataacgaaggtccgatttgaaataaattatcggctttttgttatattcacccatttaaaaacattttgcaggcgatggtggacttaaatcgagtcgccttatcaacaaacacctaattgattattttgtgccttttttgccgctcgagagaagacacgtcacaatgtgtttcaaagattatttgcgttcactgaacgtaaattacacgccggaacagctcgaacgacttactgactcaatttcggtaaatgtttggagaaatggaaactcatcatttatttgatttatttcgtctgattattctatttttagttttttccacgtgaagcaccaatttatgcttctgctggctgcaagcaagtcgttcagaggaccgatttcatattggaggagttgataagggaatctcggatgattaataactttagtgacgaactttgacacatctctttcaaactaatattgttttgtttgtattttcaacgggtcgaaaaaattttttttttgagttttctattttattaaagagaaaaattagaactcaataaa

SEQ ID NO: 78434 - DNA, 211 bp, Heterodera glycines
tgggtttttagataattcattaaaatataaaatatagttggtatcaaaaatggttatgggttttcattaaacaaaaatttgatttcgcgttcatgagttcgagtcgaccatcatcgaatccgacgaggcggtcgcatgtggtccgttggtgccgagagtaatcgaactaaatgacatggcaatgccatccaattgacccttgttgatctga

SEQ ID NO: 78435 - DNA, 292 bp, Heterodera glycines
atgactgaagaaggtgcaaatacgacatttacggctgctttgattagcgatggacgtgctgaaaatcagttggagcaaaagaaacccagccaattgcattccctcccattttccatggattttaatgggccggcattggtctccaaattcttccagactgaggatggcgctaatgggctcaaagcagcactgttccgaggacatttgcttttgggcaaaacggtcagagcgccggagggttttgcgttttatgcagtcaaagagagtgaacattcacaatcagaagagggag

SEQ ID NO: 78436 - DNA, 73 bp, Heterodera glycines
atggttcgtttcatcacggcaccgaaccttttggctagtcagcaatcgttgcctatcttgccagatcggacgg

SEQ ID NO: 78437 - DNA, 1060 bp, Heterodera glycines
atgagttggatcgttttttcctgtccaaactgcaatggcctcaactgcatgaggcccgttaactattccaaacccttgatctgtgttcatccttccatcaaaaacctgaccgactatctccaaaaggaacccacggctacaccaaattgtacatcaacaactttgtcatttttgttgataatcatcaccgtgatgctgaccattattttgctggaccatgtaagtctgagcaaaattgatagaccaaatctccattcaaatcagtgttagggatttaataaaatttcgtaaaatattattccctttaaaagagatattttaagcatatttggcgcaattttgatattagaaaatttgaaaatcttttgaatacggtacacaaacacacatatatacaagggatgtcacagaccaagctctgtacgacggttgactgggacaggggtgctaccggactgttttttataagaaaataaggatttctaggcgccgacggagaaaaaattttggaatttgcaaagaattttgttttgaaaatttattcattttataatttatcacattttcccttttgttaccaaaccctgcccccacccttcattatgcccccccccctttcagtttcacaaaaataaataattctggtctctttaaatttagctttggtcaaaattgagccgattatgggacgactacaaattgcgtaaagaacttgtgaaacgtcgcaatcagaaacgtctgtttttggatttttcattaattatttaattcattttaattcgaattaaccaggctcgcgaaaccatcagtcgcaacagcgtccagcacaaccgttgccgttatatgttccgccagtgattacgggggtcagtttattaaaattttagaattgtttaaaaaaaatatttttccaagtgaattagaattaatttttaaaaaattccaggtcaaccgtcaggagcaagtggcactccccgcaatctctgtggcagtggttaccgatgtgccaaaaattgagcaacatgatggagacgatgatcaagaattggacctgcgttag

SEQ ID NO: 78438 - DNA, 864 bp, Heterodera glycines
atgatgccaaataagggcaagcgctccatcgcaaagctttgcctaaacaatttatgtaatttatgaaaattcaattcgatttatttaaaatattttcttagggggtcgtttctctttgcgcaactttggattgtcgcaaacgcttataaccaatgacccagtcgtgctcaccgaatatctcgaaaaccgatcgctagaggtcacagcaatcgatgagctcgatgagcagcacattctcatcagctacgagaagaaaaaagaatggattgaggagcatgcatgctccaatatcggtaatagtactactactaaagatttgtaaaaatttttgactcgtaaaaaaatttttttgttaagttatttctttgtggacgacttcggctgctcgcctcctcttgctgaaggcgatgcagaaagtggtgagagcaccttcttgccaactcctttataccggtaaaaatcatatattctatgtacataaatacaattgttcagacaccgacagcattattttgacccatccggatgacaattgtccactgaagaccggcccacaccttgggcaattcacggacgaatacccaaatcatgagattttggagttttgcagcggtggcgcaaaacaagtaaattttgcttttttatttttacaaaataataaattttatgaataaatgtgttcagtacggactcaagctgcgccgcaaggatgcacctgccgacgcagatcttgagtacgtgctcaaagtgcgcggcttcactctcaactatgatgtcatcaagaaccaaggacttcgttatgagacattcaaggagcaggtgttacgatatgcagagacgggagagcggcaacaatcaacgtga

SEQ ID NO: 78439 - DNA, 678 bp, Heterodera glycines
atggactcgaacaagagcttttacaacaaagcagaggacaaattggcattggccattgatgtcataactgttgatgagccaaaaatggagaaattcatttccgatcccaacaaatccaacggcacactttcaatggaaattgaaaaagtgtcggaatttgcgcgagaaatctttgagagtcaacgtaaaagcgaaactgtgcacatcaaaggatttccatggaaaatatgggcaaaaatcaaaacgaaaaatgaaagcactgacaatgagaaatggttggccattttccttttgtgcgatgctccaaaagaaggtgtaaaattactaataattaatatatatattaacaacaattaattaattgatattgagcagaaaattggagttgcaaatgttcggcaactcttcgaattgtgtcgcaaaagagcggcgtaaaggatttaaggagagaatttactaatgaagatacttttaacaataaaacgaacaactggggattctctaattttatttcaattgctgtaagtgacaattcaaataaatagtgcccaattaaattttaacataattaaggaactgatggacccaagcaaaggcttttacgaccaaagcgaggacaaagtgacattggccatcgatttcactgtgaaagaagcaaaaacggaggacgaaacataa

SEQ ID NO: 78440 - DNA, 2347 bp, Heterodera glycines
atgccatcgtcaatggatcggatgaaacatttgttgagcacgggtgagcattcggatgtgcactttttggtgggggacggagacgcaaaagaggcgagtttaattaaaaataaaaatttaattttatttcaattgcaatttcattaattatccacgttttttaaaggttttgccagcacatcagcttattttgaagagcgcttccgatgtttttgaggcaatgttccgttttgacgccaaaaaagaaagaccggaaaatggtaaaaaaaaataataattttaagggaaaatgccaattatgttatttgttcttcattttgtctctgctaatttccctaattaatttttcaattagtttctggtaattgtcctgatgttgtggagatacctgacattgaagcagaagcgttcaaagtgatgttgagcttcatttacgcggacgatttaagtgatttgaatggagacaatgcaatggcagtgctttacgccggtggatttatttttaaatttttaattattttttaattagccaaaaagtacaatatccctgatttggtcgaccggtctttgcaaattccaatccctgaattgcgcaatgttttctttgcgtatgcccaagctctccttttcgacttggaggtgagaaaaacaaatttatttttaataattagggttgtaaattatatggactaaaaaacgcgaaatatggacattaaatatggactaaaaaagcccgaaatatggactaaaaaggccaaaaatggccaaatatggaccaaaatatggataaaaaatgccaaaatatatgttgtaaacccccaaaaatcccaaaaaaggtgtgcatatttaatatttgcttaaataaacctaaaaagtacaataaacaaccaaaaaatggggtttaaaacttaaaaatgcatattttgtatcaaaaacacctccaagtttgccaaatttcgaaaaaattctcattaaaaaaaaagaaatgttcgcaaaaaaatgacgaacatatttattgaaaatgccaaaatgacgacgaaaactcaaatttttcgtgttttgtggggtgtaatttttaaaaatttccaaaaagttgatctttaggggtgtatttttcgtttttttttcatttttcttgtgaaaatttccaaaaaatggccaaaatatggactaaaaacccaaaaatggcgaaatatggatttattcccgaaaacccccaaaatatggatttatatggactaaaaaccttcaccaaatcaaaaaattttaacgcagaaatgctatttttaagcccctttcttcatagcatatgcgcagaaaaaatatgttaatccatataatttacaacccttattaataatgcttttgttcgaattcgggtttgttgagctcgaaacttgtcgaaattgtgtgagattcatgctccaagtgtaagcaatttttaaggatttttccatcaaatgtttgcgttacatttgtcaaaatgcggctgacttgttcggatcagatgaatttttgcatattgaacagaaaatattgtgcaatcttctcgagagtgatcgtttgttactcaacgatgaatttgaaatttggaaaattgtaatttcaatttaattttttattttcattttttaatttcgatatttttttctatttaggcactccgttgggccgatgaaaaatgtcgtcagaatggcattgaatgctcctcgggaaatcgtcgttccgtacttggtcctgcactgttcaaaattcgttttcctaatatccatgaggaggattttgcaaaatgcgtcggtaaaatttttgaaatcgggaattaaattgaatttgttttggttgatatgaaattttacctttaatgcttgaatttcatacatggacaaggagggtcagaaatttttacataaaatttatgggaaaactggacaaagagaactgatgcctacagggtaataaattttgaaattttacagttcaatccggtgtgttaacagagaaagaagtgctcggcgtttatcagttcaattcccatccgtttctgtgtcttcgtggagtgcccgggctgtactcgttgaaattcccaagccatggacgaatttttaattggaacaaagccaagggcaaccgaagagggacacttgccttggaaattgaaaaaatgtcggaatttgcgggagagtctgtcgggagaagcagattcagtgatgccgtgtatataaatggatttccatggaaaattaaagcaaaaattacgaaaggcattgatgagaagaaatatttgggattttacttatggtgcgatgcaaaagaaggtccaattttaattactattttaaaaatataa

SEQ ID NO: 78441 - DNA, 751 bp, Heterodera glycines
atgaccatgactgtacgtgatttttttaatcgtttcctaaatattcggagacttggaccaaagtgtaaaacacaaaagatttcaacattctttcacaggttcagttgcaattttttcctcctcccgaactatgtggtctaaatcacataagtaccgaaattttggtaaatttatgttagtgaccgaagaagcactagccaattgtcaaattaattaaaattctattccataattattaattcaacatttcagcaattggcattgtggcggtacagcaacggttgaagagattgcgaaaacggtgttaaatgaggagcaccggtgaacagattttgtatttaataaacggatttaaaattaaaattatgggttttcagtctttttctgtccggcacccgtcgtggccttttgacctttttgcacagccaacgccaattgttcgtcctctcaaatggcgccgtttcactgcgcttttggccctcggactatcagcgatttgagaaggaaatttggacgagaaaaactgcgcactttcaaatgccttttccaccaaaaccatccggacgggtgaagagagagagagagcgaaatttgaacagaaaatgccattcccttgttaagatgcccaattggtccggaaaagtgcccatataaacacaattgaagcaaagaaagaatgattttttgttattttacaatgttattttaatatttatttactactttattttaattatttgtaaaaaataaa

SEQ ID NO: 78442 - DNA, 995 bp, Heterodera glycines
atggccaccaatttgagcaccaatcgcagtgaaaacagtccacagagggcgcgcattgattttgacgacagcggagcgaacgattcatttggcagtggaggacggagtgtcggtggacgtaaaaagcgaacatctgcacaaaacatagtggaaaaaaagcggcaaagtcgtgcggaagaaccgtcagttattcattacaacaaacacggacttggacatatgcgaacccatgtttttttaattcaagttctgaaggaatttctgggacccatgcagatagcacacatttaataataaataaaccatcataaattcaatttatttagtaaacaaattactgccgaaattgaccaaaatgatggaccaaatgttgaagagaagaaaaataaaaaaaacgatgaaaaggaagaaaaaagaagagaaacaaaggatgaggaagtaagtgagaagagcagcgacagagaggaggaagaacaggaagaggggggcggagaggtcgaactcttttcagaggatgaccgaattgacgaagttggggaagatcaagacgtcgcagagggagggacaaaggcgacactcaaagggacgggaaatgacaacggcactgtaatgcgagaccaaagtgatgatgatgaggaggaggaagagggcgaaattgtggaggaaggggcggaggatgccaatgagtggtgagtgataaatagaatagtacaaaatggacgattatattgaaacaccagtcataggtccattagaataacaaaacaacgaaactaacctccctcttttggcacttctttctccccctctttcgtttcctcttccccctccctttttctgtccttcctccactctcactgccttccccttctctcctacccttgcgctatttccacccctctcacctgaagcatgcaaacgggcgtcacaaaaacaattttctcggcccatacataagaaacaaaccttcaaattaagtaaaaataataattaaa

SEQ ID NO: 78443 - DNA, 2126 bp, Heterodera glycines
  unsure (1)..(2126): unsure at all n locations
acagcnncaactcggnncaaggngnnagncancgnnngcgccnnccgncnnnnnaaacgaagcggagacacaaggcaagngcancancaaagncgganggcccgacanaccccaaaaagccaaaaaggacnaagccccgaacagggccnaannngccaaagggnngggccannnggagacaggcaccatcggncnnnnnacgnnnnngnatcaaacgaaccgnnggnccagggnctattccgnngntcgaaagttcggctgatctgtttcttcatttaggcatgtgtttatcatcagtaagcgttggctttgcttttgcttttgctcttctgctcccccccccccctccctttagacatgactttcggtgaccttctcctcacaggttcgacatggcctcagtttttctcttctcacaaaactcattcagttttttgccatcccaatgagtttttgatcagaaaacatgaatttctgcgccacgtcggcctctgttccatcattcacgtgcgtccgccaatgtgcgtccgttggactgtcatttgcgcttttccttttagttttgcaattggatcggtttggcggtctccgggctgtccctcactcttttgaatgttcgtcacattctcttcatgctttctgctgatcattaccatcccaggtggacaaactgatctacttccggtggcccttgtcttatgagagagcgatgtccaaacggagagcgatttgcttatgcggcggagtttggatcgtttctctggggtttttggattttttagaagtttaattattatttttacttaatttgaaggtttgtttcttatgtatgggccgagaaaattgtttttgtgacgcccgtttgcatgcttcaggtgagaggggtggaaatagcgcaagggtaggagagaaggggaaggcagtgagagtggaggaaggacagaaaaagggagggggaagaggaaacgaaagagggggagaaagaagtgccaaaagagggaggttagtttcgttgttttgttattctaatggacctatgactggtgtttcaatataatcgtccattttgtactattctatttatcactcaccactcattggcatcctccgccccttcctccacaatttcgccctcttcctcctcctcatcatcatcactttggtctcgcattacagtgccgttgtcatttcccgtccctttgagtgtcgcctttgtccctccctctgcgacgtcttgatcttccccaacttcgtcaattcggtcatcctctgaaaagagttcgacctctccgcccccctcttcctgttcttcctcctctctgtcgctgctcttctcacttacttcctcatcctttgtttctcttcttttttcttccttttcatcgttttttttatttttcttctcttcaacatttggtccatcattttggtcaatttcggcagtaatttgtttactaaataaattgaatttatgatggtttatttattattaaatgtgtgctatctgcatgggtcccagaaattccttcagaacttgaattaaaaaaacatgggttcgcatatgtccaagtccgtgtttgttgtaatgaataactgacggttcttccgcacgactttgccgctttttttccactatgttttgtgcagatgttcgctttttacgtccaccgacactccgtcctccactgccaaatgaatcgttcgctccgctgtcgtcaaaatcaatgcgcgccctctgtggactgttttcactgcgattggtgctcaaattggtggccataggatcaactggcggcgaattcgaggtaaaagcaacagtcgaagtctgaacaagtgggggggggggggggaagggagagcaaactcttgacaatttgagacgggaaacctttgtaggtccagcagatgcttccaatttggagggtcggtcgaacgcaggggtggcggaacgggaacgcgaacgggaggatcgtcgctccatctctatctgtttgtgagtgaaaacggaccattttgcatcattcaaattcaaacctcttcaagagcattcgcattgaattccgcttccgctccacgcaatcgcctcgagcgacgagctgatgatggtgtctcgtcctcggccccac

SEQ ID NO: 78444 - DNA, 132 bp, Heterodera glycines
gcgcccgtttctaaatttgtttggctattaaggcagcttcgagacctcagacgggcgcttcgcgcccgtttctaaatttgttgggctattaaggccgcttcgcggcctcagacgggagcttcgcgcccgttt

SEQ ID NO: 78445 - DNA, 242 bp, Heterodera glycines
aacgggcgcgaagctcccgtctgaggccgcgaagcggccttaatagcccaacaaatttagaaacgggcgcgaagcgcccgtctgaggtctcgaagctgccttaatagccaaacaaatttagaaacgggcgcgaagcgcccgtataagcccaacaaaatttaaaaaacgggcgcgaagcgcccgttcgaggccgcgaagcggccgaaaagcacaacaaaaattagaaacgggcgcaaagcgcc

SEQ ID NO: 78446 - DNA, 605 bp, Heterodera glycines
atgcaagtacaatcagcaaaaaacattcgtggcattgcgccggtggaaatgctgctcaaagcttttgagttggagttgggtgttgtgccagacaaagcattccagcacgagcttcgcttcgtggctgagtaccaaaagggccaatcgaaactgcaggaattggcccgtgtgcctcgcaatgagtgagtgactcattagcgtagtgccaatctcggacagcaaaaattgtgccgagactacaccccaattttccagcgagagcaaggagaagcagacgcgtcacgagttgcattgggcgctggtgcttatttttctggcagaaaatgccgaatttttggacaaaaagagccaaacgttcttgtacgacaacagccagttgctactgtattcatcgcgtcaaatgatgctgaacggagagacgagcgaatttgtcatcactatggagaaatttgtaatatggtcccctttgagagagataaacggagagagagaaaagaggagagatagagagagacaaaaggagagatagagagagagtgagagagataaaagaagggaaatagaaaagaggagagagagaaagaaagaggacagatagaaataaa

SEQ ID NO: 78447 - DNA, 829 bp, Heterodera glycines
atgattcatttgcataatgcaaatttgcatcaattgaagatggattgtggtcttccatcagttggcgagggagaagggcaaaccaaatttggaatacttactgcttttttggtgggttttatttcaaaatttggaaatgcgagtataggaggtgattattttatgaaacattgttttaagaaaaatacatttgaaaaaatttggagtttgtatggagtaaaaaatttcaatgttttcttatttaaaaaactaaagaaattatgaaaatttaaaaaaattttataaaatttctgaatttttcaaaaaattattttttaaattttaataaaaattaatttaagaaaaaattattttgcttatatttcaattgttttaaagttttttcaaaaggacaattttaaaccaaaatttttgtcaagaaaaaataattaatttttgagaataagattttgtgaaaacttttttcaattcttgggggtctattttctgaaaattttcacgccgatttttaggggtgtatttttcatttttcttgcgtttttgttaaggatttttccgaaagtgctgaaaaagacgccaagaatggcgaaataggcataaaaataagcattaagcacaaaaagttcaaaatagacaaagttaggcattataaaagtcatcgtagacaccccaaaccaagcggaaaaggcgttttttgtgcttatctttgcgtattaagtgcgcagaaattttaggcatttgcctaaaaatggaagccataatgatgagatttgacataaatttgttataattataattatgtctaaaatcaaaaacattcacaaataaa

SEQ ID NO: 78448 - DNA, 295 bp, Heterodera glycines
aaaattattcatttacttcggatgagcgtgccatgcaaaataattttgtggccaatcttcatcaaaatggcatttcgtttttggcagattatgccgcactttggctgctcgggttggacatgcttcaaatgtataacaaacacgaacagcagattaagttgttcattagtcgaagttgcagctgcaccatggaagcatgggtaattattaattaattaaacggggataattaattcattataatacctctaaaaattgacttatttaaatcaaaaataatcatatgataaaaaaa

SEQ ID NO: 78449 - DNA, 1010 bp, Heterodera glycines
gtgcaaggacaaatgttgcttcttggagatcctcaagtgaacgaaaatgatgataaaataaaattcactcaagaagaggtagatctaatattatatccatccctaatggaataattaaaaaaaacatttaatttaggcgcccgaaatacgtttcgattggtgggctttgccgaagggaagtgcgccgttggactgtgctcgtctgtttgccaaagataaaaaatacattggcaaaatggtaagacgacgcatttgtcgtgaggaagatcctactgaaaatgacttggatatgtcctgcacggctattcaaagcagaaaccgattttggcacggtgccaaggatgaccaacaaggggagcagaatgagaaggagcatgccaattacccaatggcacaaattcgaacagtgtacaaggcaagaaatggggaaattgggattaatattggatgtgaatattcaaatggcctgaaacccattcggccattggtttgaaaagaattcaattttctatgggtataaatggagcaaaggtcaacttgggtcccacatttccatgcttattctttggatttttgaactattatctcttttgtctcaaattattaggtcaattttggtcccggcatatgaacgacttttaactctttttcatgtgttatgtttgtgaaacaggctcacttggaaacccaaaaaaaaaaatttaagatttccaaattacgattatttactcttcccttttccattctcttcccaggactatgtggtggttgagttggaattcgccgccactttttccccgctcaattggtactgtttcgtcgtcgatgccgcgtcccccgcgctgtttaagcgccgcgtgcgcgcgttggccaaatgctttccgaatgtaattatgggagacgagcgcccgatgaaaagtgacggggagggcatgatggaggcggtgttggactgttttgagcgattggacacgccaaaacgcaaatgggaatatgtcactctgttgcaa

SEQ ID NO: 78450 - DNA, 858 bp, Heterodera glycines
ctgaatttaagccctattaattcgctttaatattaaaaatggacgccaccaaatggcacacttttgtcaaccaagtggccggtgaatttcccattttctgtaattaccgaattcgccttcacggcaatgttaagccacgggcccaatcacaaaggcggcgatttgtggccaagacggaaatatttgggccaaatctgacaatttcaatgtgatttccccgccccttccctttcaatatcttttgttttttcttagttggatccaatggaagcgaatgtggcagtgagcgcctttagaaatgtacaatcattggccattggcccaattaattactttttttagcccggcgttttggcaaaccgtggcttagcctgcgaaggagtgacgtgcgtaataacataattttaattacttatgcccactctttgcttaggtatccaattacgcagcccccgtccacgaccaacaacacttgcctcagcggttcgatccaactcactaattgccataattagacaaatgttcaggagagattgacggacagcacggcgttacgattgcaagaacgaacagagctcatcaccacttcccgttgtttcgttaattaaaaatgaaagtgttcagcatttctcgtcggagtgaccgaagggacggacacggacgtcggccgagtggaaacggtttcattggcccagcaattggccactcagtacggctggtgaacaacgcattgatgcggatgaatacaattgttctacactgatgagcatgggctataattgttctgacactgcaattatttgtgtcatttctattttctatgaaaattaattggataaatgcaatttattcgctaaa

SEQ ID NO: 78451 - DNA, 1635 bp, Heterodera glycines
atgtactgtgccgtcagttactgtaagtttccgccataatgtgagaaagaaggctttcatttatccaatttgattcattattttaatttaatttaaattttgtttagtcaaaccaaacagtgtgatgggcgaagatggcttctcaatggaagtgaaataattcgctaaatttgcatttttttaattgttttcttttctccgctgaaggaatcgtaccgcacggtgaccaaacacgggccaatcgaaaccttcaaaagggacctgaacaaagttggcactggcaaattttggatgtacacggaggaatatttctacccaaggcaatgtaataaaattcaattgtttttttaattaattaatatttttagtaaataccattctttttagtttatattatcaaagttgggccttccttcgacaacgaaacatcggtggaagaagcaaacattcagtatatggtggtcacaggtcgggcacagccttcataattaactaactaattaaccaatcaattaattaactgtttctattttcagatgctgggaaattgtctttgactgtttacgcgagggacccaatgcttttctttcaggtcaaaatgaaaaaagggagaaacaaacacagaattcgaattcacaaatgattccagaaatataacaaagaatgtgtggactttttaaaaggtaattaatcgttttaatttcctttttaatttattttaattaattaaatttgaaattgtttagagcaaggctttggcgggaaactcttttggaattcgccgaaaccaatttaccagggcaacgactgcgaatggccctcggagaaagaagtgtttgcacgaaggcaagcaatcatcaaaatcaatcacgaaattgaaattgaaatccagggtactcaaaaactacgagcaaaacaaaaaggcacaaatggcaacggctgccaatgccaccgaatcgccggcacaaacatttgcggaaatggtcaaaaacccatcgatggcactgcaaaaattgatgcaaaattaccagtgaaaagcacatttattatgtacatataatttgaaaaaagataaataatatgatttatccgaacgattcatttggatgcgatgtccgccaaggaaaaatcgacgattcgaaaaatacaaaatagatttgagaccttggaactttgtcggacgttgagcaccgtagcagcgatgttaaaaaatcgaaattttaatgtgtaaattttttatgaaatgacaattaaatgttgattttgagtgttcatttcgactttggttgacttcgactgtaaaatttaaaaaacaaatttttgatgagcaaaaggtgaaaatttttttccttaccaagtattttaaattataattatggttaggctcagttttatatgctcgagaatatcggccaaaaaagttttttttgtcggaattaagcattgaatcgaaaaaaccagtaaaaatttaatgttggaatttaaattttatgaatttaggcgatataacatttaatgcccaaaattgtggtttaagctaaaacttcaaattttatattttccctgctaatttttgctgagcggacgaatcgtcagccggaagaattgtggtcgaaaaaatcgtacaaaaataaa

SEQ ID NO: 78452 - DNA, 1592 bp, Heterodera glycines
atgccgacttcatcttcaccaacaaatttgcttccattgctttacggttcgtatgagaggctcaaaaaacatgcctgcgacattgacaaacgattgctttattcacttcgccgtctcgacaattttacgcggctcaactttttggtggaagtcgaatggaaaggaaaaacaaaaatgcaggaagggaaagaagaggatgcatacatcctgtacagccgagccatggccatttatcttatgataagtgagtcaattgacaacgaattcaaacgaagccgcggtggttatcttttttatgatgtttcacagcgtatatgtgcggattttgacaaagttgctgcgagtttgcaacagcggtttatggagggacaaggcgatgagcctgaattttgtgatccggtgggactgcgttgggccgaaatcgttgaaaacccgatttccaaaaatttggactgtaataaggtctccaattcgtcggatgaccaggacaaaattcggtccctttcgcctgcaaacgcaacagaacttgtggcaaccgaaaaatttttaaccaaaattaaggcggacaaagaaaaccacattttgcacataaaggacaagacggacaggggcattgggatgatgaaacatgccgtgaccaataacctggccaccgttagacagtcaggcaccagcgagttcatctccaaattgttcgactcgtccatctcatcaaagcagaatcaggatttagttactcaatctctgcacctcaatgaggaagcacgcaactttttggagctggataagctgaaaaagtctgaaaaaaaaattggcagcagtgagacggacaataaaaatggcctaatgagaatttggcgattagaaaagttcagcgtgaaaaatggacgaatcttattgtcagtggagagtgcaaagtggctcaaaacgtggatcttcatcaaaattcccgataaaattcttttggacaaacacattaaaatttttcgaggacacaaatgcccacatttttaaaagccgtcacgacactagctgaaaaccttgaaccccaccattcggatgccgaattcgccgttatttttacttaaagacgaggggaccgtctttcttagaggccggggatgtagtattagtgactctttgaccctttatttgattgtttgaatttgtttggcataatgtttatttgaattcgacccaaatattttggttttcttcaagagtagttagtggatttttttggttatcgtcggtgataatttttagccgttttgttggtcgtcgatttatttgtgtttttattaatttgttgttgattgaattttatttattttggattgtcttttaattatttgttgcataaatttattttgtttggtattggatttttaaagcaggttttggccaattcatagactatttgtgcaaaatttagaagtgtggcaaagaaacccccgacaaattgcttcttcttttccaacaaaatgttaaaaccaaaatatgaatagccttagagaaaaataatttctaaattataaaatagctttaaaattatttctaatttgctattataattaaggcaacataataaa

SEQ ID NO: 78453 - DNA, 1600 bp, Heterodera glycines
atgaggaccacaattctttaccattgtcgatatctttcatttcattgcttaggacttaatgatttgatgggagcgcacgtcgaatggaaacgcgaaatggaaatggaaatgatgcagcgaagccaaaacgccaaattggcggccgtccgaaatttgcacgactttcttttaaatgggccaaaggagccgaggtttgagttaagcaattcgaaattcgcacaaaatgattgttggcatttcatttgtctcttttagcacttcgtttcggcaccctttcattgtcagtgccgaggcccgtgccgaatgtgaccaaattttgagtcattttgagaagagaatggaggaagaaataaaaaagacaaacactttgttaagttcgaccagcaaatccaaagaaagtacgaacgaaatcgttttatattttaatcatttttaattcattttaggtccacaaaagaccaaaaacgagttggacgcattcaaaaagctttacttgcaaattttgtttcgcctttttcgagaattgtatcggcaaagtgccgaaaaagtgaccaaaagtgggcagaaaggcatacggaggcaaagggcggagaaggcgcagctgaaaacgatgaacgaaggtgggcaaattgggggcgggaaacccaacacaacctcaaaatggcaaaatttccgatccgtaaaatggttccgattgaccaatattgtcccgattcgtccaacccatttctttccctttcctttcgcagcctttgacattgtgccggaaatttcggaattgaaacggcactgttttttgggcgccctttggctttgcgacggacaatcggttcgctttttcgactatttgaacacagaaattggctgctcttctttggatggaccgcacatcaattacatttgtcacattgccatcgcagccaaagaagtgaccgggggaagcgaattttgagactattctcgtcctttttgaaccttaattttcgagaagtgttgacatttcccctttatttagtcggcaattttggagccgctcattgaattgaccacttttttgccctccaattatttacacctcgccaaaatactcaattcgttggcattgatttatggtggtcattccgtaaaaagaattcaaaaacaaattcaaacattttacttgttaaagggaaggcccaagattttgataagttggagaaattgtggaggaaaatggacaatatgaaacggaatgtgccatacgaggaacagagcagccgaatgaaggttaaaattggcattgttacattttgccaaaaaagcgattttagctggttttggcaaggattgagcatttctatcggacggcaaacagaaaagtgccgggaactcttctggcggcgctgaagcgattgagcggtcagccgtactttatcagtgcacacgcgaaaaagagagaacggatgaacgacacgaaaggacacagcgacgagagaatgaacgaaaattgacgaaaagagcatccatcttttgtcgaaaggacacatttcattaaataaaccgcttcaatttgagcgattttacatatttttatttatattttcagaatttgaaacgagta

SEQ ID NO: 78454 - DNA, 446 bp, Heterodera glycines
tttaaatactccactaatattgactattctctcggctcattgggacacgaggaaatctcgtgcaattacattgatctttcttacgtatgtcaactttcgtttgtcaaaaccttcttttcttcagattcgggttaatagtccggagcttgtctctgagttcgacggaaaaataagcatttttgtggacgcggtcgatcgaactgtcagcgacggttatttcttgactggttctgcctcaatatccgccgcttgtgcagctccatcccaaagagagggacggatttacggaattggtcagtaaaacgaatattttactaataattggctaaatcgtgtttcgtttgaagatcgttgggaaacacttttccctgtgcaaattaaattggagttttaccagcgaaggaagcgacagtggctgattccggaggacacagccccgtgggaag

SEQ ID NO: 78455 - DNA, 1948 bp, Heterodera glycines
atgccggtgccgagcattgaggagctcaccgaattgtgcaaaatctgggagattgatttggcggtgggttgcaaagtcaatccggcagccaaggcaaagccttgtgcgcatgggtatgtgctaagcatcgaaaaaaggtcattatgtgtaggatacgaaatcgatgctaaagtgattttttcctaccaggaagcgaaggatcaggacgcgcaggaggaatttgatcaaatgcgctgcggtgagctcgacggatgcgttgaactcatcccgcagacgtccgtcagggccctgcaggaacggatgttcacgctgcggtccaatgactgctcgaaagtggcgaaggacgaggcaaaggtgggccgaatcatgtcgattttattgggccgaccggtaaaaccggaaagcccaaaggccaataacccattaatgacttttggggctctttcaaaattgaaagagggacagatcgacacagcgctgtgcatgctcgacgaggtgccgcgccttgtcttccaacaggccgggcccggcaccggcaagacgttcagcgcggcgtcgatcgtggccacggtcctggccacggatcccacggctcgtgtgttggcgctggccccgccgaatgtcgccgtcgtcaagctggtgctggagatgcaggatgccctggccgccggaaaccacgtggagccaatgcttgccttgttctccgggacaggtaagttgagatatgccaaggaagttgagcggatttccccccacctgctcgccaccgcggtggaggcacaggactttcaggaactcctacagaaggaccaagaacgcgtcaaggtggagcggtacctggacgcctgcgagcggaacccacgcctggcccaggaaatggcagtggcgaaaattgtgcaggagcacaaaaatcgccgcttgtgcttcgccaccttgtccttctgtgagcaacttccggcactgtttggggagacaacgcatttgatcatcgacgaagctggacaggcgccatacgtccaaatcctcaacttggtaagccaactcccctgcctaaccaaggtactgatcaccggcgatcgccgccaactgcgtgtccatttgccctccctgccgatcgcaatccgtgaggacttcggcatggacatggtcatccagaacctggatgtggcgcgagggacggacgtcacaacattgtcggtctgttttcgctcgcattctgctctcgtccgctgcacggaggccggcttttacaaaccgcacggcgagctgctgactcctggacgcgacgactcggagcgggcactcatgaccgaccaaacggccttcaaattgccgaaaaagggagtccctctaattttggtccaccagagcacgcctgcgcaacgcgacgaagtgtccacctcttcggccaatcctggccaaaccgacacagcgatgagagccctctggcgtttggcgcgggccttccccggcacactcatccgctgcatttgcttctacgccgcccaagccctggagattgaacggttggtggcccaacaagaaatcccggacattttagtgacaacagcggacgcgacacagggccacgagtcgtcacttgccgtcgtcgtcacaacatgctccgtcttcgacggtggagccgactctcagcctttctgggctgatgccgcacgggtggacgtcgccatctcccgcgccagccatggaatgatcatcatcggcgatttgctgctgctcaaccggacggagacgtggcggcgctacctggaccaagcgacgactgagacaacagtggtcggtccggagtacttcgacttcgagcagttcaagaaccccgacaactactacgacaaggacggacagctgatctcagccaacggcggtgcggtacggtcagagcatttctacagcaagtacggtaaaaatgtgtggtacaacaactccg

SEQ ID NO: 78456 - DNA, 1023 bp, Heterodera glycines
atgtctgaaccgattgattatctttctaccgattttcattataatggaaaggcaatattctctgcaagttcgtcaaaattctcgctttctatgaccgcattttctaaaatttagaacagcttggagtgttctcttatgattcaaaaaaagggcacttggaaatgggatgtgccaatctgaagtatgtgtacgaaggtttcatgaatcggaagctcaacattgaccttactcaagggatacacaagcaaatagagaagtggcgttcagaaagtgattaggttgtcatcttccaattgagcaattaaaattaaggcctcgacaaagttttcgattggttgctcaattcctacgacgagggcagctctctcgaggaggtcaaatgcttggaatttcaaaacaatttcctggttttaatgcaggctttaaatggctgtgaattcgtcagtcgcagaggcccaatgagtcgcattgccatttctccatatatttggcaatcgctgaacgacaaaagtcagaagttggcctgcgttaaatataacggtgagtgattgtccattgtatcgtttattctttccttttcagatgttattttcatcagagaattcactcgtccggacggggaagacgacaaaagcaattggaacactttcgtgcaaaaagcgtccttcgccggacgaaagttcgagcaattaatcacaatggacgaacccgagggaggcgagcccgacacaacggcacctgtggatccgaaccccgagctcgacggaatattcaaaggtctattgcaggcattccttgtgttgctatttgccccccccccccaaattcagccaatctcattgtcgagggtcgttcgttgaacattttttacggctgcgaattcgacgcactgagagcatcagacggaaagttcattgagctgaaaacacagctcaaattcgtcggtttcggcaagtacttctctttcaaaggtgccttttcacatttggcattgcttttgactcttttcattttcagcactta

SEQ ID NO: 78457 - DNA, 1657 bp, Heterodera glycines
atggcgattgtgcacagccctccgtctctacgcaagcgcttttgtgaggtataaaatttctcaaaaaaagagatagacatttttctgggatagagtataaatgtaaaaattccctcaaaaataaaaggtctattgcgcaccgccctccctatcatgctcgagagcatttgtatgtgtataaaatttatcaaaaaaagagatagccatttttctgggataacctctaaatataaaaatcctctgtgaactaaaatggcgattgtgcacagccctccgtctcatacgcaagcgcttttgtgaggtataaaatttctcaaaaaaagagatagacatttttctgggatagagtataaatttaaaaattccctcaaaaataaaaggtctattgcgctccgccctccctatcatgctcgagagcatttgtatgtgtataaaatttatcaaaaaaagagatatcccaaaagtcgggtagcctttcatggatccagattcagggcattttctgaacatggatttttgcccaggaaatttcagatccaggtcatgaaaaaaaattacagattgccaattttaaaaataacataatacagattgcaattttaaaaataacataaagacattcagagttcactatgggtcaagcccagtgttagacaaaattgctcataacgccaaatagcgcatttggcgtaaatttttgcgcgctatttcaaaatttcactggaaaatgccttttttgtattttttattttgatctgccataattcgcttcattcccaactaaactgaacaaatttggtatctaaaaaaagtttttgaaaagtagaatctttttctaagcgaacgttaagtaatttgacatctcagaaaaaagttgttggagtttcaaatttttatcacgttataactcaagtcctaggccgccgtttctaacaaaaatgctaaaactattaatttctctattgattctaaatgtccaaagtgattttgtatccttataaccaaaattgttagcatttacgaatttgatgttttttgtgtgttagagatgtgaaaatagtacgccagcacgagaggaaaagaaatgcaaaaattttaatcactccataactttttagttaaccctttttttgcccttaaaaacccttacattttgttccaaatttttttctctatcggtattcaaaatttggtgcaacttgtatgcatagaaaaaaagttatatggagagaagtaaatgttgatttttacataattaaaatgaagagatagtacgccaaagtgagagaaattacaaagaaaaagagaaacgacgagatagtactaggcttttctctgcacagtggagttgacccatagtgagagttcggagtcgatcgaagtgggaatcggtcactttatgtcagatgccattctacaaatatcatggccaagtccaagaagcataactactacaatcatgaaatgaagagtgcattaatcacttaaacaccgtaaaactacttaatcggtattcattttagattatgaaaagtgatttatattcacaaattgatagaaaatttgaagaatcttctacttcgaatgaagggtcagataatgagctcgtagctgatgataatgcttctcttaattctatgtaatctaactcaattaa

SEQ ID NO: 78458 - DNA, 208 bp, Heterodera glycines
atgtcaaacttttcattgctttcgactgaaacgttggacagtcgtcgctgccgacgaacagccgcggacgaagacgccgaaacggaattggcaaaggattcattgtcagaagggaaagcgacatcgaggtttggcttaaaaaattgaaaaaaatacaaataatttgactagaattagtgtggcaaagttcgtaatttttttcagttaa

SEQ ID NO: 78459 - DNA, 1526 bp, Heterodera glycines
  unsure (1)..(1526): unsure at all n locations
atgaccaaaaaacgctgtgccattgtgggagcagcagtaagtgggctgccatcagctcggtaaaacctttgaatatttaaaataaaaataaaaattaattattcaaaaaaggtgggcattggcttatgactttgagccggtgatttttgaacgccttgacaaaattggaggcctttggcgctataagcctgagcaattcaacccagaatgtaagcatactaaataaaaaagcttaaataaatttattaaaaaattattttatataaaaaagcaacaaatcttttaagtggcgagtgtaatgaaatcgaccgtaattgacacgtcaaaggaaatgaatgcgtattcggacttcccgccgcccgaacacttcgccaattatatgcataatgtacctaattattagtagggctgctaattttatgtaaatacatttttttcctggattctccatagcctaattagtaggaaaaacactttcttttttgtgtttgcgaacaaaagttggttatttacatattttcgggttttatatgtacatatttttatacatatttcacaatttttgtacatattttcattttttttttacatattttgaggatttttgagaatttatagaaattttttgtaaaaaatttaaaaaaattttttgaaaatgtatccctaagaaatcgaatttttttttcaaaaaatgatttatcaaaaattaattttttaaatactagcatgtgattctaagcctattttggtcattttatgcctaggtatttcactttttacgaagaattttttttcacaaaaaataaccattaaaaatttttatttacatattttagtacatatttgggggtttttgtatatttcatacattttttagcatttttatatatattttatttacataattcgcaaattttcttacataaaattagcagccctaattattagtttattagagagctaattttgagcgtatttggacaaaaaccgggtccgggtattaaccggtattgaaaaaccgggttcgggtccgggccatgaatttttatgccttttttggcgttttgtgcctttactggtcctttgcggaatttgcagaaaattctttaataaaaattcaattaaaatgaaaaaggcaccccttttaattatttgaaatcccaattaaaaaaaattttaattttttttttgttttttttattaaaatatttgtcaaaaagtgttaatttttccaaatctctttcctttactaagacacaaatgctcgcttatttggagctctacaccgaacatcatgggctttaccaatatatacggtaggcacaataataatacggtagacacttaccaatgtcaattgaataagcaatttattagatagtaatttagtcaaatattgttatttcctttgtatatccctcaatgtttggcaattattcccccacagtttccacaacaccgttctcgccatacgccgggcggacgattattcccgaaaaatgggcgttgacctgnccnaggcatgc

SEQ ID NO: 78460 - DNA, 1425 bp, Heterodera glycines
aaagattgtcaaatttgaggaccaaatcaaattcgaaggagacattattcactcccatgacttcaaaaatagcaaggaatatgaggtgtgagaatggcacggagagaatgatgtcattttaaagaagctcaagcgaataatttttttgaaaataggacaaagtgaacgttgtcgtcggggcgggtaattcggcgatggatttgaacgtggaattgggtcgagttggcaaaaagtgttatttgtccactcgtcgggggcgcatggattggcaaaagagttggcgaaggcggaatcccaggttaaatggacaaaaaaaacaaaaaaaaaacatttacatgccgcagaggactgtctgttcaacacacgattcaaagtttgtgtgctcaaccgcattttgccccaggccttcactaattggctgttcatccgccagtgccaaaagcgctttgaccatgcaaaatatggcattatgccaagccacggattcttcaggtcttgcggggccacacaatctcggaaaatttgaatcaattaaaaatgctttcgaattttatcacttcagccaacatttgaccgtcagtgatgatttgccttgccgaattatcacaggttcggtgcaggtcaagccggacattcgcgagttcacctctcatggcattgtgtgggcggacggcactgtcaccgatgacattgacaaaattgtgatggccaccggctatctgttcaactttgacctggtggagaacggacaattgatcccggtaaaagacaacacagtttggctctacaagaacatgttggcaccgcaattggccgattggaacactttggccattgtcggactcgcacaggcactttctccaatggcaatgaaccgcttggatttccaagttcctattagccttccggtgccattcatcccgttgccgaaatgcaagcgcgactgttctttgccgctctgtgcggcgatgccaaattaccaacgcgtgaagggatggagcacgacattgacagggcacaagctgaattggcaaaagcatttgtgaaaagcactcgacacaccatcgaagtgggggagggtggtgcctttcgctgtttattaaactacacaggtcaattacattttgttcatggacgagttggccgagctgatcggctgtcagccgaatcccgtggactttgccttttcaaagccccgtctcgcccatgcccttctctttggcccaaatgtgtcctatatgtaccgattgcgcggcccaaaagcatgggacggtgctgaggaagtgggttgaatacagtaccaaacacacacctcgttacagtaccagttccagcagcataattctgcactttttctctcaggcaattcttgacatcccacggcgcatggacatgtgtttgtcgggaagaaaagtgaaggaagcg

SEQ ID NO: 78461 - DNA, 645 bp, Heterodera glycines
atgcaaaattcaaaaaaaaacaaaaaacaaattaacactaattgtaagtttttttttgctaaattttcaattccttattttttcagttttaaaaaatgcgacttgaaagactgttaaattatgaattttatcattgttatcccatagtaaatgtgcaatgaaaaaggagtgattgacagttcgaacgatgggccgaatgaatgaattgttgtgaattgtgcattaaatgagtgctctcagcaaatacactccgatcaccattatggcgacaatcagtgccaaaacggaacgaatttcggcccattccgttgtcggcgcttccttcacttttcttcccgacaaacacatgtccatgcgccgtgggatgtcaagaattgcctgagagaaaaagtgcagaattatgctgctggaactggtactgtaacgaggtgtgtgtttggtactgtattcaacccacttcctcagcaccgtcccatgcttttgggccgcgcaatcggtacatataggacacatttgggccaaagagaagggcatgggcgagacggggctttgaaaaggcaaagtccacgggattcggctgacagccgatcagctcggccaactcgtccatgaacaaaatgtaattgacctgtgtagtttaataaa

SEQ ID NO: 78462 - DNA, 363 bp, Heterodera glycines
atgcttttccagaacgactcgaaacattttgttgacagaccactgaaaaaggaggccaagaaaattgtcgaagagttcacatcgacctttggcggcaacgaattggacgtgagcaaaatgaacgaacaacaagtggaccaattggccaaattcgtccgtgaaaatttcggcagagccaacggagtgctaatagcgtaaaaattgatggaaaatggcaatcaattaaaaaaataattaagttatacgcccgaagattgggtggaaagcccaccgaaacttgaacggataaaagacgcggagttcaaaaaatgggcaaagcaattgaacgaactgtggaaggagctgagtcggaaaatgccagat

SEQ ID NO: 78463 - DNA, 1098 bp, Heterodera glycines; identical to SEQ ID NO: 2201

SEQ ID NO: 78464 - DNA, 1330 bp, Heterodera glycines
atggtgaagaacatgtgcttgaactttgcggagatggtcaaccgtttcggttttgtgcccaacggcggacgcatttattacgacaaacgctcacagccgtctttcttcacattgtctgacaaacaaaccgttgctaattgcatttcctaattattacttccccactttagcatggtctacgattatttcttggccacaaatgacaccaaatttctccactaagtgttgccagtgcttgaaaaggtcagtgcaataacttatcaacgccataattacttcctgataagccaaatccaaattttcattaaggaacttggccattggagcaaaaatcggtcggttgaagtcgaagtgggcggaaagaagcagacattttaccaatacagagcggacagcaatgtttaaacagaaagaaattgagtcaaactgaagcccattttcagattccccgtcccgagtcattttgtcaagacgttcaactcgtcacgaacatttcgaacacacaaaggaaagccgacatttggaaaaacgtggcatcgacggccgagtcgggctgggactttagctgtgagctttaattgcaattttagctaattaattaattaatgtgcataattcatttagcacgatttatgaaaaaagacaacagcaacaaagccaacccgtggaatttggtcaatttacagaccacggacttattgccggtggatttgaacgcgttaatttgtggcaatctcagaatgttgggagaactcttttcaaaaataggcaactttactgcattttaattgggcatttggccaagccaattaaatgtaaatatttttcatattctcttcttaaatggttttaggtgacaatgcaaaagcatcaacttatgcggctgagcataatgagtttcgaagcgactttcaacggttattctataaggaagagcacggcgtatggtacgacttcaacattaaaagtggaaagctgcacgaggagtactacggtagtgtgacggtgccgttgttcacacagtgttacgacaccgacgatgttggcacggcggaacggatgtacaaccactggagaaaattggcgtactaaagcacaagttcggcgtgccgaccaggtgcccaatttagcgcttctcatcagagatggaatggcataaacacattttattttcagcaatgtaaactccacacaacagtgggacttcccaaacatttggccggtaatttaaggataaataaacataaataattatgaaaattggaattaacttcagtctttggcccatatgctcatcgaaagtttgaggcgatcgggaaacaaaaagtga

SEQ ID NO: 78465 - DNA, 390 bp, Heterodera glycines
atgggatcatgtcagatgtgtggtggtggcggatttcctggaggatacggctccatgggcgcatacggtaccggattgctgggcggaagttatggtggtagcttatatggtagcggaggatatggtggaggactgtatggaggaggtttatacggtggcggaggatatggtggtggattgtacggtggcggattttttggctaaaaatttggatccattataaaaatttaattttcccaaattattgcaaattatggaaggaaaatattttcgaattactcatttcagtgacttttttattattattcatctctctgtttgttttttgttttatttacataattattctaaaataattttaattaatttaatttatttttgaaaaataaa

SEQ ID NO: 78466 - DNA, 666 bp, Heterodera glycines
  unsure (1)..(666): unsure at all n locations
atggccgatcgatcggcgctgacttcgcttttttggcacttttttttggccgcttttctgttggcctcacaaaatctaaacggcattaaaggacaagcgattttaccgcaaaatcaatgccctttcggcgcaacgccagacggaggtaaaaaaagaagtcaaaaatgctcaaaaggcttgatttgtaattagtttgccctcttgggttttgcatcagccgaaatgaaaggtgctacaacggaatttgctgctttaataatcagtgcccggccggctattacagagagggaggtgagcaattagcgaagaaaactttttttaaaattattaattctgaataaccattttaataacccttttcagcgtgtaattatttaaatttctgtgtcgacccaagggaaacatgcattcaaggagtttgttgtgagtttgggctttcaatttaaagccggtttttgggtggtccaaattaatccggcatttttctttactgtccaaatgcccaacaattaagcaactcttgttcacctttcaaacttgtcatagtttgtatattctattttaggtcagcctttaccaataaatccaacttataccaacaacccgacttatcccatttatcccaacaacccaacatatccaatttatccgacaaatccaatttan

SEQ ID NO: 78467 - DNA, 387 bp, Heterodera glycines
atgcgttatctgttgagaattaggaattataattttctcacaaagatcggcaaaagcagtgttgtccaatcgcaagaatcccctccatcgcttcttacggattcaaagccctttaaaaaagtgctcaattctgccgttcaatattacgaggaatgtattggcctggtagaagtccacaaagcccgcgacgaagtcaaccgagtcagtctttttgcctttgttttatgccgaatcttttattatttttcgtttttttagtgcgaaaacaatttgtttttggcacaacaggcgagaagagaaaaacagggcgaaataaagtcattgcaaaaccgattgaaagacattcacagcgaattggacagaactcagcgaggcgaagacaggtga

SEQ ID NO: 78468 - DNA, 537 bp, Heterodera glycines
atggtggtcaccaacaaggaatcgccaggcagtaaaccgacacacatgcagaaagccaaacaacatcgagagagtaaaacattgagaaggcacaaaatcaacaagctcttgtccagcgctgcaacgttacgaccaagacgcaagcgagaatcggttcccaacagcacaacaccaatcgtgattgagatcatacaagacccagtcgcggatcaacaaatcagcttatcgaacaaacattcaactgctccattgtcgaaagaactgcgaaggccaacagcaacaaagcagagttcatcaaattccacgcgaccagtatcattccgcaagcgaacacaaggaaaagcagctccttacgcaggaataagccgaacactcgaacacagcagccaaacaaaagccttgtcgccaacaactaaagaaaagagggcaaaccaacaacacgccatggcactggaaggaagtaccgatccaacgacaaatacttatgattggcaatcagcgaaattctccaagcatttgctagccaacaatcaataa

SEQ ID NO: 78469 - DNA, 1216 bp, Heterodera glycines
atgccttaccgttcgccggttggttgccaatgcattcgccataccaaagcatgcacaacggacactgacgcttcacagcgaaggccaactgtaagtgatcgagcagaatttatgatcaaattccttgaactaattagtccttgtcagctggtcttttttctgcattgatcactttctactgatgatttttgattgattatggccaaacggctggtggtcatttggggggcaattagcaataattaacaaattatcatgttcatcattgaattgctcgttttgtcaccttaatgcactgctggtggaaaagatgcgaacaaagcgacaattggacgaccgtgccgttgtcgtcgtcgccgcattgctcgccgcgcatgtcactcagacaaatggcacatcgcgctgagcaatcgtcggccgggcacttttcgggcaacaattgttcaatgcgcacttttgtccaaaattgcacttgatgatgatgagattcatttgtcagtgccataaaccaaataaatgtaaaaaattaaaaataaaagttcgaaaaatctttaaaaaattaaattgtataaaattaattcgtaatttatgtaatataaaccaaaaattaaaactgagtcatggaaaaacattgtgactaaaactaaactcgaatctgtttgtccaattaaacgaagcgcaaccttggaagattttacaagtgattggaaaagggaagagtcgaatgattacatcgacaattgatcggaaaattgattggaaaagtgattggaaaagtgattggaaaaggagtttggaaaagtgattggaaaaggagtttggaaaagtgattggaaaaggagtttggagaaaataaacaaaaaaaaacgcgaactgaaaaagaaaggcaatgaaaatgaattgcgcatggaaatttgaacctttgaattactaacaaaattcagaaaaataacttttgaatgaattattttaaaaccattggaattaccgcaaataaaaaaattaaataaaaattaaatgaaattaaaaaaagctaaaagactaaatgcatctgaaatatccgcgcctgattatatggccaaaactttgttgaatatttaaaatttcagcatcttacaattgatgaaatttttcttgttaattgtattatttaaatgttaagacaatggaaaatcactcatttaattacaatttttaaatgaattgtgcaaattaa

SEQ ID NO: 78470 - DNA, 889 bp, Heterodera glycines
atggggggggggaagagggaggtaaggaaaatgccaagaaaatgaaaaataatcggcaatggaaaagcaaggaaaaagcaatagccaaaaaatgccaacttgcagcaaatcatcaaaaccaaaagtgaaaatcaatgctcgcatttacgtaagtaatttttaacaataaaataatggcaatattagtaacattttttctttaggaatgcctttctcatttttatggctttatggcaaagcttgaaaatgtgcaaatttcttaaacagggctcggatcttaccaagtcactttccaagtacataacgggggaaatttgtgaaatccaagtacacataaaaatgtgaacaaaataaataaatgaataaaaaaagacattcatatgaaagaatcccgatttccaagtacaatcttggaaataagtacagtttaaagtttccaagcaaaaaagccgaaatcaagtacgtacttggcatccaagtacgaatccgagccctgttcttaaattttagatttggagggaccgaacttaataaaggataatctatttaataattatttattagaattaggaatttcacattttgcaaaaaataataaaatttttaaagaaaaaatattatttttcctaacaattcttcatttaaaaaaaatgcagcccaaaatgcaaaaattattttcaaatcattcaaatttcactttgatcagatgggaaaaatgaatgaaaaaggcaagaaagtaaaggacaaaaggcactcggaagagacggcactttttgatcaaatgacaattagtgaattgaacgagtacgaagttgggcaactgatcgctaactcggcaccaccggtacggtcaattgaaggcatttgccaaaaaagggacaacatttag

SEQ ID NO: 78471 - DNA, 1252 bp, Heterodera glycines
atgtgcgaactcgatattttacacgactctctttaccaattctgccccgaattacacttaaaacgactcaacagcttaacgttggcttgccacgcattacttgactgtaaaactctcactcttaccgaacttggccgtaacctgccaaccaaagcgagaacaaaacataacatcaaacgaatcgaccgattgttaggtaatcgtcacctccacaaagagcgactcgctgtataccgttggcatgctagctttatctgttcgggcaatacgatgcccattgtacttgttgactggtctgatattcgtgagcaaaaacgacttatggtattgcgagcttcagtcgcactacacggtcgttctgttactctttatgagaaagcgttcccgctttcagagcaatgttcaaagaaagctcatgaccaatttctagccgaccttgcgagcattctaccgagtaacaccacaccgctcattgtcagtgatgctggctttaaagtgccatggtataaatccgttgagaagctgggttggtactggttaagtcgagtaagaggaaaagtacaatatgcagacctaggagcggaaaactggaaacctatcagcaacttacatgatatgtcatctagtcactcaaagactttaggctataagaggctgactaaaagcaatccaatctcatgccaaattctattgtataaatctcgctctaaaggccgaaaaaatcagcgctcgacacggactcattgtcaccacccgtcacctaaaatctactcagcgtcggcaaaggagccatgggttctagcaactaacttacctgttgaaattcgaacacccaaacaacttgttaatatctattcgaagcgaatgcagattgaagaaaccttccgagacttgaaaagtcctgcctacggactaggcctacgccatagccgaacgagcagctcagagcgttttgatatcatgctgctaatcgccctgatgcttcaactaacatgttggcttgcgggcgttcatgctcagaaacaaggttgggacaagcacttccaggctaacacagtcagaaatcgaaacgtactctcaacagttcgcttaggcatggaagttttgcggcattctggctacacaataacaagggaagacttactcgtggctgcaacctaattgctcaaaatttatttcgcacatggttacaccttttgaaattatgaggggatcgttaccttcccgaagcgcaagtataagcccaacaaaa

SEQ ID NO: 78472 - DNA, 371 bp, Heterodera glycines
atgcgaccttcaacttccaacctggactcaaaatctattatcgattcctacttaaattcgacggaagattgtcagtttttattgcgagcattaggtaggattttcttttgtacttgccttccaagtataaacttaataggtaacttgttttagagaaacaagcttttgagaatgtggtcttcgctttacgcgctcaaggaccgctaacacaatacactgagttacttttggatcatctgaagacggcgttgtcgtaagtgcaacaaatctcttcaagactatttgtttgtttacagtattgatgatgatgaatttaacataaaaatccgaattgcttctaataatccgcatatctgtcgtattgcccagcg

SEQ ID NO: 78473 - DNA, 411 bp, Heterodera glycines
  unsure (1)..(411): unsure at all n locations
atggagttngtaattngtagaaatgtaatgggtaaatntgtggaaaagtnataaaaaaaatttttttttctaaattttcagaaaggataagaaaggattggtgcataagctgaagcgacgctttgcactgttcgccaaaatggatttgcaagaaacagaatgttgggaattgcacgaacgcttggccaagctaaaagtggatgaacgcttggccaagacaaaggtggccaagaagaagaagaagccgaagccgaacaatttcaagcagtttgacgccgacttcggcaaggccatgatgacgaaaggcccggtgtttgtggaggatttcatcaaagcgatcctcctctgaaatctgatcacttgctaatgaggggctaattaatgggggagaaggcggcaaaacatacaaaa

SEQ ID NO: 78474 - DNA, 1258 bp, Heterodera glycines
atgaagcaacggatttgccatttgacagcaacgcacaaaacgactaaaagaccaggcaaaccaaaggttagaacggcaatacaacgcactgaaacaccggacgaaggccatggaaaagtacaaggcgaaagtggcagaacacagccaaaagataagccaaaggaaggaaagcgaattggcggacaagcagaaactgttggacaaaattcagagaaaagtcggaaatttatgaaaaggaaaaatgaaagaaaaattcagcaagaaaaagggacggaaaattacgaacagtgcaaagagcaagtgagaaggagggccatggaactgtgctcgccacgacccacccatttgtgggcacagactttggccgactttggccaaatgccctccgatttggcacttcagcagaggtcgtccaattcggacagaacggtcgagggcgaagcggaagaagcgagcggaatcaaaggctgtttccggtgcggaagcaaagtgagaggaacggaagggaaacgaaacggaagtccttcccaatttccaaggaaatcattcggaatgacctgcaacttttggcccacattatgtcggagaaacacttggccaaagctgaccaaaagtcggactcacttttacaaaacgcagtgatcagctacgattttatggtccgctaaagaaaacccaaataataagaataataatggaaaaatcagaagaacgaattggagagaatgacttcgttgccacaaaacttagaagaaatttccgaggaaatgtccaaatcgatggacgaaagcttctcattgggcaatgcgccaatggacaaaataatagcaagaaatgcggaaatgtccatttctgatcagaatttaatgcagcttttgatggtcgacgaaatcaaagagaaaagcaatgccaatggaacgaagaaaaaacgggcgaaaaggcgccaaaaaataattcggtaataaattgggaaatgcaaaaaataaaatttaaaaaaacaaatcgaagggaattcgaaacgacgacacaaaaggaaattggcgacgattggagcagagaaatgggacagaaaacggcggcacagcaaaaaagtgccaaaatattgaatattttgcagacaaaggtcgaaagattgggaaattcagcggaggaggggcaattggaggagaacgaactgaagggagtgcagcggaaagtcacggaactgatcagtgccctgcgaaatgcgcacaatgccaaggcacaaaatgagcagtga

SEQ ID NO: 78475 - DNA, 138 bp, Heterodera glycines
aagcgattcacccaaatccgagaaaggaatcgacatgcgcatttggtccgaaaggccgaggaggagcggcaaaagcgcattgaggagaacaagcaacagagagaggaagcggagaagcggcggaaggacgcggaagag

SEQ ID NO: 78476 - DNA, 403 bp, Heterodera glycines
atgacggaagaagaggagagtttggcacaagaggaggaaagtctgaagaaagagatcgaggaggaggtgaagcagtagcaggacgaacagtaaacattgttgacccattcaggaagagaatttgccggacttttcggatgattttgtggacaaagacaatttggaggaattgccagagaaaagggaggacgaagcaattggcaaagagggagcacagagtgagtgggacggaagagaaggccaaactcaggcgaacagtgccgagccgagccattatagaaacccgggagagttggcacagctccgggcaaagcttctttcgccgacgaagcgaaggcaatcggcgattcccggggaaattcaaatggtaaccaaaaaatcgcagaagggccgaagacattga

SEQ ID NO: 78477 - DNA, 161 bp, Heterodera glycines
atggaaaaagaaatttggcataaaatgcggctaaagtaaaattaaataatatttttattttttgtattatttttaggatgcgccattcgaatgaagataaagctaattatgatataaagaaagcgaacccgtcgagtcacagagaaactgagaatttttga

SEQ ID NO: 78478 - DNA, 611 bp, Heterodera glycines
atccccaaaattcgggtccccaaatgtcgggatccccaaatgtcgggatccccaaatgtggatccccaaaagtcgggtccccaaatgcgggatccccaaagtcgggtccccaaacgtcggatccccaaatgtcgggtccccaaatgtcgggttccctaagtgtcgggtccccaaatgtcgggtccccaaatgtcgggttccctaagtgtcgggtccccaaaagtcgggtccccaaatgtcgggatccccaaatgtcggatccccaaatgtcgggtccccaaatgtcgggttccctaagtgtcgggtccccaaatgtcgggtccccaaatgtcgggtccccaaatgtcgggttccctaagtgtcgggtccccaaatgtcgggtccccaaatgtcgggtccccaaatgtcgggttccctaagtgtcgggtccccaaatgtcgggtccccaaatgtcgggttccctaagtgtcgggtccccaaaagtcgggtccccaaatgtcgggatccccaaatgtcgggatccccaaatgtcggatccccaaatgtcgggtcaccaaatgtcgggttccctaagtgtcgggtcaccaaatgtcgggtccccaaaagtcggg

SEQ ID NO: 78479 - DNA, 3384 bp, Heterodera glycines
atgacttttgtctacgagtcgaagcttcggaaagacaacattgtgtacgacaaagaggttgggcttcaacatgaaatcgaacagacattccaaagtcctccggtgaaacgctcttacaattcttcgcctcgttccagtcccaccgattcaaaccaatgttgctgctcgtgtatggtgagtctttttcatttaattttttgattctaagttgagagatctttgaaggaatcttactacttatttcgtcgttttgtttgattttatgaaaatttccaggaaataattggcggccttttgtacaattgctcaagatgcaactcttcctttcattccatttgtcattttcccgctcttcccattaacaaaggcagctattcttctgattggatttgtcatcgttgtgaaatggaagtacaatacaacagacggtaattgttttttttagtttttacaaaataataaatatttttacagtcatgtgccgaggattaaatggaatttggtaaggaatttcattaatggatttacaataaaatgcttttttggtcctttttaagtttcttaattttgggaattacaaaatctatcaattttacctaatttcgttataacacataatttttcctcacatattactactactcttccaaaaaaaaagtttttctaaatttaatgtattttagggttttcaagaaaaagaagatgtattaaaccaatcattcgttcgcttcttactccgcttatccgggaaagatggtgcgccgtccgaggatttttctgaatttgtgaactccttaaaggcaatcaattctcgtgaattttctcttgacaaattgtgcgtcgatgaatgtttttacaaattgcctttcgatgaacttttcgcaaaagatgagccaaattcgaagagatgtttttactgtaaaaggttaacactttcgaatttgcctattttattttgtacaaaataactaaataaaggttcgtcgagaagaggatggtttcttgcgacttttgcgacgcttctttctgtttcgactgccccaacccgccttttactgcactgccaaatgaacgttttatgtgctcacttcacatcgaaccattcatcgtccttaattttgtttcttcgttttacaacttttctttaaggacgccaatttattggattcgaaacgggtaactgaccgaattgccctttggaaaaggtacaccgaactgccaaagtccgaaacgccttttcggtccgttatttcgtgtttctacacaaaagttagagaggataacacaaagcaacatcttaaattgaagtcaatgacaacaaaaaagcaacaaaagactatcaataaacccttcaaaatcgaaagtctgatcaaaagggcttatgccgttgcggaacaaaacttttctggagattgctcaaatagtcgggaagaaactccgattgatgttggcagtccggacgatgccagactgtcaattgcagttgaggctttgatgaaaatgcataatcagacggaggaccacgatatgatggagtttgcaaatttataataatgtctaccaataataatataaaccgatttatagtgattttcttcaccccttcaccgtatcagaatccaaatttgactttgccatcggtttttctgatgtttttgtgccgaaaatggaagaagacaataaccaactgccgctgctttcttttaatccaagtaaaccatatttatttctttgaatatttataaatgtttcaaaactgcagcacttttggacagaacacagcccattttcgcctcccttaaaattttgagtggtgctgacaaaagcatgggagagagcgactttctgattccaattcattcgtcttttgtcactttgggtccattgaaagtgaattcgcttcatcacatcaatttgaggttttccgtccgtctttgcttccaatcttttttgaatgtttcttttagtcattttacgcactgcaaaatgctcaccaagcaacaggcgttgattttcttcgacagggtctttcttttcttttctctattcatttaaatgggtttaaggccaaactttgtttcgaaattgtttctgccaatttgttcgactgcgattcttttccgtcctccaaatgcatgcaaaagaatgcgtctcgtttcgatgatttcgtttccgagtgcacctgtcaaagaatggatgcggaagatggcgatgaatcggttgttcttcgattgttggaatcgaactatgaaattgtaccgtcgcgaaagtctgcagttttatggaacggtgcgataattcgtattggatgtttgcgttttcactttgtaggcttaggcattttatgaatgaaaagcaccacttcatacataaaatgggggatgggggatcggtctgaccgtttacaagcaaaagccggggggggggcggcggcgatgaccagctttagaaagggagtcctgccatttaaatcgatgagttttaaatccccttttgcgctgcgcttttttcaaaaaaattcagtgaaaaggagggaacgtttgcaaattctagtgtaattgttaacagatgtctaaaaaattattattttttctgttttgagtcattttttaataatttgaactgaaacgattttcggaatacaattagaagatttattaatccaaatactctgataaatatggtatttagccttgaacattccgagcgcctaaaagacgcccgacccttataatgttgttataatattgcccttatttatttccccaattgttccctactttcctttcattaactaattggtttcttatcttttttattaacttttaatgtaaaatatatgtgtaaatttatttaaatcacttgaaaacaataaacaattgatgaacacatgcatttttagcataagttcatttcgttttacaccgtaacgcattttaaagttgtggttgtcatagagattcttttacagttattttaatctttgattttagcattgcttccttcattctgctaaagtgtgtgccgtccccattaattttttatttaatttgtgaattgttctaagacgccttctgttactttttctctaattataaagcatttagagctcacttaaacgatattctattttcagacgcactaagcaaacgaatatggcagatttggaccaaaataatgctcggaatgaaagcgaaggacggagcgaaagtaccaacgaaatccgcgcgccgatcaccgaagcagaaattagggcgaaagaaatggtgatgccggacgatgtgctcggattgaactgcattactgaaagtatgatcacaaaacaaaaccaaaagtggcattccctttcagatttcctctgccgacccgaggataatgtctacg

SEQ ID NO: 78480 - DNA, 1988 bp, Heterodera glycines
ttactttcgcctcaacacaccgctgaaacggcagatgttgctgcacttcagaggatcacttcggaaatgatggacagacagacaattagccaactcataaaacgttttacaaaaacaaaacttattaccaaatcaaaattccatttagcaaaacaagaagatgagccgggctttctgcttgttcgtgccttctccgaatttctctatttttgcctttaccattgctacgtttttgcccttctctccatgatggtctgtctatttttacccgttaatttgagttttcatttgtccctttcttttttcagatgtgggcccttctctaccattctgtgttcggccttctcttccttttgctcacttgtttcctctgggccctcgtaaattcgcgcaaatggacattcaaattgtcccccattcttttggcttacgttgaggtgactcccaaacaaaaggacaatttgtttttttatttgtttcttttcaagttccttttgttggttcaatatgtgttcagcatgaatttacacaaaaatgagcttggacttcccgaatcggtggaaatcattggcttcaaacttgagcaatccaggactgatgcatttatggcacttttgttgaaggtgggacaaataataacactgaacacacaaattcccaccctttttaacttttttcttaccgttgccttaaagatcactttttcaagtggctaaagtccaaaaatcaccgactgacagaaatgaaaaaaaaatatcaattttcttttgcctcgcaatatttgctgatgagaaaagatcttttgtatgtcaatgtactcaactgataattttgaggacatatataatttaattttaaatcgagttcaaattaatttcttttttccctcacattttatattttttactaaaagctaaatttattataatttaaccgaattttattgctttttggtttttcgctttttaaagccatttcaaggagaaccattgcaataaaaatcctaatgatgagggaacgatataatattatgaccatgcagtgaatagtcaatatttaattctttattgttttttcttcagattatcctcagtcttccacttttcattcttttacgtttgcatttgcgcgaggattattataactctttgaacggacgtgaacgattccgacaagtcaattacggcacattcgcagtgaacgacagtcaaaggcacgtaaagtgccggaaattcacactttcgagggcaaatgaggtgaagcttgatacatttgagcaacacaaaaataaattgtgaagtctcattttcaaattatttaggacccatttggctgcatttcatatcttttgacaaagtattggattttcctagcggtcttttgcattttggtgaattcgccaataatcggtgccagagggggcggcgtcactttcttttccatcggatttctcacctttttcattgtgttcattcttcttcttatcgtaagctaatcatacttttttacttaaatcttctctttttttcactaattaggcatctttccgactcttccggaaagtcgtcttcgcatttttcaccgttctcatcatttacgcttccgttgttttggtgtccatttatctctaccaattcaagggagtgcccgagttttggcaaaagtggacgcacataaacgaaacggtgtgggaggacattggactgatcgattacaaagcaaacgaatttgggttggattttttaaataaaaaacattgagtaacagttttattgggatattattgccattttagacttctgttcactaatttgacaaaactcatctctctcctcgtcgtcactatgctccagctgaaattcttccacagcccttggtcccgactcgtctccgattccgcagaagcgtctcatctcgaatgcgtggagaccgttgacaccgtacgcgccggtttgtaaaaacggaatcgtataaaattcatggcacct

SEQ ID NO: 78481 - DNA, 1215 bp, Heterodera glycines
  unsure (1)..(1215): unsure at all n locations
atgatcggctacgatgtgctcgccttcgtgttcattgtgtttcagctgagaattctccattcgtggttcttccaacgctgcatgatcgagtttaggtgtgaggtcatccaagccaacaggtgagcagagataattccattcatttaatttaaaagttgtgtaaacaaattctaaaataattatcgctatttatttgccttttaggggtgccattcttatcaaccaactcattgagaaggaaatgcgtgaacagactgaacaacaaaacaagaaacttcacgaaatcaaagaccgaacggcagcgatccgaaaacgatacgaggaacagcaaaggcggagcactgggattagctttttctcgccccaaacatatggacaaggtccatttttgtataagtactttttatataattttttgctttgcaaaaattagcatttgttttttaatttcgttttaatttgttttgatcaatggtctatttctgtttcgtattattcgacccgttccgatggtctgcagtctttttctgacactttctttcgttcctctctaatgccatcactaatcattgtccaatctctctcttttgctttcaaattgggtgattagtcattactcccaaatgggtggtttcgttggtgttccactgattgtgtatgttttgtctgtcctcagtgtttcggcacagtccttcttcactcgtcgagcgtcttccgacttttgacgaagacgaccccttaccgagttacgacctccgactttctgtcccgtcttccgtccctggtttgttgtatttgcattgccttcttccgtgtgctcgactttcgctctctttcccgcacttcgcttttgtttttcgtttgctgtgtttttgtttctttggaataatatttaattttgttatttaggggactattaaaattctcgttaagtagcataatatttgttattggtgttggtttgtgaacattggcaattgccctaatgtgtttttttttgtaacccttccttatacagtaattacttttctgctattcttttgcctttctgctttattaatgcgacttttcccttggatttgcttttaacattttttattttgtgatattttttttcttatagccaaacgttctggcgactattacatgtttgactacgagccggacaaagatgaattagtcgtaccaattgagtcatttgtntcccgaaggtaa

SEQ ID NO: 78482 - DNA, 148 bp, Heterodera glycines
acagacaaaacatacacaatcagtggaacaccaacgaaaccacccatttgggagtaatgactaatcacccaatttgaaagcaaaagagagagattggacaatgattagtgatggcattagagaggaacgaaagaaagtgtcagaaaaa

SEQ ID NO: 78483 - DNA, 471 bp, Heterodera glycines
atggaccaaaaccaaagtgaccaaatggtaaatgagtttggcaaccaccgcctttctcagataaaggccgcgatcgatgacaatcagcagagattggatcagaatgatggcgaccatcattatagggatgcgattgctctgaaaattccatccagtgtcagatggcggtaagcaatagagaccggaccgagcagagcccagtaccggtttttaccgggcccggatatttttgggtaaatccggagtgaccagttttccggcttgaccggtttttgatagacccggaaaccggatgactctgaacatccgatctacagtaaccaatcagtgcctgaatgtccgaaacaacgtcgcctgtgccgccttcgccaaaagatgaatagccaaaaacaacaattaacatgcacaacacgtccaggaagaacatcagcggatagaggtcgcggatgtaacggaatttgggaaaaatga

SEQ ID NO: 78484 - DNA, 1333 bp, Heterodera glycines
accaacaaactcaagaagatgaggagaccgatgttccatcgatgcgaaaactccccagacaagaaattggaactgagcgccaagaaaagttggcaggtgacgagacggaaaagaaatcgttggaggagaaaagtgaagaagagtcacgagccaaaagttggggtattgttttgtttttcgaaacatttccatttgtcagtcaatttcccttcccaaaaggtcaaacaattctttctctgttccttttcgccttgaaattgttccgttcactgatcggatgggtctccgcctttctcaaccgacggtctcgcgagcatcgatacgttgaatatgtgttgaacaaagagaaggagaagctgaagcaaatgatgtgcaacgtaaatgcccttaatacgcttttacgcttttccctccttttttcttttaggagcttttcaatgggcaaattacgacttcggcattgcgcgaccgatgggaagcgcacaatatgcatttggtatccagtgaggcggacatcaaaaggttggccgggaggatttgatggattataataaacaatattagtatttatttgtttcaatcgcttaaaattgaggtttttaggttggaagacgaggcgctcaatcgttgggagcagcgaaacattttcgcccgttttatcactgcgattggaaattgcatcgccgcccacaccgacataatttgctactgtttcgtgatcattgtgcacgggtacactgccggactgctcactttgccacttcctgcgcttgtctttctttgggggacgttggccagcccgcgcccctccaaattgttttggattgtcatgttcgttttgaaatagcccagctaaattttcatatttcattataggataatttacaccgaattcgaaatcgtggccaaattcgcttttcaattcggattttggccttggaatggggacacagtcggcaataacaaagtgtacaagacggagtatgtgttcggagttcagcgcattcagggctttgccggcaaggacgtcgccctgctcatcgcactctttttccaccggtaaaaacgaaatttgtgaggaatttcacacataaatgggctttttttaagttatatgttgaggaaatttggactttggagagacgcaagttccgacagattgattaacgaaatgcccaaaaaacggatggacaatgggtcatcttcatcatcatctgctgaaaaaagtccacagaaatcgactcaatcgacggttgttccatcgtcgagtggagaaaactttgaatcggtggccaaggcacaacaggaacaggtaatttggattttttggtag

SEQ ID NO: 78485 - DNA, 1158 bp, Heterodera glycines
atggcgactggtggtaaaatgggattcggagagattgtgccgaaactgagtcaggtgaccgaatgggacacaatggccaatcaggtggacacgagtcgtttgtgcataattaggcttactgatttccttcgctttttcagtccctcgccgaaggcttacgctgcgagataaaacagacgtgggacgggaagccgttggatgggcacggacccatcaaaatttggatgcgatggcatttccggcgaatgttcgggcaaccccacaaaagagtggtgagacaatggcattatttgcttgggatgccggcaaaaattcgtcatccttaattctttttagattcgcgtggagatagaagctccgctcgtcgatgaccccgaaccgcccagcgaattcgccggcatttgcacggatgtgagtaaattaggcaggggtcgatcggtacagcagttgcacatttttcaagctgtacaactacgaatgtgtggagctgttctttgccaatgacaagggcttctacacggaggtaattaaataatttgtaaattaacttttgaacttgggggcgtgggaatggcattttgtcctcattggattggcatccgtttctgagttcacacatttctcattgtcaggtggaagtcggtccgcacgggcattggctcgtccttctccacaaaggctacagacaatgctttaacagtggcgacaatttgcaattggaagtgaaaaacgaatggaagggcaccgaatggcactgccaattggaaattccgttggcatatttgccgggaagtaagccaagcaaaagccactcattctgtcccgttctttgtttgcttcagatgtgaccaaattcaacgcgtacgctttgcacggttctgacgaacagcgccatttcgaggcactgcacgcggtcaccgacggcacactgacggagccggacttccacaatctgatgttttttggcaaactcgacacgaaacgaatcattccggatgggtacaatcggacggtgttcaacgacctcaaatacggcgatctttgggaagaagccaccagcgacaaatgaaaagccgaaatggacattttaacactttttatcgttgtgtatttatgtgcttttggtacttatcattctttgtttatggttgtttacga

SEQ ID NO: 78486 - DNA, 129 bp, Heterodera glycines
atgcaaactccgaatgaattgaccgccggctccggtgtcaccaatttcatcaaatgctccgtctgcgatgcaaaatggccctataaaagtgggcatttcccctggggctttgccattcgttgcacaaaa

SEQ ID NO: 78487 - DNA, 189 bp, Heterodera glycines
ttagaaacgggcgcgaagcgcccgtctgaggccgcgaagcggcctcaatagcccaacaaatttagaaacgggcgcgaagcgcccgtctgaggcctcgaagctgccttaatagcccaacaaatttagaaacgggcgcgaagcgcccgtataagttcaacacaatttaaaaaacgggcgcgaagcgcccgt

SEQ ID NO: 78488 - DNA, 499 bp, Heterodera glycines
atgttcttctcttttaaaaatcatttcctccatcatcaattagaacaaaatgccaaatttggcattggctgttccggcattaccattcaaaatccgccggtcaaatcgaagcagcaaaaaatagaggaaatttacggcactcaaaacaacaacattatgccaattgttacgctgctcagtgttttgtatgtgtgcagtgttgttgtgcaaacagcttgtgcaatgccaatgcaaatgttggtcatgtacacgcccatcaacagttacgaaggtggatttaaattatttcttgaaatttaaataccgaaaatccataactctcgacaaatgctaattaatattaaatgtgagaatttggtaaattgccacattagcaaacatgaatcatgataattattaataattttggtgggtattgattaagcaagctttatctgttaagaataagctttatgaaatatgaatttttagaaaatccccgacaaaattacttgcccaa

SEQ ID NO: 78489 - DNA, 171 bp, Heterodera glycines
atggtccattcctttttgcgttacagtatattgtttgtcatttcatgctttgtgtacggtcatgatgatgaaaacgacaatcatatcattggtgatgtttatcttggtgacgaattttggtaccaactttcgccgatcactgatttgcccacaattgatggagtcgaattt

SEQ ID NO: 78490 - DNA, 1284 bp, Heterodera glycines
atgaatttgcacacaattttctccgtgttattgtgtgcgctggtgttgtcctgcgcagtcggaaagccaccagcaaaaaagggccagcaaagtaaaaaggctgacgtcatagctaaagccgctgctggtgaaccggccgaagtaaagaacgatggcaaagcaaaaaaatcggctaccgtcgtgcctgtcgcggctggaccggtaggcgcaagtaacgatgccaagggcactaccgccggtggcaacaaggcaaccggcgacactggcacgactaaaccaagcgccggcggctctgccacgacagatgatgatgatgatgacgagagtccttctccttcggccgccgccggtggtgcaacgacaaccgatggcaaggctaaaccaagcggcgatggcacggccaccactttgtcgggtggcggtggaaaggcctccagcgcggcaaaagctggcagtggtggcacaactgtgcccgccaaggtcattcagaaatttaaaatatatttattttgaattttttgttaaaaaaatttatataaagggagaggaaacaaccgcagtaaaggtggacgaaaactcgaaaggcactgatgagacagagaaaccggaagggtaaaattaattttttgtcaaaactttaataaaaaaatttatgaaatagaatttttcgaattcttgagtctgtttttgtttaattagcctttttaaattggaaagcgcccaattcatactgttttttgacaaaaattaatttctcataaataaataaaatcgtcaaaaaaattaaatgggaaatacatttttatgaaaggaagcacccgaatttttttaaaaaagagacactcacaaattgaaaaaaaatcatttttattccttaataccccaatttttgatcaaattcagctcaactgatgccaccattactggcgacacgtttacaaaggtcaacaaaatcgcggacgagatcacagagtgcgagttttacttcgttcatttggaaaacgtggtaagaaaaaaaacaaatgcatttttaattaaattattgttttttaaatgcccaaatttttttcacattttgcaacagaaagccaacgaaaaggaaaagctttggacacgaaccaaacaagaagcggagatcgacaccgaagagatggcagaagatagcgtcgattatcgcattgtgacgcccgccatttccaaggaccaaccggacatgggcacattgtacgagcaagacacggatgatttgccctccgatccagatagaagggcaaggaggaatat

SEQ ID NO: 78491 - DNA, 680 bp, Heterodera glycines
atggaacggaaacagaaacgccttgaggaggtgacggaaggatttaatattgttttatttgggctgcctttgcagaaggacgaaggcgagctgagcagcagtgactcggaggagccgaccagttcagaggaggaggaagaagcggcgaattctgccgacggagcggcggcccccaaaaagtcgggcgcgcgattggtcgcttctcgcgaacgacgccgcacgcgcagagtggacgagcagaagcaagttagtcgacgggacctctacaattgcactatcgcccctggggactcctattttgcctgttggttggtctgaaatcgaaataaaatatcctttcatataaaccatttttagatatccttctttggtcaaaattgaaaaggatatttatgtttttcttaaaatcaacatttactgtcatactaactttctaaaaataatgattagatttgatatcagattcagattttatccaaattgattatttcccattttggcccctttgcgtaacgagcggggagatgctgacattacctgacaataagcaatggggcggggggtcatgcaccgaacggcgcctaccgtcaccgccgaacccaaaaacgtttttcttaaaaatttgactggaaatagcaaaaatttagtcaatttttgataaaagctgttaacaaatcgta

SEQ ID NO: 78492 - DNA, 885 bp, Heterodera glycines
atgtccttaaatgggacctatcttttcaacctgagcttgtactgctccaactccatgcatgaagttcgagctgtacaggtttgttgcgatcccagagaccaaatctaagaccatattcgaactcaacatacccgatttaccttgtttaattaaattcagaatttccaaaaccacttaaaacattatgttacttggtggtcttgaaaaatgccgtttttggagaccactttcagtctcggctctccaataattcaatttttgtaattaaaattttatatttttgtgttcttatagtcctaactttgctctatttaatcactatttctctggctctgtatctcttttatttttctttaaatcagccatcaaaaatacctaactctaaaatgaccatttttacttacttaactctaactccctacttttccattggtattgatctcttgccagaataatggcaacatattattgataataatggcgggtatcttgaatcatgattgtgttttgttgaaattaaaaaaaaaaatttaataaaaaaaatttgggtatcaaaaattatgttccaccctaagtacgggataatcacctctaatttcgaagttttttcgtgcatatttttgacaaccctgctcataaactacagaaaaaagagcccacaaagaagattatttataaaattattaatgctaaaggcgtagaaaacataatgtacctaattaggaaaaataactaaattttaaatattttagaaacgcccatctcaaattttaaatttatatttggtcaaaaaaacttaaaaatttttcggttcgattaaccgaggaatttttagaaattgccatttaaagggtaaaaaattgaaatttactcaaatccctaaga

SEQ ID NO: 78493 - DNA, 825 bp, Heterodera glycines
atgcgctcaaaattgttgtggccaatgttgacattgcgcaggcggagggcaacgaccgtcgcaccaaaagtggcaaattcactttggcccagctcagagccaccgacggtgaggcggccgccggcactgggctcaaatttagggacacgaaatcacaaaaataattaggtccaaattaacgaaatgtataaattttgaagacagtctattggaggggaaattgtcaaaattgccaaatgtgtataatattccattgcttccatttctcaggcatttgccctctccaaaacggcaccaatcagttcgactcgcagaaggcaaggactaaaattattataatcatcattgtcattaagcaataattaatttttattattcctattctttaatgaatgataacacaaaaattattctgatcagaaaaatgatataatttccataaatctttctttactcatttgtcagtgaatttattaaacttaattatgagccttaattatttttaattggataaatcccgtgtccccgggtattgctggactcaaaaaaaccgagtccgggtcttgaaaaagccgggtatccgggttccggacccatttcggatacccggacccgttttaccctagttcactcatttatttgttgggaaaagatttttctctccaaatatcattggattttcatttttgtccagtaaggttcaccagccaaatctctctctctctctctctctctctgtccaatgatcggtagctttatccaaggcctaatcagtgtatcaatttcgcgtgttttgatcaatgccgctgagacagcaaaaataaa

SEQ ID NO: 78494 - DNA, 1348 bp, Heterodera glycines
atggataaatttgaaattttgaaatggattgaccaactcgacaaacctatggctgatttaataagaaaattgcacaaatcagtcaacgaattaagtgcttcaattaatgaaggtgtatttaaaaaaataatttatttatttatttatttagattctttggaccaaaatgcaaaaattcaaaatttaataagtttgattaaagaaattgcaattggtacggcaaatcgtttgcaaatctcaacaaatgaaattatgccaccggcagatggacaacaaattgatcagaaaagcatgctcgaagagttgaccaaattttggcacaaatttagggaaaatggggagcaaaattgtaattcttttttgttaacattaaaattgtgtttttattcaaaaataatttgttttttgctcatgaaaaacgcgaacatcaacaacgaaacaagcgcatacttaagctgataatgagtttcacaacagacggagtcgacggattggcgaacctaaaaaaatgcaaaaagtttgtgagcgtttcaaatcgtcatacatataattcagataaattacggcatttttggtccccgtcatgacagattactggttttagtgatttttccctaattttaattatcaactggaatttttaatttatattttaaaacgattaaaaaacaaaaattcaacgaagttttattcgtttttaaaaacttttagatggtgaatagtttttgcattcattcaattttcatacagaaacccaacgacaaagacgccggaagaagcgatcagtgggaagcacagttggcgtgctaattgttggcggctttttttgcattttggctatttgggctatcgggaaatattgtaaagattgttctcccgaaaatcagcaaggagaagacatcgaaaatggcagaagagtagcggcacgagaaattcagccagaatcacctgaaggacacatgccgccaagacgagatcgatcatgtgaaagaaaggggaaggcgaggcagggacgacatcgatcacggtcaaactcgcagacgcgtttgagtaagccaaatctggctggaagcccaggcccgtttaatcagatgggctgggctaatttggagattttttttgttcctccaattttttgtttacaatacgatttgcaaaagttatgcgtcgggggggggggaatatgcctttttaggtaatttaaaactaatgaaaagtgagcaattcagaaaattttggtcatatttttgaaaaaaaattccaaaatggcggttatccgaaagcgaattatcttataaaaaataatttttttaggtaaattattgtgaaaatgaaataacttaataaa

SEQ ID NO: 78495 - DNA, 146 bp, Heterodera glycines; identical to SEQ ID NO: 61784

SEQ ID NO: 78496 - DNA, 217 bp, Heterodera glycines
tgtcgtggcgacaagaaatttgcgtcgaactctgcggggtgaaggggacgggaaggggatgaaatgggcgaggcgcgcagagtagccggtcgggggaacgtagggggtcgggaccgatcggagagcgatgagtcgtgccggttttcgtccaggcaaatagaccaagttgggcacaattttaataagagtatgtttattgtgtcgacctcaaacttgg

SEQ ID NO: 78497 - DNA, 1245 bp, Heterodera glycines
atgcatgaaggccttgcgaatgtttgtctgatcggttcttcaatgaccgtggtgaagtccaaaattgacatgcaggttggtcggaacgggatttatttaattgtctttttagtaattaaaaattgtttgtttttttcagatcgctcgcaaacggaagggactgacctcgcaacatgacaaaagtttggtcgcctttatgaatgcaatttgtgccgcatttgttcggcacgtgaacatcgaagtgacttccccccatttctttttcactgccaaaatctctcgccgattttcagctgatcaaatgcgttgttgtcgctagtccgggattccttcgcgatcagttcatcgagtttttctggcagtacatcgaacgcgaagggctaaagcagcagttcgccccgcacagaggtaaatttgtgctcgtccattcgtcaagcggcttcaaacacgcgctaaaagaagcactttcggacgccactgtcagccaacggcttagcgatacgaaggcactgatttttggaaaaaatggcattttccaatgttaggtcattttaggcacaggccgaagttaaggcattgaacacgttcatggagctgatgtgcaccgacccacagaaggccatctacgggtacagacacgtggtgcacgcacgcgaacaacagtccatcgacactttgatggtgtccgactcgttgttcaggcaggcgaatgaatttggcatggaaataattggcagaaacatttaaaggtccaaagaaattgcccagaggaggaaatatgtggaccttgtggagagcgtcaaggatcaggcgagaatgaagcttattggccaccgctttatatattttttctctcttttagggtgccaatgtgctaattttctcgagtatgcacgtgaccggagagcaactcacccaattggtgggttttattggcattaattgccataggcatccaacaaaaagacggacgaattgttttagactggtgtcgctgccattttacgatttcctatcgccgatttggacgacgaggagtgggaacaggagagcgaagtgccaaacgacgaggccgagagggaagagaacggacggacatgagaagaaagcggaggaaaaagggggaaaagcaccactcgagaattgtttttttcaaatttcattgttcccaaatgcctaaaatacataacaaattttatgtgttggttgaccatgaatatttttgtaattatggatgaagagcaa

SEQ ID NO: 78498 - DNA, 464 bp, Heterodera glycines
atggcgcgtcctttcattggctttgcgtttgatgccttcaaacggcgtttgggtgcccatgacttcccatttctccgtggtttcatccatggattcaattagtggggcttgcttaatttactgaattattccaaaatttatttaaatttttaattattttaaatgaatttaacacaatataatttcataatttttgttttcaagttatgatgcccaaagggtcaaagaaattggtgccgaaagggccgcggccgaatgggtcgtccgttgtgaggggaaagtgaagtgggaaatgccaaaatggccaattcaatgtttataatattttgctttctcagatttgaccattccccccacattttctccgattacaacgctttgcagcggttcacttccgaattggacccgaaaagagagtccgaccgcgtccatttggtggccgtcgatgccactgactcgtgcat

SEQ ID NO: 78499 - DNA, 1198 bp, Heterodera glycines
atgcctgctgttgattgtttgaatggatatcgcagttacattaatgatcgcaatgcagagttaattatgggagatccattgaacccaaacatggaaacggatttcgattttgctggaaatttggcgctttttgacaaggctgttagtaattacaatagtaataggatacttatgcagttttaagattaaagctaacctttaaaaaataattttaagtgcaattattacgctgtcattgcatgatttatgcggggacccaaacaaatttttcccgcccgcaggggtgcaccccaaaatttcgccgcggaaatttcgccggacggaatttcgccgggacataatttcgccaaaatttttttttaaaaaatttggaaattttcaagaaaaaattcttagaatttttttatatggaaattccaatgaaaaatttttgaaaaattttttagtgattttttggaaaatttttcgaaaaacttactaatttatcataaatttcaaaaaaaatccttaaaattttttctaatttttttttgaaattttcttataagaaattctatgattttttcttaaaaaatttctaagtctaattttttgattttatttttttgcggcgaaattttgtctcggcgaaattccgtccggcgaaatttcggcggcgtaatttcggcggcgaaattttgtcccgtcccccctgaaacacacctccccgtcccttggcaccgttccgcccgcagcagcactgtcagcccgttttggcacgcgcttcgcctcgtcgcctccctcgtcatcgtccgtgtcggaagggcatgcgcagtcggagcattcgaaacgcgagaatttgcttttggccggcattttggtcaacggcgggtccaaacagccgatgtggtagtggcacttgcacgtgtcacagtaggccaacagatgggcatcggttgtctgtttttgttggggggggggggtaatattagaagcagacatttttccttccgtcgtttccccaacgaaaaatttgaatttttttttcatttaatgtttaaaatttttcaaaaaaaagttgagaaaaccacaaaaatttttcttgaaattcttgttgaaaatttgaaggtttttgaaaaaagtctgtttaaaaatttccaggagggaaattaagtgcacccaatttacacaccgactcaaaaaaacgagacacgtgaca

SEQ ID NO: 78500 - DNA, 3592 bp, Heterodera glycines
tgatcggcacaaagtgaggggggggggggcgaatgactgtcattttgtcatttgtcatgagaacggcgagcgaaagggcggcgaagaatgaaaacggagtgacacaccacaaaatccccgcagacacaattagcacctcccgaaatgaggtcatcccgagtgcgcaagcgaagtgattcctttccatttgaatttacataaattgaaaatgatttgaagcaaaattaatttggcaattaaaatttaaaaatttaaaatgtctaaaaaggcgtttaaatatgcaaaaacaaaattgaaatcacatctttttaaagggcctgatcattttgttttgttttttttcagcaaattaattgatgatttgattttcttttctaaattcttcccattatttttcctcccattttatcttttgccgatttaattgcaatttcattcaactaattcttcttttttcctttttttcgcttattaaattttatcagtttcaggagaagaaatcagtcgccatttttggtaagaaaaccgcggaatacaatcacaaattaattaacgtattccattatcttttaatttgattttctttgctaatatgtaatataaattttaaactaaaataaaatgtaaaaattaaggaaacaaaaaaagaaatgctaaaaaataagcaaattctttttgttgttattgtatttcttttccattctcggacaaagtatttttataaatttaatttaattaaataaaaatgataatttaaattaaaagggccgaatcggacgaggaaggcgccgctgaccaaaacatttgggccgttttggtcgcggggtccaacggatggtggaattacaggcaccaggcaaagcaaaagcctaacactaaagacacgccattaattaaccaattaattgctgctaattgcaggcggatgtttgccatgcgtggcatgtgttagtcgaccacggagtgagcccggacagaataattacgatgatttacgacgacattgcgcacaacaaaaggcacggccaattcgcaaaattaccctaattagctgtgctaatgagttcagaaacccttaccccggcaaactcttcaacaatccgacaatgaaagatgtgtacgaaggcaatgcttctgatgaattgcttaaactttgcttattctcgtcttaatttatttaggcgttcgaattgactacagaggcgacgaagtgacaccggcgaatttcaaggccattcttctcggaaacgaagaagcggtggaggggaagagagtgctgaaaaggcgggtacacaaaacattgatggatttgaaatgatcagtaaagatagtcggactgattttcgataaatcaaagggcaattagctaaatgatagtccgactaattgttgaattagttttggtcaaaactgattgctttcaaatgactcttttttctggtgacacaaagagccttaaaatgattaaaaaatattttacattttatttgaagtttctaatatgattttatttgactttttcctacttttttggtaagttaattagtttttgtacttttaagaaaaaatcgaccaactttcagcttctttcaggcaaaaatgttgatttgaaatctccccaatcatctccccttttacaatgagtttttaaaatttggaaaatattatttttttttgttattgtaatttaaaatcaatcgtttttataaaatgcaattttataaattgtttttaaaaatggtatttttacttttggctaattttgcttgtctttttggtggggttttcgtcctttctaattccatcccactgattgattgcttatttgttcctcatttagcaccagcaatgacaaagtgttcgttttcttctctgatcacggcgcttttggtttggtcgcttttccctacggcggcgattacactgaaaatatcgtaactttcttccctttttaatatcgtaactttctcttccaacagttaaccgtaaaggaattaacgcaaactttgcaaaaaatgcacgcgaaacgaatgtatggccaaatgacattttatttggaggcctgcgagtcgggatcgatgttcgaccagaaaattgcacagcaaataaacggttcttcctcatcaataccaacaataaatgatttttctgatcaccccttaattaccctctaattaccctccttttccttccccccccccttttgcccattgacttttccccttcctttctgtcgccgatctcagtgttcgccgtcactgcttcgaatgctttcgagtcgagttggggttgttactgtgacacaccaatcgtcggcttagagtacacttgcctgggcgaccttttctcagtcaattggatggaggactcggacagacaggtgaaacagcggagggaggagagaaagagaggggggagagagagagaaagacagagagatggaggggagggggaaaggggaagagagactgatcacgagtattgatcagttgttgttcttactcaaaggcaaagaaaggaaagagtaaaagtcataagccatgccatcctatccctttaacaacatttttttgtcttttttattaccgtatttactgaattaaatcccctcccctgaaatacagccctttttgatttgtttatttgtcaataaagaaaaagtccacaaaagggaaaaatccgcttacattgagaattcgacttttatttttccggtcaatcttacagaaatgaaagttttaattttatttttaaattgatttaatgagtttatttcaataagctttttatcgagttggttccaaatttttgttacccgccccgcaaaaggtataatttttttgcctaatttatctttcgagttaagtctataaaagggaatgttaaagcgtttagaaggtttaagtatttcaaagggattcagatctgttcggccataaattattttatgagccatgaacagatcagaaagctttcggcctgctttcaagtgttggcagttgaaggtattctaatctttgttggtatggaatgggtggaaggctgcatttgaaaagaactcttttggtgaaatatttttgacatttttcaattttttaaatattttttagaagagatggattccaaacctcaggagcatattccaataacggtctaacataagttttgtacaaaataatccaaatcctagaagattttgatttaataacccgaaataaagaacgcatacgtaaatatgcattctttattacttgtgtgacatgattggaaaattgcaatttattatcaatatttatgcctaaatccctaattgtatccacaacatttattatatttccatcaattttatatatttctttggggtttttattccccaaatgaatacaaaagtttttttaattgagattctgatctgccatttattttcccattctgataaattatgcaatgctttatgcataatttctgtttcggttcttgctttataacaaatatacaatttaacatcatcagcatataatttaattcttactcctgatggcaaagcatcaggaagatcgttaatataaatcaaaaataataaaggtccaag

SEQ ID NO: 78501 - DNA, 1477 bp, Heterodera glycines; identical to SEQ ID NO: 14458
  unsure (1)..(1477): unsure at all n locations

SEQ ID NO: 78502 - DNA, 673 bp, Heterodera glycines
atgtccgtccgcaaatgtccgtccgcaaatgtccgtccgcaaatgtccgtaaggctccctcggggggacgagggctttagagggggagagagttgatggcccactattgtttgcccatgtcgtacacacattttgtggtggtggagtgccgttaagagaattaatggacttgggccttaaaccaaacaaaaaaaacttttttgttcacatggattttttcagggtaaaggaatggaaaatgtgttaaaagtttttttttgttttcaatgtttaattaagggaaggaatggtggtggatgggatgaacttttaaattttaagtaaatgaaagcaatttccaataattatataagctacttcagacctgatgtaaagcaaatttacaagggataaatttaaaattttttattaaataattatttgaaaatttttcagtgtaattgtaaaagggtgcagaagtgccgtgctaaaatgaaaagtcgaaaaacggttttgaatgttttggcacgaaacaatggacactcgagaaaggagggcatgctgaatactgtaatccaaaaagcagaaaaaaacaagtcctaatttgtccattcattaattctcgggttttttgacttaatggaagatattgtctcgagagtttaatggaatttttatgagataatttttttta

SEQ ID NO: 78503 - DNA, 1596 bp, Heterodera glycines
atgagtgctaaccgtcttttacgatggtcacttatgctgttggcgtatgacttcgagattgagtatgtgaacaccacagaatttggacaagcggatgcgctctcaaggctgattgcaaaaagcaccagtcctgaagaagaccgagtcatcgcgtccatggaatttgagaaggaagccgaaaatttcttcagcaacactttggaaacagtgtcattctcatcgaaggacataatttcagcagggaacgaagacgaaaccatcaaaaaggttaagaaatttgtcagagatggatggcccaatgataaagcaattgcttcggaaacggaagaaataaaattgttctttcgtcgaaaagatgacctctccatcacaaaagaatgtctgatgtacggagaacgagtcgtcatcccaccaaaatttcgagcgaaagtcctacgaatgctccacaaaggccatccaggaataaaacggatgaagcaactggcgcggaaccaagtgtactggccaaaattggacgcggaaatcgaggatttcgttagaaattgtgagccttgccaactcgcggccaaatcacccataaaaacagagttgcactcatggccgaaggcgagcaaaccatggcaacggattcacatggactatgccggcccattttatggaaaagagtacctgctcattgtggacgcattctcgaagtaccccgaagtcttcgaaatgccgacaaaatccacagcagcaaccgtccaaaaattacggtatctcttcagccgacatggccttccagagacaatcgtctcggacaacggcactcaattttcaagcaaagaatttgccgattttactcagagcaacggcataaatcattgtttttcggcgccgtacaacccaatgtcgaacggacaagccgaaagatttgtggactccttcaagagaactttccgaaagttaaaaggggagggagcccttagcgcagaaatcattgaaacatttctgacggcataccgtaccaccccaaatgacacactacaagagtgtaagtcaccagcggaagcgttccttggaagaaaagtgaggaccacattggatttgttgcgcccgccgcagtttcagccaatggagcgtgatgaactgatggagcggcgtttcaacaaaagatttggcgccaaaccaagagagtttggcccaggcgacaaagtcttcgcccgtcaccgaatttcgcagaattggcgtccaggaaaagtcgttaaaaagaccggcgtaatttacgacattaaattcgcagatggtacgaccaatcggtaccatgccaaccaaattcgcccacggcaaattgaggacaagacgacagaacaattgaacattttcaatgatgtcttcggccttccaccgcaggtaagagccgaaccggaagatgtacagcctcaagacgaagccgttcgaagtgaagccgatgaggatgaaatcggccgggcagtcgaagaacagaatgatggacgtatcgaacaggaggaacagccgaatgaggaaaggccgatcactccccgagtataccctcgacggaatcgacggccaccggaccgctacagccctcattaa

SEQ ID NO: 78504 - DNA, 518 bp, Heterodera glycines
cacttggttccgcgccagttgcttcatccgttttattcctggatggcctttgtggagcattcgtaggactttcgctcgaaattttggtgggatgacgactcgttctccgtacatcagacattcttttgtgatggagaggtcatcttttcgacgaaagaacaattttatttcttccgtttccgaagcaattgctttatcattgggccatccatctctgacaaatttcttaacctttttgatggtttcgtcttcgttccctgctgaaattatgtccttcgatgagaatgacactgtttccaaagtgttgctgaagaaattttcggcttccttctcaaattccatggacgcgatgactcggtcttcttcaggactggtgctttttgcaatcagccttgagagcgcatccgcttgtccaaattctgtggtgttcacatactcaatctcgaagtcatacgccaacagcataagtgaccatcgtaaaagacggttagcactcatttggcggattccctttttgt

SEQ ID NO: 78505 - DNA, 1844 bp, Heterodera glycines
tccatccaaaacgagaaaagccgaactatgagagaccaaaaagccaacaaagcacaaagacggagcaacaaaaatgctggaggtgcggtcaaacgaaccatcaccacgcagcttgcccgcagaaaggctacaaatgccgaaagtgctcacaaaacggacacatcgagttgcgttgtgaagcagtgcaggaatggcgcaaaaagaacgccaaaagttggctcaagaaaaatgttggcaatgtccacatagtaacagtcaacattggcaccacagcaaaaccgacaacaaagtcaacattgctaagggtcaaggtctcctttcaaggcaaagtcatcgaatttgtcctcgacagcggtgcagaagttaatgtcataaacgaaatgacatacaaattgatcggcagccctaaaatcaaagcctgtaaagaacaagcagtgctttacgatggaagcacaagaagcttcatcggaaaagggaccggcacattcgaattcaacggagtgaatgttgaacaagaattttatgtggccggcaaagattccctaaatttgctgtctattcaaacaatggacgcatttgggctgctcgacgaattgaaggaaaagatttcctcaaaaatggtgaatatgtgcaaaggcggtaaaaaggacaacgctccaatccgaccaaaaggcaccgaggtcaacgaatacctcaccaagctgaaaaaagctttccccgacgtgttcaaagaagaactcggattttgcacaaaggcaaaagcaaatttggtcctaaaaccggacgcacagccaattttcagaaaggctaggccggtacctcacaactcacgggaagttgtcgagaaagagctggaaaggttggagagcctaggaatcatcacaaaagttgagcacacggattgggcggcaccgattctaatcgtgaagaaggccgacggaacagcccgtatgtgcatcgactactcgacgggcctcaacaacgctctattggaccatcagcacccacttccgttgccaaatgacatttttgcgacgttgaatggtggaaaagtcttctctcaggtggacttaaaagatgcctacctgcaaattgagttgactgctgaagcgaaaaagctatgcacggtcgcaacccaccgtggctactacaaattcaacagattgccattcggtgtgaagacggcaccaggaatttttcaatccgttatggataagctcctggccggactcgagtttgcgacggcgtaccttgatgacatcataattgtcagcaaatcgaaagaagagcactttcaaaatctggaaaaagtgttcgaacgaatccaaagctggggatttcgggtcaaaatggacaaatgttcgtttttccaagaacaaatcaagtatcttggccaaatcatcgacaaagatggaagacgacccgaccaaggcaaaatcgcggcaataacgaatatgccagcaccaaaagacgtcccgtcacttcgcacgttccttggaatggtaaaccattatcaacaatttgtgaagaacatgcgattcatccgccaaccaatggatgaactactgaagaaggacaaagactgggactggggcaaagaatgccaaggagcattcattaaaatcaaggaaattttgtcctcggatttgctcctgacgcactatgacccaaaattggaaatcatcgtggccgctgacgcctcagaacatggaattggcgcagtcatttcccaccgatttccaaacggagcaattaaggccatcgaacacgcctcatcatctttgacacccgctgaaagaaattattcccaaattgaaaaagagggattggctttgatttacgca

SEQ ID NO: 78506 - DNA, 292 bp, Heterodera glycines
ttccgtagatcatttcgtgaaattttcgcactgcgtaaatcaaagccaatccctctttttcaatttgggaataatttctttcagcgggtgtcaaagatgatgaggcgtgttcgatggccttaattgctccgtttggaaatcggtgggaaatgactgcgccaattccatgttctgaggcgtcagcggccacgatgatttccaattttgggtcatagtgcgtcaggagcaaatccgaggacaaaatttccttgattttaatgaatgctccttggcattctttgccccagtccca

SEQ ID NO: 78507 - DNA, 893 bp, Heterodera glycines
  unsure (1)..(893): unsure at all n locations
atgaataaaatagatgtacaaccgaagcgggatccgaccggcagtcaaaagaatcgtcgcgcaccccaacggcgccggcataccgatgtgctgaatggcatcattgagggccgcgttttgaagacggagatgatgccgtcaagcgtcgccactgactgtaagtttaatgattactactgtaatcgactatgtgtgagttgacactatatgtcaataaaatattatttttaactgagtgaattggtactgtaaataatgagttactttgtattggtgggtttactgtcattagtgtatttggaactactgtcatcagctgatgagcattataacgattacagtaaattgattaacggttttgttggttttgctttttattcgatacctattaaattgactgctttaatttaagtcgagattaactgtgaattgtttggttacttttttattgattactgtaattggctttaattatgataaacttcacttaactttcacatataacagtttctccgaacacgttgctgccctccgtggaaagctcaatggaaaagcattacacaatgccagaaggtaaaatttaaaatttgttaattaaaatatttaaaaaaaaattattgaaatttcagtgaatgcatgccatcagcaacaaactttgctatcctgctgcccgccctcaacggcacaacaaaatttatgccagttgaaaaaccaggagcagcacagtgattccaggtaaaatttggaccaaatgctgattaatttgaacaagaatttgcaaaataatttaattatttatatcaaaaatttatttaaaacacattaaacaaagtatttaataattatcgaaaatttatataaaatacctaaaagttattttaaacaaaanttta

SEQ ID NO: 78508 - DNA, 1806 bp, Heterodera glycines
atggatgacgagaacgatggagacgacgtggaggtggaggtggagcaggacgacacggcggagcggctgtgccatgatgccatggaacagccgacgacaagccatggtcctcaacggcacattgtggcatcaaatgttggcaatgcgcaacaacggcatcagttggcacggcaacaacaattaagcaacacggaggaggccgaacagcgcgaatttgacgagtaagtgttgaaaggtggtcaaataattggtcatgggtatggtattgggtgttttttacttggtgaatacggtacagactgttcggaataggccatttttatataattatcatgataaattgcttaaatagagcccctccatatgatggttgtatgattccgtattttcctttttttgagcaaaaatattttttgggcttatgtgcctaatttaaagaatagctaaatttgtcttaattattagtagagaccgcaaaaaaaggcaccaaaaatcgcgaaaaaggcactataataggcaccaaaaattgaaaaaacggcatgaaaaggcacgaaaatcccgaaaaaggcatttaaaaaaattttttctaaggtttttttagggagcaaaacacgtaaaacttaaccaaaaacttaatttggtcatttaaatgattattaaatattttataatgtttttcgaataaggaaaatttttaaacctaaaattttttatcaagaaaaaaaaatgaaattttttgagaaaatttttcaattcttaggggtgtattttctgaaatttttcaattcttagggatgtattttctgaaaatttttcaagtcatttcttaggggtgttgttcccgattttattccattttttaatggaatttacggaaataacgccaaaaaaggcatcaaaatcggaaaaaaacgccaagaaaggcaccaaaacggcaaaatgccaaaaaaggcatttaaggcacgaaaatcccgaaaaaggcaaaaaaaaaggcataataaaagtcaacgtagaagccctcaaaccaagtggaaaatgcgttatttatgcttaatatatcgaaactagtacgcagaaaaaaaaggcatatgcctcaaaatgcggtttctaattattcgatctttaaaatatgttgggcgtgtgaaccgttttagaaagaatatacgaaagaaaaattgttagaaaatctcaaaaaattaatttaaataataaaaatttaaaccaatcttgttgcttctccttttatatgcatgtagttgtttatcatatgtttaaaattttccggaatttcttaggaaatttttttttttggcggtggcgggggattaccttatttagaatttttgaaaactcgaaatgtcaaaacaataatttgcaaaaattgccgaatcgtttcccatatattttgcccaagcatttttcaatttttaaatgtttcaattttgtttttagcctagtacggagctatcaagaacatatgattttgatgcacagggcaatgacaccaattgaagcattttggtgtgcccaatacggcgaagtgggcaaatttatcacattggcacaaattggcatgccgtaatttagtgccaaaaatggagaccaatggaacccacggatgtggacttgttgagtaaagtcgaattggtatgggtaaatttggcaaaaaaaaagttttaattttagctattatttttttttcgaattattttatgcgaattttagcggcggattgttcgataattgaaatatttattttttttttaataagaattattatattaattttttatttccaaaataata

SEQ ID NO: 78509 - DNA, 428 bp, Heterodera glycines
aaagccttcgacgcaaccaccacgaccctcctacacgtcatggccagactacgcgacaagcacgtgcacaagccaatgacggtggagtataggaggtccgctccagcgccatccattttcagggctagttgattcggcaggtgagttgttacacactccttagcggattccgacttccatggccaccgtcctgctgtctatatcaaccaacaccttttatggggtctaatgagcgggcactttggcaccttaactccacgtttggttcatcccacatcgccagttctgcttaccaaaaatggcccacttggagctcaaacattcaacgactgggttcagagtcaagcaaccctggcttcatacccatttagagtttgagaataggttaaggacatttcgtccccaagtcctctaatcattcgctttac

SEQ ID NO: 78510 - DNA, 703 bp, Heterodera glycines
atgaattactcaatttttgtgtctgtaatttttgctgggctaattattgttggtttggatggcaccgatgagaatggtaaaatggagaaaaataatggcaaaaaaataatcaaattcctcgaggatttccaagaaaatgacgcaaaagatgagaatgatttgcagattgactttaacagtgaacattctcgcgaagtgacacaaatgaacaatcgaaattttatcagtgcgaagcaaatttttaaatttttgtttttatttaaatttttttcagcctttcttcgcggaagctcttctaaggcatctgataccccgaagcctccttcttcggcatcggttttattgccaaaagtgcgaaagtttttagaaggaggcacaccaacaatgccatactatcaaatgccatttttgcagcaaaaggtatggcccgccaagggcaaagtcaataaaagatttttcaccaaaagagtggaattttttaaaatagggcaaacactggcaaatcgaccggggaattttgttacatttattataataaaaaataatttaaaatgaagggaataaatacattcaaatttatttgtatgacaaaatttttattccgttttcgcgcgagtgcctgttttagcattagaattgttcagaagtatatgtatagtatattcaggttgaccaagtttttttttcttctaattcaggataa

SEQ ID NO: 78511 - DNA, 942 bp, Heterodera glycines
ggtaccggtactagacaaacaggtaccggcacatttacttttgaaaaaaccggtaccggtacatttacttttgaaaaaaccggtacatttacttttgaaaaaaccggtaccggtacatttacttttgaaaaaaccggtaccggcacatttacttttgaaaaaaccggtaccggtacatttacttttgaaaaaaccggtacatttacttttgaaaaaaccggtaccggtacatttacttttgaaaaaaccggtaccggtacatttacttttgaaaaaaccggtaccggtacatttacttttgaaaaaaccggtacatttacttttgaaaaaaccggtaccggtacatttacttttgaaaaaaccggtaccggtacatttacttttgaaaaaaccggtaccggtacatttacttttgaaaaaaccggtaccggtacatttacttttgaaaaaaccggtacatttacttttgaaaaaaccggtaccggtacatttacttttgaaaaaaccggtaccggtacatttacttttgaaaaaaccggtaccggcacatttacttttgaaaaaaccggtaccggtacatttacttttgaaaaaaccggtaccggtacatttacttttgaaaaaaccggtaccggtacatttacttttgaaaaaaccggtaccggtacatttacttttgaaaaaaccggtacatttacttttgaaaaaaccggtaccggtacatttacttttgaaaaaaccggtaccggtacatttacttttgaaaaaaccggtaccggcacatttacttttgaaaaaaccggtaccggtacatttacttttgaaaaaaccggtacatttactttttgaaaaaaccggtaccggtacatttacttttgaaaaaaccggtacgggacatttacttttgaaaaaccggtaccggaacatttacttttgaaaaaa

SEQ ID NO: 78512 - DNA, 2000 bp, Heterodera glycines; identical to SEQ ID NO: 14467

SEQ ID NO: 78513 - DNA, 1656 bp, Heterodera glycines
atgcaaaaagaaatgctttcacaaatggaggcggcaattcgcgaaagtctaatggacaaatcggcactggaacaaatgcgtaggagagaacaatttttgatggaacaagcactgaataaagtataaatttaaaaaaataattatttatttaaataataaatgaaatttaaaataatgtataaaaatttgagggttttttttttgtatgcaatttgtcaaaaaggaaactttttttgagtttcttcttgaagcaaccgattgatttattatcattattaaaaaaactctaaaggaaaaaggctttattataacttttcttagttttttatagttttttttaatttaaaaaaagatatttttaatataaacagggaaaaacccaacaaaatttttttttgaaatttgtgaacttgatagcttattttcacaaattattatttaatatcttcaaaataatattttaaaataatttttaatttttatgaaataatgaatttttcaattagcaaaaaaaaattaattatttcgttattaaaaaagatttgatttatttatttcttttttagagtgctcattcattcagtaggttaaaattgagcaacgaagaagcagaaaaattaccaggcacatcagcacaaaaattagagaatgccgaaaaatctgtgaaatttgacgaaaaagcaaatttcatcattagcccttcaccaatcacgagtggcacaaggccaacagcaacaagtctggcacaattgaaaattgtgccaaactcggttgaaaaacggcggaaaagtgcggcggatttgctcaatgaaaatgcaaattacataaaaatggaggaaaagccatcgattaatgaggaaaatccaaagccgcctaagctggtggaaaagcggatctctttgggccaaatccacgttcctcaacaaagaaaagaaatgaagaacgaaactgtaaatttgcaaataataaatttcaaaaaatttctatgaaatagagaaaatgtcataagtaaatttaatttttttttacagccaaaagggcggcgattttgcataccgtgtaagaattttctatagtattttatataataatttatcggattaaatatttatattttcaacagagtctactaaaggagcgtgatggcatttctgagagccaattaagtgatcgaaggcaatatttacgggaacagagggacaaattgttgaagaaaaaaagtcaagagcgcgaaaaacaattattagtaaaaattatttaattattttttatagaattaaaaattaaacaaattttaaaaaattaaaataaattaaaaattaaataataatttaaatgttccttttgtatactctataataaactattaattacttaattggtttaaaaaaatgttatttatatatattctattttcgcttttagtataataaatctttaaaattattttaaaaaataatcattattttgatttattattaaacaaaattatttaaggaggccgctaaacaaataaacgattcgcgtcctcagacagcaaaagcagcacgtgaattgatggaacaaaacagtgaagtggacgaagtgaggcgacgaattgcagcaaaaatcaaagcggaagtgatcaatgggaagtgaaaaatgatggaaattaaa

SEQ ID NO: 78514 - DNA, 337 bp, Heterodera glycines
aatcggagtaggacaaaacgtcgtcagccgaaacgtcgtcgaacgaatttttcgaccataactttttttctttctcaatcaaattaaacattcttggtattattcgaaagcattcgaaaaatgctattagcctgcaaattttcaaaaatttttatttatgcacaaaaaaatcagagcaaaaaagttcgaattactgggtttttgagttccttctggccataacttttttgaaacttaaccaaaatttttgagatttagcaaattaataataaacacatagagctatcgaacaacaccaacaattcttaatttgattgacagtgaacaaagttatggt

SEQ ID NO: 78515 - DNA, 860 bp, Heterodera glycines
  unsure (1)..(860): unsure at all n locations
atgaagttattcacactttattgcattctgttttttgtgtccgacacatttgccggctgttttacggggtccaaaacgagcgaagacagcgattctgagcgagaagatgatgccgtgccaaaagcggcgcaagaaacagttaaaagaaaacccactttgaacacagaacttttaagtaagtttatcattgctattgggatttgggtggatttcctttttttcgcaaaatgttttattagcatgtaaattgagattttggcttggataaagaaagccttatatgatctattctcatttcaactttttttccatatttcaagcattttatatccttattcatttcaaatccattttctgcatattcgtaaaaatgcaaatgcagctttaaaaattcattttttttttaaacttaggtttttgaaactcgaataatttttgtcctaatttacctaaaaatcaataccaatatgttcaatatttttctctttaccaaaacgcttttttcttaacttttagataatttttctgttgcttttgtaacgaactaaatgtatttttattttctcaaaatttaaaaaaaaattgtcctggattttgggaaatctatgaccatataataaagccgtgaggtcccactacccagtgccaataagggaatttaattccaggagaccttcttacgcgtccgtaattaggcccctcatttgtcagggcttggaagggaggggattatgatagatgcctggggacgtctcccaggcggagatcgattggccaagtctcttaaatggctcccgactgactcgactgatctcttagctgacttcccagcgcccgggaaggaggagctatcgnagtaa

SEQ ID NO: 78516 - DNA, 456 bp, Heterodera glycines
atgcatttgttcccaattttgtcccccattttttcgctgctttttgctggcattgtgcccgtcccaattggtggtagtggcggtagcatttttgcaatctgcaaaaagagtgacgtagaccgaaagaatccgatgccaaaagtgaaagcatttgatacgccagcgacaacaccttcaccgccaactgatcgcacatcgaccgaccgcaaaacgcagggttcttaacaatttaaatttaatttaaaatgaataatgattagagctcgcattttgaggcatatgcctttttttctgctcactagtttcgacatattaagcataaaaaaacgcatttccactttgtttgagtcttctacgttgactttttttatgcctttttttgccttttttggcattttgccgttttggtgccttttttttttgacgttttttgcgaaaaagtccattaaaaatgca

SEQ ID NO: 78517 - DNA, 1268 bp, Heterodera glycines
ttcaatcggctagtgctttaaggttttgtctttgactttgcttcggctagtgctttaaggttttgtctttgactttgcttttttttccatttatttcaatcggctagtgctttaaggttttgtctttgactttgcttcggctagtgctttaaggttttgtctttgactttgctttttttccatttatttcaatcggctagtgctttaaggttttgtctttgactttgcttttttgtccatttatttcaatcggctagtgctttaaggttttgtctttgactttgcttttttttccatttatttcaatcggctagtgctttaaggttttgtgttttgactttgcttttttttccatttattccaatcgaccacgttaattcattctctatacatttagtgtcttatttcatgaaattatattaatttaattttaaataaagaggcaaatttttacagaaaataaatagacgctgactaattagctaacatttataaagaaagtagaaatttgattaaatgcatatacaatatacaaaatattacttttttaaatttgtataaagttcctattttgtctttgactttgcttttttttccatttatttcaatcggctagtgctttaaggttttgtctttgactttgcttttttttccatttatttcaatcggctagtgctttaaggttttgtctttgactttgcttttttgtccatttatttcaatcggctagtgctttaaggttttgtgttttgactttgcttttttttccatttatttcaatcggctagtgctttaaggttttgtctttgactttgcttcggctagtgctttaaggttttgtctttgactttgcttttttttccatttatttcaatcggctagtgctttaaggttttgtctttgactttgcttcggctagtgctttaaggttttgtctttgactttgctttttttccatttatttcaatcggctagtgctttaaggttttgtctttgactttgcttttttgtccatttatttcaatcggctagtgctttaaggttttgtctttgactttgcttttttttccatttatttcaatcggctagtgctttaaggttttgtgttttgactttgcttttttttccatttattccaatcgaccacgttaattcattctctatacatttagtgtcttatttcatgaaattatattaatttaattttaaataaagaggcaaatttttacagaaaataaatagacgctgactaattagctaacatttat

SEQ ID NO: 78518 - DNA, 465 bp, Heterodera glycines
atgccggaccaaatgagatttgggacgagaaaattggaggaaaaaggtggcaaaaaagagaggcggatgaatgagaggcacttgacgaatggcaccagaaaaaggtaagacgaagagcatttctgtcgatcattcttactccatttcagaaggggaatcagccggcggcggtggactaggcgcataaagctataatttgaaaagtgcaagaaaatatgttttaatgaatcactaaaaaaatcaatggattaattttaaataaaaataaacagctattttttattataggtttttatgggcatttgaaaattgcatttaatttgtttgatacgttagcttacttcatttagcacgtcgctgatttcactcatgaacccgtcccaggcatcataagtggcgaaaaatgtcaccatacaaacgtcccatggctgtttggttttaaaatatttaattaaaagaaataaa

SEQ ID NO: 78519 - DNA, 196 bp, Heterodera glycines
tttggttttatgcatttttgttaaggaattttccaaaaaatgtcgaaatagtgacaaaacgccaaaatagtgatttttaactattttagtgacgaagtcgccaaaatagtgatttctagtgacgaaaagtgacgtccaaatgaaaaaattttaacgcagaaatgcgttttttgagctcctttcttcaaaacaattg

SEQ ID NO: 78520 - DNA, 275 bp, Heterodera glycines
atgctcctcgccttcgtttaccccgccttgatcgatttgttcacttttgtccctcattaccgtgcggaaggacatcgtcaaaaggcttgttttcgccttcttctgaacctttttcttgccagcgtcggattgtttggcatggtggccggtttatacgcgagcgtcagcaatttgataagtcatggatcgaatgaatgcaatgcgatgacgacgactgggacgccaactattatgtggaacctttataatgggacaactttgtctagcagtattca

SEQ ID NO: 78521 - DNA, 2868 bp, Heterodera glycines
atggccaaattgcgcaccctttgcttttacgttttaattctctttctgttcggcttcaccgtctttgatgttcaaaaaattgtaaattattacaaatttaaatttcgaattctgtcgttttattaattcattgtgtgctgtgccgttaaggtcttccaattcttagacgataacaaagaaacggacatgttcgtggtgttcaacgacacaatgacaatgccaaatgtttgtttgtcttgtggatttgttactgtagaaagtgtcaaacggttacagtaccattcagataactttttgcatttccaaaaaccacgcgtggagtcatttcaaaaccacaaatgtgagtgacagcgaaattgacgacattgtgcaggtgagacgatgatgaatccacacagaaaaggacgactgaaattggagaaatttaaaaaacaatggaaagggaatactgtatgattgggatgggactgtaatcattgcttgggcatactgtagtgggacgttttaaaagaatactgaatccatctagaggggtaccgtaatgagaggagtgaacgaattccacgaccaattatgaaggagtacggtattttatttatttaaatgctacagaaaggtctaaagaagatgagaaacaaaagcgatttcctgagcagtccctgggacgatctgatggtggtcgacgcctttcaggtgaccgaccgttcgttcggctgacagagaaaaatcgccgaaattccatttgcgaattttaagacaatttcttctctgaattcgatggaagtcgaaacgaatccgacagtttttgcgatgactgtgcaaaaaattgggcaaactcagcgaatggccaatgtccgaaagatgtggcaagtaatgtccttgttcagcggttttagcattttccgtgccatttccattggcactctcttccacacagaaatggaacgacgccgtcgcgcaaagggacgtcactttcgacgaatttaggcaaaaggtcggctcggaaacggtgaaacggtgagaaaatgccgtagagaaaaagcaaacgaacgaagcgacagatcgttgaaaaatttccaacggatgggcggcggcgccaattggaggcctatccaggacgtcaaaatcacttggatttcactacgccaaatgtgcttccagccgctatacagcccggacgaattcaaagaccattgaagaacaggtcagagaaagagagggcggtgcagaaacagagaaagaagggagagagagtaaaaggaagagagagactggggataacgaaagagaggaagagagaatggaaagaggggaagagagagagagatatgtgaatctagggaggaagataaagcagtaattagagaggcgaagaggaatgaaaagggatggaaaggggatttagagagaatggagagaaagagattaagagagggtggaaaagaaagataaagacagagagagggaggaaagataatgaaaaggaaggggaaaattgccatttttcttgaggatcaattcttcaaaatgcttatcgttcacggaaaagaatacgagtcgttggactgcatgagcatcgacttccacggtcggcccggggaggaggcgcgctatttggggccgaagggacggacgaacgatggcacggacggagacgtacggacgaggggggcaattgaatttgggttaaaattctgttttttcagctctgtctgtccgaatcacacgaaattgtcgcggaagtgaaagaaatacagactttgctgccgggcgcggaagaagcggaagaaaaatgcatggaatacgggggggaggagcagttcgggacggagttggagtgccatggccaatgccgacttggcctaattcgggtcagctaaataccatttttggttggctgatcagagaactccctccaattttgcaatttaaaatttcaaaaatggactttttgatcaaaaaccatcatccgttagcaaattgaaaaattttgtgaatgtttcagaaaatttgcaaatgcaccgctcgcactttggaaagcctcgccgattcggaaactctacagaattttcccctttgtgactatgcgaaatgcaatttgaagttaaatggaaaaaaacaattaaaaagggtaattagtgaaattaagtgccaccgaagaagcattggaaaattgggaagcgacgctgaaaaattgcacgacggagtgtctgccgaattgtagccaaatcagattcagaataagcaaaaagacgaaaagcgcacagagagacggtgagaaaggaaaagcgaagggcaaagaaagggaaatgaggaaaagcatttcagacagcacagaagtgaagctgttctggggctcgttcgagtatttgcgactgatccaaaagcagaaatggtccttcaacaaattcgtctccaacctcggcggctctttgggcgtttggttgggcctttcggtggtttccatcattcaggtcgctgttttcaaagagcaaatgaatcattttgccatttttcaatttttggcttttcattttgccatttttcaatttttggcttttcattttgccattttcccttttcagttcatttcttttatgctcctccgactgcacaaaatgatgcacaaagaaagtgccgtcgaaggcgaagaaacggagagacagaacgaaccgcgtgaaatgccctcgccctcccgcgccggcggagacaccgaaatttcgatgagtccgatggacggcggcggagggcagcggaagaagcgatgatcggctaattatgcacactaatgggatatatgacgtcaaagcagtcaaacctaaacaccaattcatgccatcattaggggcgactgatcgataaaagaaa

SEQ ID NO: 78522 - DNA, 223 bp, Heterodera glycines
tcggattgtttggcatggtggccggtttatacgcgagcgtcagcaatttgataagtcatggatcgaatgaatgcgatgcgacgacgacgactgggacgccaactattatgtggaacctttataatgggacaactttgtctagcagtattcagtgatcgcccttctgtttcatttgtaaatatgttgtatttgattgtctgtacataaacatatgaataataaa

SEQ ID NO: 78523 - DNA, 1083 bp, Heterodera glycines
atgttggacctgctcaactcattatgcgaaacaaaaagtgccattgcgacgaattgcggcgattgttcgagtgaatggacacgcgcaatcgaagcatggaattcgttttgcccgcacttggacgaagcacaaaatgaacgggttttgggtagtgttgaacgatggctgaaaggggaggaggaggtggtgccggacgagaactcgttgatggagatgaatttggaacatttggtggagaaaatggagccgtacggagatgcacagctggacgggggagacgtcgcactgctgcacaaaatcggactcgaattggccaaggcaaaggaggagaagcggctggcaggaagagtgatgacggctcctggcatttgggatcaactctcgaacatttgcattctgatcggagggtttgtcggtcgggcacagaccgcgactgaaaagcagcagatcacggcactgacaatgtgctgggagaacgcactctgtggccaattggaagagatttatgtgagtgcggtgatgaacgcgttggagcggtggcgcgccggggcgaccaatggcaccgacgcgggagtaatcattggaggcagcagaaaggcactgcaaacgatgaacagagtggcgagcgaagagggacaacacaatgagcggcaaaaaacggccatttcaaagacagagatggcattgatcgctgaattgggggcatatttcgcggaagtgatcgaagcgcagagaaaggcgggggcccaatggaaggagatgagaaaaacggaaccgatcgttggcatggacaaaatgctgaagaaacagtgcaaaaggtcagtcggaaggaccaagcaaacaaaagagagaatttattgtttaagttggacagaatttcgccggaaaattccgccagagaatcggaaaatgttcattagttggtcaaaaatttgtaaaactatgaatttaaaggagacgaaaaaagaaaacaatgagcaaattcgggacaaaatggaggaaaatatattaatgaaaagagaggaagaaaaaaaggaaaagaaaagcacaaagaagagaaaggatgaaaagccgaacaattaa

SEQ ID NO: 78524 - DNA, 1097 bp, Heterodera glycines
atgttggcggcggctgaccagcgacaggacgcggacaaaacggacaacacaccgcagggaggggcgccgctgatgagccaagtgagtgaggggacgcatccgcaaaaaagggacgagaaaaaccaattcgaaatagatatcaatcgctttgtaccttaacgagctcggcatcttgaaaaaagcttgcacctgggttccatattggacctggacatggacccaggaaaatccaggccttggccatatccatgccaaactaataatacacctcaaaatatttatggttatttttgaggatcattttgggttgattttgtttaggtgattgcccagaacattgaggaccgactgatcacttactgtcaaatttacgttccgatcaggcgattttcaactgcttactacgcacactttcggcatttttgcaacgttgttgaataattaattataaatggtatgttaaccaaacattttcaggtccgtaccttcgcctatttcaaactttcgttggcgtacggcgatgatcgcgaaatgctttttgttttggcctggcgttggcagaaatattcgctttgcttcggacaggcgcctgtgcccgcggggagcgcgtgggacggacgaaaagcggcgcgacggtgggaaaggggggaagaaacagccaaattcaaaagcgaatgaaacacacgtttatttaaggggcatttaaagaaatccatttcatccgccctttcagttttttctgattttgtgcccctcttaaaggcgttggaatccgcatgtgctcgtcactcagtcgctcacagaacgtttcaaccgcgacaaggacctgacttggctagttaattacctggtatttaaattttcttgcattttgaggatcattataattgtaccactaataataccaaaaaggagatattttttctaaatctcatgggggaggggacttttatgacaattcataaagttttaaacaaatctatcggggtttttggcgtcgcttatccgagacagaaatccatttgataaattccgaacgaatatgaaacttatttttattttgtggattttcttttagaaattatgaatcggcatta

SEQ ID NO: 78525 - DNA, 139 bp, Heterodera glycines
atgcccggcggatccttcccgccccttcccccgacgacgtcagccaccgccaaacccaccaaacaggtcgttcgttgttcattcattcgttcgctggccgcccccattcaatcgcccgtcgatgacatttcatttctct

SEQ ID NO: 78526 - DNA, 2012 bp, Heterodera glycines
atgatggaggacgatgtccgccaccaacaacagcagcaaatgccgcgttttgctggcaaattaattggcgacggtggcgaatgtcgcgatggaagtgccgaaggcgccgcccattcgatacatttgaaacgggaggaggaggacgccgcgggagccgaacaacagcggcagagggaagaagcggaagacgcggcggatttgggcgcggacgcactcaaagcacggcgagcagcgcggcagcggaaacgcgagccggtggtggtcgggtggcgcacattggagaaggcaatgcgaacgacggccgaaggtgggcgacagaagggggagcaacagacaatgtacacggccagggggacaaaggacccaaaattaatgaaaaacaattggagtggggagagagaattcaaattaaattattgtaaatatatgtggtaaagtcagaaatatttttccaaattgttgctaaaaagaatttcattcgtttccctcaaattcccaacttcgctgatttttcagattgggtttaatttttaggacgggccaaatttagaaaaatatacgcttacaaattgctaatggacatttttatgatgaaatctgcttcaatttttcctgacgcatatcgacacccctccacagaaatttgttgaaaaacatcccgcaaaaaatactaaatttttttggattttgaagaaaatctgaattttgcttaatttgaagcaagctatgattttcctcaaaattttgcgaaattccttcaaatccccgtgcaaaaattgaagcattgaactcccccaccctcatttttgtattcataaattgaacttgatgaatttactttgaaaagtgcagacagtgacatgtctccgctggagcaattccttctcggctccacgctgctctcccgtctctgttccttcttcgaaatggcatttgccgaagcacagcgccaacagcgcgggaaattcaaattgccaatcaaagactacggagttggcactgacggagtgatgagcgcgacatttccgaggtgattagtcccacaaaacaaagcgattgtttttttttaaatttaaaaacttaaattgattgaaaatgaccaaattgaatcgggttttaacctaattttttttaaagaaaaccaaggggtttacgcacccggtttttagttcgggatttcttcgatttcattactctattcattcatagaaatccctattttgctttttgttcaattcggattaggttcgaaatggatcccaacaaaatggttattcttccatctgaaaaatctccaaaaacagacagtttccaaaaaacattcggcgctgtactttcaaataggaacgtgccgaacccgtcccttttttgtccatgctatctgatcacttttgtatcgctctctgctgtccttcagttaccccatgcccccgtccctcgcttcttcctcgctgcccaatgcgctcggttcgcccggtgaccattctgtccaccagcagtttcacccctccacccattgtatggttcgtctccaactgttcgtctgtccgcagcagttccgtttggtctccatgttggactatggttgtgtgtctcttcgtcaccacttttctttgtccatgtatcttccacccaatgccattttagccaccggcccccaatgtccggctgagtcggacgtgcgcattttcgagcgatttttcgcccgcgaagtcgtccgtatgaacaacgaattggccgtgttcgctttcgtcactctgtgccgtttttgtcacccgccaattttcgcctcctttgcccaactgatgatggcccaaatggtaagaaaaaaggccgagcgctgtttttgatttatttcgtattgcaaaaaggagtcccaaccccggtggccatggcgtgtcgaattggaattggtacacaacgccgaggaatcggcccaacccacgggagccaactctcatcagcagcagcagaagacgcaaaagatcgtcaaaaacagcattcaggcagca

SEQ ID NO: 78527 - DNA, 832 bp, Heterodera glycines
atggatgacggcagagacttgtaccattggaaggcctccatcaaaggaccgcccgagtcgccgtacgaaggaggcaccttccatttggacatcgttttccgtcgcgactacccattcactccgccaactgtgaaattcgacacgatcgtttaccatccgaacgttggagaaaggggcgacatttgtttggacattctgaagcagatgtgggcgccgtcgttgaccatttcgaaaggtgaaatagcagacaaaacgccgacaaaatatcgacaagacaaaacgaccaccaaaaccggactttttggaaaagtgtcgatcttttgtcgtgtgaaaatgggatttttcaaattcggaaatgccgttttaatccttatcccctctccatttcagtgctgctctccatctcttcgcttctctgtgacccgaatccgaacagtgcgctgcggcaggacattgcgactatgtaccgcgacaaccgcgaggagtacaaccgaattgcccgtgaatggacgaagaaccacgcgatgagatgacacgacaaacgaccgatggatgggagaggatgcagaagacaaccgccgaagagggaggaggacacattcaactgaccctattcccacatatgatcccaactgtaaagattgtattattgtatctcactgtatgtacagtattatgtcgcctggttactgtttaagcgaccataattgtctgttgttggttgatcaccattatcaatgtgttatgtctctgtgttatcatttcaaatgacttgtgatcaattgtttcgcctaatatgtattaactgtgatgaaacgtgaattttattaaa

SEQ ID NO: 78528 - DNA, 1117 bp, Heterodera glycines
caaaaattcaccagcaaaacgcacagcacgagaactcttcccctttctggtcgatttggccggaaggttggccttttttgtttggcatttaaaatgaattaatcagatgccattctgatcagtcaaaaattgttgtccaattgatttttttatttttatggaacagcgaacgactcaaagggatgccaaatggcggagaaaggcagcgggagggcatccgcataaaccaagtaaaagtgggcagcagccaaatcatccagaaattaactttgctgatcattgatcactctctatgtaattacccatcaaactttgtttgtctaatcagctaaattgtccggttattcgtttctctgagcatattttctgatcagtctgatcactttgactgtcccattcgttgatcagtccctctcaacattgggccgagtgatcaaagcgttgtacgaccgccaaaatgggaatggcacttcatctcagcagaaacaggtccaccaatattagcattgatttcgtttggcaataaacttgcgcagattccttaccgcgactctgtgctcacttcgctgttgaaaaacgcttttggcggcaacagcaaaacgataatggtcagtcattgtcagtggacgacggcacagcaaagaaatgaatgaatgaatggcacccatttttaattgtttggtaccaaatgccaaaatccagtgcatttcggcaattttatgaaatgccagataatttgtcattcattagccaatcactgatcccttcccctccaatcagattgccaccatttctccggctgatctccattatgaggaaactctgagcactcttcgatttgctgacagaatgaaagtctctttctgaaccccgagaacagttgaaaaataatgccaaaaatgtaattcaggcaatccgaacagtgcccgttgtgaatgagtcggccaccgagcgactgatcagaacaattcgatcggagaatgatcggctgctgcgggcgttggagcggggcgaattggaggaagtggcggaaaaggtggacaaaaagcgagagacaatacgaaatttaaaaaacgaagcgagtcaatggcacggtcaaaccaaaactatttgttgg

SEQ ID NO: 78529 - DNA, 1714 bp, Heterodera glycines
atggttgggctatccaccaatgttcaggaaatgagtgcgatgagtttgggcgagttggagcagtcactgaacgcgtaccgggaggagacgccgcacctgtggaatttgaacgaagacccggcactgagcgatgtgattgtgcactttttggagaaaggtggcacaaaggggggggcacaaaagaaaaattgggcggaatttgggccaaagcgccgatgttggcaaaattttaccaaaacattaaacatttggggaaaaagagaagtttccgccgcaattgattcaattttttgctttcttttttaatttcctcttaaaataaccaatggattaattttgtttttcatttttattaaaatttaaaatgatttttgtatttttgtgcttcaggagacaacaaaatcggtgcgttattttttggctttgtttttgattttacaattcattttccaatgcccagggagtgggcaaaatgcgcaaattcaactcaaaggaatgagcgtaagtttttaatgagttaattagtaccgtggcttaatccaacactcgagtgaccaagtaaattaatgatggatccatcagattctgcctgatcatgcgttggtccgcaacagagaaaacaaacggatcactttgatgccgttgaacggatcagaaattttggtgaatggcaaacgcattttgacggagagggaactgcgacagaacgaccggtagatgaacagctcaaaggggatgagagggaattgggtggatttaatgccattcgtcactttttttgagcattcatttcggcgccaaccatttgtatgtgttcagcaacagaagggagaggaaaagggaagcgaaggaggggaaggagaagatcagttacgaaatggcacaaaaagaaattgcgagacaaaatttgaaaagtctgtcagaaatggcagacaaaaagtcgaaaggtaagaaaagggatgggaaggccttgccctttctcggcattgccattcccgccgatcattgaccgttggctgatcacttttttgcgtctgatccgttcatccgtttttgatcagatgaattggtgctggaggaggagttggtcagtgttttgccgtacgtttaccgggccaattcaatggcggcggaactgaaacaggcgaaacgtttcgaaattgtgctgatgccacaggaggaaaagggcggcaatggccgaggcggggcattgacagaggcaaatttgggggaaaggggaaaagtgagggaaagataagcaaatggaggagagataaagcatgaacaaagggaagccaaaggcaatgaagcaaaaacgatgttcatagaaaaagccgattttgctgatcagatcagtccctcccccttgggtttaatgggcttttttctgatcacttagacaaagtgccataattaatgttcgacaaaagaatcgaatgaatttaatttaccaaaggaaaaaaacaaagttgatcattaattggtccgtttttgcaacagatttgggtgaaagtgcacgacaattcggtggccggcagcagcagcagttcgctgtggtgagtggagaaaaaagtgccaaaaatgccaaattccttttttaagggacatcagccggtagcgaaacgaaaaacataactttgtccacccaaaaaatgccatccaattgtttttcaggttcatgtcccgttactaccgtatgcaggtcggacactga

SEQ ID NO: 78530 - DNA, 1369 bp, Heterodera glycines
tccgctgctccggcgcgtgaacggaacgcggacgaagtgctcggagaattcgatgccaatcgaattacggcacaacgcgccaaattggaactgcgcattgacctctcccgagcgtacaaatcgttgctgacaatgacaacgacgggcgaaacagcaatgttggacaatgacaacagaaacaacaaaaacagacagaggggagacggaggagcagagggaacagcgccccggggaacaatgagaaaagtagggaaaaaccccaaaagaatgcaatttaatttaacaccaaattaagctgatcggaattgcgaaccgttgggagcatttgaaagaaacgaataacaaacgaacggatgaggaagagggacggacggacaaagaaagtgtttctaataatgaactcaagaagttgctgacaatgaacagacggatgagtgccattcgaacggttgtgctgatcgacgaggaggaggacaatgacggagagcaaaggggaaatggagaggaagtgagagaagcaaagagggacatagagaatagactgaaaaagaagaaactgtcatagagagagtgaaaaagagagagagaaagaaagggcgttacagatggacgacagataaaaaaacctaatattatttctttattgctcttttcagtaccacaacgaagcagagcgacgcaagaaccaaattcggaacagaattgaacatgagtgggtcagtccgtacgacaactacgtgctgacggcaaggcagaaaacggtaactgattttggagatgctgtgggaatttgcggaagtcgtatggtttcgatggttttcggatcggtgatcacgaatctgacattgaccaatttctaatccctgttaaaaaattgcaaaccaaagcactcctccttggtttttaataaatcgtcaaaagtccactctttgcaaggagcgtcgaatgtgtaatcactaaagaagagtcaggacagattcttttttttattcatttaacatttttgcagaccaatgcccgtggaacagatgttaatgggaacatcgttaatggggggaccattcgggccacgacaattgttgagaaactgagcaaaaagagaacgacaaatgaatggaggacgaacgatggaaatacggtggaagagacagtggaggaagagggggagacgcaaaagacgaagcgaaaacgctactcacatttggacgagagagaagaggaagcggaggaagagaaaccgacggtgaaaacggaggaggagggaatggcggaggatgacgaaatcattgtgatggacgcggaggagcgcacctttttcgccgatccggcaaatttgacgcggaaggcacgcaaaaggcagcggaagaag

SEQ ID NO: 78531 - DNA, 591 bp, Heterodera glycines
atgccaggacaattccgaaaaggaaatgtttgcgtgatgcgtgggaatgaagttgtgtacgtggcaccggatcacaaaaccttggatgcaattgcaacgcaatttaaaaaaaaattaaatgccggttttaaagaaatcaataatccaaaggaggacggtccaactctagcagcatgggcgcattatatgtttgtaagtggaatttttaattttaacgttttctaacctgagaaactcagtatatacctgtattattttctgtattcttccgaggtttactatcaaaccactcgaaaaatgctaaattttcataaaattccgacttaaaatttcggttttttaccaggtaaaagcgcattttttcgatgggaatggaagaagtgctcgttgtattatgaatatttgttttttaaaaatgaatctcgaaccacttgtgcttgatagcactaccagaaatgactataatgaagcgttaacgtgtgatgatcactttaaatttgcatcatttattgacaaaatatggaaatccaaaagttggtttcgtctcaaatgaactaagcattctcacaatccctgtcttgaatgctgaaa

SEQ ID NO: 78532 - DNA, 2505 bp, Heterodera glycines
atgccaggtgtgccaaattaaaaaaacaaaataaaagttaataaggcggacattgcatctaacagacaaagcgtcgaatcaataaataagtcgaggttttatagagctattaaataagggaatagagatgatgccagtccgagatcactcagataaaaaaattatgtaaataaaaatattttttgaaataaataaataaatgatggatgaatttaatttttatgttttttttcgtgtgagaatttttttacgttttttaattcaatgaaaaatttaattttctataccaacggaccaattgccaatttcaaaaggcattcaagaaaataaggatttattcaattttcgtagcggtggaaaatttttttttttaattcaaggaatttaatagaaaatttcagcattaaaaaaaagatttggaagaattttacaagctcattagtgtctttttcatgatgagcatttgtctctggtagatgatagtcggtttttaactgaaattttaataaatttttaaatttacctaccattattaaggaagagacgtggcactgattggtgatcataaatttgcaactgaaagtgccattaaagaaaatccggattattttcgggaacgaaacgaggctttatatattaaagcaattgaacaatccgagaaaatattggtaaacagaggcggagcactaattatttggcacaaattttttttttagccaatttggcaaaaatattaaaaattccaaggcatgcccgctgagccagagaattattgaaattttaatgaatttttacgcaagaaattgatgaattttttggatatttaaatgatttgtctaaaaattttttaatttttagaaattttaattatatttcaaaaagcctaaaaccaaatgctttttaatttttcgcccccaaatttgcatttaaaaaacaaaaatagaaaatcatgacattttctcaaaatttttatgttatccaatcctttaaaaaatggtttttccaaatggcattttgacaaatggcattttttaaatatgttttgaatttaggaagaactgtttttgagggcattgaaccggtcactgttatcaagaaatgtttacggagaattaattacgcatgagcgtttttcatcatgggatgttgagtatcggatggatttgtacttcaccaatgtgcaaccattcctcgattttcctgttgttgagcaggaaattgagcgagaacggcaaatgcacatagaaaatcgtgtcacttttattggcggaatcacaatgccaaagggtgttgtgccaaaattgaatggggtaatattgggtttttaaaattattagcaaaaaatgtcatgaaatagacattcataataacctggactggttatccaggcctggtttttcctgggtccaggtccaggccatttttcggtaacttgaattttcaggatttttgtctcggaaatgcagcaaatattaaaaaatctagatccagattaggcacgaaaaaccctggattttctggataatattttagaatttgttatttcttgtgactttttttcagttaagttacctgaccgggacttaactggtcgtttgtccaggaaatccaggtccaagtccaacatggaaaatcgaaattttgttaagcaacctttcgcagaggcaagggtgttttcaggatggacttagctttataaaataataatttttagccaagctttagttttctggacgcaaataaaatgccaaattaattgttccacaggacaccaaacaaatatttaaatctggcaacagtgcaaatgaaaatggtggcgttgtgctgctcagttttggctctgtggtggagatgaatgatggcgaagcacacgcagttgcactgaagaacattgtggtggaagtgttcaagcagtacccgcagatgaacatgatcatcaaatggggcaaaagggcgccaattggcacgagcgaacagtacaaaaagttggcggacaatgtgtatgccaagagttggctggaacagtcggcaattcttggtttaaaaaataaatttgaaattttttaaattttaaatttaaaaaaagccggcgggctgaaactgttcatcacccatggcggacagaacagcattaatgaggcagtcaaaagtggcgttccgctgattttgttcccattctttggcgatcagtttaacaatgccgaggcattggcggcgcgaggggtggcaaaagtgattggtaaaatgccaattttaaaatttaatttcttgttttaaatttgttttaaatttttcagacattcgctccaaaacattgaaaaatgattttgcggatgcattcaatgaaatgttaacaaattacacggagtataaacaaaaaatggacgaattgagcacaaaaatgaatgcggttgagccggaaaaagaatttattgaaaagtttcgacaactcagaaaaagcatttaattttcaaaaatttttaaaataattttaaaatgaataaa

SEQ ID NO: 78533 - DNA, 488 bp, Heterodera glycines
atggtagcaaaagaaggtattaccgagacacattatgttctgcatcgacaccttgctgaactgctagcagccgacaaagaaaatgttgagcaagtggtaaggctattacacaatttcattttcattcattacagtagccatttaccatatattttcattaatgtttatttttcttcgctaatccttcaattttttcgtgtcgtatcgtatccctttcattaaagtattctttaacaaaacagtaatttatgcatcccatattcagcttcttctcgtccatgaattggactgtgccgagccaactgaagtgccaccaaaatttgatgggcgccttttggtgtggcaccggatgacttttgattgggccgatgccaaaaattgtacggacgcggttcttcagcatagacagcgtgaaagagagcacaggcacatttgggagggtgcaatttttttgccaaatccgaacaaaccaagcgtctcaaaattaa

SEQ ID NO: 78534 - DNA, 1681 bp, Heterodera glycines
atgtacaaaattttcaaaatggtagaagcaaaagtattgggaaaggtcgacaaattggcaaaacaaagcgaaaatgccaaaaatgaaaatgccaaaaatggaaatgccaaattggccggcgtgagaatgataatgatggcaccggctttggcattttcggtgccggaaactgttaccgccgagcaaatttgtgacgctattttaaatgggccattgtacggattgtccgatgcggtcagtttttgttaagtgctcgcagtttttcgagaatttaggaatttttggttgaacgattaagccaaattttcaaaatgaagcgctattgaattttcattatttttttaaatttaaaaattgcctcaaaagccgcgaaattcgctactttaggataaaatcttaaaaaaaatcgtgtaataataagtcgtagaattttttatcataaaaattatgaaattcaataaataaaatgaaaatttttttttttttagaatcatttttatggccatcaaatatagcaaaaattcaaaatttcaaaaattctcagtctgcgcttaacagccaaacttccttaaaaattttttacgaaacggactcttttgctacacagattgaggacgaagcactgcttcatttcgtgaaaggccgtagggatttaaacaaaatattgacccatgtgaattggattttgccaaaaggggcatcgtcacttcgttacacagtaggaaagcatattgctgagtttgaaaccatgctaagtctactgtatttgatgcgcaagcgttggcattgtgccaatgccaaaaagcgcgtcgccaaaatcggcattgaatgcaccaaattgcgccaatacgtggacattatgtatgaatatttgttccgagtgcgctacgcaaagccggcagtgatgccgatgttccaaatgcgcggacctcgattgtaattattaactaattaaccattaattaatggaaattgcaggccccactaattagtagtgataaattaattacaaaaaattaacacttcaagattttttgattgtttaaaaattttcataaattcactttcagggagggttagtaaaaatgttaattaccggaacataactagaaagaatagaatttaaaagttgaaaatatttacctactagtttttttcagaaaatttcaaaaattttgaattttttggcaacaaacatttacatgttgagaatttttgaaaaatttgatcgaaaaaaatcgagtaaatgaaaaattgctttgcttgtacagcagggccccaaaaataagggaaactttggccaaattttatcttaaatttcagttcattccgccgaagcttggccagtatcattggcattttaaatgtcgcttcggcattttattttgcccagaaaatcgagcgggtggtagaaagtgtgatgccctggctacacacgctgaaaatactaaatgaaaatgtattgaattatggaggagcaaatttgggtaatataaaaacaaaacaaaaattagggggacatttggacattccgagcctaaattttagtttatttttatttttttgaaaattacttaaaggatttggaaaagtaaaagatttaatgcgatttataaaaataattcattttccaaaatgagttttccaaagctaatacctctttcagaaagtataaaactca

SEQ ID NO: 78535 - DNA, 88 bp, Heterodera glycines
atgacattccatgaaaatgttgtgcaaatggcgataaatgcgaatgacccagccgaacaataccgaccaagcgctgcgaggcttgaag

SEQ ID NO: 78536 - DNA, 2064 bp, Heterodera glycines
atgagcagcgcaaaacggagcattggcgacgccggcggcagcaacgacaaagcgggcacaagtcggagtccagcaatcggcaacaagcagcaaccgcaccatcagcaacacaaccatcgcattcgcaacaacacgagtaacagtcgttcgccaaccaaaaagcggagggaggaggaagaggggacgagagcgaaggtagcgacgaagaacggcaccgccggcagtggaagcaaaagtccacgacggcacagccaacaccatggcgggttgggtgcggcactggaggaaatgcgggagcgcaaatgggccaccatcgccggcccgtcctcatcatcgggcgcaaaggcacagaaattgtccacggcatcggcaaagtcggtcggggagaaggcagtacatcgccaacagcaccaccacaatgacaaaccggcgaagaaacgcgagacgaagggcggcgcacagcgacgggtgcgtttggttgggtggcgctttatattagttaatgtggtcaatgtataaatttccgctgttgtgttcgggtcgcgaccaaatccggagaattttctcagcccgcgagcatttcgtttcccgcgctccccttaaaaattttttttataaggtttcgtttcaagaaaaaaaattctatttttcaaaacctaaaaaataaaaaaaaatttttgaaaactcagttagatttttttaattttcggggacgaagcaacgaagtgcatatttatcggtcctttctttggttgacacagaccaagcaaaaatgcttcgatgatacaaaacaaaattttttgaaatgaccgacaattttttaaaacacgtttccgtttcagttgaccttcgccagcaatcacaaagccaatgatgacgacgcggaggatgacgacgacacggcggcgggaccgtccggcgccgccgacgctggcacttcgtacgcctctgcccaaatgcgggtgcttccgctgagcaaagtgcgcaccatcatggaggcgtcgccgaacgccaacgaaatgaaaattagcggcgaggcaatgttcgcgatgagcaaagcggcggtgggtgaagaagcattttagaatatgatatgtcacgaaacaaattgggcagagcaggtcgccccccccccccccccgaattttttttttaaatttccaagcagaaatttttattgattcccgggccggggggcgacaagacaaaaagtcgtcgcttggataaaaacggaaaatgcaccgaacaaagccctaattctatacggcctcagcctttgccaaaaataaccgctaatatttcaaaatgatttcaaatattcaaaaattcgtcaatatttttttataattttccaaaattaaaaaatggatcaattagtaattttatcatttttggaaagccacttcttcaggaggccttcatttcgatgcttgccaagggcgcttatcagcaaatgctcaccggcagtcacacacggatcaattacaacgagttggccatgttcgtgcatgacactgatgagctgaacttcatccaaggtgaggctccaatttttggaaatctctataaaaatggatgttttttgttttggcctcttaacggaggggtagagggccgaaatcggtcagttcctcccgccaactccgttccagtcaagcacagaacgccataaactcttcggtaatagtaaaacttagtccccccccacccaattttcgaaaaaaaaattatttccaacagatgaaaaatgtttccaagggttatcggggtaaaatgttttaatcaactaagtgtaatagcttctaaacattttgtagcttttcgaatgaagtcaattgaatggtttttcatctttttcatcaataaagacgaaatttatgctttaaacttggctggaatggactctcgggacggactgagccccccaatcggaaaagggtgttttttgctttgaaaatcccgcattataacccgccctcatgttttttaattttttcagatattctcccgcaaaaacacaaattttccgaggtggacaaattaatgacaacgaatcgacggtga

SEQ ID NO: 78537 - DNA, 640 bp, Heterodera glycines
atgtgcagtgaactcgacaccgatgccgacagcggtgatcagagtgacggacgaaatcgggttcagcttgacgcccgcaaggcccatgaagccggccaactccacggtcatgctggccacaacgcaggtgacctgtgttgtttggggataaatggtaagtgatcagaaaaaggaaaaagcaaagcaaagaaacaaatgattaggaagtgctctgaatgagcgggaacgatcagaaaaaggaaattgtatgatttgatgtcagtgatgtgatcggatggtggaatggggaaagtgattagagacgagagaaataatcagaaataagttaaaaagtggacatgaaatgatgtgatcagaagaagtgatcggaaaagcggaaaagtaattagcgaacaaaagatcgaccatgtcaaaataaacaaaatatgatttatttgtcagaaacacatttagaaaggtttggagaatttgaatgaccaaaaaatttaacaaattgtatacaggagaatggggttggggcctcggccagacaaaaaaaaaacttttttttttttttgtaacaaaccaaagcggcgcccacgggttgaaaatgatggtggagataacgcagaagacggacacggaaatgatctaaaataaa

SEQ ID NO: 78538 - DNA, 418 bp, Heterodera glycines
atgtcttcttcgtccaccatttttgttcttctgctgataattgccatttgcctttcattaacaattgccatgccagcagtggacaatcaaattgaaaggtataaatttttattttttatttttggcattccatttttctttctaatggctgtgccagaccaattacggcactttttgacgccgtaatttcacattccgccaatttttaggaaaatttcggcaaaaattggaagttttatttcttaaaaattgaatgcttcaaaagtgcaaaaaaaaacaacctaattttataatttgaagatttttcaaaaagttttttgttccttttttaaattaaattttaagtgttccacttcggcaaaagcgttatggctacggcggcggtggatttggcggtggaatgggctttgatggctga

SEQ ID NO: 78539 - DNA, 1786 bp, Heterodera glycines
atgcctcctcatttttgcatctttataattttattcaatctcatccaaatcacacataatgttccgccggcgggcctacgtggtggcttaagaggcggtaatttttaaaaatattttaataataaataattcaatacttgtatgagggggggggggtcaaaaaaaccatccaaatgaaaatattttttgatataactttgcttaaacgcaaccaaatttttaattcttcatatcattcggaatccctaatttgtaagtgttctctattattcaaaattttaaaaaagtttcgttaagttttaagaaagttatggcttaaaatgttcaaaaacttggtttctttatcttttcagtttataacttttttgaaacataagtaatttttttttgatatttttcagtataataggaaacgcttagggctagctaaaaataccaagataataaaatttggttcgttttgggcgaagttatgaataatttttctgtccaaaattttctatttgatggttttttgactaacgtcccaacccaaaaaacaccccaacaattctttccgatttcagtgttcaatgatgtttattggacttttcaaaatcttgaattttttaattttccacaccatgaagcacgccatgttgtgcttgaccaattatatttggaatattttatggagaaaaatgagcaaaatggaaatgaaaaaaggctaaaaattgcaacattcacccttttttatatgattcgatggaaaattgaacagaaaaaacaatttttattgtcaattcaaagtgtggatgaggatggagaatacacaggcagaacattatatgagaaaaaaaaggctgctataagagggtaattcatagtgctgaactcgagaccgagacttgacccccgagactcgagaccgaaagtcgcgagacccaaaaaactcgagacgcgaggcttttttcaaaaaattttcttattaatttaaaaaatcggttaaaactttcttaaattgaaaaaataaaaattttaaggcttttcctaacaaattttcgcttttttgatttattcaaaaatggtcaaaaaatttatacataaatatgtataaaaaattatgtataaaaaacccaaaatatgtaatttttttggggaaaaaattcttcgtaaaaggtgaaataggcacgaaataccattaaaaaatgaccaaattgggcttagaatcacattttagtatttttaaaattaacttttgatatatcttttttgaaggaggaaaaaaaacgattttaaagggtaaattttcaattattatttaattatctcatttatcgatatggtgccaaaaaagaaaacaaagcaaaaacataggggtcagcaaaaaaaaagtgattggaatttttataccaaaatttatttctttttttatttaaaatttatataaattttagcataatctgtgattatataaaagaagaaacatccataacaacattatgtttaatggtgattaggaaaaattatttgttggaagttttagacgaaaaaagcccaaattttaacaaaagtcacatcgaatcaccggctaaaagtgacgaatgttttgacgaatcagttgctgagcgcataattgatgaaaataatgaaggaattgttgaatggatgctcagcgatatgctccacttttttgacaaaagacagcgattgaacaaatatttggagtaattaaaaccaattaaatttttattgaatttaacacattttttagaataagaaatttatattattttaaaaatataca

SEQ ID NO: 78540 - DNA, 840 bp, Heterodera glycines
atggacaaaatgctgttgctcttcctatttctgatcatcgtcatcggattgatcgctgctgacaaatgcaacaacttgtatgatgaatgaaatatttgtaaacaattttaatcacttgttttagtccaaggctgaatttcctgtcgcttcagcagcagcggaaaactcgagaatcgcgttgctgctcaatgccaacgagtcgcgtcatgttcggttcagaaactggtccttacgacaaaggcgacgtactttgttcaatttatcatcaaaaacaagtgagtcagtaaaaaaaattctgcataaatttaaaaaaacagaagaaaacattaaacccgtttaaaactttatcaaacaatttttttttggcatttcgtgccttttttctaaaaacttaactttcgtgtttttgaggttatttttgaaattccagatcatagacccatagggctatatttttttctttttttttgcattttttattgttaatttccaaatatggatttattggcggaaacccccaaaatatggattaactgttaaatttatgtatccattaagaatggcctaatgagcagatgcagcggagtgctgttcaacccttctcttgtcctcacgtgtgctcatttctgggaaaaggcagagaaagacggtgacggatcgatggcttatgcgggaatcgaggatggacaaagtgtggaggagggcgtttccaagaaggtgcagttttacaataacaaaaattactacccacttataattatggcaaaaacccccaaaaatttaatttttagttgaatgattcattatgcccctaaccttacccagctatttaaatttgaa

SEQ ID NO: 78541 - DNA, 1203 bp, Heterodera glycines
atgagaaatcagtccctggtactcagttggcgctcggatcaaaaaacctatagttttcccgaattctcctcaaaaagttgtaagacccttccactactttcagacccgtcccattagccgttaagctcaaattagtttttgaaacgaaactccttgtcaatataacgtatatactagcgggtgcgtgaaccgtcggctatttagctgggaaaaagcgcttcgcgctttgggagcttcgctacctagattagctatcgggttgtgaaaagatttggaatttttaaaaaattatcagcgatttttaggccgcttcgcggcctcagacgggcgctacgcacccgttttttaaattcggtgatttttaggctgcttcgcggcctcagacgggcgcttcgcgcccgtttctaatttttgttgtgcttttcggccgcttcgcggccgttttttaaattgtgttgagtcggacgggcgcttcgcgcccgttattaaattttgatggactcagacgggcgcttcgcgcccgtttctaatttttgttgtgcttttcggccgcttcgcggccgttttttaaattgtgttgagtcggacgggcgcttcgcgcccgttattaaattttgatggactcagacgggcgcttcgcgcccgtttttaaatttgttggccttggacgggcgcttcgcgcccgttatttaaagtttgttggttcatacgggcgcttcgcgcccgttattcaaattttgttggccttacagagattagaagaggtacaacagtgattagaagaggtacaacagtgattagaagaggtacaacagtgattagaagaggtacaaaagtgattaaaagaggtacaacagtgattaaaagaggtacaaaagtgattagaagaggtacaacagtgattagaagaggtacaaaagtgattagaagaagtacaaaagcgattagaaaaggtacaacagtgattaaaagaggtacaaaagtgattagaagaggtacaacagtgattagaagaggtgcaaaagtgattaaaagaggtacaacagtgattaaaagaggtacaaaagtgattagaaaggtacaacagtgattagaagaggtacaaaagtctaacttgttatgagatgtacaaaaataatttcataattttaaatataattttatagaattaggtttatttaaaaatttaaaaaaaacaaaata

SEQ ID NO: 78542 - DNA, 839 bp, Heterodera glycines
atgaacagcatttttgtcatttgcattgatatttatgatggagttgcgccctccccccttattttatccgaaaaatcgtgttttagcagtaaattaataaataccggtttatttgcagtcaccattctgattcaaggcatggcccaacaagtgctaccggacaattgtaaacagggctcaggtgaaattttcaaaaaatgtcacgagcactattgcttatttcataagttttcttaaaaaaaagtaataggacaaaatcactcatgatcaacataattaaatttaaaaatttgcacgaaatgtcatatattgtaagctaaatgtcgccaaatctttaagaacgcaattgacaaagcctacaatgccgcaagacaaatttatcaacaacggaacattggtggcactttctttgcggctaaacacttagagatcgtgttcgagccagctgactggccaatcagcggggggtcgtgcagtgctgcagcggctattgcgctcctttcaaaggccgaaaaggaactggcccgagttgacactgtggtgtcgggaggagtgctgccaaatgggccaatttcacatgtcagtggcctggagcttaagatcacgggcgcaagaaattacaatatgcgccggatactactgccaaccgcaaattttggagatgttgccgaattgccgccgaacgtaacaaatggcattgaaattgtttttagagcaaatatttttcaaattatggaggatatgcatttgtctatgacacaccttctggctgtttagtttttattgttgagaaaaatttaccgctttttattctggtttttattactctaatgcttaaa

SEQ ID NO: 78543 - DNA, 903 bp, Heterodera glycines
  unsure (1)..(903): unsure at all n locations
atgcggaaccggaatatggaaccagcccttgtaagaagcaatcaaacaaattttttatgaattttgtttgatgtataacagagagaagaaccatatatatatgaagaaggtaaacgaaagataccaagaatgaaattttggtttgatttgataaaaaacagaaataagtttggtgttgtgttgtgtacgaatcacggactaacaggcattgcagcgtattcatcggagaccatttcgacggcgatggcaccggcggtgtttgtgtcggccaggacaacggccggtgattgggtgttggaagaaaagtccaaaggacgagagacagacgacgaagaaactgttagggatgaagcgattttttttttctgaacatggcacgggtatgggataggccgatgtatccccggccgaaacgtcgccggatgttttcggaccattacttttttttgttgttaatcaaattacgctttgttgatgctttcgatagctatgcgttttgttagtgagttcgacttggacctggatttttgtccaggaaatcaaggtccaacatgagattaagtccaggcttttttcaaaatgtcgaacttatttaatttggttgagaaaaaatgatggtccaaaaactcgtctggcgacaatttcgacaacaatgttttgtcctgctttggagattataaaagcattatttaaaattacatatatcccctgcacaaaattttttttcattaaacatcaaaaaattccaatacctactnttatttnnacaaatttaaattcttatantncaaacatnctcccccnannaaaattanaatttttaaaanattttnttaanaaaanttnnntcaatttcacaaaatactcctattaaaacaatctcncanataaattttaaaaaaa

SEQ ID NO: 78544 - DNA, 264 bp, Heterodera glycines
atgagcaacctaatccggatggtactgggcccacaagtggcaattcttcgtcaacgagtaaacacggcacggacacatgtcgaccgtgaggaagatgaagaagtcaacaacgctgcgctgatggaagcaaaagtattgctgttaaaagtattgcagcgtgtggaagctgaactagcgaaatgggaaaacgtgatttctggacttcaaggacaagaaaaacagacagaacaagaacgactcgagacattcatcaacgaaagagaa

SEQ ID NO: 78545 - DNA, 1228 bp, Heterodera glycines
cattttacgcgtcccatgacgttttacgcgtcccgtgacattttacgcgtcccgtgacattttacgcgtcccgtgacattttacgcgtcccgtgacattttacgcgtcccatgacgttttacgcgtcccgtgacattttacgcgtcccatgacattttacgcgtcccgtgacattttacgcgtcccgtgacattttacgcgtcccatgacattttacgcgtcccgtgacattttacgcgtcccgtgacattttacgcgtcccgtgacattttacgcgtcccgtgacattttacgcgtcccgtgacattttacgcgtcccgtgacattttacgcgtcccgtgacattttacgcgtcccgtgacattttacgcgtcccgtgacattttacgcgtcccgtgacattttacgcgtcccatgacgttttacgcgtcccgtgacattttacgcgtcccatgacattttacgcgtcccatgacattttacgcgtcccatgacattttacgcgtcccatgacattttacgcgtcccatgacattttacgcgtcccatgacattttacgcgtcccgtgacattttacgcgtcccatgacgttttacgcgtcccgtgacattttacgcgtcccgtgacatttttgagcaaggtcaccctactcccgcttcaccaattcgcatctcgtcatgtgccattgtttaggtctgcttggaaattgctggcttttgtctgcgttggctgtcatttctcaacggcccgacattctcgagaagttgttcattacgaaagagtacaatcatagaggggtctacgaagtcaggtggtgacaactttattttgatcataccgataatcggttttaaggctttgtattcacggaatttggcggcggattatcgtcgacgattttttcccttgtcatcggtcaactaaacgccaaatttttgcggtggggaggagaggccaactttgggtgtcgctaattgagaatgcacttgcgaagtataatggcaattatgccatcctgaaatccggactaatttcagaaggtataaataaatttagtggtttgggcggttactacatgcctttttttaggattttcaaccctcaccgggcagccaaccctttttatcgaccttgaatttttgagtgactccgactttgacatcgtttgggctaagctgttaagtgcgagacagctgttctttttgatgtcatgttcttgtggtgcag

SEQ ID NO: 78546 - DNA, 1511 bp, Heterodera glycines
gagacggaggggaggacgagcgggaaaagcgcgagagataggtctcggaacggaacaccaacctgatcatcaactacttgccgcagaacatgacgcaggaagaggtggcatagaaagcggatgaatgaataaatgcccacgaacaaacgcagcccatttaaaacgttaaaaaacaatggcatttttagcttaaatgcctacttttaaaattgaatttttggattttcggattcatatcatgtgtttggcaattttttcactttttactatgagtttcgcatgtttagatttcatttttagtgttgccttccgttttatttgtccctctccgtttttaggtgcgcgcccttttcggttcgatgggcgaagtggagtcgtgcaagtaataacagacaatcatttccatgctttgattttaaaaactcattttgattaagattgattcgtgacaaatcctccggtgagtgctttttcctaccgtaccttttcagcattctctgctaccgtactcctccactttccttcccctctttccaccgtatcttttgcctctttccaatgcttttaactcacctcagtttcatcttctaaatttggttgtgtgttaaatggacgcgatgaatgctgcgctgtttttgttgtcgttgtttcacttttcttttcatttcctttggattttttttgtcctttcgttccggtcactttttccattgacttaataatcccccgggggaatgccatgccaagtcttttcgtattttccgtttggcattatccacccccccttctcccaattgctccctctttttcttcttccgaactcctcggtttaggccaatcgcttggctacgcttttgtaaattatgagcggccggaggacgcgcgaaaggctctgacctcaatgaacggacttcggctgcagaacaaagtgctaaaggtgagggcgaaggacggactttccttttcagttcctccgagtaattaagtaattagttaattaatcatgttaattaatgtttctgttctttgcgttgtgtccaaatcggatgatgggctgacaaacaatgaattattcttttttttccattttcattttgcttttggttttctttctatttttttttttgtttttgtttttgagtgccaacaaatccactcagtttttctcgttcattcaccgatttccattcgcaccagtgatatggaattccgatgctctaaaaaatttcgggtggcggaattccgtctcctcactgattcgattcgcacccccgggggcgttcatccccccgcccccctcccccgcccccaatttttgcgcttttcgttcttcccaatttgcccctctccgccacaggtgtccctggcaaggccctccaaagatgacattaagggcgccaatctgtacgtcagcggactgcctaagtctctgacccaatttgagctcgagtcggtgttccgtcccttcggcactattatcacttcgcgtattttgtccgacaatgtcaccg

SEQ ID NO: 78547 - DNA, 429 bp, Heterodera glycines
atcgatctgtcctcccattttcttatgtccgtttcgccagtgatcaatcgaatgctcagcgtggagatgaaggaaaagcagcagcggtcgctcactttggacgagttgggcatcgagatggagcagttcatggaatttgtggaagccatctcaatcactgcttttcacaagccaattctaccaaatcgtaattttaatttattattttttttatttgtaatggctaaaattttgccacaacatatttttggcaacaaaattcctcttaacatgaatatggatgtcattgatttcgatcaattttaaaattgaaatcgaacaaaatgtttattttttaatttttaatcattttttccaagatcgcaatgactgaatagatatcatattcttgatcagtaatgatttaattatttggcaaaatttaagaca

SEQ ID NO: 78548 - DNA, 2009 bp, Heterodera glycines
atgaatgactcgtgtacaattcacggcaaaaaattcgattgctcatttgcgtggcttttggaaagatacaaactctcagacaaatttgcaattacggaaaagattgtggtaattaacaaaaatttgcttattttccatctgcaataagaattaattatatttcgaattttaattaaggtcaaattccctgggcatcaaaaatttgcctttgtggcgggcgccgataaaaaattttttccgtcattgaggagagtgatcgcaaacataaaaaaaaactttggctgcaaccaaaaaatcattttctatgatttgggaggggtgacagaaaacgaaaaatgggtaaaaacgtaaaaacataattaaataattataaaatataataaaatgaacaaagttaatgagaatttcacaaaaatcaaacacattttaatacaattgatcattttttttactaatttaaattttttttaattcaatgttcccaaattttaaggttgatgaattaaattcgatatgcaactttgaaaggcacgtgttcgatttttctcaaatggtcgatggttcggtgcgccgcctggaaacttacgcgtggaaggtgtttttactcgcggtaacaagcaatttttttggtaggggtcagttgtatgtctgagccaagcttaaaacatcataactttttccgtgttgaccaaattttataaatttagtaatcagtggaaagctatatgtttagaaaccgttgataagttatttctaagcgattaaacaactcataaaaatttgcaacaataaacccacaaaaaagtaaaccataaaaaagtcagaatttttgaatatttttatttataacttttttacaagtcagtttatctttgtgatttttgagaagcaacaaagaaaaaagttatgacggacgttttaaacttgtctcagatgcaactggcccgctcagatttttttttgtttattttaaaattccataagctttttttaattttaagcatgttttgttggagtatgacactgtcgtttgggtggacacgacaattatctttgacaatttcaatttgacggcgattttgacatcaatgaacgagggtagaattggaccagtacaaatgccactaggtggggcatggaaatttcacaaactaatttataagagttaattgttgttttaaacttggttaatttaagtcgcttggcatggcacaaacattgcaacgcatccgggtaaacaaaattgatttaaaaagggtatttttaaaagttgatgatagaagttaattagtgaaacataatgagtagagaaaatgaaaaactcaaatttgacaaaaaagctgatctttgctaagtcatttgaaaaattatgaataatttaaaaccaaaatccataaaagcttaaaacatgtaaaaatttacaaaatgtaagccttaaatggggcatttaacagatatagaatatacacaaggcaattatttcgaaagtcagtgtttttggaataattccttattaaagttccaaaattatttgtgtgttttacattcgttttatcaaaccaaggtcatgaaaatttgtggcctcacacaattaatattttcatttttaatttaaaagtccattcattttccaggaatgtacgaatttttgccaatgttcagcaattttgaggccaaaaatggaataaactgacaaatgacccaccacaattcgagtccgcccttatcatcattcacaaaagcgaacaaacgcggcaactgatgaaatggtacaaaattaacgggaatttaagccaatgccttaaaatttaatcccgtttcaaaaagtgatggaaattcaaattttgtaaaattatcaagagttttgacggctaaatattaacggcgggcatcgactcaataatttctaaggaaattgtgaaatttgcagggaaccgcgcgtcttggaacatggaaattttattaattaatattagattctaaaatataagccaattagcaaatttaaa

SEQ ID NO: 78549 - DNA, 418 bp, Heterodera glycines
atggctattgaacattcatttgtcggtggcccactgtttgcaccgtttcattgctttgctcgcccattttcaacaacacgagccttcggcacaatcaccggcattggcacaatcgccaccatcggacgattcagtaccaaatgccgtgccaatgccaacaaaatttgcgcaaaattccacggcaccaaacagaagcagcgaagaagaccaatgccagcagagaaattgatgaaagcaataagagatagagagagagaaaaggaccatttttaaaattaaaatgccaatgctggcacccaatttttgttttaagtatgccaaaatgcctaattagccttttttgcatttcttttaaattcattctttccatctttcgttgtatctgatctctaaattttttgaatattgttttatttca

SEQ ID NO: 78550 - DNA, 735 bp, Heterodera glycines
atgaccaatgatcaaagggcatataaaaatgacggcattttcaagggaatggcacaggtcagaggatggataggagagaatgttcgtctttggtggaaaaattgccgctgatgtgaccgatggacgccgaaatcagccgatttggcatttattaattaattgggggcaaaatacggacaccggcgagtggcgtcgcacttaaatttgtaagatttgaaattgttttttaaattttattttttgtattttaatgaaattttttgcaattttgcagcgggttaatacataatatgtacatagagcatgtcatttgtaaaacatcaactatattaataccgaattaaacaagaggaggaaaaatgagggagcgattaaatatttttatacaattttttttattaacctcccttaaattcattttttatttgttttttaaaagatacaataatcaaggtagaattaaaaaattataatgattaaaatagtacagaaaaaacagctgaggaatgaagaaaatttgaaatattaaagaaaaatgagctttcttctgctgctgaagagaatgagtcatcatttttaagttgagatttaatttaaaataatttaaaaatcaaattattaattttaaatgatggaacttattaaatgttaaattaatggctgaattcatgcaaaaacttaggcccaaaaataatataaaattaataattttataatttaatttaaaaaatgata

SEQ ID NO: 78551 - DNA, 594 bp, Heterodera glycines
atgccattttcccaaattttccccatcttttcacaggtgtctatagtcgaagataatggacattatgaacaacgatatttgtggactctggtgaagaagaaggaggacaatataaacaacaaccaaattgatgcacttgggcagaaattggacactctcatcgagaagattgaccaagacaaaaatgtgcaacagaaaagtgtggacactctcgtggaacaaaccaagactctcaatgacaaattggacactctcgtcaatgcaattagcactctcgtggagcaattagagaagaagagtgtcaaagtttcgctctggtgaaagtgatcattctgatcacaattgagcaaatgaatcggatgatgttcctgttggtttctccattttcaagtgcgatctttttaaattgtcccttttaaatggctttaaatgttggcgaaatttgccacataatttgctttaaagttaacatttgtaggcctggtaatgattattttatacagtttatccaataattgtatctaaggatgaaaaagcaatcatttattatttttttttgcagttgagagaaaataattcgcattttaaaataaa

SEQ ID NO: 78552 - DNA, 1253 bp, Heterodera glycines
atgctagcctcggcttctcttctggtgtcatgttggccgcttctttttggtctttgctttcgccggccatcgaaatttccgaaagacaaatggccaaattggcctttgtcccagtcggtaaaaaacaaaaatttaatcttttttttctgattttaattaaaaatcagtcgaaaaataattcagccgttggatttgcgttgggtgccttttttgtatatttatccgaccgattaacacaaaagtgagcaaattattaaaaaaaacaatgaccaattaagttttaaatgttattattttaagtgctaattatgcattttttaattagtttcaatggcagcgctctctccgatcagataaatcaattagagaattggcattcggccaatcagcaaaatggaattcatagtgaaaatgctccattcgattttgaaacagaccgacagagttgagtcattaagcatcaatttaaaacaaattaatttgcattttacttaattaaccgatttaattgtgtcccttattaatcttaattaccatttaattaactcgtataattgattttaggagcgaaaatcccgaaaacgctggcgaattggccgcttcgttacgccaacgctgcgtaaaagcgccaaattcgaaagggatggccgacaaagagacaattcgcttggatggccagcagcagcaaaagcgctcacaagaacagtcgtggcatcgaattatgatgctgatcattgccataacggcacataatttccccgaggtgaaaaaatagaaaaaaaacaattagggagggaccttttttggttttttgcaattggcagttttttcattcgtttcccgtgccatccaattaattaattacccaaacaactgcccaattccaacagggattggccgtcggcgttggcttcggcggtgccggccggtcggagtccgttagcctggagaaggcgtcaaatttggcgctgagcattggcctccaaaacttccccgagggcatggccgtcgctttgcctctggcggcctttggccactccaaatggaaggcgtttttgtacggccaaatcagcggaatggttgagccaatggccgctctgatcggtgcttcgcttgtgctaagcattgaatttgtgctgccctacgcactttcctttgccggtccaattttggccaattaaattaatggctatttctttactaattacctaattaggcaaatgaattatcattatttactaattattaataaa

SEQ ID NO: 78553 - DNA, 287 bp, Heterodera glycines
attacataataactaatagcttcataagaaataacaaattgatttacaaaattcaatcacttggaatgaaaaggactttgtacaattttttaaattttgcataatttggctctttcattttttcaaaaaaggtttgttggcatttcttccgccgtttttctctgtcacttctttttgtcgtacgattgctgtatcattgtaagtgttaatctgatcagaaaaggagatttaagtgataagagtgggaaaaagacatgtcgcattatgccaatgacttgtggatactg

SEQ ID NO: 78554 - DNA, 1678 bp, Heterodera glycines
attacataataactaatagcttcataagaaataacaaattgatttacaaaattcaatcacttggaatgaaaaggtttttgtacaattttttaaattttgcataatttggctctttcattttttcaaaaaaggtttgttggcatttcttccgccgtttttctctgtcacttctttttgccgtacgattgttggcccaagttgaagctttgctctttgccctccagaaaataggtggtcacttcacctttgccctgaggcaacaaaactttgatttgttgaaaatctgctgatcagaaagtattttttgccccacggattgatcattaatgatcagcaactgatcgtttaccgggaaatagcccacccatttcagtgagtgatcactctgatcagagaatgattaaggaatttctcataataaattgatagtaaaaaatgatcaatcagtcaatttgcttaaacaaatggcggctcactttgatctccactttgccacgttcgatcatcacaaattggtggtaaaaacagctgagcaaattgaacgaatgttcactgatctgaaaattaaaataacagcaaaaataaataaaaactgaaaattttttgcctgaattttattcggaagtccatgggattcctaaaaaggcaaaaaataaaaataaaaacaaataaatttggctaatgaaattggcggaccattcgtgaagcgaagttgacagtttcgccgaataagcagtagcgaggcgcttgcaagcccacctatgagtattattatatcatttcgttgtttcattgaaaaaaatgttaaaatttaaatgataatttatttatttgagtttggcattttgtttgtgccattttggcaaaccgaccactccggcagccaccggtccgctgtggaagccgatgcgcaccatcatcacctcgtccggacggtgggccaatttgaaattggcgacaaatgtgcgcattttcagcccaatttccgaaatgtggtgcacatgcgcgttgccattctcgcgcggcagacccgagacaatcatataagcatcgccaatctgatcagaaagtgggataataatgtgggaaaacgattaatgatcgaagcgaaggtttataatgactaatctgatcataaaactgggagatgggaggggggagggagatgtgtaaactaatcagagcaaaagccaaaaatgatcaatgagcggatttaatttgatcagcagtgaaagggacagagttaactggatagtgggctattagctgatcagagtgggataaatgagatcagaaagcggggatgggtcgaataaaggtccagaaaacgtgacggacgagcatctgatcagtgtaagtgttaatctgatcagaaaaggagatttaagtgatcagagtgggaaaaagacgggtcgcattatgccaatgccttgtggctactgtaatgcttgctggcacctaccgtttccactttgtacgcgtcgtgtttggcgatgatcgcatcgaaaccgctgaaaaggtcgttcagaaaagcgaccacttggatgggcgttgaagtggaggaaatgcgcgtgaaactgaacaaaaaggggtgggggattatttgggatttaaaacattaaaaaataattattttttaaattttaaatttaagatttgagtataaaataccccctta

SEQ ID NO: 78555 - DNA, 5607 bp, Heterodera glycines
ttttatgcgtcccaaagaacttttatgcgtcccatggctttttttttatgcgtcccaaagaacttttatgcgtcccaaagaacttttatgcgtcccatggccttttatgcgtcccatggccttttttttatgcgtcccaaagaacttttatgcgtcccatggccttttatgcgtcccatggccttttttttatgcgtcccaaagaacttttatgcgtcccatggccttttatgcgtcccaaagaacttttatgcgtcccatggccttttatgcgtcccaaagaacttttatgcgtcccatggccttttatgcgtcccatggccttttttttatgcgtcccaaagaacttttatgcgtcccatggccttttttttatgcgtcccaaagaacttttatgcgtcccatggccttttatgcgtcccaaagaacttttatgcgtcccatggccttttatgcgtcccaaagaacttttatgcgtcccatggccttttatgcgtcccatggccttttatgcgtcccaaagaacttttatgcgtcccatggccttttatgcgtcccatggcctttttttatgcgtcccaaagaccttttatgcgtcccatgaacttttatgcgtcccatggccttttttttatgcgtcccaaagaacttttatgcgtcccatggccttttatgcgtcccatggccttttttttatgcgtcccaaagaacttttatgcgtcccatggccttttttttatgcgtcccaaagaacttttatgcgtcccatggccttttttttatgcgtcccaaagaacttttatgcgtcccatggccttttatgcgtcccatggccttttttttatgcgtcccaaagaacttttatgcgtcccatggccttttatgcgtcccatggccttttatgcgtcccaaagaacttttatgcgtcccatggccttttatgcgtcccatggccttttatgcgtcccatggccttttttttacggatcagtacaacattttttgtccccatttaaatatttggaacatttcttccccagtcactgatttcatttggttgtcactaataaatgttaaatgctcatttatcagtttcacttctgctaattatctctccactactccctctcctgctcacttctttgatcagttcgtttttgtttctgatttttgctttcaaatctctttatttgtccatatttgatcattttttgccctctctgatcattcctttttttctccttttctccttatctcttttttgatcaccttctctcctcctcctgctttttatcacttcttttattgtctctctgatcattccaatttttgctccttccgatcacttttcgaatttatttccgcccctttcagtggtcattccgttcggctattttctgtacgtgcgcgaaaaggagcgcatgctgtacgacatgacgtggcgcatcccgcgcgagcagatcaaactgttgggcgaaggcggcaaacaccagcgccgctccgacccgtcgctgggcaaatcgatggaaagcgcctccgccggctcaatggtcgcgaattgggtcagcagagagttgatttgactaaattcactcaattaaataatttaaatgccgacaaaaatgtcaaatgtttgttttccccttaagcgactgtcaacgaaacaagcggtggccaatggggttaagtgcgcgtgcaaacgctacctgcagacgcgcaacatttcgttcaacaaacacgacttgacacggctgaaggagctgaaggcaaaacgaaactaatgggaaattgaaattaaataaattaaaaatggaaattaaatttaaataattaaaaataaaaaaagccattttgaaatgtcagatgatggagaatgagaacctgaacaagttctatgggatcagcttcaatcagcagaatgaactcatcgcgctttgggtgctgtgccaacgcggcagtttggaggacgttttattcagtggggagatcaaaatcgggcgcaactcttcaagtgacctttgccaaagacgtaggacaaattgagcaattagggggcgcggaagagatgggcaattaatgggataaattggcaattagtgggacaaatggacaattagtgggacaaatgcacaatcagtaggacaaataggcacttagtgggacaaatggccaattcgtgggacaaatggtcaactagtggaacaaagtcattcattgttcccttctccccccgcagggcctttacttcctgcacaattcccccatccgaatgcacggctttctgtgcctccaaaactgtttggtggactccaattggaacatcaaactgaccaatttcgtcacggaagagatcatcggggacaaattgaagcacaacgaactgaaatacgttgacagagacgagatggaccaacaagaagtaaataaaaaatgaatggaaatttggaaattaaatttaaattaaattttaaaatttaaatttaaaacgaaaggcaaagcgaaagcgcgagaagcgggagcacagagaacgcgagaacggcacggatgatcagcagcaggagaaagcggaaaaggcgaaggagcgcgagaaacggcgcaaacggcgcgactcaatcgattcggacggagtgcgggacgactcggagatggatatggcggcgatcaaaatgcgcgagaaaaaaaacgcaaaaagtagttcaaattggcaatgggctgacaatgctaattgagggacaaaatgaatgggaagcagaattttgtagaatgatcagttagagggggggggggggcaaagtgatcggaatggggatggaattaggatgaccaagagtattcggaatcggaagatcggacaacatacaaatggccaaattgatcaattgggtgggcgcaagggtcaaagggatgggaaagagtgcgtaattaatgatcataaaatggtggggcagacaaattttggttggatgagtttacaattaatcgttttttgattgactagagattggatcgagaattcgttttcaaaaagattaatttattgcaaatggaaggaaacagcttaaccaattcataattctcattaagaactgatccaacaagcgccggagattgtccgcgaatatctcagctcaaagcatttgcccccggggacacccgcggccgacatttatagtaattggggcggaatgccattcaattcaaatccttttcccccattaatttgttggcatggcgatggttttgtaccaaattatgttcaaattggagccgttctatgagcgcaatttgccgcccaacagtgagcaatttgttattattatatgcgacaaaatataaaatgacaattaattagcctattaggaattaaaaataacggttaatttctttcaatgaatatttaaaagactattaaattatttgccaaaaaataacaatttcgattgcattttttgccgaaaattggtccatttttgcggatttaacggcactttctcactaatttgatgaattatgttgttcagaaattgtgtctaaaattgccatgtccaacgacaacgaccaaatcattcgcccgtcctttcccaatcagcaacaaaatttggcgcccaagcagcaacagtcgcaggaggaggaggagcaggcgtacaacttgcagctgctgtccgctctcgaggcgtgctggttggaaatcccggagatgcggccgaacatcaaacgcatcaaaatgatcgtcttcgccaaccttcgctcgacgggcagcggctcactggtggaccaaatgatgaaaatgatggaggaagtgagccggagggagggggagggggtaattatggctaattaacattgtaattaattgcccatttggacaaaacaatgggtggcaaaaaaactgctaggacagcgcagcagaaggtaatgaatataggaggaaatgtgctctataatggggaaatgaacaaaccaaagacgggagggcagtcaattaccttccgtctcattacagtatgcttcgtggatgcatttaaagggatgagaagaaataattttggaatcgggaaagtcatgccatctctaaaaaatgttagggatcggatttcggtgattggaatcggattagcttaccttagtccggtctttatcattaaacaactgtttccccgctacagtacaccagcaatttggagcaattagtgaaggaacggacccaaatgttggaggacacgcagcaacaagctgatcggctgctgaagagcatgttgccggcggcaattgccgacgatttaaaggcatttttgatgaagaaaagtttaattcaattgccgtcttttaccgcccctttaggccggccgttctgtgccgccccaactttattcaaatgccaccgttctcttttccgacataagggggtattttatactcaaatcttaaatttaaaatttaaaaaataattattttttaatgttttaaatcccaaataatcccccacccctttttgttcagtttcacgcgcatttcctccacttcaacgcccatccaagtggtcgcttttctgaacgaccttttcagcggtttcgatgcgatcatcgccaaacacgacgcgtacaaagtggaaacggtaggtgccagcaagcattacagtagccacaaggcattggcataatgcgacccgtctttttcccactctgatcacttaaatctccttttctgatcagattaacacttacactgatcagatgctcgtccgtcacgttttctggacctttattcgacccatccccgctttctgatctcatttatcccactctgatcagctaatagcccactatccagttaactctgtccctttcactgctgatcaaattaaatccgctcattgatcatttttggcttttgctctgattagtttacacatctccctcccccctcccatctcccagttttatgatcagattagtcattataaaccttcgcttcgatcattaatcgttttcccacattattatcccactttctgatcagattggcgatgcttatatgattgtctcgggtctgccgcgcgagaatggcaacgcgcatgtgcaccacatttcggaaattgggctgaaaatgcgcacatttgtcgccaatttcaaattggcccaccgtccggacgaggtgatgatggtgcgcatcggcttccacagcggaccggtggctgccggagtggtcggtttgccaaaatggcacaaacaaaatgccaaactcaaataaataaattatcatttaaattttaacatttttttcaatgaaacaacgaaatgatataataatactcataggtgggcttgcaagcgcctcgctactgcttattcggcgaaactgtcaacttcgcttcacgaatggtccgccaatttcattagccaaatttatttgtttttatttttattttttgcctttttaggaatcccatggacttccgaataaaattcaggcaaaaaattttcagtttttatttatttttgctgttattttaattttcagatcagtgaacattcgttcaatttgctcagctgtttttaccaccaatttgtgatgatcgaacgtggcaaagtggagatcaaagtgagc

SEQ ID NO: 78556 - DNA, 70 bp, Heterodera glycines
atgatcaaatatggacaaataaagagatttgaaagcaaaaatcagaaacaaaaacgaactgatcaaagaa

SEQ ID NO: 78557 - DNA, 286 bp, Heterodera glycines
atgccggaattttccgttgtttgggtttcgtttcgggtttgtacaggtgccggatttttacctgtttttagtgtttttggaattaaattttttttattagtctatgcacaaattagcttgtcgccaattttttggcgacaagggcagacaaacggaagtgtcaaacggaagggccgaacggacggaaagcactgattgtgggagggaagctttgtttgccggaaagggaccccaacggcactcaatgaatcggaatttgctaattgagagtgaggcggtgcaatag

SEQ ID NO: 78558 - DNA, 1894 bp, Heterodera glycines
atgaatttttcggcttttaattttgccgccctttgccttttattttgtctctgttttcatccgtcaaaaaatattctcaatgcaacaacaaattcttcgccatcttctccaaaaaacattggaatattcacaaaactcggaaaacaaaattcaaatgttgttgcgctaaaaataagttaaaaaattattaattcattttgaagcgaattttgattgaattaaattattatttattatttttaatatattttaatgaaattaagttcccaacttttcatcgatgagctcttcacaaaattattcaagtcaaaaactgtttaaccaaggcaatggaattttatggaacgaaagtggaggagcataatgacaaataattaaaaaaataaattggtttttattttgaattaatagcccaaaaattaatttaaaaaaaattatttttaaatcacaggtggacgctttaattcgaagctggccaaaaacaaagctgtaaaagtgttggcaagaattgactttccgaaagatgggaaaagccgtttcaattacgaaaatcaattgcaaattatgttgggcaatcaaaagcgacttttaaacgagcgaattgtgctcaagcagaccatttacaagtcgaatcaaaagcagaaggtgggacacggcttaatggccaattctaaggcccattaattactaaggatacgatttatagtgctaaaaactgccaaaataattagtttttaggttttaaaaacacccaaaataggtgctaaaaatgggaaaatattgtaggtgccaaaaagtttcaaatttaggggtataaaatgccaaaatttactcaaaaaaagtaacaaaatcagtattgagataaataatttttaaaatcaaatattcttgtcaagaaataatttttgtgaaaatttttcataataactcgaaaaactaaaaatatcacgcctgcccattatttttgttagttggccaaattcaaaagattttggtagagcattcgggggataacaggggatttatcggatttagtcgacttaaacaatgccgaaggaattcaatactttgattaaaaaaagtgtgtttagttaatcattccttacgagatttgcgcactcaaatcggcgaaattagaagtggaaaactcaagaaatctaaacaaaattgacaatgaaagtcttaaaagtaattatacacaaattctcagcggaagtcagctgataagaataattgcaaatgcaatgagcagagaaattgaccaatttaacaatgcaatgcttctcgataaaggcgatgtaagtgatgagcggatctgagaagcaatttgaaaagtgattaaaataaaaataagaaaaaacatttaatactaattggggatcggattagtaagcaaatgcaaaatttcatattttgcatttaatttattaaaaaattggttttacatggttttcactaataaattagaaataactttaaaatcccacaatctttggtcaaatccgacccttaatgataatcggcaatttaaaggaggaattgtggcggatgtcaattggacatcatttccactaattgttttttaggagtctgtgcggagagtcggctcttcggcttttgccggcgctgacgagaaggagcagttgcgcttcgttggattggtcctttggcatttggtgttccgcgactgtcccatcattgacccgacggcggacgaatttgtgttcatcgcaaaggtcgagccgagcattgacgccaccgacccaaatgtggcgatggcattctgtgccgaattggacagcgaattggcgcgaaaaagccaaccgaaggagcaaaaagaagagaaaaaagtggcggaaaaaatgcaagagaaaattgagaaggaattcgatct

SEQ ID NO: 78559 - DNA, 712 bp, Heterodera glycines
atgaaatcaactgcgattccaataaatgtaagcaaaatcaaactaattaatttataataattaattaatgataatataactcgcacaatttcctctatttttgacagtcgccgacattttgaacaatttgtaccgttctgaccaaattccgttgttaattattttaactgttctttttactgtggtcgttgcgctttgtttctattttcggccgtgtcgaaaaaaggcgacgaatcattgcccaaataaggcggaaaggttgccaaaatatgaggaaaaattaaatttaaattttaaactttgctttatttatattcgctaattacttagaaaattaaattttgaaaacagattaaaacgaaaggagcaatttggacaatgcaaagtcaaaacgaacgccacaaactacacattgaacattggcaaagcagaaaactggaattttaatagcaaaacaatgccaaatttggcaaaaaataaatcggtaattcgtcagttaattaactaattacaaaaaaaaacgcatgatttcagcagagaaattcgttgagcaattggtcattgtccgatttggcacctgttgaaaggcatcacgaaaattgtcagcaaaagttttgcaaaacggtggccaaatcacattaatttgttaatgaacattcaaatttcaataattatgaaatagaaatttggaggcgattttcattttaataaa

SEQ ID NO: 78560 - DNA, 971 bp, Heterodera glycines
atgagtcaatgtttcactgaatttaagggcggttggttatcttttaattctgaataaataaccaacaacaaatagaatgaaatttatagcgaatcgagcaagcgaaaacagtaattaggagatatttttaaacatagataacagcattcgtatttttcccgaaattcaatatatataaattttattaattcagatttaatcaaattaaaagtttttttttttgctttctttttttcatttgcttatttaaaaattttggcgaatgaggagaccgcggtgcaggcagataaacaataaataccaccgacaaatatttttatttgaatagattcaactaaaattttttcaaaaattgccgataatctgaacaagacaaatacgaatactgttatttaaatttttttatcaatgagaatgatcaattagtcaatttatgaaggacttgcttcagtgggaagttgctgaacattctgttgctgatcgtccttagatggaaaaatttaaaatgtatttgattagttcaatatatgcctcattttgttgttgctttttctttgggagattcatttcctcaatgtctgcttgtttcaactttattacacttaagggtcgacgaatcattgaatttcggacaagtgataatttagcgtaatctaaaacataaaaaaatcaagtgtcgttttgggtgctccttctcaattggcgattcttttatccgacaaaatcaaaacttttcaaaatgaatttttggcgaaacgttctattctcgatatcgcaagaaactgctaaaaacagctgaaattctttaagatcagggaatacctaaacacagtcttttagattatgtgtgtgtgttttttccttctttaaataatttgtgcacaatgttttttgtgaaattctttttgtttttttttaaattttcctttatttaccacatgctaactttcctttttgtttagaaaggcata

SEQ ID NO: 78561 - DNA, 1212 bp, Heterodera glycines
atgaattgtttctcgtccgccgtctcgcggattcaacacgcacgagcgcacatttaccattcgatcagtgacattggagttcatgtggatgacaacggatttaatcgactctttccccaacttttacattacgaaagggcaacggaaccaccccaagcggacattacactgactttcattcgtcctggaggtaattgctgaacttaatgtttgtaattgcttttgctcatacaataaccactttgttattagcaactccttcacattcccaaatcccgagtgttgtctcccagccgccttcgcgtgattctccgcctcattccgattcgacgccgaatcccccttctcatagtcagcagaataatccgactgctcttaattcgttgctttccggctttatgtcttttgcacatcaatgtacacagttttctttctgattatctttccaggctttatgcttaattttcagtgcttggcggtgttcctgatcaaaatcatccacgacaccccaccatttcgccgcgtatgtcttctcgctccgtttccttcgccccgcggtcgtccgcttcgtccagatcaactaattccacgggtttgactggacaattccctcgaccctttcgtcacgtgcaagggtcccaaagacgttttccttttggtcttacaactttgaattggaatcagacaccacccagcgtaagtaatccatttattgtatcggcacttattagcttacttttgaggcacccaatgcgcttttcgttggtcctcggccaccctttgtttttcctattttcacaatcgatccgtttttgacttgttccagccgacgatatcgtgtatttgagagtgactcggtaggactaggactgtttttacgtcacaacgaaccccaaaatttatagcgccacaatgatttttggaatgaccccgaaactgcgcgtcttggcatttttcctccgtcgaattctgtcactgcttcctccaaccgaatgcaaaatgttcctccgtttgctttcaattcggcatctgatgacattttgttggatggaatgtctcacaaccaacgtggcaatgcgaatgctaacatgggacctcctcaaggggttggttctggctcttctgctgagaattccgactcataagcggataatcaaccttcaaatgagcaatgggaagcgaagggaagagcaaaagccaacttcttgcaat

SEQ ID NO: 78562 - DNA, 462 bp, Heterodera glycines
atgctactttattcatttgctttgctgattttcactcaattctttggcgtttttgctcaattttttggcgtccattcgcaaaaaaagacggaatcgtaagtgtagtacagtattattatacggtattatttttttttaattttcatttattagaattcgtcttaccggtgtccgaaaagatgtgttcaaagtgccggtggctgttttggaccaatgctttccgtaccaggaggagaagtcattcggattcgaattccaattcccgccgagtggcggcgaatgcaaaaatgggtttaatttgaggaaggattttgtgaaattaaaataaaattcatgaaaaacagattgaccatttgctacccgagcttattggccacacagaagctggaaaatgagcatttcatggacgaagcgtcaatcaattccaaactgttcaacattgacgtcgattacaatgtgtga

SEQ ID NO: 78563 - DNA, 842 bp, Heterodera glycines
atgatcgtggtgagtcgaagtgcaaaaagtccgaatgtggcgaagtgcaaaaagtccgaatgagtggtgatcagaaggggcgggtcatttcagtaccgaagatttattctaatgactaattatcatttaaatttataattgaatgatgccaaccaaatccaacattgttggtgtcattcgatagccctatgtatcctctattagcctaaaaaatttcgttaaggttcaaaaaagttatggccagaagaattcaaaaaaccaaattttcaaacttttttggctcgaactttttttgaactcgacgaaattttttggaattttgcaggctaatcgagcatctaatgagctttcgaatgataccacaatgttggatttggttggcaaagaaaaaagttatagtccaaaaacatgtgttcgtatgaaaacggtccgtacgaaaacggcctggcacctaactttccatatacaaatcgtagaaccaccattccaaaagcaattcggtagcaaattctgtgctctttccagtcagcttgtccattttctctagaaaaaattttccagccccctagggattttttcgaaaattccccgattttcagtgtattttgggtgtcccggtcactaggatgagtgatctgatcaagttggtgtaagagacttttttgatcagcaccaaaagttgtgcaagcatgaattatttcaagtttttaaatgaactataagatagtttttcaggtttgagtcaagacttttttggggcactgtatttctctcacaaaaatgtaatttgtttgggaaatattaaatataaagctaaattataattagggccagcaaataaa

SEQ ID NO: 78564 - DNA, 1053 bp, Heterodera glycines
atgccggcttcaacaaattccatggatgctgtgacagctgcttattacggtttggtgcaattttgtgacgaccccaaccaccgtagtctgacactgacactgacggccatcgctttgttcgtcatttacgcgattggcattctgtcccaattggttgtgctgccggcaaattggcgcctgtccgagcagcgctccgcttttctgcttctgcttcacattgtgagtgaacataatttttaacatttgagtgttgggaaatgaaatttgctgtttcagaatttttacagccaaaagccttaaccttagagttttggtattccaaaaaaaaagagattttttgaacgtgaacaaaagaatttaaaatttaaaaaataatttaattactgagttatagaaatcaatttgaaagagaaaatgaaagttaaatgacaatatttgcatgacgaatattggaatttgggacgtcacaactgaataacgaccgggatattcatctaaaaaagaccaattttatcaaaaaaaaaaaaaaaaattcaaaggacaattttcgtattttaaaatattatcgaaagttgttctaaatttccaaaaaaaaaacattttcccggcgatgcctatcgacaccgccggcctcaaaactctttatctctcttaagaaattgaatcaaaaccgcaaaaatttcctgcaaatctctagggaagagtcaaaaagatttgaaaataatattaataattaaataaataaatgccgcttctcttttttaaataaatcgaaattttaaatcattacaataattggtgttcatttttctttaagaatgtgttcgatctgatctggctgttcgagtacgtttggctttccctggaatatctgatcggcactcgtctcatcgtcaaattctctttggatgcctttctttttcgttttgtcaatttttgcattgacactttttacattgaattggcgttcaaccgatgcattgcttttctgttcccacgcctttacaacacaatttgctgcgaaaagtccgtccgttaattttgggaattcaa

SEQ ID NO: 78565 - DNA, 168 bp, Heterodera glycines
atggccaaggatccgtgccaatgtcttccgacaccgccgactttcgggcgagacgcatttgtggtgacgccgtcggcacagaaattcaaatgggtgaccaaatggcaatggttccgacacaatcgactccgatggaacagccaaattgtcatcagcagcatgacgacg

SEQ ID NO: 78566 - DNA, 246 bp, Heterodera glycines
acacaatgtgccatttgcagcagaatgagaggaaaatccgttggaaattgaagcgcaggcaatcggcacatttctttttcgacgcctttttcatgtgtcccttttcgtccagaattgtctgttggatttgcgtcaagagttggccttcgtcgactcgttagacccttccctgggccaatgtttgaccaactcgcggcgtttgctgatcagcgagtcgatgaaattggaggagtggcacaaccccga

SEQ ID NO: 78567 - DNA, 659 bp, Heterodera glycines
caccaagcttatggaaatccaatgagttttggttcccgggaaatagcgaattccatgaaaatccgtgacgaggaaaatcacgacgaaatcccgggctaaaatcttgtcaagaacccggaccaaatcatggtaaaagtatgacagcaatggtaggaaaataatgaaatgaacttaaactgaaaacgatggatgaaaattaaaaattcacatgtgtcaggcgtccaaacacgtgcgcgaaaatcactccttaaattaaaaaaaaatatttaggtaaaaaaaaaaaaaattaaatttatacatttttaaatttaaattatattatatatataattattttatagataatttaaatatttagtttagtaataaaaaaaataaaatttgtaaaatatttaaattatttttattaataataagtttaaaattggatattcacacagaaaaatgttttaaaataaaaaaataagaaaaataaaaatatttttaatttttccttttaaattaaaatatttttaatttttcctaattaaaaattaaaaaataaaaataatcaaaatggtacccactttaatgttatgttggtggtgcacacatttaaatgcttaaaacttagtcgagggtcaagcctaaattaaattaaaaattaaaaaaccaaaaac

SEQ ID NO: 78568 - DNA, 1285 bp, Heterodera glycines
caaagcattgaattttaattaaaaataacattttttagtttacttcccgaagcggatggtgttaatgtgacgattgaattgcatgttcaggtgttttcctctaaattcgttttcaatttctttaaatttaaattttcttagggtatctccaaaatttcggaaatcactgctgattttggtaaatttaccatgaattattaaacaacaattaatttttctaacttcacagaattggacgtaatgtacagcgaaatttggtaaaaaattgaaagtttttggttttttaatttttaatttaatttaggcttgaccctcgactaagttttaagcatttaaatgtgtgcaccaccaacataacattaaagtgggtaccattttgattatttttattttttaatttttaattaggaaaaattaaaaatattttaatttaaaaggaaaaattaaaaatatttttatttttcttatttttttattttaaaacatttttctgtgtgaatatccaattttaaacttattattaataaaaataatttaaatattttacaaattttattttttttattactaaactaaatatttaaattatctataaaataattatatatataatataatttaaatttaaaaatgtataaatttaattttttttttttttacctaaatatttttttttaatttaaggagtgattttcgcgcacgtgtttggacgcctgacacatgtgaatttttaattttcatccatcgttttcagtttaagttcatttcattattttcctaccattgctgtcatacttttaccatgatttggtccgggttcttgacaagattttagcccgggatttcgtcgtgattttcctcgtcacggattttcatggaattcgctatttcccgggaaccaaaactcattggatttccataagcttggtgcactgcgtccaattgattttcacttttttgaaaattcgaccgaaattttttgaggattttttttggcaaattttgctgattttattttatttgggaaatttccaattttccaccactgaatttgccattcatcttgtttttagtattttttttttttgctgcttctaaggtatcatcaactccaagggctcgtcaattcataaaagtccatcggaaaatacagtaaatcctgagaattttggaaatttccaaaattaaaaaaaaatttccgcagtttgtcatcctctacgaacatggcctcgtctggtccaacttcaagggccaaaattataaaatttggtgtgtaaatacgctc

SEQ ID NO: 78569 - DNA, 252 bp, Heterodera glycines
atggctttcatggcccgtcttcgtcgacaccaagctgtacatgttcgtcgtccatgccgtcgtcgtgttcaacagcaacagttcaacagaaacatcatggaaagcgatattattccgtccattccaaacacattactggcaccaatgatggcactttgtcgccttcgtcatcaagttcaagcagtacaacagaaacaaaaacaacaacacggtcaagcagtacatgcgaaacaaatgcgacaactacggtaa

SEQ ID NO: 78570 - DNA, 359 bp, Heterodera glycines
atgcaaatggtgccatttgaattggtgaacgaatggacaaaggaaaagctgacattggccaaagaaaacgaaaatgaattggaggacaactgttggattatgaaacgatgcaaaattggggaggccgcggcggttcagcttcagaaagatgaaaattgtaacaatgtgttcttttaccttaatgccaataattgcattgggtgagcaattaaaaaagcatttttattttttaaataattaaaattgcgcttaattaaggccattgtctccgccaccaccagcaaaagaagaaggacgacgcgggataaagcatcacaaaggagccgtcttctgacaatgagtgacggacaaagcaacaa

SEQ ID NO: 78571 - DNA, 552 bp, Heterodera glycines
ggagctgaatgtgccgacggcgaatgctgcgatttggagcagtgcaagccgaaaggtcggtccaccgtttgtcgggaagaggccaatgagtgcgatttgcccgaatattgcgacggaacaaacccaatttgtcctcgtaagaacaaattgctgtaaaattgccaatttcttttccatttaagccgacttttttgtccaggatggccatacgtgtcccaaaaattcggaggtaaatttccgtgtaatcataaattatgccaaactcagttttgatgaataactaaaaatcttggttttgccttctccaaaagtgcatatttggcatggcgttgtgtattgattaattattttgtgttttgccaacatcaaaaaattgcaggatttttgctaccaaggcgtgtgtggcagtcgtgagcagcagtgccgcttcatttggggcccgaccgcgaagaattccatcgcggaatgctacgcgtacaacgaatacggctcattcagcggcaactgcggctacgaccaggccaaagaccaataccatcgctgcaagaaaag

SEQ ID NO: 78572 - DNA, 679 bp, Heterodera glycines
atggcaacaaaaccagccaaaaagggaaataatggcacaaggggagggattgtgccatcgttggcggaacagcgctcgttggtcgcgcacccgggctatgacacgggcgggtctacttcctccgacgaacagcagccgacaagaacaacagtagcagaccaaagggcacaacaacaacaggaacagcaaacggtaattgttgcacaacaaccgtaccgtaatcccctaacaatggtaatagacaaaattacagtatgaccatcggcaccgatacggcgttgagactcctccgccaccgccgccgccccataaaaatgtacacaaaagcggagaaaaagtaaatggttaaggaaatgagcagcaacagaactaaccaaagagttcaggcagtacagcagaaacagccaaaaatgccaacgaaaccgccgacaatcaaagtgaaggaggaaaaaggaggggcagaagcgaagataaatgtgaaagcgatggcagcgaaattcgagaaaaaatgaaatgggttattcgatcgactctgatgtgatcctctccttaattctttaataccaaaattgcctttttgcatttgcaaattcttattttttgatatttctccgccccattttctttttaattaagcgattaccaaaatttctattcattttttgcaaattttcctata

SEQ ID NO: 78573 - DNA, 305 bp, Heterodera glycines
atggcaaaggaaatgacaaatgatgaaaataaggaagaagaagaagaactatgggaaaagtgggaaaatttgcataaaatcggaagttaaatttgaaggaaaatttaaaaaaaacgaagggaatttatagcaaatcaaaaaaagagaattatattattataaatgtgtaaattcgacaacgatttttaaagccaaatttaattttatttcaaaaaataatttgaaaatataatgttggaaattttttaggaaatttaatttgaatcgataaaaaattataacttaaaaaataatcattaattaaa

SEQ ID NO: 78574 - DNA, 689 bp, Heterodera glycines
atgctctgccgacgaccacacaaaatttgcataataatcgcaattatttttctcgtttttgtgccgtattgtgccgccttttgtccgccgggctgtgagtgccgtgacgatcaatttttggtggcatgcaattcttcggcactgacctccattccgatactgtaagtgttgcttttggtactgttataattatacaaaaatattaaatttcttaaattattaattattataattcaatattttctttatattctttttaaaaaaatttatatgatttacaataaaagaaattccatatattattatctttatattgtaaaataatggatttttaaattcataaattaattaatattttattatgcaattgctcatttttttagcctcaatccgatgctgaaaacattggtcatcacaaactcaaatgggcttaaattggactctttttcaattgctctttatcaacgttggttttttacccatttttttattttattttatttattttttttataaaaattttgtatttttaattgcagaacttgaatctctggaacttagcaacaaccaaataacgcgaattccaagcaactttttgagccggttaacaaaattgcgaagtaaaattcaattaactgcgaattcatttttattaattgccgataattaagcacttaatttacgtggaa

SEQ ID NO: 78575 - DNA, 1443 bp, Heterodera glycines
atgcgaccaattcgcagtcgcaattccaacgatttcctgaacggtggggaaagtttaaaaaaaaaattcatagtaactaaattaatcaatgttcatcatgaaaattaatttaattttaaatattataaataaataataaagcaatcttttgaaaattattgtaaattttctttcaatttttatacaataaatcttttaccacttagtccaactttcttcagcattgaccaattcagcaagttttggtcaattgtcgaaagttgacagttggccaaatccaattgctccaatgaattagcgccaataaatgattttggatcaatgtatgacaaaaaagttgaattggtcaaaaaaagactgcccaattttggcaatccgacgaaagcatttgcctaaaattattaactcattttgaaaactattaaatcgtaagttaccctaatctcccgtaattggttcatctgttccaggtgcaactccctcaattcccataagccaccatcgaaggttcttgctgggatctggcacacattccaaagaatgaaaacttttaattttattttaataagtcacctcggcccaagcatttcctgacaaatccaatttccttaagccaattaggttttcccaatttgcatttcggcgacaaccatcgataacctcggaggtcggtgttgataactttaaaaataactaatgttactatgttacatatctatcaaatgatttttcttaaattcgccacggtgtttttctacaaaagaaaatccttaaagttttgatcaaagccaatcaacttttatattttgtgagataatagagaaaattagagctaatgaaggattaggagatttcaaatttggtgcttttggacggagttataacgaattattttaagaagaaagtgcctatgtaaaatataatttttcaacaaattttaaatacatttttcttttgtttcatcagctgaaatagccgcataaacagtaataaatttggttaaaatttgtgcaaataaaagtcattgagaagagaaagcctaagattgacacatgggatttggcttatcggtggcactcaaaacaaacaaatgaagccccgggggaagggagtgagtgcattacgggctcaaatttggctaatgaactgaaccgatccggcgacggggttaatttactaaaaatttggtaatataataatgattagctaataaatttaattttttaaataaaatgaactaattttatagaatttttttatgttgaaacgattaaattggctcagcaattaccaaatttcgtgccaaatttaatgactccaatcgctgcagtcccgaaaaggcgtccttctccatacatgaaatcaaatttgagcttaaatccaaatcgcgcagcttttcaagtgaagaaaacggcttggccattagctaaatgaacaaataaa

SEQ ID NO: 78576 - DNA, 1704 bp, Heterodera glycines
atgatcgaaattttggccacacggaccaatcaacaaattgctgatctgagaaatgtttatgatacggaactggctattagtgacccacaatatcggcttcttgaggcttacatcaaagaaaaaaccagtgggccattccaacacttacttgtctcgttgcttaatgagtcaagagatgagacacacgcgagtgatgaggaaatggcaaaaaaagtatgctaattatactttaattacaaataatgccttaattaattggaaattgaagcaaaaataataatttatttcaaataaatataaataaattttatatttaacattttaccaatttattaacaggaagcacaacaactcttcgaattaagacggaaaggtgaaattttgtccgaaaccgcataaaaacattaaaaattttcccgactgcgtttgtcggcatcgctccaaaagttctgtttaaaaaaaggaattttaattcaaaaatgtttatcaaatcgaaaatttaatttttccaacgggcacctgttggcacggcgaatggcaacaaatttgaacaaatttgttatcaaacattatcaaaatatcatctgaatgataataatttaattaaaatatttaaattttacatattattattgaataaatatagtttttaaacggttaaacataatcgttttttgactccctcgcccactggttttttagattgaatgttcaggttttgaaaatttaagacttcaagattttcgattggtaattacgaaggatttttttccatcctttactagaatttaagattttttttaggattagcagcgaagagtccttgggtcagcaaaaatgctgctgaattcaacagagtgtttgctaaaggaagcttcagccaagtaaaaaaatatttcgcaaatttcaaatttaccatgattaatgaatgtaatttaattagaaatatatattaaagataaattttatttagctgcgaaaattattcgattattacaaacaaatagttgttcagcatcaaaaacaaaaaagacattataaagaggaatatgataaatctggtaaatacgacattgaggctgccatcacaaatgagttttccggaattgacaaggatgggtaagggataattgagaatgagtccgtttttctaagcttttgccgcctattggcacatttttatatatttttattgaatgtattaccgtaattatttaccttttgcatttattatataacgacagacataagctgaagctttcttattatttaagttatttggcattgatcaaatatgtccgtgacggcccaaaatattttgcagatttattgcacgaatccatcactggtaattttttgccaaaaatgcccagcgacttgactcgtgttctggtttcacgatctgaaattgatctggctgagataaaggtgactgatttaattgaactatttgtaattaaaaggcataaatggtataacaaataagtttttatattaaattgttaaataatatatataaaaaaaaattattatttatcataaaaagtaatgaatagggtcgcgatccacacacccctaagattcgacctaaaaattttcaaaaccactcctaagaaatgaaaaaaattttatttttaggtacctatttttggttttttgcacttaaaaatcccagtcctactcatttgcaactgcaactagtga

SEQ ID NO: 78577 - DNA, 345 bp, Heterodera glycines
attatggcttttttgcaaagaaattggcaaatcggtctttttaaacgcattaaagaagattcagtcgattgcttggagtgtaagcaaaaaaacgttattaatttttcatcttcatcattttttggtttaaaaatatattgaatacttttttatactttgaaagacttttttataatacagaattttttgaaatttcctaaaatccgcaatcctgcgcaggatcctgcagattttaaatgcaggatttgcaggattaatcctgccggatcctgtcctgtaaaaaattttgaattccaatcctgcaacaggacccgcaaatttgaaatttccggtctctaattccta

SEQ ID NO: 78578 - DNA, 2696 bp, Heterodera glycines
gtgtggacaaatttttggaagatattgctgacatgcttcgcattcaaaaattgccatcagttgatttcttttcgagtcgtgaacattttatgtggcggtgagaaaaatatatgatttttaatataaataataattaattaattttacaattttaaatttaagaaaatttatgcacatcattggaccaacaggttcttacataaaatggatgtggtcaatgtttacaccaattgttcttacggtgagattataattataggaaatatttttttataagaaaaatcataaaagattcacattttaaagaaattttcatttttaaatatttattcaaaaataatttaatgctaaaatgccaaaaattaagaaatttaaatcatttttctattatttatgcttaagatgcttcttgcgtttctgatttgggctattccgaaaatattttaatggcaaaatgtcaaaaatcattaaatttaaatcatttttccaaaaatatttaatgacaatatgcctaaatcatttattccatattcaatttgattcagatgcttctgatcgcttccattttggactatgaacgtgtaacattcaatggcatcatattacccattgaatatgaattgattgcatggattgtgatgatcggaccattgctgattgtgcctggtacagcaatttacaacatttgggatgcaaggcgaaaaaataaagtaaaaattaataataatatttattttttaaaattatttttattacaattaaaatcgatttttattagccattaaaaagcgtgtttaatggaagttttcgtaaacgtgaattggatgacgaggagagtaagcagccaaagcatacccagcagcaagaaggcggtctatacgatgtaattataataaaaatttaaataatatatttaatattattttatcactctactcaattttagaacaaaattttaggtttggattttaaaattagtcaaaataaatttctggcgcaggagcctttagaaagtcggaaattttcggtgccaaaaaccatatgccattttcagtgccgatttttcttttttcattttcagtacattgatccgttgtcgagaggtgcttcgacaaaatccggtgttaatcgcattagccgtcgatcgggcgttatgcagtggcaaaatgatcagcaacagcaacaacagaagcattcggcttcagcaataatagatgatgatcaaaagtaccaacaagttcgggaacggttacgacgatggaccgaggaggagggcagcagttcaattggcattcaacggagtttgagtaaatggcttatttaaatatttctaatcatttattaaatattttgttgcgttatttttccaaatttttgaagaatgaaagatacagcgattctaaaggcactgccggaaatttttttggatataatttattcatgtattttgtactaaaaatgtctttaatccttgaaacataaaaattccggcttttgtatgggaatttcataaaaattgctgaacattgaaataagaccctcaaaattgatcggaaaaatcgatttaagtactgaaaaatcgataaaattggtaaaattttaaaaattcctaaaaaaaaattccaacatcatgctagagataaactttttttaaatgttccagcaaaaacaagataataacgctaatcgcaataataaatattgtgattttcaagctgatcggcccgaaattgaagatgacagtgctgaagaaaatcttgaggatgaaacccatgacaatcgaatgcctggccgtatccgagaatggcatcagcaacagttgcacggcattgccgtgtcgtcatcatcctcgcccaccccgccaccacttgactaccattgctatcagcagcagcaaaaactcactgatacaagcatctctgacaatcaaaggtgtgtttgtgtgtgcaatattaatccgaaaattgttaaaatataaaattactactattttatgaaccattatattttcctaatttctaattcgccgttaattgattaattcttcaatttagggttgggtgctccccgaccttcagcagggagagaaaaactcggggattaataaacaaatttcctgaaacttattttagcaaatttttaatattcaccaggggtggatcacagtaaaaaaaattgccgaggttttttaaaatttttcaatttactgaagggttgcggagacctgcggcgcttgcgggaaattatttatatttaattttattttaagattttatattaaaaataggcatttttaaaatatttttaggaaatgcgagtcgcccttcttgttcggtccacctccgatgcaggcaattttgtcagcaggaagcattcattccggccacccaactgatgccgttgacgactgtcgtaatgaatcggcggccacttctgacattattaagaccaaaattacgcgacaacatggcgacgatggcattattggacaaaatgacaaaaacaaaaatttgggcattcaaaaatttcatcagtcctcatccgccattgaacttgatgagttcggcaaaagttgtcttggatcagtcagtgtgtttaatgtgccatttcgacaacaacaacaacaacaacaacatcatgatcaacagttttcactgtcatctcccatccgaacacagccaaattggagatcatcg

SEQ ID NO: 78579 - DNA, 2594 bp, Heterodera glycines
atggcactctcccctttatcacaggtaagacgccaaagcgtgccagtcgagggcacaatgcagtgaacaggcgcagcctgtggaatcggataactgatcgcggcatgcgtcggctgcgcgaccgggcaagcggcgcacgggcggacgaagtgcgcgacctgtggaacacgcaaattgaattctttttgtcctgtctgggcttcattgttggtggcgggaacacgctgcgcttcccggcaatgatttttgaatttggcggtgagcaaaaaaatgatgagcaactaattaacaagttttcgatttactaccaaaaaatattggtttatttcttatttacatttttattttaaaataattaaatttacgtttttaaaatccaaacttaactataaaataggaactatcatcagttgtatggattaaaaatttttacaaaatgccagtcgggtttttgtagctctgtttacagttaccttgacaaattgactaaggccctacagactgaaaaattccaaaatttttactctctatttttcaaattttctgtgaaatttgtacctatgaaaatgcacatattattttgcaaattttcaagtctttctgattatgaattaaattacaaaatttacttgtcaaaattcaaatgtttagtatagcgccctagctataaatataattatgtgatttctaacctattgatgtaaatatttggtttaataatattatatttctttcagcaaaaataactttcacctcctaaatatatctctgattttattttattttttatcattttaaggtatttttttcatacctcatctgtttttcatggttattttcggatttccgcttgtctatatgcacttgacaattggccaatattcaggcaatatatttatttatttattttttgcaattatttatttattattttaggactttctgcaagcgcagccttttataaaatgatgccaattgcttctggtctgtgaaataaataaatatattttttttaattagcagaagtttttcaaagcatataaaaatcaatttttcagttaaaaacaatttgggaatatttgaatataatttaataaatacaatttactatttttaacactttattgaataataatttcacattattttcaggaatcggctgggcgttcgttttatttattttatatttctaaattaattttttttttcaagtcttgtcctattggcattacccgtgtcaatttattacattttctatgttgcttggggcttttactacctgtggtttgctttgcatggcattttcgagcaggacggcatggtacggtaaaacaaaaaatctacagtagtaaaaacaaattatgttttatagccagccatagtaaaaggcggcactgcagtaatttttttttgaactatttttttaaatctcaaggtgtgggaacattgcaagcccgaatggataaaacaatttaactgttgtgaactcacgactactgtaaacggtgaactgtgtggcggctacggtactcagtcaatgccagcgcctgaggcattcttctagtaatgattttgcttgcatacaaaatatgaaaaaatttatttttgtttttcaacaaattttgatttttttttcaaatggaagaattaaaatgaaacttttgcatttaattaaaaaaacaacaaaatgcttgaacaacaaaaacgaattatttaatttaaattgttgttttttttttgtaaatttaaattaatcattatttttgttaagctttcaggtaggacaaaaaaggacttgtttaatcaacttatttcaattggagttttccataggtgctgaatcgcacaatggttagtttattatataaaattatttaaaaaaaaatatttttttgcgtaaaattccaatgaaatttttaaggacatacaaagtacggctcttggacaaattcaagaacatttgctcatttcgttgataatttcttggataattggttggattatttatagtattactaaataatatttatgtataatttggttttgaatttcagtattttttggtgtgttcaagggacttggatcaatcggctgggcagtgtctttcaccgcaacgctaccatattttttggttgataaaattaattaatcacaaaagcataaatggatttcgtaaattttcatgaaaacgcaccaattttttttaaaaaaatgagtttatttcagtggtaaattttttaaaagcaactgaattatttgggattattttttttaatttaaagaaaacattgataatcatacctatcaaatgccaataagcttcaaaccaattggattaagctgatcattcttctgcttcgcagtgtttcgcttgaaggtgcttcgtcgggactcgtttatctgttcaagcctgagtttaaaaacctatggagccttaaggcaataatataatataatttttatttaaattatttatattatctaaaaaaggtttaattaattcaaaaaataattttcttcaactatgtttatatcttttttttgtatcttagctctggcgtaaagcagctgagcaagtaatttcctttaataaa

SEQ ID NO: 78580 - DNA, 1396 bp, Heterodera glycines
atgcccggcaacgccgtgctcgcgttcaccactccgtcgacgcccgtggccaatcagacgctgatcaaagtggccatgttggtggcccaaaatgacacggactacggcctgccgcggaaaaacgcggcactgcgagattctggcggcgcaattccaatggcattggaacagttgtgggcggacgaaatccttccaaaaagcatcaatttttcgtcagttaaatattttaaaataaaaaaattgaacaaattcacagatttcaatggcattatgggaattgcaacgaggcgtcggcattgggccgaatttacaaatatgtgaaggaattcgatgccgacgcaatcatcgcaacgccgtgcatggacggtgaaagaaacaataaatttaataaaaaataattaaacatatttaaatttataaataataaataaaataattaaaaaacattattttgttgtcacagtgcccccaatgcttggccatttggcttccaatttcaacttgccaatgatggtttggggacagagcatggcgtcgatgtgagttcataaaaaaacccttctccaaattggcttaacactcaattgcatttcgctctgttttagcctcgcctcctccaacaatttgacttacccaactctgctgaacattgtgccaaattacaaatagtgagttgactcatccctttgttttacggcatttccttctttagcatggcttccggccttgtcagtcttatgcaatatttcaattggactcgctttggctttgtgcttcaaagtgacatcaacggagtcagcggaggttaacgcactgaaaaggcaaaacaaaaatttccatgtgaataattataatttaggctgtaatttattcgcccgcgacatcgatgtactgtaaaaccgtattcaattgaccgtttctctttttttggatttaaaaaatacatttcatatatttagaaagcggtgggtgaacagtcgacggtcagtatcaatttcaaggcacgcattttcaacacccaaacgtccgatttgagcacaattgtcaatggactgcgcaaaagggcacggagtgagtgggggggggggataaaaagggatttgttgggataggacaagtgaaataaaaagggattttaaaaacggatcgggatttgaattaaatgaaatgaaataaacccaaaatgtaaaaacacattccgatatgtcagtcattttgctttgcttcgacgacgtcactcagttgcgaaccttcgcactttctttgtttgatggaggactgaaaacaaaggtgcgtgggatgccaaattacgcgaattaatgatttaatcgatcattaaggattatttgtacatcatcccggataatgacctgatcctttcatgtttgatcaatta

SEQ ID NO: 78581 - DNA, 1415 bp, Heterodera glycines
atgaacagacggtaagcaatttcttttgaaaaattacaatttcgttttacccaattttcttatgtttcagttggatttgtggcgacgtttggatggacattctcccatcttttgaccgtcctgaactcggcctcaaaatggcattgctttccgaccgtttcgatgttttggtggacaaacatttcgatggaaaaagcgaattcacaatttggaaagcaatcgaaattcgcaaggacgaagaaccaaaagcgaaactgtctgtatggaccgatgacaaatgcgtggcatttccattgccggaccgtccgctgcccatcaaaatccgttttaaggaccttcagattcagtaaatcaaaaaatatacagaaaaccaatcttcatttttccccttttcagttacattgaccattctgtgctcacatttctccgttccaacaagccaatttgggacagaagtggcaccaatttggaattgtatattgaatattgtgaccagcgaatttgggatgttttggaccgtcaaatttggccaatttttgcgaaaagcattcgtcattttggctttcacgatggcgatgatttggacaaattgcgtcgccgcatttcaccgacaattctcactgatgttgatcaattgaattcaattgattctggtgctctattccccgatggaattgctgatgatgggccaaatgcaactgctggccaagctttgaccaaatggttgcacactccgagcaaagatggtcaaccgaagcaattgtatcgcaataattattttggtccaccaaagctggaatgggtcaacaacttcaaagaggtgtgtctcgccagaatttccgtcaatttgtttttattttaccaatttttgtgtttagaaatttcgccatgccaccacttctgtcagttacacaattcaactgttttttcttgtggacacaatgcaaattgaaccatttgaattagtgaatggacggacgaaagaaaagctgacattgaaacatagcgatgaattaggctataattgcctgtataattggctgttgcaacggtgcccaattggggagacggcgacggcgccagttaagtgggaaaacgtgaaaattcgggtgctaatttgaactatatcagatttgagctgcgatatgccaattattcgggtgccaatttgaacaagatccgatttgatttgtgggatggaattcattgcattgggtgagcagcaaaagcaatttttgattgtcgaaaaaatataaataattttaggccattgtcgctgccagcggaagaagaagcggatgaaagcattgaaaaataatttaatttgagaaatggccgatctcacacatttggaatttgatttgatgccatcattttctccgaaatgcttttgttgattctttcgttcgaataaa

SEQ ID NO: 78582 - DNA, 777 bp, Heterodera glycines
atgccccgctgctgtgaaggaccgacgcaccgtggacaaatgctatcgtgccatggagacggtgattcggctgtgccagcagccccggctgaacttgaagaactcgccgccgttcatcctggacattctgcccgacatttacaatctgttgaacagcatttttgcaaatgagcccaacattttgcaggttgaaaaagagaaaatcgatttttaaaatcttttttttaaatgtttttgcccataaaattcataaataaatcaccctaagggtcagctttagaaaatttaaaaaattaaccaaattttaaataaaaatttaatttggcaaatttagtatataaaaaaaaattgaattggaagttttatatgggttttatccatattttaaaaaaaaattccatataaattgttaatgtttttggccccatttgttgaaaacaacaaaatttgagtttgatttaccaaaattatttgaggacaatttgtacttgcgtctgttcctctccaatttgacgctgaaatgcaaacagacggtcaaactgttcaaaacgtaccgcgaccaaatcttcgacgagggcaccagcggacggcgccacctcaccaaaaactcgctgatcttcgcgcatatgctctccgagctgaagtcccagtttccggagggcaaatttgtgggcaacaaatttcgaatcacaaaacggcaggcggaggagttttggctgaacacatttggggacaggtgcaaattgtggaaaatgccaaattgggaatgccagaaag

SEQ ID NO: 78583 - DNA, 310 bp, Heterodera glycines
atgcttcaaatgctttttggtcgtaattggcaattgtttcgtacgtaagtaccaacagggaaaggctggttgtttttttctagaaattaagcctaaaaacaatttatttataacagctgctgataaatgcattttgattgattactgaagagcaaaaagtgcaattcggcaaaacccataatcattttcttgggaggggcagaggcgatcatttcggtataatcctgcgggaagagttcccggtacaagcgatgtggactgaacttggcaatgtataccgaaagcggagcaggtccataaaaataataaa

SEQ ID NO: 78584 - DNA, 1685 bp, Heterodera glycines
atgaacggagtgaatcagcagaacggagtggtgggttttggaaaagtcgttggtcattggcattttgaaggtcgacaaacgcgtggttccgtcacttcgtcagtggaacccttcttatcatataaagactgtgctcgaggacatacggaggttggcctgtgacattaatattcttaattgttctatgtaccattatttcaattcgtcgaaaaggtaatactggaaaacctggactacgtaaaaaatctcattaaaacaccaatccgcggggttttttggggggcttctgatcacaaatatgacatcagatttgcaaaattaatttccgaataattattgacaaggtgataaatgctcatctaattcaacaaattatcgagtgctgctagacgtaaatatttatataattcaaacttcgaaaatcggattttaaaacaatgataaaatcaacgattttgaaaattttatatcatatttgtaaacagaagcaacgaagcccccgaattggtcgtttcataacagaaaaaaaacattatttttttgtggagtcaagattctccaatattaccggtaaaaatcattcgacttacaattaatttattgttagtctataatttaatttccaaataattttttttttgttctttataggcacttgatgactgccaaagagaattcgaagctttcccagcccgccgaaggttcgtcgtactgatgggttgcactccgttccttcaaacgaatattccttccatcggtttttgccccaatttgtcgtggtatttcgttataatttgagtccttcgaatttagctcctcctttttgttcgttcgtttgttttgtctcttcactataactgattttaaaataaaaactcccagacattttatgacaaatgaatatttagctccgaagtttctttttgaagctttgcttattttaccacgtttctatattacctaatttatttttactttgtttttttctgccgtttttctaatggtaagaaattcggccctttcttttcttcacttcctttgttttgtcaggagctttattttgaaattctgcgcaagaagcaacatttgctggtgcaggcgcgggagaattggacagcgaaagatctgaaaagagtggtggagggcattctgaaggtggtaccaatttccactcataaaatatggtctcgttaatcaaaggaatagtcaggaactgtattgggttttgagggaagttggtgattaatcattaatgacacgcttttcaggtgccacccgagaaacagtctctgtacaagccgaccaatgagcagcggacggaatgggaggcaatggacgagaagcaaacgttgcacgaattgggattcacaatgaaaaatgcgcgagcggatggtaaaactgccgatttatgcggtaaagtcgttcctttgtaggcccggctgtgttggcgttggttttgccaggtttactcacaacctgacttagaactgtttttaagttcatggcttattgacagaggatggcaaaagtcccgacatagtgccaatgacagtcgcaccgccggtgcccgaagcaatggcacagaacaaacagtccgaagttgaaatggtcgaggagtgacgacaccactaacattttagagggcagtgattttctcagttgacttcgccaaattttattggaaa

SEQ ID NO: 78585 - DNA, 562 bp, Heterodera glycines
  unsure (1)..(562): unsure at all n locations
gcattnacagcttggagcgtgtttccttcttagccgattctttgttccgtttgttcaccaaattttatgaatgtatcaaatggcatttccgacaaagcccaaataaaagcgaaatcgaaaagtttggagcagcaattctcaaatttggccgttttgtttgtgggacgctgagagaggtgaattaagaaatcaagaactttagcgaaatggctaaaataacctaatgaaagagcccttcagatgcaaactgtgaaacagccgaacatttcccaaaatgtgaccactcgtcactgggggccaaacttaaactgggcatccccaaatgcttttccgattctgattaacagaaaagcaactaatcatatccaaagtgagaaaaatatttggaagaaatttggcccacatttaagggcgacaacgcgggttccttttgtctcccgagctcgactacgataggcaccgaattgctgttaccatccactcttcgaaaaataaaacagaagacaaaaggaagaaaagagcaaaaaacaatcaccgggagaataaaagtttcgacagagaa

SEQ ID NO: 78586 - DNA, 2054 bp, Heterodera glycines
atgagcatgtggccaatctcgtgggcagctatcttagaaattaaaaacgtaattaaaaaaggtggcacgaaaactaacctccgaaagcgcgtgtcgtttatgacgataaggaggaaacacgttctatgttctccaaactcatcctccgtagctgtacacatgccgattgaaagtaaaagcccaaccaaaaggagagttgaaataggcgcagaccgaggccaaagtcttcccggaggagattctcatttttcttttgaaataaaatgccaatataaaccataggatttctatggcgcttgcgttgattcgactcagtaaaattacgccaattaattcccagaaaattccagagtcgagagtgtcgatcagggatgttgcaaagagaaaaataaaaagcgaaatcaaaataaaaagcgaaaaggcgaaagcgaaatgcccaaaaaaagcgaaaaggcgaaagtttttcccaaaaaaatgccattgtttatttcaaaaacccaatctttaggggtgtacatcaggaatgggccgaggtttcgcttttcgcatcctcttcagaaaggggggataattagagattgggggataaatagagaaggggggattatttttcgacagaattattttgtgtaaaatttttgaaattttttgaccatgtcgccaaaaaatgtcatcgagtcaaagaaaaatcattttttattgcattttttaaaagaaattctgttttttctagtcttttaactatctataattatggttgtaaattatatggattaacatattttttctacgcatatgctatgaagaaaggggcttaaaaataacatttctgcgttaaaatttttcgatttggtgaaggtttttagtccatataaatccatattttgggcttgccactataaaaaacattttggaagttggccactaaaatagtttttttttgccacaaatttagcattttgccacctatttttcactattccgacattttttggaaaattccttaacaaaaatgcaataacaccaaaaaatacactgtgttaatttaaaataaagacaccctgttttttgggagtttgaccacttcccatgaaccgatcgagctgaatttttaactgtacgtagcaattctgaaaatattaagattctgaaagtgagaaaccgaaatgatgacggaaaaaagttttacgattttttttcaaaaatggggtgttaatttaaaatagaaaaatttttttaggtaactattttgggttttttggtcttaaaaatcccagtcctactcatttgcaactgcaaaatttcgggtgaggtagttcttggagggggtattatgtcattatggacttttcgccactatctttgccactattttggcatttgtagtacttttactgtcgattttgtttgtttttgaaaaaaattgacggcatataattttctgaaaattctatttatccccctggaggataaatggagactgggggattatttttcaaacccctcctagactgggggataattggagattgggggataattagagcaaatacggtatattacccatttatcattttacaaaaaaaaaacggaagcaaaaaatataaaaaaaaaaaaaatcaaatttcttttatttttcatttaaaatttgaaaaaatacagaattcaaagcttttaaaattatttcatttcggctcccggacaatccgacagtggacaatccgacagtgaggacaatccgacagaagtggacaatccgacagtggacaatccgacagtaaatttctattttaaaaaatattttcaagtcattagaacggattatttcctaaaaatatctcaatcaaaaaaattattaaaaggaaatgactagttactatttaaaataggttatttcgcgtcctttaaatgtccctgcaaagtttggtgcgcttctgatcagtttctgaaaaaaagttaagcctaaacattttggcctgtttaaaaaggaattaaaaatttttattcttcaccatttttcataatatacgcctaagagggcctttaacacgtaa

SEQ ID NO: 78587 - DNA, 295 bp, Heterodera glycines
atgaaacgtgactggacaatccgacagtggacaatccgacagttggacaatccgacagtgaggacaatccgacagaagtggacaatccgacagtggacaatccgacagtaaatttctattttaaaaaatattttcaagtcattagaacggattatttcctaaaaatatctcaatcaaatcaatttagctttaatttgttaccaaattaaaaaaagttagtttggtatgctggtaacaaaagtacaataaaataaaaaataattaaagataagtgatccatacaaccataaataaa

SEQ ID NO: 78588 - DNA, 165 bp, Heterodera glycines
atgtttttctacgcattggacgacgatcagcggccaaatgacagcaatcaacaacagcagatgatcagccgatggtttgaaattgatgaacaaacgggacagatcagtgccatcagtgcgccaccgattggcattgatcagcagcgcaaaaccgtcaaatttggg

SEQ ID NO: 78589 - DNA, 1135 bp, Heterodera glycines
atgtcacaagcgttggaaatggtaaagttgattatgtgtggttactgtttaggtaggcattaggcgagaacaaagaagccgctgctgtcattgtcaaatcgaatttgtccaatcgttccgaagtcgaaaaggcggaaacgaaaataacaaagaatttgaaaaacggattcaaaattcacagtaaattaaaggggtcgtaaaatatgtgttttttgtacaaaaattcgcgatgaattttcttataaatttagttaattaagaaaacatgaaatcattctttggccttgaatgccgtttattagtctagaaaattatgaataaatttcttttttacataaaaaatcgaaattttgtttgggtttacattttttaaaccttagttttttatttttcataattttggtacatttatcgacattgaattaatctactaattatgttgtttctgtggaaaatgttgataaattatggttttcgaagaaggtgtcgaaatttacaaatgtacccgcactaatataaattaattttaaattatatttttaattttgctaaatattgacccattttttagacagttattttacaaaggtcggagatggtcacattgaatttgtgtggttactgttgaaggattcgtcgggcaaaaatgaaagtgccggtgccgtaattttgaagtcttctctttccgagagtgtcgaatatcaaaaaattattttcaaaaaagagactgagcttcaaaagactcaaaatgctttaacggacaatttgataaaaggatacaaaattcacagtaatctttttttaaaaatatattttttatataattattgtattaatttaattaattgttcgcccaactctttcagaaacttttaccaatcgcgtggggaatggcaaaattgactatgtgtgggtaatggtgaaggactaagaatttctttttagaaattttgataaatttatatatttcgcgctttttcttacataaaatccccattcctaaaaatatcattttgatccaattccatataaacttgttaccattagaattacttgaatttgttaaatttagtttaatttaatttgtcgagcgaaccaaaggcacatagtgcttttacatggtgccaaaaagaaa

SEQ ID NO: 78590 - DNA, 1953 bp, Heterodera glycines
atgattggcaaagtgccggatgaaaggcgaatcgctgccagcacatttttgaatttagacaaaacggaagggtaattaatgtacagccgtaaattagggctgctgtccccgactcttggggagaaaaattggagatgaaattcccggtcaaattttgtggtgccgggtcgttactcaaaaaccatcaaaatggattagcctaaaatgcaacaaattttatattcttgatttaacttgatagccttaaagttttttattatcctgcaaaattccaaaaaaaaatcgttaaattccaatttcttttcataaagccgagaaaaacgcgaacaaaaaatcttattgttgaaacaaaaaaccatcaaattgaaatttgttgacagaaaattattaataacttcgtacaaaatgaatcaaattttaaaactttgatgtcattcgatagttttaatgttttctatttttctgcaaaaattcaaaaaaccatgtttttttttggacatttttagtcataactttcttgaatcataacaaagcgtttgaaaattttgcaggttaatagaaaacattttcaatttttcgggagcccatttaaagacactctcatcgaattggggtgcaatcacgacatttgtaatttccccgcatcggctcggggaccaacccgagcgtaaaaataaaaaataaaattaatttaatgatttcaaaatttaatagtttccacacattttataagttaaaaattaagaaattaaatttcaaaaaaattatttaaaagtttgtcatcactattcattgcaaaaacaagtgaaaaatggcaaaaattgtgccaaatgaaagtgtttgaagaagaaatcggcactctcaaaaaagaattgggcaatggcattaataaattggcaatgcaaaaaaaggaggacaaaacgacgacaagcaaaacgaacgaaaacaaagacattttatctaaaaaaataatggcaaaaattaaggaatcaccaaaaaaagttacaacaaaaattaaagaaaaacgaaaagaagacaaaatggagcagaacattgaattaatggacaaaatgaatgttattgagggacaaatgggcgaattttgtgcaaaatttgccgaatttgaacaaatttgcgatgttaatttggaccaaacattgcccagattttgcagaaatgatcaaaagtctgcaaaaaaagccaaaaaaaagtaaataaattttattactttttaaataaaacaaatttaaatttcatgtaacgaaatgaatagtttatatgaaaaaaatgaaattttcaagtgtttttgtgtcttaatttttgctttaaaatttgttgaaattgtatttaagcccacaaaattatttttgaaaggattggctaagcaaattgaagcagtgaaaaatgatttggtgccagaattggaagtgctgatcaatgagaagaaattagaaaatgccggagtcaaatcgaccaaattgttatttgaattggccgattttcagctgaaaattgaaacgaaattgcgaaaatatgaagaaattgggcgagaaatctcccaaaatttggtccatctaaaacatggcagggccaaaaagaaagctttgacagatgcaatccaacagaatgccaatagcgcaaaaaagcacatggaaaacattggcaaaatgctcaaaaaaatcaaaaattccaacagcaaaaaaatgggagattcagcatcaaattaggaaaccaatttttagagtagggatatgatttttggggaccaaaaaccgaaatagataacaaacatatcagggatgttgatcatttcatgtttcgcgtttcgtattttaacagagtaaaagttttttgaaaaaattaatttatcccacgggcctaaaacccaaaatttaaaaaattgacataaaattgcaaactttgctcactttatagacaaaatttgttaataaa

SEQ ID NO: 78591 - DNA, 644 bp, Heterodera glycines
atggaaagaacagcaggaggactatcccttgcatttgattgtcaggtaaaagcgtctctttttgttgtttttcctaagcaatgcctttttagtcggatgatgtttgtatacggcgattccgacgagcctttgaacatttgccaggaatttatgctcgatttgctttgcaaacaactgaaaatgctcctcgacaaggcccataaactttcgattgaacgacagttacaatttatttgattttctcattatgttttaccaaaaattcaactcttttagcagcccttctgtcggctttcctgagtttatgttcgcattcaggttttgccatttttggtatttcggtaaattcattttttataagaaaggcgccatccgttgctgatccgaaaactgattggatacatgcgggtattaattatttttgcttttgtttcttagttttttcgtttagctggttgaccttatgccagcgatgtttcgtgaagaagaacaaaaaattgatgattcagaagacattctgccgttgtcaagttcatcgtctctcaacatccaaaattcattggacgacttaatgaaattgaaaaagtagcaaaattaaaaatatttgggaaaatggcatagattaatatgctgacaaaaataaa

SEQ ID NO: 78592 - DNA, 1042 bp, Heterodera glycines
atgggcagactttcctttgacaaagaaggctcaatagccaaagcattgagtctgatcaaactttacgaagaggagggcattgagaaggagcgcattctgatcaaactcagctcaacttgggagggcattgaggcagcgaagttggtgccattggaaattgaaatttttagtttaataattaaaatttaacatttccaagggttctcgaatcccaacacggcattcattgcaacatgactttgctgttcaacttttaccaagccgtcgcttgtgctcaagctaaagtcacgcttatttcgccttttgttggtctgtttgtacataattatgttgttttgataaatggcaaatttaggtcgtattttggattggttcgttaagaattccgacaaaaaagagttcgaccgaattactgaccccggtgtgcaaagtgtgaagcgcattttcaattattacaagaaattcggacacaaaacgcaagtgatggccgcctcatttcggaacacggaggaaataaaaggactggtcggatgcgatcttatgacgataaggtaaaagtggtgaagacgaccctaaaagttttaaaatttttatatttctattttgcctttcacggaattaggcattttcggttttagtgcattttaggagtctaaccatttaaagctttttaatacagtcaattttttttcttctaaatgaaatgctgggtttttatctatctctaattatttattacattcattctttttgcaaaaaacgaatttgattgaaaacaggtctaattaatttatcgtttgtcattgttttcttaagccccgctttgttgggtgaattagccaaagattctgaggcggttggaccgatgatgaccgtggaaaatgcaaagaaatgcgaattggagcagattgaggtggacgagaaaatattccgctggcagatgaacgaagacgcaatggcggacgaaaagctcgcggatggaattcgccgctttgccgtcgatgctattaaactcgaagagttgattcgatcgaacctttga

SEQ ID NO: 78593 - DNA, 1091 bp, Heterodera glycines
atggagcgggacaagcgcaagtacatgagcagccgcttctccatcaccgagcagggcgaattttcggtgagcccttttggggtcacgcagaaaaatttaaaattgaattaacattctttttatagagaaaattgttcataccttttttaggtgaacggtcagcggaatgggggggggggagaggcttcttaatcggaggaggggggagtttttgaaaaaaaatttaattcgtttaaatcaacaaattttctcagcggtgcctataagcaccgctgggccattttctttcttttttttaaagaaaagtgctccacaaaaaatgggttgaaaagcaaaaaaaaagcgaaaaaactcgtcgactacatggcaggaaaccttcgattttgaattttcaaaaatttccatttttcaaatttttcgagcaaaatgataggacgatgagtgagggtagtgcgacaaaatttaattaatagacaacattatgccattctgtgccaattttttgttttttcagtggcatttgcccaaaggccgctttgaccaccacggcaccgcggaggacatgctgcgctgtgtgcagctgaacctgcgacggcttgtcgaccgcatcccggacgcattgatgcaccgcggatgggtgttggacggtgaaaagggcaacttcctgcgacggttggctgctgttcggaccattgactcgttgaggtgtgccgattttttgaattttttgtttttctatgttttcaattggcacttacattttttaaaaaaagtaaaaaaaaaacaaaaaaaatcacaaaaatatataatattttctatatttaaatgagcattttgtagggatctgttgatgctctacgaggcagccatccgtcggcccgttttcctgccaatttggtggcaatcgttgtccgcaacacgctttgtaaatacattatttttaaacaaaaaaattggaacttagagtaaaaatagaaacatttttataatcaaattacatacaaaatttctaattctaagatttgaaaactttaagttgcggtaccaaaaaattgcgaaatgtacaaaatttcgctgacggcgtcattaaa

SEQ ID NO: 78594 - DNA, 169 bp, Heterodera glycines
atgaaaaacggaccgaacgcaacattcactccattcaaatctgggcactcttttgtcgtgatcataaattcggtgcctaaagggaagggtaatacaataattttttttaattaacgaaatttttgaaattttgcaggccaataaagacacataaggttattgattggta

SEQ ID NO: 78595 - DNA, 2004 bp, Heterodera glycines
atgtcaccacagtacactaaatggatggaatttaatgcatcgttggctcatccatcagacccagtcgtatttctggtaattttttcttttttcctttctctcttattttttattattatgtttaaggacattgaaagtgactcggcttcttgcggtaattttttgtttaattaatttcgaaaaaatgagtcgtggccagttcggcgcttaaaataaaatactaaatttttttggaaaaaagtataaaatttcaggacgtataattattgacctcatggttgctgctgtgccacagacgacggaaaatttcaaacaattgtgtgcaggagcattgtaatattttattaaaattttataaattaaatattatattcgaaattttcatgctattagaataaattacaaacctaccaagttttggaaactttctctcggagtttttacggtcacttctcgttcgctgttttacagattagaaaccggacaaaacctgggccccgcatgggttttgccggaactcccggttccggtttctttggccataccccgggaaccccggaaaaacggaagtccaagtccattttccaagttactttttcgttccttaccattttaaaattcctatctcgaatactggcaaaatgatcttaaattttctcagttttatggcattttggaatcgatagtttaaagtttcggtattcctatccaatcgtataattgactttttttgcattaaaaattatggtttttgtttttttgttgaaaaatggttttttaaaacttgaaattcttataaaaactcaattctgttttaggacattgcccgtcaatggcgcacaaattgaatacggataccgaggaaccaattttgaccggattgtaaaagtaaggcctcgtagattttaatttataaataaatgtttagaaaaatatattttaatatttatttaaatatttggttataaaccgaccctgactttttgatgaaattctaattttacatgtcaatttatgtttttctttatatttttttaaattattcttttttgccgtgaatgccaaaaattaaaattattttctccgacgtcgccgtccataatttcaatttttgcctttttcgatatttttttttgaaataataaatttttgattgaaaaaattattataataaaattaatttttataaacaaaaatcaagttttattcactaatgaatttcattcttttaggacaaatacataaagggcggaaaaattgaagaggtaaataaaacgaaaaaacaatttctttatggtaaaaatagtttcgataacaagaccctcttgtttaggatttttctcatagtgattgatcattgatcactgggcttttttttgctcttcggatttttttgccgatttaatttacttaaattttcggcgtcatagaaaacgggaaatttaaattggggtcggcggtgccattaggcgccacaaaggaaaacctagataatttttgtccgaatttattaagaaaacagtaaaattcaaaaaaaattacccaatttttcgggaaaaaaaattcgaatgattgattgtcgagaactttaaaatggttcatttaatgcaaaatatttttttttggtggtttttgattaatgccttgcgcgtaaaatggagcgtttattagtgatcaatgccttaaagccctataaaagcgttacagataacattttaagacaaattttttttgtcaaaattggaacaatctcacaattattattatatctattttttcaggttcttggctgcaaatcgctgtacggagattattttgcagatgaaaatttttcggtggcacacgatgcaccgggaattgtttcaatggtaatgaaatggaagtagaacgcctcgtaaatttccgaaaggattcgattattttacaacatgacaagtttttaaatcaccggttgatttttattttttaaaagaaaacaaaaaaaattttaccgctactaataaa

SEQ ID NO: 78596 - DNA, 614 bp, Heterodera glycines
atgaccagctcaatgacaactcaaaatgcaaaagttaaattaaggacaccaattcttttcgaatatttttattattattttgtgattcacactttaaatccaagccttgataataattttttcaggaaaagtcattcgaggcttcgaggtcttggagaagatttgccaagtgaaatttttgcgttaaaatttttcttgcgaaaaaacaaagagggttctgtcaatttgtttttcttaacacgtgtaggctgatcattagggaatccacttgaagaattttcttagcttcaacaaaaacatttatatattttaagatgtaccagcacgtttcaagactttctacaaaattgcttaaatacatatttcgcctatttttgtatatatttctaattttgaagaaactccctaacaaaaaatttgattggtttcatatgaattttcaaacaaattcttttttttaatttcagagaaatagtccaaaaaaggaaatttgaaattctcggccgaaaatcgatttttcttaattgtttcagtttcagtatatatttatttttaaatttcataattttcttatataaagtggaatcccatttgatcctttcctaaagaataaa

SEQ ID NO: 78597 - DNA, 169 bp, Heterodera glycines; identical to SEQ ID NO: 78594

SEQ ID NO: 78598 - DNA, 224 bp, Heterodera glycines
gtttcttggctgcaaatcgctgtacggagattattttgcagatgaaaatttttcggtggcacacgatgcaccgggaattgtttcaatggtaatgaaatggaagtagaacgcctcgtaaatttccgaaaggattcgattattttacaacatgacaagtttttaaatcaccggttgatttttattttttaaaagaaaacaaaaaaaattttaccgctactaataaa

SEQ ID NO: 78599 - DNA, 399 bp, Heterodera glycines
atgtcaccacagtacactaaatggatggaatttaatgcatcgttggctcatccatcagacccagtcgtatttctggtaattttttcttttttcctttctctcttattttttattattatgtttaaggacattgaaagtgactcggtttcttgcggtaattttttgtttaattaatttcgaaaaaatgagtcgtggccagttcggcgcttaaaataaaatactaaatttttttggaaaaaagtataaaatttcaggacgtataattattgacctcatggttgctgctgtgccacagacgacggaaaatttcaaacaattgtgtgcaggagcattgtaatattttattaaaattttataaattaaatattatattcgaaattttcatgctattagaataaa

SEQ ID NO: 78600 - DNA, 804 bp, Heterodera glycines
atgaccatcaaagggacgggctgcgtcaactcgatgaattttgtcttttttctcttcatcttcatgactcaggtgatttttaaattttttaaaataaaatcttaaaaaattttcaaatgaaatttcaaatttttaatattggtttaatttcaggttttcattttttgggcaatcttgctgaacgtgccgtctcgcctgcgacgcattggagggctgcgtccgcgtcgtcgtccgccggtattcgatgatgtagacacccgtccgcttcgtccgcttcatcttctggttcgtgaggtgagccccccccccccctcatcctatcatccgattacacaatcattttcccttcagcgttcgtcggaccatcgattgtccgccgagaatgacggcaacgagcgccgcactggaggggtcagtgaatggaggagaaaaatgggattttttttaaaatttattttttgttgcaggactcaactggtacccgcaaccgtttgtctacgatccaggaggtgaaatgactttattattaatttacaaaatttatttttttttgtttttttaaagaaaaacgagaacgcctttgccagcggctgagatgtccatgaaaaagaatggaaaaaacggagggaataactttatataatcctttttgatggtgatggtgatgattttatcttatatatttttagtaatttatcatttaaaatatttaaatacatgggcaagctgaatggaggattttattttagagttatgtgcttaattaatttttacatagaagctggatttaaattatcagttaaa

SEQ ID NO: 78601 - DNA, 638 bp, Heterodera glycines
atgtcgactctaccaccgagacatcagagccattccgaagcttctgatttcttttcgccaattgcagcagctacaatggcgatggacgtggaacaaaagaaacccaacccaaagccgagacaacagcaaacagacgcctcaaatttctttggacctatttcagcggcaacaatgggaatgggtgcagaacagctaaagccaacgataaaacaacaacaaaatcaacagcaaaacggagttgcttctgagtttgcttcggccatttccgctgcaacaatgggtatgggcaacgaacaacgccaacatcagcctccgccccaaaaagagaaggaacagacggaccaagaaattttggatgagtttcttgagagcgtttcggctgcaacaaccctattggatgttccgcagaagaagccgaagaagaaaggaaagaaggaggtagaagatgaagaagccgcagcaatcgcatcgatcacccgtaaacaataaactatttaagtacttgtgatgcaattgattttttaaaaatatccagaatgtttggaaatcaattttatacagataaagagctaaaattaaaaatgccatttggtatgctcatttctgggccatcggggagtgggaaaagcactttttta

SEQ ID NO: 78602 - DNA, 563 bp, Heterodera glycines
atggcgatggacgtggaacaaaagaaacccaacccaaagccgagacaacagcaaacagacgcctcaaatttctttggacctatttcagcggcaacaatgggaatgggcgcagaacagctaaagccaacgataaaacaacaacaaaatcaacagcaaaagggagttgcttccgagtttgcttcggccaattccgctgcaacaatgggtatgggcaacgaacaacgccaacatcagcctccgacccaaaaagagaaggaacagacggaacaagaaattttggatgagtttcttgagagcgtttcggctgcaacaaccctattggatgttccggagaagaagccgaagaagaaaggaaagaaggaggtagaagatgaagaagccgcagcaatcgcatcgatcacccgtaaacaataaactatttaagtacttgtgatgcaattgattttttaaaaatatccagaatgtttggaaatcaattttatacagataaagagctaaaattaaaaatgccatttggtatgctcatttctgggccatcggggagtgggaaaagcactttttta

SEQ ID NO: 78603 - DNA, 2981 bp, Heterodera glycines
atggcatcaaaatttgttcttgtgcctgatgaaatttatcgcggtctaacaaacagtgattcggaaaacatcaacttggattttgttcagcgtgctttggaaagaacaaaaagaaagggcgaaaatgtgacagcaaaaaatgtccattataaccaagaattgtcgcgttacctacacctgagagatgaagatcaaaataagccatcaaaagtagaaattaccaaaggtctaaatgcactgatcaaaagaggaaacgaaagtgatgaagaagaacaagtttttaatttggagtcagatagatcacaacagccagcttcacaaattagcagaccgcgtcgacatcatcatcatcataataatgacgatgaggaaatgccattgcagccagcttttccagcgcttcaagctgaaaataggggacaaaagcggaaagcaaatgatttttattcctcatgggaggagggcgcaaagagacaactgcgtcacgaagatgaaacggttccttcttcctctaaaattggtaatagacaaagaagaagacaaccgccactctcattgagaagagaacaacgacaaattcccgctgagattcagcaggaagaacccttccaaccagccccagaaccgtctattcccatccacccacaaattaacagaaaacgcaaagcccataatgctctaaatgatgttcgagaaataaaaaagagacttataggcttggaagaacttagacctccctctctccagcaagaagcatcccttcgctttcaacagaaaagaacaaacaaaccccgagtaaaccaaccccagcattcgagttcatcggccttggtaacaagaagaaatcctcagaggaatttactggccgaggcggcctttgctccattaccagataatgacgatggcgatgattttgaactctcacaaccaccagccaccgcagctcaggcccagcctctcccacctagaccttcattaccaagtaaaactaaaaagaggaaaagcaacaaagcggaagaagacacagaaagaaaaagaatcaaaattagctctcgaaaaagggacttgctggcagaagcagccgctgctccattacccgttaatgatgatggtgacgatgactttgagctctcacaacaaccgggaacctcggctcaggcccacccacctggacctccgttgcctagcaaaaccaaaaagcggaaaagcaacaaagatgaagaagataccgaaggaaaaagaaccagaattggttcccgaaagagattgtcgtcaccaactgtgaccaaaaatgagccaaaaagacaaaagagctctggaaacgaaggactatcagaagaacagcgtcgtcagtttgcggacgatcaacgccttttcaccatcccgaattcccaacttaccaatgagcaaaagagaagacggctccagttcgtatttaaccgaaacccggtaaagtatggtgtacgcggagacaccattttaaataatgcaggaaatccaataacggatagcagtgtgacacaagcacttgaatatattattgaacgcagagctggaagagttcctcagtttagacagccaccgggaacaaaaattattcaaaatcgaattaatcgagaccttattctacgaacatggacggccccaccggtaccaccgaggggagccaaacggaaattaccacagacagaccaagacgcggaattaaaccaaaaatcacaaaaaataagaggattggggcaggcgagaggcagagcacaggaaggattgatgcttccgtttccaacgaggggagtcaagcggaaaacaacggtcccaccagaagcagcaatggaaataccctcaaagacacaacgtctgagaccacagaaatggaaaaaccattaaaaattcaaaaactattagaccgtctatacaatgacccaaattcgcctgctgcattcgctggcgtaaaccgtttgtggttggaagccaaaaaggaacttgggtataaaatttctaaaaaggatgtgaaacactacttggagggacatcgcacatacacgttaatgcgtccaagacgtattaactttcctcgttctcggacaactgctgctggctttatgacagactgtcaggtggatttggcagactttcaagcactttctcgacataacagtggaaaccggtacttgatggtactaattgatgttctttctaagcaaatttttgtaacaccacttcgtacaaagaaggcagatgacatgattgaaggatttaagcaacttttttcacaaatgccaatgaaaccctaccgaattttttcagacaaagggactgagtttaaaaatcagcagctgaaaaagcttttcgacgaagaagaagtcgaaaaatatgagagtaatcactctgagaaaaaggcagcattagccgaacgtgccattcgacaaattaagaatcgagtctaccgctatttcgcccaactcaaaactcttaattggtttgatgtaatctacaaaattgttaatggaattaacaagtcaccgagtcgggtacatggcatgcgaccaattgatgtgaattttaaaaattctcaaaaagtttgggaaaaaatgtttggtgaagaacaacacagatcactttttggaaagcacagaaaaagaccaaaatttgttcccgaccagaatgtaagaatgagcatagcaaagggtcaattcgagaaaggatacatacctaactatggcgatgaaattctggaaatcgatgccgtcaaacgtcacatgaaaccaatgcgttataagttacgtgatgcaaaaggagaaaagtttaaaggattcttttatcctgaagaattaactcccgtacgtaaggaaactgatacgacttatagaattgaacgcgtttttcggaaacggaagcggactgacggaacgatggaagttttagtgaaatttatcggttatcctgaaagagaatggattcacgagacccaacttgtataa

SEQ ID NO: 78604 - DNA, 588 bp, Heterodera glycines
atgtcaaattctactccttcttctcctccatcaaaacgttcgcggcgttttttcattgatgaattacttcgtgaaccatacaatgaactttcaaatccacgaaagtctccaaaagactacgtaaaaaagctcgactcggaaattgagcgtgtcccaaaatttcaatggttaaaaaacaaatcaaccttcatcattgaggatgtaccagcagaccccgaagggcttctaattggaatttttcaacattgcatggacgaagcaatgagcgaaagcgttttgggaggcattaaaccaactcatcttggttgcattgtctccagtcaacttcttacatccgacatttggataccaatccgtcagatcactcccgataccatcaataccattctcaaccgattcaatgacgttgcacagagcaaaaagcaggacggtgtaacgctttgggggcagccgtttaatgtcactgtgataactgttaaccggaagggtttgccagagaagcggcaactgaaaggaggagctccgagaaaattagcaccagtgaatcaccaaatccacgagcaatgtcttatcaaggtttttaagtaa

SEQ ID NO: 78605 - DNA, 1782 bp, Heterodera glycines
atggatttcataacggagcgagtgccaaatgttgaaattttttggcaatgcgaaattgaggcgatgttggtcagagacaagcagatgaagaccaagttcagcgaatatacaggagatggaggaccaatagatatccgttcctgcttcatgggaggacggacgggagccttgaaactttaccatgaggcagcaaaacacgagcaaatcagttactatgacttcacaagtctctacccatatataaagtaattcaataataaataattaattaattaaaaagaaaattagttatgtaaccgattacccaattggccatccaactctccatgttccttgtgaggatgttgattggcggcgccctgaggataatccctacccgttggcaattctcaaagttttcgtcatcccacctcgccgaattgatgtccccgttttacctgtcaaagtcgatgatcgtctatgctttcctctgtgcatgaaatgttgcaaaaaattcccaaatggtgctgttaaagcggcatacagctgcacgcataacgaccgtgaacgagggtggattagcacgtgtacttcgctggaagtaagttgcttttttcgacagttctaataaataatttagctcaacgcagcattagaagaggggtaccgagtaacagagcttttgcgtgtacttgagtacagtaaaagcgacaatgaattattccgcccgtacatgagcgaatttgttgtccaaaagctgcacgcttcgggatttgatcagaacatccgtgggaatcttgaagccgaggagcaatttattgcagaatgttgtgaacaattcggaatgaaaattgatcgcaacaaaatgataccaaataagggaaagagagcccttgccaaattggcagtcaataatttgtgtatgttttttttaaatttttttcatctccttaatttagggggtcgtttttccctacgcaactatggactctcccaaacgctcattactgacgacccgtcggagttaggcaactacttggacaacaagaaaatcgatgtcacagggcttgacatgttgaccccggaccgaattttgatcagctaccaacagaaaaaagattgggttaaggaacacccttgctcgaatgttgtcgtctcactttttaccacttctgcagctcggcttcatttgttaaaagcaatgcaaaaggtcgttcgaacacccggctgtgtccttttatatacaggtaagaataaaatttctatccaaaatatttgcaattttagataccgattctttaatatatgctcacccaattggcaaaaaccctcttagtacagggccccatttgggtcagttcactgatgaattccccgacgttagtttaaaaatattaatttttctcttaaaaatatctttagcatgacatattggaatttgtgagcggcggctcaaagcaatatggattgaagctcaggcggaaagggactgaaaaaattgagcacatgctgaagctcagagggattacactcaattatgatgtcaccgaaaaccaagggcttcgatttgatacgttcaaagaaaaagttttacaatttgctcgtaccggaaatgttgagccaatcaaagcagtttacccaaatttcctccgtcctacagtaaacgctggcagcgttatctccgccccccttcaaaagatatacaaaccatatgttagtaaaggaattgtttgttctcgtgactttcgtgtgatcgattttggatatgttgcacagtaaaattgtattttaattaccgaacaa

SEQ ID NO: 78606 - DNA, 620 bp, Heterodera glycines
atgcttcttactgagaaaatcgcccaaattttgaattgtcgtgtgtctgagctccgcgatcggcttaatcatccttcagattttaaacatgtcgttaaagcattgaagggatgtcacgtacaaacaacatacaaggatcggaacggtttcacaaagagctttctgtttggtggcataacaccgcaaggagcatcaacaactatggcctacgggcgattgggaagacccttcaatgtgaatgtgacagcgcatttttacgttcgccaccgcattaaacttcgacacccattcctgcactgtgtaatcgagagatttcccgagggtcaggaggatcgcttctacccgcttgagctatgcaaaattaatgctggacagattgaaccgggttggctgggacgtatttttactgaaaccggaagtgacaacaataacaacattaacacagacgaaaatgcaagcactgagacatcactaatatcaagcggacgccaagaatgtagccaaagcgacggttattctttatggtaggtaggtagttcaaatgtataaaacttatctactaatattcataaaattgtatcttctattcattaatttttcattttcccagccaaaattga

SEQ ID NO: 78607 - DNA, 494 bp, Heterodera glycines
atgccgactcctcctcatgacaacaaaatttacaaaaaatctgaatatttaaaaggtatttttgtctcattatttattaataatattcaaaaaattagtcgatgatgctgatgaagtggatacggacccctctcctgaagaagttgagaaatggacgcccgagcaagtgattgaatgggaccagcgtagttatgaaaaaatgcctgccgaggaagagatttggcaagaattcctcgacaaaggagaagcgaatgtcggtgatatttatccatttttatgtttaaattaaaactttaggttctgcgtgagttctttggcggagagggggctcttaaagttgagaaaagtcttcgcgaatatgccaagaagaaagaacagcgagatgaaattctgatgcgaaagcggaaagaatatgaagaaaaaatggaaaacaacaaaggcgaaaattaaacactcctttgtactgttattgttattgattcaaatttggatta

SEQ ID NO: 78608 - DNA, 1392 bp, Heterodera glycines
atgagcgattcgaccaacgatgccattcgtgaattacaacgagcactgcgtgaacaacagagaacaatttttgttttgcgcagtcaaatggttgatcaccgggcggtcattctacaaactgtcgcacgcacggaagccctggagggatacgcggctaacgtaaatttgaattcaaaatttcactagaatttaccctttttaattaataattaaaataattttctaaaaattgtttcagagccgaggagggagatttcgttcccgttattcacctatggtggcgcttgaaatgaccaccataggacggcggcttgaagagagacaacaacgtcgccatgcgcaagcccatgcatcgaccaattcatcatcaccagggcgcggtgagcccggcacatcctctggcgatggtgccaatggtgattttttgaattttcatacttttcttgaaatattgaatttaaaaaatatatattttaaggacaaggctcaaacgagccgagtgttggagctatagcagtcaactcgggtttgactgaaacttgtaattataaaaaaaaacccaaaaaaataaattatcatattttttcagtcccaccaaccccactcagctctcgtggacaaaacagtgctccattgcgtcagagtgcgtttaaaacaaattaagtgagagaaatctgtttaatttaattttcagataccgctggtgctggtcccagcacgggaattgcagatgggggcgctgaaagcggcggtaagaacatttttctttctttaagtcatcataatggaaatatattttaggtcagtggttcgggcccacgattgaaaaccacatgaaccgatcacgacttcgacttgtgcgcgaggaaatggcacaccgaacgatgcagcaacaggtggaacatcagcatcagcaattgcttgaacgggcggaaagagtgcgacaggccaatgttgaacaacagatggaggaagcagacgttctacaagaacagctgcagcagcaggacgaagaaaacgacgagaaccgcgacccagaaatggagcagcgacgactagttcaggtcgctcgacaggcagaatacgagcgacttgtccgcttgcaattgcgggaagctcgccgttttcacaacggagtcgcttcttcggttgtggtccctcctcccttgttttgggaggaggaatgcgtcatttgcaccaacgcccgtgcaaatttttataatcgtcagtgcgggcatgtttgcctttgcgcggagtgcgcagtcactgcggtaatccaaaaactcactgtctgtatgatgtgccgtgccccagttaacggcatatacccatatgttcgttaactgggacacgaaaataagtgttagcataattttaaaaatttggaaaaaa

SEQ ID NO: 78609 - DNA, 1624 bp, Heterodera glycines
atgtctattttggactttttgtactctatgcctaggcgcctattttgtgcctatttcgctatttttggtacatattttgatgattttcggaaaaatccttaacaaaaaaacgaaaaatatatccctaagattatgacccaaaaaaattaagacttttggtaaatttttaagtaatttttacttgcctatttttgtgcctatttaatgcatattttgcgtatttcgttgctcaagacaaccaaattaacattctttttattttaaggattattagaggccttaaatggattaagaaatattaaagttgacaattatttgattgaacttgaaaaggtgtcggaagaatatcaaaaacaatggaaacgctttgaaaacaaaaatttaaacgagaaagaacagaaggaaattgtgaagagaatgggagaagaaaatgcaaaactgtgggaattaatgaaagaaattggattgggtaaaatcctcaagctgtgtgggatttaggaatttctaaaaaaaaagtttacgttttctgttttccgtggcgccacttttgggcattttcaaataaaacgacatttggggattttaatgaaaaaataaaaaatattataaaaaattaagtactcagcctcaaactcgacaaaattatctgcttttgccatacttaattctattttgtgaaaaataacaatattttttaaatcaactctgtttccgggcaaccgtgaagagttagttagcagactttttttttgcgtttaatttatgtacagtaaacttttttgctaatttatttaaaacgccttttccaagggccaacgggatgtatcctaaatatattatggttacaatggaaaataaaaattatgctttatatatattttttaatctattagattgggcgtcaatgtgtgaggctggcaaggagttcttttcacagattttgaagaaatccaaatgtgccctcaatgacggatccatgcgaggaggcgaagctgaaagtgaagaagaagccgggcaagctgatcagccgatcagcagcccaaagtgattagaatcggcaccactgatcagagagcacttctaagggttgcatatgttttcgtgacaatttcaattattttgctgatttgtggagaacaccttttttagaaatgagttgattttaaaaattctcttttttatttgtaaagatagacgaataattttagctatttttagcaactttccaagatgagaatttagtataaaaaagtgaaaaaaattacaaaaatatctttactaaaaggcgttttcgagtatattaatttattttaattttatccaattttcgttaaaatccttacaacatttgccgatttttggttaaatttttagtaaatgttatttaaaaatttgtgaatttcttgaaaaaatatattatattcatagtactaacgtgggctggtaatttaagtcatgaaaatttccaaaagtcgacttaaaacaaaaaaaaaatcaccaaaaagtcatgaaaagtcataaaataccaaaaaatcacgacaaaaatgcaaaaaatcatgaaaattaggcaaaagtaaaaataataatcaatttttaaacaatttatagaatagtatttaataaa

SEQ ID NO: 78610 - DNA, 760 bp, Heterodera glycines
atgttggcacttcagcaagcacgggtcgtgccaacaccccgccagtggtcactttggactgccaaattcaattttaaatataactctaaacgggcgccggatttttccgatagaggacttttcgacagcaaaggacatttcgacagaaatattataaattttaggaggggacttttcgacagtaaaaagtaattaaatttcaaaaaggggggtgtaaaatcgtaaaattttatccaaaaagcaacaaaattaagccaaatcattattgagataaataatttttaaatcaaaaattctaaccaagaaaataaataaataaattttgaagatgaatttttgagaaaatttttgattcttcttatgggtgtatttttgaaattttaaaggccgtttcttaagggttattctttggaaatttttttaggtaaaaaacgtaaaaaccgtatccttccttagtaataatgatttagcaatacatattagtatgttaatttaaacggaatttagtgctatgctgtcgaaaagtccgggagccctataaaatagtttttcaatctaaaaaatgtgcaatttttcattaattattttattttttcatattttaagaaaattcagtaaaattcttttttgtgaagacacggttcattgtggaccagggcgaacttcagatgagctccgcaatggaggcgattaaagcttaaaaattcaaaggcaacgcctcagcttgatgtgaggcttaatgaagtcgcgggtaaataaa

SEQ ID NO: 78611 - DNA, 267 bp, Heterodera glycines
atgcatcattttcaattttggtcgaatctatttcccattttggtcttgatcacatcgattgtcgttctatcagcgaatgaagtggtcgaagatggcacaacggaagagcaagacatggccaaggcattggcattgagcaaaacgtactattggcgaaatatggtgttgaaatgggactgcaaaaaagagaaaatgataagtcctgaacaaattggatataaacaatcccatgaaaaatgttggagatttgcgaacattggaaaatga

SEQ ID NO: 78612 - DNA, 755 bp, Heterodera glycines
atgaaagcggcagccgtgccaaaggcggcagcggcggaaaatgctcagaagggaccgctgagtgcggaagtggtggcggaggaaaacaacttggacaccgaggcggtcgacgacgacttgggggtggaagcatcggacattgacgaattggcagaggacgaactgctcgaggacgacgccatggacagtaaggcggatgcatttttggacatgggagaggaggcggagatggacagctaaatggacaactaaggccaattggagtgacaaatggaataatacgggacaaatgacacaaatatcattttaattatagaattatagagaagataaaaatatattaaatcatcatttctgtgcttctaacttcgaaaaaacattgaaatttctagaaaaacacacctttaaattattagacaaaaatatttacactttatccttgaattcaagatgtccttgaaaaagagcattcgaaaaaaacattcaaaatttttgaatttataatttgattcatagacacacacaaaaagcgttaaaatttgactaattttggacaactctgttaagaaattgcttaaaatttcaaaattttccttggtggcacctatcgcaaggctatgtcctggtttgagggtagtggaaaatgttgttccgattcttaaacatattcataattttgaaattttatgggcataatgtcattattatttagtaattttaaagtttgaaagcaaaatttggtcattattgaacaa

SEQ ID NO: 78613 - DNA, 2060 bp, Heterodera glycines
atgaaaaacgcacgaaagttagtgaattgtaaaagtaaagcacaaaagaatgtttctgctcagattctctgtataaaagtgagagctttgaaaaaagaacttttttttcaaccaaaaatttaaaatttaaaagattttccattttcgaattctttgaataaaacagcaaattaattctcttttgaaatggatgattttgccgacaacaacaaattttgcgactatttgaacatcaccaccacaacaaaaagtgatgttgataatctgacgggaaaatttgctgcttttgaggcacagaaaaatttgtctgtttttgaatggcttttcagttcaatgactcatcaattaattgtcgctaattgcgcgtatcagttcaaagtggcgcaagttgcggtaaaaatgattttaaagatggcaaaattaaatttttaaaatttggcaatttaattaagtccaattggtacctcgacaatgttctcgtgttatatgacaagttgaattgcgtttcgccgcttctcgcttggattgtcttcccaaatattttcactccgatttccattctattaaatttgtctctaatttgggtcacatgtacaaaaatgtgaattttattatcataattaaatttaatttttgcttcaaggactaatcacaaagtgtgcaattggctgatcgcctttgattcgctgtgccaactttttgtggtcgctccgttcggcgtcaatgcgattggcgtcattttccaatacagtagcattgattaccgtttctgcctggccacccttatggcagccaccgtagcatcatacgcctctatcatggcaatgtatctgatctcagttgaacgcctgttgatcataatgtacccaatcaagtgagttcctcataaaatgtcaaatttaaatttattttccattttttcgaatgaattggaataaaaaatctacggttctttggtgttcaacagtttcggtggttttttgctcattttttggcattctgatgaatttgaaagtattcgatgtgtggacaattatcaacgtgccatatgagcggtatcctttgatctagggttgctccccgacccctcggggggcaaaatctcgggggccggggaccatcggggggcacatgtcgcgggtcggggaggaactaaattgtcgggggtcggcgaccccgatcgggtagtgatcaacaaatttttttaacgaaaaaaccaatttttattttaaatgctcgtaaattttcttttttttcactgtcaaccgaaatttttggtaaggagtctgggtggaggaggggggggggggcgtcagctccgatttttgaaggtatctcaacatcggatttgacgatgacccttttttttttttgcttttcaaaattggtttttgcggcgtgttttttccaaaagacttttggggagaaacaaaggggtccgtccggcggtgccggtaggtgccgccgggaaaaattttgaaaatttgaggcaatttgttaacagattatgtctaaaaaagtaccaaattttgaataattttttaagaaaaattaatacttttggtggccggaggtgcagatagtcgccgccggaaagtttttcagaatttttaatgaattttattaagaaatttttcaaaaattttcaatctttcacccttcctggttgaattaatttttaaatttttacaacgctcggggtccccggccacccgactaagtgtcggggggtcggggggggggggcaaaatgtcgggggtcggggagcaacccaactttgatcaatgtcaaattaatatcgcaataattattaatgactgaactacatttaccgcaaatttagttgcgtttactgtaacagtggactttatgctgacgtgctgaatacagttccatcttatgtaatccttttgatgtgcaccttaaattatgcggcaattttttgcctgattttatggcgtcatcaaacaaacaaaggatcaactcaaacaacgcaacaatcggctgcaaaatgttgccaattatccgattttaattttattttttatttccacatttaa

SEQ ID NO: 78614 - DNA, 305 bp, Heterodera glycines
atgactccaattctaacattgcatcaaattcacgcgtttcacactaaaacgcgagaaagaaacccccaaaaaggcgagaatgcgaaaaagcaagacgaaactgattttccgtctccacctagaaaaacaacaaaagtgagttcatttgaaaaatttttgagctcttttagttgatgaatttcatcaaaatttccagtaaccatgaaaaaaagagattatataccccaacgaagaaagtgacagaggtaaataaccgcacagaattaggggggtgggggctgagttagaggtcagtaaaattcata

SEQ ID NO: 78615 - DNA, 1629 bp, Heterodera glycines
ctgaggaaccgcccaccggcaacagttcaactgccaccaccgacccggtggcgatgatgttggcacggcggtgcgcgccgagtccaatgcgtacaccgccaacctccacttcttccggtgccgcagccaccgccataacaatagggacaccacagtgccctggtacaacaataacaacagctgaagaaggtttgtgacacggcacaatgccattgacagacaaatggggacattatgactgtaaaaactcaaaaataggctaaaattttttagaaaatggcaatttttcgccagtatttcaaagtaaaaagcgtaaaaaaccattcgttacaaatatccgcctattttaattgtggagccccgacatttgcgcctatgtccaaagtcggactcaaagttgaattttttttaagccctgatagcctaattagcattaaaattaagaaagcacagtcttttggttcattatgatcattaattctgttgtttgaaaattttattattttttcaagaattctttgaagatcaaataatcgtatacaattactttcaatcgcttattttaaagctgtttaggcgatcagggattgaaaaacttaatcttgaacccgattttggacaaaaacgcaaatgttggaccgcaaatgtcgggacacgttaattgttaagaaattggcccaaatttgagtgaaaatattaatctggataatttcaaaaatataaatgcccggttttcaatgccaaaaacgcaactctaccggcacatctatgccaatcgcttacaattagcaagaaactgggtttcatgggacgggggtggggacgagctaccctcggaaaatttagttttttcggatattttcaaaataaagatttttggggattaaaaaaatcctattgatttgtttgcagaaaatgatgatcaacaacagcagcaggcaacgacaacaagcagtgcatcctcaacaccatcagcagcacaacaacaacaacagcaacagacatcgttgaacaaaaagcatccggagatggacaacgcaaaacggcgactgttgctggacccgttcatccaccagagtttgtacacgccgaaacgaagcgtaagtgtggccaaagggaagaagggggagggaatagagagataaatgaaacacaaggaaaaagaatgggtgaggtggatagagtgacgagcgagagatatagagaaaagaaagagagcgtcctggaaaggccaataaagtaaagagagagatagggagacaaagacagagagagagagaaaggaagagagagagagagaatagaatgcaagaaggggtcgaagagatagagcgaggttgatccaggcctgctttagatgaaaaagcgaaaaatttttgaaaaaatagcttttggccgaaatctgtgaaaatgtcagtttttcctagcgctgctcgtcagtggtgcctaatttagaggaaaaattttcggtttcagattttcggtacccaagcgggcgcctactcccaggtggccgactccaacgaactgttgctggccgaacagagtgccaccgttgctgttgaagggctggtccgcacttcgtttgtggaatggtgtgccaaaacatggacaggtgtgcgcttttga

SEQ ID NO: 78616 - DNA, 924 bp, Heterodera glycines
atggcggaggaaaccagcaaaaccagtgaaaacatcgctgaggacaacggcatcaaagcgctcgactctttgtttgccgccgtcgcccacgcctcaaaatgtttggcattcgctgccggcacgcccaacttctgcttggccacccccgccttcctggctgtcatggtacgacctttttcagtcaatttcatacttttaagggaggatggtcagtaataaaatggtgttttcgtaatttacaaacacttccgctccctcccccttttttgggttggcaaataaaatgccatcatttcgctgtggatttaggcgctaggatttctataaattgtaacctttgacacgtgcgcatcagaaattaaccccacaaactgcggtcaaatttatccttgcaaaaaatgttggcaaattcggcggttgcggccgaactttttttttgtcggttgagtaagccgaaaaatggaccaccttttttgttttggcctctgttcaaaccgaaagtaacgcaccaatttaaaaaatcaaataaatcttcggaatgaatttccccattttccccaaaaactctgtttttctatttttaggtttggtgctgtttcctcatgccggtaatggtcaaatggggagagggcatcatttgaattgagtcgaaatgcgttttgtttcagcctgtcgctgtgcttttccgaagctatcgccgcgacggcaacgcgttcactgtgcaggcggcgtacaacgtcattctgtggtgagggggcgggtgaggaggtcaactgcatctgagcaaagccataagttatatgaatttggtatctatcaaaagctatggtctttttgaaaaaaaacaattttctttctaacaataagcaatcgcaacccacaaaagggaaaattttaaatttattggatttgactaaaaataaa

SEQ ID NO: 78617 - DNA, 1755 bp, Heterodera glycines
atgttagtggataaaggttaaaaaataaagaaaaatcaggagaatttatttgttttatttgggttttcgaattaaataggaaaaaaattttccagaaattctggaaattttcaatttttcagaaaaaattcaacactcgattctgaaaaggagttttcataaattaaaaaactaaaaaaccgcaatttttagcattaaaagagatattttattttatatttttatctcctagaaattttttcgaaaaataaaaaattccatttatccccccggggggataaatggagacgggggattattgttcaacctcctcagaaaggggggaataaatggagatcagattctttcgtccatggaaaattaggctgaatctttgttatttagccagcaaattattgtgtatcttgtgatttttttttcatttccggttagcttcttcctaaatgcctatgtttgttcaagcgtttcatggatttcttcgatgatttaatccctctaccttcagtggaacaaatttctaaattaattgacgacgcatctcattacaccaacgaaatgctttattcaatttttgccggttggattggcgcaaatgctgctgttaaggtgtttgaatgatgaagatgaaaacgattaccaacttattttttaaatattcgacaatgcctcattcattttttcatatatttagtcaaaaagtcgcgtggccatcgatcgttcgacaattggcccctttcaatgtgggcctggtctttgcactcgaatggccggcatttcgggcggaattgctgtcgcaatgaatgcgtacggcgcacactttggtgaattcaaaattaaaaaaaaacgctaaaaagaactttttgcgttttcagagagatggattaattctaatttgtgtttttttagttctcgccaatgccgacattaatgatgaacgaaaaagagccatgacttatgcgatcaaccatcacttcatcaactgcattggaatggcgttggccggcgtcggtgcccattatccgacgctgacctcgaggtctttacaaaaatctcattaacgatttttaagccgatcatttctattactaggtcgtatcataaaaaagggcccttatccaaaatgacttccattaagaccatattatctcttaaaaaaaaataatccgcagccaagcggattcgaaccccagaccctcgtctcatgacccctaagggccagtaattaaatttcaaaaaatcatataaaactttaaatttgtcttcttcataaatttaatagttcattcgaaagctctttttgagctctacaatatctgtgtatgagttttaacgcccgatttattttattaaaatttttgaaaaaaaatcaagtacttgatgaaaaacatagataaagtcaatgattttgcaaatctgagctcacattcgtaatcagcacattttttcaccctagaaaaaaccaataaaatttttgaattcatttttcgtcgggaccgccatttctaagggattaccggtctcctttggtttgtatcccccttttgggtcaaattttttcaaaaattttaaattattattttattgtcgcaattgctttttagattaatggaaaagcttaaagattttactcttgatgatttattcaaagttttggctctacaagacaaagaattcgaagaatggctcagagaacttaagcttctctacacaccactcgtttttgtgactgtggcaacgaaatgagctacaaatgaa

SEQ ID NO: 78618 - DNA, 2033 bp, Heterodera glycines
gctttcagctgatttttgccggtgaatataccaaagcgatgaacaaagactggcacggtgaccacttctgttgttggcaatgcgacagccaactgacaggccaacggtacattctgcgagacgaccacccgtactgtatcaaatgctacgaagagatattcgccaatgtgtgcgacgagtgccaaaaacacattggcatcgattccaaagtgaatctgctcacactttgtttagggggtccagcggttggtctttcctttcgtgtgacacccccacccccgagagtttttattatttattacagtcatcaaaaaatgagaaaagtcacgatgacattattttgctcttttgcagaaaaatccttttatgggttttaggcaaaaagggaattttaaaaaggagaggcccgacaaacgcctgcgtgtaaatattaacaattttacaaaccccacactatactttaaaaaaattgtttttttttttaatttttcgaaagatacggagaccggtaaccccaaaacacagccgccgaaaaaaaagttttctttaaaaattctatgagaaaaaaatttttcaagaaattttcggcgatttttttttgaaaattttttcttatagaattttcaaagaaaaatttttctaagatttttttcttgaaaaattctgtttgaaatttttttttaatttattcccggctgtgtttcggcggctgtgttttgtcctgttccatacggagacggacgttccctaaccacattttaaatagattattttctcaaatatttagaggagcggaggggggggggagggatatgtacctcatttgccaactcaaaaatgcagttatttgtaaaaaccaaagttttaacattctaaggatctgtcctacaaagacaaacattggcacgaagactgtttcctctgctcaatgtgcaaagtttcacttgtggacaaaccatttggcagcaaaaatgagcggatcttttgctcaaattgttatgaccaagcatttgccacgcgatgcgacggatgcggggaaatattcaaagcaggtgacaactgatgaaatggccggaagatattcccaatgttttgataaaactgacaatgagaaagaagccccttttccacagggatgaagaaaatggagtacaaagggaagcaatggcacgacaaatgcttctgttgtgcccactgcaaaacgcccattggcacacggagtttcatccccaaaaacgaggaggtgtactgtgccccctgttatgaggagaaatttgccactcgctgttgcaaatgtaaaaaggtgcctttttgtgtggcctttgggcggggggaaggggaaaggcacttgtgaaacatcaattaattatataaaatccaccaaattaatgtctcgttacaaatcgttactttatcttgccaacaattccttgtctctctctccaagaattaacccgtaaaatgaatgaatgaccaatgattgcgtggcgttccaatggctgtgcctttaaggtgataagcaccggcggagtcacttacaaaaatgagccgtggcatcgtgagtgcttttgctgtaccaattgcaacacctccttggccggccagcggtttacttccaaagaggagaagccgtactgtgcggattgctacggcgaattgttcgccaagcgatgttccgcctgtgtaaagcccatcaccggtaaatgaatgggatgattcgccttagttgacaattttctgttctctccaggaattggtggagcaaaattcatctcatttgaagaccgacattggcataatgactggtgaatttagaatttttttggttttaaaatcggtcagcttatggtgtttgaagaaatcattgcttttagcttcgtatgcagccaatgcaccgccagtttggtgggcaaaggattcatcacagatggggcggacattctttgtgcggaatgtgcaaaagcaaggcttatggcggcgagcagctgaatatccatctccggagacacttttattttgccccacccccatca

SEQ ID NO: 78619 - DNA, 895 bp, Heterodera glycines
atgtttttgcatttttcagtgaatgctgctgaagcaaatgaactgcttgaagatgacgatgatagggctgcaacttcatcttctgcgccatcactaccaaaggcaacagcaacaacaacatcattagtgaagccatatacaacatcggacccatttggcagccgcagaccaccaatttcatcaaccataaagtcattgttggcaaaatttgagccgtcagcagcaaagccaaccgacccatcattcgccagtgccaaaccaaatggacttggaacgaaggtaaatttttttgagagatatttttaatatgaaattcaaaaaatgaaaatgtttttcaaaattttatgataaatttctaagtttgtttttttattttttttcgggttatacgccctgttccctgcttcttttttcggcatccaaaatgaaggaaatcagggaaacttttttcaaattttctccccaaagttcactgttttttctcaatgccatcattgttgaaggcttccataaaaccggacccatcattcgtcggtgatgcttccgccgtgccattctcatcctcggccgtatcaccgacaattagcggtgccaccaccaccggcacggattcctccgccacggccgttggtgttgaacaacaaccagtgcatgctgacgatggtgatggacggcttggtgatgaagaggttgatgaagttgcagaggaggtccggcttgagttggagcaggacgcgctggtggtgttcacggacatttgttgctgggacttgcacatgcgcttcttcctggacaaggagggcaaattcaccagccgcaagtgctgcaaccgatcggagtgagtttgagttgttgtttattgtacatttggttttttattggtaacgaaaaaata

SEQ ID NO: 78620 - DNA, 994 bp, Heterodera glycines
atggcgattggacgtgggggcgacgctggcagccattcgggaattggtgcggaacaacaacaacagcagcaggtgttacattgttgcttggcagtttaatgagggctgttgagcccgaaaatttggaaaaaaataatgaaaatttcaacaacaaaaaaactgatggaaaacgccgcgggcgacgaaacgacttgggtgggaggggtgaaatgggggtgcactacgtttcccactcccccttccggttcagttccctgtatcaattccctccctctctcatagcgtccctccccccccccctcgaaaaatttttaaaaaatttcaaatttgtattttctttttaaaccctaaatttttataaaaatttttcaagcacttttgaataaaaaatttttagagacttagtaattcattataaaagttagataatcaaagaaaaaaaaattattgcggcaaacaatattgggagggggaatgaactgcttcagtgaaatggacccatttcaatattaaaaaaattagtcctttcgatggcggccaatttttccgcttttatctcccaacaatttcagcgagttcaacgcggcgatgaacaggttgaacaagttgtgcagcaacaaaaaacgcctgttgttgttgtcgattcgcgcgtgtcgccggtgcagcggaaaccaagccgtacggtgtttaatgagtccaacgaaattgtggacaatgagcagcagcagccatacccgtggcaacaacgacggcaaaacgccaacagcagcagcagttgcagcgacgtgcgcgactcggtctcattgtcagccggtgacaacgaggccgacgacgattttggcgaggatgacgttgatcacacggtcgaggtgtgcggggcgatgttatggatgggaccgagcggatattattggcattttatgttgtgtgccaatcattgggttcggaatggcacctcgaccgttggacaactttaatttttatatgaaaatta

SEQ ID NO: 78621 - DNA, 2742 bp, Heterodera glycines
attactgccgaaattgaccaaaatgatggaccacttgttgaagagaagaaaaataaaaaaaacgatgaaaaggaagaaaaaagaagagaaacaaaggatgaggaagtaagtgagaagagcagcgacagagaggaggaagaacaggaagaggggggcggagaggacgaactcttttcagaggatgaacgaattgacgaagttggggaagatcaagacgtcgcagagggagggacaaaggcgacactcaaagggacgggaaatgacaacggcactctaatgcgagaccaaagtgatgatgatgaggaggaggaagagggcgaaattgtggaggaaggggcggaggatgccaatgagtggtgagtgataaatagaatagtacaaaatggacgattatattgaaacaccagtcataggtccattagaataacaaaaaatgaaattaagcaacggtaaaatcgcaaaacgccgagtggatgaagagcacgatgacgaagaaattgatggcgcgagtgacgaacaggaagaggatgaaatggaagacaatgttgatgaaaaggaggagggagaagagagcgggtttctatttcttttatacatgcaaatttaaataataaaaggcattttccatttgcagttacgaggaagacattgaggacccaaaagtggtgcagcaaaaacgcgggaaattgccaaagtcagccgtggacgacaaattcttcaatttggctgaaatgaatgcatttttggactccgaagacaaaaaagaggaggataaaatgcgacagcgaagtgtcagaaatttgggacaaatcgaaaacgctgaagaggttggtgatagtggtttaatgaatttgttgatttgccctgcatggattaattcatatctctgcagttgttcaaatttccagcgtctttaatccaagtatttagttggagcaactaatcagtgcacatgagcagtccaacttgcagccgcgtgagtgggcgctgtcaggtgaagcaaaggcggaagaacggccgaaggacgcgctgttggagcagtatgtggacgcggactaccgaatggccgcaccaccgacaattgacgcagaaaagatggcacagcttgagggaatcatcaccaaacggatcaaagacggggtaaaaagggacattttagcagagtaatttcttgcccaaaatcaaaaaattgtttcagtttttttttctttcaaaaatacgtctctttcaaaagtgaatgcgtcttttttaccttttcagttgtttgacgacgtcgttcgcaaagtgcgcgtcaacgaatcgcttcagcccgcagcgccctatcgaaacgctactgttaatggcacaacggagcaaaaagtgcgcaagtcattggcggaggtgtacggcgacaaattatctgctgggctaaacgacgaacacgaacttggaggagaggggaaaaaggcaaacgtttaaattttcaaaaacgctttgatgaatgaaaaatttgaaaaaattgcacacgttaattaatcatattaaaagttatcatttctttaggaagaggaacagtccaaattggacccggcggttgaagagatcaaaagcgacttggacactctttttctgaagttggacgcgctcagtcattttcaatttcgaccccagccaatccaagaggaagtgaaaattgtcaataacatgccgagcttgcacttggaggtccctttttcattttttaaagagcaactttatgggcctgagaagggtagcgaaatcgggagtaccttttcaacaagcagcatttgatccttccgattagtgtttatctgaagaaattgggtatacttttcccggcatgaaccaataactcttcagcttacaattagtgcaagtcatttaaaatcctattaaaggaagttggaccccaagcagcggttggaccagaggtgaatttgttggcaccggaggaagtgaagcgacgcgtgaaaagtgcgccgaaagggacagatgaacgaacggagacggaccgaaagcggcagagacggcagaagaagaagaagcaacggtgagtgaatttggaggaacgtttgtgcaaggaaagtcattcggaacgtgtccagacatttgcacttgtctaaaatcgggttcaaatctgagtttttcaattcctaatgtgcaaatgtctggggtgaaaaagcccgaggcgcaaatgtggggtaaccattcggaaaagccttcaaacgcaatagaataagaaatgtttaaaaacttaaaagtgaaagtttccaaatcatttttgccttttcttacaaggcaaccgcaatacaatacagccgttccttaatgctttttttagcattttggcctccatcggcgcaatgaatggtgaagggaccgacggcggagaaacggcggaacgggtgaaaacgaagaaaaaagttcgacgggtgaaaatggattttgctgagcaaattaacaaattggtacaaaatgaaggcgaacaacagttgaagaaaaagaagaagcgaaaaatagtggaggaaaacggcgaggaaaagaagtcgaaaaagatgaagaagaagaagagcaaagttggaggagaaaaggaatgaaagagagagaaggacggacaaaggaaagaccagcggatttgcccattgtctcgttgtttcttgttgatcttattttttgagtttattcttaatttttgtttgacctgttcattgatctgatgtttatttttacaattttataaaa

SEQ ID NO: 78622 - DNA, 1265 bp, Heterodera glycines
  unsure (1)..(1265): unsure at all n locations
atggatgcagtcanncagcagcagcagcagctgcccgaactgttgaagcacgtgccggtgttggtgtgcgccgaggtgatctgcgagcgctgcatcgcctacggggtggacattgagcgtgagccgttgcgccgcgcgccccagtgccagtgcggtgtcccgtggcgtggtgcgaaccggcgccggtggtgctctcgcatcggcgaggaacagtttgacgacgacacctgtggaccagcgacagcacaacaacaacaacaacaaatgccgccggatggattgaacccgcggcggctgcgcttcttctgcgacggcgagccgggcaccggacgtggcgcaatggcccaatttgtggactttttgctccacaccggccccaaagggacgcgcaccgtgatgttggcgcacaacggggtaagagcagcgagggggtgggggtggcaaccgattagtagtgaaaaaataacattttttcagggtcgttatgacgttcacctgttgctggaggagttgcagcggcggggcgagcggccgaagaaggcggtccagcacgggctgcgcgtctacatgctggagctgcgcgggactcaccagcgccagctgatctgcaaagactcgctgaacttcttccacgcagcgctcgccaccctgccacgcacctttgggctgcacggggtgctggacaagccgttttcccataccatcacattcgggagcagaatctggatgttgaactgccggccggcactctaccaccaccagcggcctacgacccggaccggatgcgtgccgcgcagcgtgacgacttcatggcctggtacgagcgcgagctgcaccggcccggacggcaaccgtttgtgctccgccgtgagctgttgcgctactgctggaacggttagttgttgttgttgtcgctgtcggggagtgctgaagtggtggaaaaaaatgccgagcatacagatgtccgtatcctgcgtgccgcctgccttcgcttccgggagttggtgggcgagtgtgcggacggcatggagcccttcctggccgccacgaccattgccagcctgtccatggcggtgttccgccaacaccatctgcgcccgcacacaatggtccacacgccggagggcggcttcctgcgcgggcgtcgcgcgtcggccgagtcgcgccgcttcttcgccctgctcgccgccatgcgtcctgacttgggcccgttgcgcaccgcccgctggtcagtcggagagatggtgatggacaacagcagctag

SEQ ID NO: 78623 - DNA, 504 bp, Heterodera glycines
atggcaaccgatattaaaactattttacttcgactgtcttcaattgaaacgttattatcaaacaacaacaacaacactttggcaacgcaaatggcagaacaattcaacgccattgctgaacgcctcaacgaaattgagcgcaaaatcaacagcaacaataacgacaattccagtgcggaggaaaaagaacgcaaacgaagcctcgttttgattggcctgccggaggctgtggctgaaaagccgtcagaacgcgccaaagaggacgcggaaacagttgcggaagtgttggacgctttggatgtggaggtttgcccgcagatggtgtatagaatggggcggcggattgatgagaagcgaaatgggcaaagttgtcttgccagcgacgacgttccaacgttttgcattggcacaatgggggcgcaaccggacggaactgaagcagcatgttggttggcagcgacttctcgtcaggccctctctgacgaaagaagaattggcggctga

SEQ ID NO: 78624 - DNA, 1536 bp, Heterodera glycines
atgaatcgacggtaaggaaatttttgaaaaattaaaatttttgtctacccaatttttttccttgtttcagttggatttgtggcgacgtttggatggacattctgccatcttttgaccgtccccaactcggactcaaaatggcactgatttccgaccgtttcgactttttagtggacaaacattttgatggaaaaacggaattgacaatttggagaagaatcaaaattgtaaaggacgaaggaccaaaagcgaaactgtctgtggcgatcgatggcaaatttgtgggatttccatttcctgaccatccgttgcccaacaaaatccgttttaagaaccttcagatttagtaaatcaaaaaatatacagaaaaccaatcttcattttttcactttatcagctacattgaccattctgtgctcgcatttctccgttccaacaagcaaatttgggacagaagtggcaccaaattggaagtgtttgtgccgttatatatgaccgacgtcaagctcatttgggatgtttttacccgcgaaatttggccactttttgcgagaaacattcggcatttgagctttcataatgccgatgctttggacaattggcgtcgtcgcacttcgccaacatttctcactgatcttgatgaattggtttctatcgattctgttggtctgttccccgatggaattgctgacgacgggccaaatgcaactgctggccaagctttggccaaatggcttcacacgccgagcaaaaatggccaaccaaagcgattgcatcgcaataatttgttgggtccactgaatctcgaatggctcaacaacttcaaagaggtgtgtctagccatattttctataaattgttttttccaattttttgtttagacatttcgccgtgccaccacttctgtcagttacaatattcaattttatcttcgtgtggaaccaatgccaactgctggccaaaaataatggccataactagggcgggaaccgcccaactcgccgcggggccaactcgccgcggccaactcgccgcggccaactcgccacgccttgttttttggctatctcgccgccagatttttcgttaaaaaaatgcattaaaagcaaaaattctttaacagttaattgtattcaatgtgttatatttcagcaaagtttctctccaatttaatatgcttcaaattgaaagttaacgcaggaaggaaaaattgcagaacgatatattcctctgtattttccacaaatttaaagagcaatcatgtcggtcattggtcccgaatttttttttttctgggaattctttaacaagtttctttgggtattttgaggcgctgagcactagagaccggcgcgggacgggatcccgcgcgggattttgcgggatccccttcgcgcttcccccttgttttttttcttcgccgttcactcaacccgcgccatcccgtccctgaggaagtgtagtgtaccagacctctgcaggggcatccgcaccatgacaattgccagatttcgactgaggactccattacattta

SEQ ID NO: 78625 - DNA, 785 bp, Heterodera glycines
  unsure (1)..(785): unsure at all n locations
atggatgaattgaacatttttgctgaaaattatgacaaaaaattaatgattgacaagcaacaatcattaaaggaactgttggcaattntaatgaaaatctacgcggactatagcaatgccagcaaaagagaaataagcaaaaatgccattcggttgacacattctgggaatgtaactttacgatttggacaaattttatatgaaacgatagagaatttggaaaatttgccggaagaccgcgtgaagtacgatgaaaatgaacaattgctaaccattccattattatttgtcaatcatttgcttgagcgactcaatgaattcattgaaaggtttgtaaattagcctatggcgttttttgccacatttggtcaacattttctgctggcggttaaaaatggtttaattaattataatataaatgggaaacatagaatttttaattactttttttaagaaacttgaaagaaaatagtaaaatcagtgatgactttgatttcgtgctaacacttcaaacagttgccgaagagagcacggaattagaggcggagaaacggcaaaagccaatttcggctggagttaatgtgaacttgttccaattgcttttctcattagcaattcgtttgtgcttactaattgacgaaaaagaaaaattggcagaaaaatatttgccaaaattcgtattcgcattgaaaatgtgcacaacaaacactgggtaaaaaggcgtgtttcattttttattcattaagaatttaatctaatatataatatatatttatacaaggaaa

SEQ ID NO: 78626 - DNA, 1268 bp, Heterodera glycines
atggataaagctgaaagtaaatttgaaagtatttaataaatagttcattaatattattttttaatagacaaagagattgtgaaaaaattgagtgaattaatggaattgatcaaactgaaaagggtagagaaaggtaataatcttaaatttaataaaaaattttaaataatattgtttttttttaatagtgaaaggactcaaagaaaaatttgttgaattattggaaaaagatgaaggtaattttgaataaaagtcaacaattttttaaagtattatttttataatagtggaaaagctcatggaaaagctgctggaattgaaaaaattgcaagtggaaaaagccatgggtaattttaaattattattattatttaattaattaattttataaattatttctctaatagtcgaagagctcttaaaagaattgaagaatgtttataaagtataaaaatgtgaagagaaaggaaaacatcaaggccggaagaaaagcagaaaaaaggaacaaaaacaaaaaagaattttctcccattatccaacatttcttttttcactttatctaaaacgatgtaaaaaattttgcgcatttatttttgaaccaaattcttcgtattgttattaggctggacacaaattcgacaaattcattatgtccatgattttcatgcgtatacaaatttatttcagttctttatccatcaaaaaaaacttcggttcccaaaaactttcatttcgcctactaagccaaaaaggtaagctcgaacttgagcccgtaggaaatcaagattttcgtgagagaatatatgaaaaactccgctctttttgtagatagacctgaatgtttgaaagacaaatttaaaatagggagaaaaattttcacaatttttcctcacatgaaaagccgggatttccggcggagatgggagtgagtaaatcttcccagaatttctagtgctcttgcatgcccataactggctacttattattacattttttagcgatgcgatttagagccttaatttttgcccttttaatacgcctaatcctgattttagaaattttcctttaaaattttaagtaatttttgtgtgtatgcttactgatttacccttatttgttaggcagaaaaatgttaaatgattttttgctagaaaaacatgaaatttcttaaattttttaaaaatcatacaaatattttttgagtaaaaagtctcagtttttacaaaattattcaaaacataattaaaacgctcaaatgttaaataaga

SEQ ID NO: 78627 - DNA, 1367 bp, Heterodera glycines
atgatcagtttgacggaggtttaaaatctaaaaaatataaatataataataaaaaatttttgtatttttttagctttctctcactgatcaatcaaatcaagaaagacttaaaaatgcccatgtgaaaccaaatgaaatagacgaaaagggaacgaaaaatcataaaggaaaaaaaaaaggtatgatatttttggcacttttaaaattcaattaacgaaagaaaagagtcggcaccagtttgaaaattataaaaaatagaaaattaaattaaatttaaaaaatttagcggtaaaaatatattccaaggaagaaaaactacaattgcttaagaaattccaaaaaagaaagaaggaattcaaaatggatgaccaaataaatgcatttaatagaatggaagtagcaattgctcaggaattaggtgttagcataagaatgataaatgaatggaaacgagagttcggcttaacaagtaaaatttaattggttttcaaaaataaaatatcctacttttaatttaggaaaatacattaattattcaaaagaacagaaattagaattggtaaaggaatttcaaaaaaaaagaaaatgaattcattacaactgacaaaattaatacagttcgtagaatagaagaagcagttgcaagggaattgggcatcggtaggacgaccttaaaaaaatggaaaaaacaactcgggctaacaggtgattagaatcattttaattgttattctattaaacgatttatgttttagcgaaaaaaagttattcaaaagaagaaaaattcgaagtgattttgcaatttcataaaagaaatattgaatttaaaaaggatgaaattttaaattcatacaataaaattgtccaagcaattgcaagagaattaggcgtaagccgaaaaaatatatacaaatggaaaaaggaacttgggctatcaagtaagaatcattttaatattctatcattatttataaataaattttttaaagacgaacaatggttggagctaatccgaggaagaatgaatgaatttgaaaaagatgaaaatccgaatgaatttaacaatgccgaagatggaattgaagaggaaatggataattgtcatgtcaaaaaaggtgattttaaatgctacaaaagaaataataaaatattttaagagagcaaaatttattcaattaaagaaaaacttgagttgctagagcaattccaaaaagagaaaaatgcatccaaaaagaatgacgaattaaatacattgcgtaaaatagatgctgcaattgcaaagaaattaggcatctctcgaactgcgatttacagatggaagaagaaatttggactctccgggttatcaagtgattagaaagaattta

SEQ ID NO: 78628 - DNA, 1076 bp, Heterodera glycines
tcgaaaaaatagaagaagtaattgcaagggaattgggaatctgtcgacggacaataagaagatggaaaaaagaattcggcttaacaagtaaatttcaatttaacattaatttgtggtagaattgatgatttttatttgttttaaattaatttttaaatattacttagatttatgtaatttagggaggacgattagttattcagcggacgaaaaactcaaattgcttgagcaattccaaaaaatccgaaatgcattacaaaaaaatggaattacgaatatatgtgctaaaatcgaaaataaaattgcaaagaaaataggcgttgatcgaaaaaagataaagcgatgggaaaaatggcttttcatagcaagtaattttttgtccatttaggcctatgaataaggttatacaagaatgaggaacaaagttatccttaaattgggaattagaataaatgaaaaacatacaatgaattagtgctgctcgagagtctattcttgagtctcatcgagaaaagtctcggcttttgtggtctaagtctcgcgtctcggggtcaagtccgcggtctcggaaagtttcagactctagtgtcactactagagaggcggaacaggaccagaccctggcatgaatttacaggatctgaaagcatccgcatcctaaaaattttaaaacccaatcctataatatgatcccaaaattcgtaatttgccgatgtcgaaacactactattgttaatacatgttttggaattacatgttttggaaatctagaaaataattaagaaactaattttgtaatgaaatactcattttcagctttccaacatcagaatggacaaaaaaacaaagcagattcgcttaacgcagaatttaatgatcaaaacggtcaatcatcatttatcaaaagacaaaaacacgtcaactttgaagaaaattcaccgccaaattcgtcaccgatttcgcaatcaatttcttctgattcgccattgaataatgaacttcacgaaaaattggtcagtctaaggactaattgtttctttttggactccagatttcgcatagattttgatttttag

SEQ ID NO: 78629 - DNA, 3217 bp, Heterodera glycines
  unsure (1)..(3217): unsure at all n locations
tctgaacggtcaatcatcatttatcaaaagacaaaaacacgtcaactttgaagaaaattcaccgccaaattcgtcaccgatttcgcaatcaatttcttctgattcgccattgaataatgaacttcaggagaaattgtccagtctaaagactaattgtttctttttggactccagattatttcgcatagattttgatttttagaatgtttctgcggaattgcatcaaagcaattttattggcggaagatatccaaaacgacactgcaatcaaagagtaaaagataaaagtgttcaagaagaaaggcagaacagcagccaaccagtagtctattgtatcaaattgacgaatatattagtgctaatgagttagagcatgacgacacaatacacgcaatgaaaattagtggtgggatattttgcatttttattaattaatttttgcgctagttaaaaagtggagcactttgaattttcttaaaaccaagaaagggtaataagcccttttgctttgcaattttataaattcgtttgcgaattttatttgtggaattcgagttgggattagtaattagtgaaaaactgatgtcaaattcgtgctcaactactccgaagcacagctaaaataaattccacaatttaatacgaccaaataattttgctttttaaataaaattcaaaaaactccactttcaaaataatttcgatttttattattatagaatttacaatgaaatacgttagggaatctggcttgcttcatccacttttgttcagcgagccacctgaaaagttgggaatgaggtttataaagtaattttttttaaaataaattttgcattttaagaatgccaaatccacaagagtttagcattttggatgttcttggtaatttattcgttgttctgtatgaaatcagaaacttttaattacatttcagagcttgttggtggcgaaagacgaattgaagttttcgatgtacacactcaggaggggaaaaatatgcgactgaaagaatttgtcaaatatttcaggtgaataatatttatggttgggatactgtatgtgataaatggacgaaaaacaccatttttattgcttaattctttattaaatactattttgttaaattgtaaatataaataccaaccctaaataatataatttgttgatcagtggaatggaattatccaatcatcagattttttgttttagacaaagtccgtcaatgcgtaaaaatttgttgaattcgctctcactcgaaatctctgacaccaaattgtcagaacaggtttttaaaatgatttttatttatacattttggttcatttaggtgatagcgccgggttttgtaagaagaattgattggattgacaatgtgtggccaaaagaacttttggcacgtcagaaaaacctactaaaaaagagtcgttgggcacgaagcaacgatttttccacttacccaaaagtgcaaaagtttgtaaaatttaaaatatatttttatgattttttactttaagatattgcctgatgagcgttgctaattgctttacagactttcatattggtgagttatgaaaaactttttgttctacaaattttgctaaatttgtcgaacaaattcactcttccgatgggacttggatccacggccttttcccattgcgggaaatgctttaacaaactaagctatgggcgtttcctttagattttctcccaagtcctttatcccatttccccatacccgcttccttctggcaccaaactcaccacatcattttccggaaaattcctcttaaaattcatttattttaagattttggcggatcatcagtctggtaccatgttctgaagggtgaaaaagttggtgacggatgagaaaaatttaaataaaccttttatttgataatctcagaaaaagatgtagaatttgtataaattaaattttcataattcaataatgctacagcaaattttagattttttggctaattgaaccgactgaggaaaacctgaaactttatgaagaatggtttctgggcgggaatggagattcaaaattccttggcaaattgaccaaatgttcacgtgttcgactccgtcagggagaaacgcttattataccatcgggtgaattaaaacaaacatctttggtgaaaattgcataaacatttttcgtctggcttgttcacaaaaactgccaaattggctattcctaaaaattggcatttgctaaaactgccaaatagctgttttggcattttttgggaaacaatgaagcaccatgtttcttacggacgagtctgtgaataacattgatcgccgttaaggatggattcacagtgtttacacaccggtggatgcactcgtttttggtggcaactttctgcacagttacgcaattccgacacaaattcggatttcaacattggaagataacatcaaagtgaaatgatttattaaattaatatatattaattaataatatataataaatactctgtttggtacaaaaatttatatgatatttggtccctgaccaaattatcaaaaattttgtaaaaattttcaaaaatccacaaaatacccaattttggtgcaaatctatttaaaaatttggccaaatctcaatttttcaccgtcctactgtagtactaccgcacagctgggcctctcattccccgaaacttttttgaaaaaccgcaaaagcggtgtgcagtgaaaaacacatcctaggacgaccatcagtgatgctggtcgtatcataaaattttattatttattgcagcgcggcaaaaaatatcgcttccctcatttcaaacaaatattttggtgtttcattgcacaaattgtgcgcaaatgcacacatcgtctgtaccagaaaaagctgtcagaagaagcccacaatgttgaaggcctaaatttggtgcaggtcattgatgaaaggatggtcagtagcctttatttgtggttactggacatttgcgccccggatatttacacccgagcatatgcgctccagacattgcgccccgaacctttgagcataattatcattttaagcttaaattttaaactttgttcaaaaggatgacgaaatggcaaacaatggcccacggctgaatttggatggagaagaaatttgttacaacgaatttttgggaaatgcaattgatgtgagggaattttatagcaattaaagtccaanattaaactttaa

SEQ ID NO: 78630 - DNA, 304 bp, Heterodera glycines
atggcaaacaatggcccccggctgaatttggatggagaagaaatttgttacaacgaatttttgggaaatgcaattgatgtgagggaattttatagcaattaaagtccaaattaaactttaagaaaaatcagtatcaaaattcggaaacaaaaaatatatttataaaattcggttttagggttcatatacatttaatccgattcaatcagtctacgacaataaagacaaggcgaaattcactcctacaaaaaactacaatattggtacgcacaaaaatattaatagattatcatttataaattaa

SEQ ID NO: 78631 - DNA, 3792 bp, Heterodera glycines
atgctggcaggaggcctgtccctaagcctcctgtgcttcatcttcaccatgtgttccatggtgggatacgccatggcaggactgagaatccttttttggattttctcagtcttgttcgcgcgcttattcaagccgcgaaaagagacatgggtgttgagtgaagaggaggaaaacctcctctatcctcaccgacgaatacgccggcccaggccagcaacaagaaactgggccagtggccgagttagccaaatgacaatgcttgtcatggcatctcttccgtttgtacacgggggaattgagacagtggccataatggccaaatcagagagctgtctcaacaacggcacaacgaaaatgtgccaagtcaagggaagcgtaacccttgcgcttctcccggtaggacaaccgaatgtcctgtcaatgaagaccgatgatggtctcattttgggaacccttcaagtgatcttgaaggggctctctctcgaatgccaagcatacaccaaggcttggaaacgatcatacgagatcgcttccgtggccagcaaaagatgtccgtcggctggctcatgtgtcggtgacttttgcacaaaagtcccaccctccacagccatccgagagctgagggagaccgaaacgttccccgggaacagtttctgcatcgacagcacggctttttggggaaaccaatgtctcctagcagccagttcatgtctcttctacaagtggtttgccaaaccacgctcatcggccattaacgaagtcatcggatgcaactcttgggagtttggcatccatattcaacttcgcctcgactctaccactggaagaagtgcgacagtcgaaactgtgcttcttccaggccgtgtgctcaaatggcacaacatcagcatttcaacaataggagtgagccaagcaccggctcccctactgaacgctgacttcctgattgaagggcgaagtgtcgccattgtccgtgagaaaatcacggactctttccattgtacagacttgaaagccgcccaagctttcaattgtactctgggaattgacgcatgcacgggctgtcttcccgatcacacagacgggacagtctcgtgccattgtcgcgtcgccaatctcgagggtctaatggaagaccctcagcggagacttccgctctcattccgccattacgaactgcggaatcacggaaggcgaatattcgccataaccggatatagtccggtccaaatgaacattcaaatggacagccttcaaatgtccttggaaatgcaccagagtttgtgcacaatcacaccaaagcacatctctggctgctacaaatgtgcgacgggagctcagctctcctactcgtgccacactgacattggccaaacattggccgacattcaatgcgaagatggttcgcatttcacgagcaaatgtggcccgaacataacggaccacactgtcgtgctcccattccagcatgccgaaataagcacgacatgccaagtcatgtgcttggctgggagaaccaagttctccttggtgggacaactccattacatcccactccgacaacagtcagaattcggagcccgagtctccgaaagcctcgaagaggccagcaactcaggctgggctgacttcagtttcgactggaagtccacttttcaagctctgtttggccttaaaacaggcctaattttcttcattgtcttgatgatcggcattgtgatcatcattttcgttgtacacttctctcctgtgtacaagttatggagaacatttgcttggttgctcatgaaccaagctccgcgacccaacaacgccacaactttttccgtggctgccattctctttttggcggccggaggatccttcggatgggaacctcgaaaaggggattctttccccgtttcatgcggggaattaagaatccccgaccccgaattttcattcagggaagcggaggtgaatacagtacccctccatcaaaaaatcgattaccgtaatcgatcgccaaaaactgatataaaagaaggaaatttgatgacaatttcattccttcgccatcatcaagctccaaacaacacccagcgcctcagcaaaaccatgccgattccgttccgagaacggccaccttttttctcggcaccaacaatcagccgacccacaaacgaagtggtcattaatgaccgcctcgtcatcgacatcatcggccaatacgaagccgagaacggacagagagcaaacaatgctcctcaacccggggctgacaatgctcctccgccctgggccgaagaccaaagaggcccctggtggttcgaccaggattgggggccccagctcccaatggtccctgaaaacagtggccaaaatcgccaaatggacgatcagcgagatgattggggagcccatgctcctccccaacgggaaccatcgccccgtgaacacaccgagcgcctgaactcatgggttgagcgacaccacggccaacaatggtatgagacggctagcattcgccgtgacgcggaggaacacctccgccgagaactgcgcaccggtgccacgctttttgcggcacacctcggtccattcgcgaatgtctatttcgacgggttttcgcgttttggaccggctaacacgcgaatgtttccgggacggactgtccaggaacatttccgacggcgcgggttccaggtggacccgaatttgccatgcctccaagagtatggaggcttcagcaatagccaacaaggaatccatgtcgattacttcccaatcgacatggtcaatgtccgattccaaatcggagctgatcagagggaggctgagccccctcgtcttccccgaataagagcatatttggcattggaagaggctcccaatgaccaagaggggccaaacaggggacccccgtctcgacggttcttcgaggccattggcctccgaagaggcaatccgaatgttggcgaaatggcggaaaacaatggccgccaagcgcctctccaacgcggagagcgagccatggactatggccgccccaattcaccggacggcagctttgagaatcgcccacgaagggcggtccccaaccgtccaatgcgccgttggcagaacggccttttcattgtggccgtggctttgtgcctctgcaatttggcggagggaaaggaattcccttcgacaaggacttgccatcagccgcttgaagcggcgaacatggcacgtgaaaaccaatggggattttcacgaatgctgttcccatggccactttcccacgatcagaaagcaaatctgatcgaagagctccgccccttcaatggtagcaaaacctatttaagggcatggatttgccatgtcccaccatcacttgccttttccaaaatgccgaagcccatcaaaatggcttcctcttcttcttcttcttcttcttcctgttcatcatacggcagcgacacatcggaagagccgcccccgccgccaccaccgcgcaaaaaggcggtggaattgttcaacatcgccgcagcaacaccggaacgggacgcaaaaagcggacggaacttttccgtccgcgatttcatcgacgcggaagcgaaggaggagtcgtcgtcaaaacgcatgccgacatgttcggcgtgccaactctctggccatcgccgcggggcaaaggcctgccccctttatgttcctcctcaaaaggagcgaacggcggcagcgagccgccccggcacatcaaacacacgccgcgactcccccgaggaaggggagatcaccgccgataaggcgggccgcgatcgcccaccg

SEQ ID NO: 78632 - DNA, 1507 bp, Heterodera glycines
  unsure (1)..(1507): unsure at all n locations
atgaaggagcatccgctgtggcgcatggcgcacattgcaattttgtgccaacgcgtggacattttcacggacgacgggctggcctacctggaacggtttgactactccgtcaccgacttggtccaagtggcttgctccccggaaggcctcttcccgctgatgttggccgtccagaccaaccaggactccattgtccgctttttgctcaagcatggggctgatctgaccgcgcgtgaccccgttgggaacaatgcggtgcgtcgaacaaaaaaaaatttttttttgcaatataaaaggctgtttgtttaggggcacaacactgccctctgtccaatgccgtttctcctccatgaattcttttaaaaattgattttttagttttcgtaatctcttcgaaatttttttagtaaaaaatcttaaaaatttacgctttttttgaataacttgaagtaaacaaacaaaaaaaaatttttttcaatttaaattttgtacatgtttaaaaagtaaaactggaggtcttccggtgccgccgataggcaacacttggaaattggaacttttaatatttttatatagaaattttaaaatgttttcgatatttatttttttgtaaaatcgaatttttgatttactttttaaatttggtaacattggtgggaatggcagcacatcctcaaaatttttttggtttttcaaacaaatttcccatattttccattttcagcttcactatgctgccctggtttccacccaaatgttggagacactgcttgaacaagaggcgggcaaggcgttgatcaactcgcggaacaatgcgggcgaaacgccgtcaatggtcgcactgcgggcggtcaatccgttgtgcatgaaaacgttgttcaaccacgggggcgaccttttgaacaaatcgacggacaaaaacccgctcatcgaactcatccagtccagcaagggcaacacgccggagtatgtgctttttggggatttgtttatgctggattcagtgacggtcgcaggatttttcgggattttttttaaaatagaaattggaaattttagaccgttgggagttgggtatatactccatgaaaattttgcatcaatttatttgttattttttgaattgttctgttagtttatgagtttaaaaaattttttttgaagcctcaaaaaagcttcaaaatagccatttgttaatttaattatttatttttccaaaaattatataaaaaattaatgacgtggagaggacttgaacccctgcactttgttcctttactgtcgtcttacaaaagccacttcgccatacatgcaaaatttgaaaacagaattccaagaccaaaatattagcaatccgaaaacacatcacatccccgatataggtagggggtatctagaaaaaattttcgggggggggngggggggacccgactcgagactttttttttttttttgctcttcaactgaaaacctttaaaccttctttttttgatatttaaccaataaa

SEQ ID NO: 78633 - DNA, 677 bp, Heterodera glycines
atgtcgactttaaatcttcattttgcttactttcttctcattgttgtgtttttgcttgtggactattcattggcaacgagaaagaaaaataagaacaaaggtgaggcaattatgctaattataatattattatccattgcattcatttataatttccattcaaagttcgctcactatttaatttaaatgggaccggacctgaaaaaatttgtaaatgggaatttcgcgtttttctttttcggcaaagcaaacgcttggcattccaccgaggccgatggacaaataagcggagccgacaaacaattgggctacacaattcgggattctcccaattcagtaataccgttttttaaaaaataaattttgattaatttaaatgttttgcaggaggcgtcacattcactaaaagtgtacacgagaagaggaaaacaattaagcaaatcaaacgacgcagaaaggacgacgcccactgtcggagaacaacaaatgccattgtcagccgacgcagcggaagaaaacggcacaaattcacagggaacggcgcaggaagagaaactgcaaaaaattgtcgacaaattggagacgaatcagaaagaaatgcagaggaacattgaggaaatgttgaaggaacatttgacaaaaatggaggcgaaagttgacgaggtgaaaaatgaaaa

SEQ ID NO: 78634 - DNA, 1014 bp, Heterodera glycines
atggaaaatgaggaggaacgcccgtctcagaaggaacccatcgaagcatatttcgcgaagtttaagcagttcatggcccatttgcaagacaatccgacaaaaggccaaagtgacaaattgttggccattttgagagaaatcgaagggcgaaaagaaacagtgaaatttgccaaggaaatggcagagatggatgaaattagagaacatattgacgaattggagcagggatttagggagaaaaacgcagaattggcgaataagaaaaccaccgagagagaaaaagattcttctttgaaagcgaacattgccgagggggcggataaaattggcgaaggagtgaaaagtgtggtggaatatcaggtggaaaatcatcaaaaattatgaaaagcaccacaaattactaaaacatcaccaattaagcttggcacctacgtgaaaaaggaatttatttatttgacaaaagcaaaacgaaattcgttgccgccattgaaaataattacggacttttttggggctttggagttggcaatagcctatctaaatcatgtgtgggatatcacaaagggtcagtaaatcgttggcaattagcttgaaaatggcaatgcttggtcgatggtaattcattgtgtgattcatttagtctgcctattgttgcttttcttcgttttcccctcattagcgccttaattaccctgccaattcactctcttaattactcggcccattttctgtatcatttgcctcccattatctgcttcagatttggtcgctttttcctcgttgcgccgttattttataagagtcgacatgaaacttgtgtttctaaacccagcgctttccatcatcagaaaagaagcggcaaaaaaattgcatttttctgggcaattgtcaaacattgcagggccaattcaacaaatttttacggaaaaagtgttgaagcatgaccaaatggcgaatttgcatgaaattatgcaaatggcattgctggaaggcaaacccatctcagaggaacag

SEQ ID NO: 78635 - DNA, 460 bp, Heterodera glycines
  unsure (1)..(460): unsure at all n locations
atggcgtgctttcaacgtggtatggtcgtaagcgaaaggacagcaattaaagtaatttaaataggcatatttaaaaaagcctatttttttgccttttcacaagagaatttattaaaaaaggcaaaattcgccttaaattaataaggtgaaagtttgaaaatgtttattaaaaaatttcaggatgaaatacaattaaaataattaaaaagaaaaaaaataaatttatttttctaaataaataaaaaacattgtcagaggcagtgcctgccgaaaaaatagacaaaattttttcaaaaaagccaaaaaaaattgaaaatttaaataaatttaaaagtgaaaaaagtaaaaagcttccaacaccttcgattccaggacgtctccgttccaagtactaagaaggccccacgttgcttaacttgccagatcggacgggatggcgtgctttncacgtggtatggtc

SEQ ID NO: 78636 - DNA, 1488 bp, Heterodera glycines
atggcgttgtgggcggagtgcactcggaggaggggaggaaaagcagacacacgacatttatgtgccggtaaattcattggcatttacatcaatgccactgacaaatggctgagtgttcacaatcagaagggcaaccaagactggacaaactcattacgtttcaatttgactgtgtccgtctccccaaacggcgcactcgtgcaacagtcgttcccgctgcccataatcaacagaaaacaacgcagtcacttcttcgaaatcgcatttgacaagaaatgcggtgaggacaatgaatgccattccgagttggcactacaagcagccattctcgacataacgtgagcataccggggatggaaatgcagaaaaacattgggacaaactcaggaggcgcgaagacggcatttacattgccaaggtgacggagcgcgactcgctggtgattcgttttttggtggagaatcgtaaggagcgcgcatttctggccaaattatttgtggaatataacggagtgaggggaagtacatttcgatggaaaatgagttgtcaaaattaaggacgaattggacgaacctcacctcacgcaaagggactaccaaaaagagactccaaagttggacatcgaacggaggaacgaaggattggtggttgttggactcggaaacccaatggaagcgggaagaaaggtccgatcagacggagacgtttgttgccaagtcgtttctctttcagcttagctttgacttggcgtttaaactcgtccgtggaagttccgaacgaatcagcgcctcactgaactttcgcgcactgatcaattcgtccagtgttgaggaggaaacggcgaacaatgaatggagtgccgaagtccaactgatcaaagaagccgacctccagctgggctagtgccttcctttcttggagcccttttatcaattccttccgctttcagaaggcgcttctcggccgtccatcgtccgcttcagtaaaggcaaccgattggtcactgacgaagtggacatcggtcctcaagtggtgcacgtgtacacaataaccaaccacggccctttctacgcacgaaatgtgagcctgaagatcaactggccgttacagctgatgagcggggaccctttgtccccgcgtcaaattgcctccggcagttgggcactttacacacttgaagagccattgatacgtcataatggccaaatccgacggtgtgcagcaccaccacaattacatggacaaaagtccatcaatccgttgggcgtgtacaacgacgaaaccctcaaattggattatcaaatgacgagtcgacggcaaagaccgaaaagggcccccaatcagcggacagttggaacaaacgccgaaggcgggacattctctgccacggcaccgctgacatcgattttcgacaacggacgcattcgacggaaggaaatcgaggaaagttcaggcgccaaagttcgtattgccgacattgtgagttga

SEQ ID NO: 78637 - DNA, 96 bp, Heterodera glycines
agcccgatggactcgttatcaccagtgtttaaaataattatttacttatggaaaagccattaatcctatattttcaaattgaacatgtaaattagt

SEQ ID NO: 78638 - DNA, 2541 bp, Heterodera glycines
  unsure (1)..(2541): unsure at all n locations
atggtcggcatgggacagaaggactcgtacgtgggagacgaggcgcagtccaaacgtggtattctgacgctgaagtacccgattgaacacggcatcgtcaccaactgggacgacatggagaagatctggcaccacaccttctacaacgagctgtaagtgtgctgtgagaatttgttggtgccttttttgtgattctccacgacggtgaaatttaaagtttagtggttggggtgggtcaaaaaaattcgggaatagtccgaaaccgtggcttgtgtcatgtttgatcacgaatttatttcgccttgtttcggacttcgggcgcaaatccgaacaacaaaaaccgttacctgtcgagacgttcccgtgatttttcataaaatattaaaaaatgcaacccaaaaatatggcaaaatttcgctcccgtccttttgcaggcgtgtcgcgcccgaggagcatccggtgttgctcacagaggctccgctgaacccgaaggctaacagagagaaggtcagccagtcgccatcggtcgaccaatggtcaaaccgcacggcccgtccccctgttcagatgacccaaattatgttcgagacgttcaacacgccggccatgtacgtggccattcaggccgtgctgtcgctgtacgcctctggccgtaccaccggtatcgtgttggactccggcgacggtatggcagccaaatcattggcataatgccattgctaatatccctgtacaggtgtcacccacaccgtgccaatctacgagggttacgcgctgccccatgctattctccgcctggacttggccggccgtgacctcactgactacctgatgaagatcctcactgagcgtggttactccttcacgaccaccgccgagcgtgagattgtccgtgacatcaaggagaagctgtgctacgtggccctcgacttcgagcaggtcggactttggccaatgccgtgccaaaattatcagtccgtccgccttcaggaaatggccaccgccgcttcgtcctcatcgctggagaagagctatgagctgcccgacggccaagtgatcactgttggaaacgagcgcttccgttgccctgaggcgttgttccaggtacgtatttggctggatcggccgaaatgtagccggcctataatgtcgtcgcaaaaaaattcaaggccttgagcacttttccggaagcagttttttggcaggaagagcaaaaacaaaaatttttttccgtattccccatcaaaaaaaattttctttctatgggcctggccctgaagtggggaacaggagggcaggggacacactgcttccagcataagtagagactggactgaatatgcaaaacgcggtgcattactttctgttctctatgtaattgtcacccccccccccccgagatttaaaaaaaaattttttcttgaaatccgttgaactttgaacaaaagtatttttgggctgggggcgagtcgtttctcagtgctctgtggaaatcgttgccaccatggcaacacactgattgtatgaatacacaactcctttccagccatctttcctcggcatggagtcggctggcatccacgagacgtcgtacaactccatcatgaagtgcgacattgacatccgcaaagacttgtacgcgaacacggtgctgtccggcggctcgaccatgtacccgggcattgcggaccgtatgcagaaggagatcaccgcgctggcgccgtccacgatgaagatcaaaatcattgcgccgccggagcgcaaatattcggtgtggatcggcggctccatcctcgcctcgctctccactttccagcagatgtacgtttgggttggccgtttttgttgtcgggtttggctgagcaatcaaactgcttctccccccccccccctccgcattcaattccacgcacctccgcatttgcatttttttttgcacggtaatctcttggatagtcttgtcgccattttttgggtttgtgtaacatcagactgtcttggctcttcttagaaaactcacggaaagtgccgcagggaacttttntaaacgatttaattttgtcccaacttacgagtgtatcaattttggtttacaattaaactcattttccctttttaagtgattcattttttggatggctgtagccttttaaaattggcttattattactttttccaaaactgttttatgcaattaatcattgcgcgttttctcaggtggatcagcaaatccgagtacgacgagtcgggcccgtccattgtgcaccgcaagtgcttctgattgagcggcggcccgcagggagccgaaagaaggaggaaaatgttgccgataaaatttgatttctttttttttttgctgtttgtcatggcgtatttaatttaaaatgataatatatagaggcggatttaattttatgaattgcttgtggataattaggaaaatcttattccttggcgggtgaggagtttgacagtgatttgatttttttaaatttgaggcaggcgggtaatacctctgcatgtccctcctattttctgaaa

SEQ ID NO: 78639 - DNA, 329 bp, Heterodera glycines
ataatttacacgatggggaccaataaaagtggacgcatcgtttttggtagttgccaaagcgttaaaagcagtggtggacatttttggccactatttgttggcccttaattaagacaattagccaaattttccgaaggtgaccatttctgcgggccatgaaaacatcgacaccgtggaatgtgccagaaggtggtcactaatcacttccgctcagttccccacctctacaaattaggggcatccgaatgggctttggcggtgccattctcactgaagcaacagccgaaacggcgatggcacttttacttacggtttcacgccgccttgtc

SEQ ID NO: 78640 - DNA, 1578 bp, Heterodera glycines
  unsure (1)..(1578): unsure at all n locations
caggagccacgcgtaagttgcctgtttttttaattttttgttaaatttctgtaccgtttcccattcaggaggtcccaccggaccgcgtggaaagggaattttggcgcaatgtgatcgacattgacaagggtgttcaagtgaagtacggggcggacctctgagttttttttttgtcttggaattccccaacttatgaaaaaaaaaaaattaattttccgaatttctcccaacaattcaggactctagggaatttgtgccttaaaactctaaccaacaatttatttggatgaattggcattttttcaaggagagagtgaattttgggaaattttgacaattcgattgaaaaaactactaaaattcttgacaaatttctgaccctaatcccaatattcaaaccctctcccccggcttttccattcaaaacttttttggattttttttttgaaatcctctttttttacaaatttttctaaatggattatgtgtatgtatttgcattattgcccgacaaatgcgattttccggggacgggaaagaccaagaatttcctgacgggaaattgttgccatgccaaacattggtgtaatgccgtatatattttacacatgtgctcacgcctcccccaatttgttgcgcagcatttcgagcaaagtcggcagcggttttccgcgccgtgaggacgcgtcggtgcgcggtgttgcggcggacgcgcaggaccgccaacagtacgccaaccatccgtggaatttgcacaatttgccgaaggtgcgcgagagtgtgctgtgccacatgaccaccgacatctccggcatgatcatcccatgggtgtacattggcatgctgttctccaccttttgttggcacgtcgaggaccactggtctgtgtctgctgtttggtggctttgtggccaaaaaattgtggcatttttgggatttagaatccgaatatgccctcgaattccttattgttttacggcaaaataatttgtctacgccgaattgaaacagttcaaaatgctccaaaaattttagatacagcgaatttctaactgtcccaaaaaattatagaattttcgggattccgaatccgggtacgccccctgattctaattataagactgtgtttttgggcatgggcatagttaacccgcatttctacgccgaattgaagcaattgaaaatgctcgagattttctggattttttttttcatacctttgccaacaatttttattgccaaaaattctatgtctgtttggtggaatttaattatccgccttctacattttatgctgtattccatcaactacaaccattggggggagcgcaaaatttggtacggagtgccgggcgaagaggccgaactgttcgccaaagttgttaaaggtgtgccggaattttccatggcattttaatgataattttcttcccctacagaatcggcacccgaattgtttatggagaataaggatttgctccatcaaatgatcactcacatgtatgattgattgttcatttttgattccatttttgcattattnattttttgacagaaatccgcaatttctgatcgacc

SEQ ID NO: 78641 - DNA, 170 bp, Heterodera glycines
acatcgcaccgccgttccgcgcccgggacgaggccgaattgttgctgctgcccttcttccactgtttcggtttcactcagctgaacatggctttgctgaacgggtccaccggcgttgtgctcagcaaattcgagcagaattccttttgccgagtggtggagcagtacagg

SEQ ID NO: 78642 - DNA, 748 bp, Heterodera glycines
atgcgcttcaaatgcaaaggcggccttttgctgctcacttttctcgtgggctttgccggcggcgatttggcccacaacccaatttataagccaggtaaaaaacgaaatgaacagcgaagagacaaacatttgctttttattcgcttccatttttgtttccgatttattttttcagataaaaatgacgcggttgtttttcatggacaaatttgggaggaaaacgaagtgaaagagtaccaaatggaggcggaagtgttggacgagcaacagccgataaaagaacctaaaataatttgggcgacggataaattgggcgacagacactttcggatgacttttaaattcgccggagggacgggcaaaaggcaaattgacaagctaaagttggaactgttcacaaggtaaagccaagggaaggcaaaagagtgccatggaaatttactgtttcagcagaacagtgacatcgttcagagaaaagaatggccgagttgaaaaggtgaaaaagaaaaagggagacactgaaaaatgagagtacggtaggagaagggacagacaaaccaaaggggtacggtggaggaggggaacggagagagagagagagagagatgggggaacaacggaaggatacggtaggaagatgagaaggggaccggcgggcgaccgaaatgggccaattccgtcacggccaattcagccccgtgtctatcatcattggggaggggggctaaaattgtaaaaaatcgaataa

SEQ ID NO: 78643 - DNA, 534 bp, Heterodera glycines
cgggtgagtgatcagtatctggctggttgtgggtgatcagaccgtaattcgttggtgtgctgatcataggtgacatcgtgttggtggacaagtacggcttcatcactgtggtggaccgactaaaagagctgatcaaagtgaacggattgcaagtgagcaaccactaatcagctgatcacctcacttttgcttctgcttatggtcgctccttctgagttggaggatttgcttctctcccaccccaaattgcaagactgtgccgtcattggcgtgccggacaaagtctccggcgaattgccacgggcatttgtcgtgccaaagaatggggcgaaagtgaacgaattggaaattcagcaatttgtcaaaggttgcggaattacaagctgatcaaaaagacgaacattagccaattcagaaagaatggcgtattataagcagctgaaaggcggtgttgaatttgtggcggaagtgccgaaaagcccagcggggaaaattctaaggagaattttgagagaaaaaatgacaaaaggaaac

SEQ ID NO: 78644 - DNA, 1845 bp, Heterodera glycines
atgtaccgggacccaattgggaagcgaaatgccaagaaaaacaatgccgccgtctcctcctcctcttcagcaccaattgagcggaagagaaaaagagttgtcgctgctgctgctcccgccattcccactactggtttgtgtgacggccaattttcatttaaattttacaccaattttttttttttgatggactaagcgcttttgcctgtgttgcctcctcctcctctgttcccacttcgtcgccgttgggcacagttcccaccaccaccaccaccactgccgcttcaccaccaaatgctgagtgagtgagtttggtttggaaaacgatggacccactaggcacagaggcaaagttttctggattaggaatcgggaattggccccgatagtcgagaccaagacttccaaaaaattgctaaaatgcaaaaacataaaaattaatgggaaattggcagttttcgtctcggctgcatccccaaaatagaaagttctttgtaacaaaattctatgaacaaatttttttcgaaaacttttgtggtcacttactaagatttttcaaaaaatcgctgaaacttctcgaaattttttctcttagaagataaaaaagtttctaattgtaagatttttttcttgaaaaaaaattcccggacgaaacgatgcgatgggcgggaactgatactggggagggggggggggggtgaacgtagtgcatcctcctccatcacactctcatttttttcgtccattcccccaacaaattatgcacctaacaataaacataaactcctcaccgcaggggttgttcgtttttttcaaaaaaaaattcaaaaatattcgaaaattcagtgtcctctataaataatttttatcttttatgaaatgtttcccctacacttctttgtttcctccattccagcttggcttcttccgtctctgaacttcgccgaatcggtggcattggcattagcagtgcgactggtgcaatgcaaccaacaccacccgcattgtccagctcggcattctttccggatggcagcgggacagtgccgacaaccacaacaacgacggcggcgccgacggccccgacactgcctgccggggtgagtgatgccgaaacgggtcgtcacacatccaccgattttaggatgccgaaatggctgccacaatttatgatgtaaataaattttttccttatttgaccgaccaaatccaataaaaaaaaaagttggtatcatttttcttttaagaaattcattttttgccgtcaaaggcatttttaaaatttaattgggagaataatcaattgaactaacccaatatcgctggtatttcggtttcaatttttccaatcattttggcatcggtaccaaaaaacagtaaatttacacaatcgccaaaaaattttgcccttaaactctaatattttttttgattggactgactcttaacatattcagttgctccatttcgcactttctccgtccgttcgtccgtcttcaactcttcagcaacagtccctcgccaccaccgccggtccttccgtcgatgtaaaatacgagttttaaatattttttttaatttcattttccctaatttttagacaccggccgccgcaattgcgctgctgccctgtgcccttccgtccccctctgagtcgccctccgtgctgcagcggctcgtggacggataccgcaattttcagtcgtcccaggtgaattcgaaaaaaatctgggtaatttctgataatgagttggttttttgaaaatgattattttcacaagtgtagtgtgattaaacttttttataatttttgagaaaatttaaagattttctttttctaataaa

SEQ ID NO: 78645 - DNA, 401 bp, Heterodera glycines
  unsure (1)..(401): unsure at all n locations
atgggcataaaatatggacataaatgccaaaatatggacaaatatggaaatatggatataaatcgcaaaatatggaaaaatatggaaaatatgagtatagaaatacggtaggggtcaactccgtctcagcaatgttcaaaaagctataacttttttctttgttggccaaacttcacaatcatggtatcattcgaaagccctagatgtttagaagatatttataagctatttctcagtgattaatcagctctcaaaaaagttgtcagttgaaaaccgcaaaaaaggcagaattttcaaagttttttatttctatctttttttatagttcgaaattttctgtaatttttagtaggactaatagagcatgtgaagagctttcgaatgatatncagattgtttga

SEQ ID NO: 78646 - DNA, 1870 bp, Heterodera glycines
atgttttgtggttctgttagtaaaggagtgttctgttttggtaatttttcgtttggttaccaaaataggaaaaggtgatcttttcctatttgaaaaattataaggtcttttgggttgaggtgagtagtatttttgataattttaaaggctgttatgatatcaagatattttctcctggtttcaagcttggaaagttttagaaattttagcctttcgctgtatgagatgtaggggagacagcattttctgaaaacattttttgtaaagtttttctgaaatttttccaggcggtttatttcttttttggtttgaggattccaaatttcggttgcgtattctaaaaggggtcgaatataacttttataaactgtaatccaagtcttggttgacttggttttaattttttttaaagaattctgcttttgagataagctttttggagaattattgaaacatgttcgttgaatttgagtttgttgtcgattaaaatacctagatcacgaataatttttgattcaggaaaagttgaatttttaattgtgtacggtatttttttgttatttttacctagatatgagacggaagatttttttactgaaaaatttaagccacatgtttcaattaaagactgaaattagagctgtttctaaaactttacgttgggattcatttgaatagcaatgataaatttttgtatcatctgcaaaaagtttaattgagatttcttttggaatttcttcaggcaaaagctaaagggattttaaaaatgcaaaaaaaaaagaatgaaatttgcccgggctagtctaaatgctaaaggggctgactgcaccgaaaattgacaaatttgacaatttgtaggagagagcgagagagagagaataagaaaagagagtgaaggaagccaaaaataaccaaaaaaagtcctggtagcaaacgaataaggtagactaatttataaaaatatttgaacgattgagaagcaaaaaaaagagagagagaaaaaagaagtgagacagaaaaaaatagaacaattttttttttgaggagagcaaaaaggcctgggctgataaccaatcaaaggggcactattttagctaattaaaaaaagagggaccaataaaaaatgaaaattaggccctatcattttgcttacagtatgagttacagtttttacaagttccaaagttcattttatctctttgttttctctcgtttttcacgccataagaatattcacgtaatcacgtgccgccgcattttttcattgggcaagatcattcactttacacatttttgcggcgcctgagaattgttaattgctcttgtcaggcggagtttaaatgaagatggagcagataagcccattcctggaaggcgttcgcatccattcgattacccgctgtcattcattaattttttttctctctcaatcaatgcataatgggattaccaaataatttttttttagcaaaataaaacaaaatcttattataactgaacgacttcgaatgtctacatcagggggctcgtcaaatgagttcccctttggtacatcccaagccttcgggcaggaaacaaagatgtttttgagtggaaaggaggatgagtcctcgatttcggctattgataggaaactttggcaaggaaagaccacgataaaaatctctgatttagaaaaagctcaaaatgatatggggaaattagaagatggagtgaacagagcttttcgctacatgaatcgttctttgaaccaaaaagtcaacaatgcctatacaactcaacaaattcaaacactatgtcggccgagaaatctcacaatggccttattcgaccgttttggcttacaattagcattagcctaataagagaa

SEQ ID NO: 78647 - DNA, 1101 bp, Heterodera glycines
atggtcggaaatggaaatgaattagtggaaacagaggatgacgaaaattctgttaatttcatgaacttgtttgagaatttggaactgacggattctgaaaaattgcctagtctaatggaaattgagaaaatatttacggacaccacaccaacgccagctgatctgccaccaattgaaagctcagttatggggtttgtgttcatctcacaccccatactgtgggcactggtacaaccggacattttgggcgaacaaaatgagctattggaccggaaaaatttaagcttagaatcagatcaatttgtcttccaaagtacaccaagttatgtgacgacaattacattggaccctaacaataactggccacatttcacacaaatttcgttgaattggaacaaacaatctctattaggaactcggctcaaaacaattgatttgaagcaaatgacttatcctccaaaactgggaccatcagtgagtcaaattgtcccttcgagctgctgtggaataattagggaagtgatccaaaataaaatcacctcagaaattatggccattgatgtctttttgtatggggaagaaagtaatcagcgtttcttcccccaccaaatcgattcaagtgttaatttgatggaattagaaggcacccgggtccaaactacgggatttcgagccaagacttcagaaaatgaatggaccaacttcgggtgatggaattcgcgattggtgggctgagcagatctatgtcgggaccagggacgtatccaggatttgggcttggggggggggtaccgatccgaaaagtcaattcttaggggtgtatttttgaaaattcttcgcccgattcttaggggtgtatttttgaaaaactttcgtttttttttttgctcataccagcgacgctgggaaaataggcagacagtcagacagtgcattatttccttcttttcttccgcatagccacgagagaaaggaagaaatagtgcactgtctgactgtctgtctacgtggggctgcggcgggtggaagggtagacagtaaacagccgtgtgctcgctgtgcagcagcattgtgtgtgggaaaagggaagaagtgagaaaa

SEQ ID NO: 78648 - DNA, 429 bp, Heterodera glycines
atgcaaaaacctactccttctaaccgccccaattcctctgtctccaaaacccttgcctgcgggcttgaaaaaattgtgaatttgagtggaaatgagccactctcggtgccggtgctggcggatcggagtgatccgctgggactcaagtcggtccaacccgacacggtgccaatggaaagtgccgagggcaccaaggaagtggaaataatggaagtggatgaaatgagtggagaaaaagggaaaaagggtgaaatgggtaaagaaaaggtgaaaagtggtggaatggaagaggaagaagaaagtgagggcagtgaaagtgaactgctaggagaaggtggatttgacaatttgcaattgaaccccagcctgagggcgggaaataaagcagttgaaaaggaagataaggggaaaccctatctggtcgcccaa

SEQ ID NO: 78649 - DNA, 482 bp, Heterodera glycines
atgtcaccgatatggccaaatttgtcgtcaaaaatggcacaagcattaataaagttagaaaattgaatttgttcattttctattaaaattaatgctctttaataacttaattattattttttactttccacattacgattaaactgattttttttttttttttactacgcatactctatcattccaacaaatcttattaagaactgaaccaaactcgaaaattttgcataaatttgatgccgaaaatgagagtattctgcagatttttcgaaagtaaaatttaagcaattttttcagaaatttctaaaagaaattttccaggcttttgggttttttgcattttttaaaatattaattgggacggtatgcttagcaaaaaaaaaactcggttttattaatctatttgaatgtaaaaagcattgcttaatttattaaacaatatatataattataatgaaaaaaaatgatttctaatggcctaa

SEQ ID NO: 78650 - DNA, 1235 bp, Heterodera glycines
atgcgatttttgctaattatccctgctcaattatttcaggtacgcttcatttctgagctgaaaaagttgcaggagccgtcgctgatgaacagtgtgttagagaattttaccggtaattgtccaactacagtaatcacacagtgttttttaaggtcatgaaatgtttgcgaaattgagcgaattttctgtttacaaaaaagttcttgctgaaaatcaaatctttgttttacctctctttgaaatttacttaatatgacattgtttttatttttatttcaactaaaggtttttcaattttctgttgttctaaatttctcatttttaattaatattttctatattttataaatatttaatttaaattgttttaaaaaaatttttaattaaaaaaaaattcagttcttcaaattgtcactgataaacaaagcaacgacacattgatggtcatcgcgttcatgttcggaatacgagaggagtaagcttgtttaaaagtttgatttcaaaaaaatttacagtatcgttttagtcaactcaattacagtttccttacggtgtcactaaaacatgggtgggggaacgtattccagcttttttagcgcaagaatttcatgattttttctccagaaatttttttattgtaaaatatgtaaaattctcgggtctcaaaaattttaaaaattagaaatatttgcactttttaattaagtgctaacattcgcgacgacggtgaaggagacgatgaaatattcaccaacatttatcggataacagaatagggcttctcactgatcaccacattcactgaccagatcagactggacaaccaaaacaggagaaggaggagcaattgggctgctgttggtcagtaaattttttcgcctgtggtaataattgtgtcgagactgacgagattcgtcctccaaaaaacaactgactaaacaattaactactctgcttgctcatcgagattgtcgaacccaacacaaaattgggacacattgtcaaaatttacatgatattttttctttcgtgcctgtgtttttacattgaagaagaccggatagggtagatcagtagcagcatccttattttgggatttgcgactttaaagtcatttgcccaacatttggcggcacagattttgatccgccattttcggtttaattcgccgtttccatccaatttcaaatgtttccattaagccacccatatacatagaaacgatgttggcatta

SEQ ID NO: 78651 - DNA, 486 bp, Heterodera glycines
atgccgacatttgcctcgcgagaggctcttcaaccaaccaagacaactcgaaattgcgatcaccggggacttgcagttgtgcacatgttatggtatgaaaataattggtattgtaactttaccggagggtcgtggaaccggggccacccgccgccggtggtgtgggtcaatcagttccttccttccgtctgttctgattgtaagccaaattttttggtccataaaatttggcattattatattggtgaattgttctttttaataactttttttttagttttcatttttaatggctctaattgagagctttaaatttgtgaaaattggccaatttggaaaaaagtttgacccgaaaaaattggctcacaatcagacggaaacgacccgctttgccacctgtctggcttaaaaattgtcaatccattactgtaccaaattaattgaattaaaaaactcactaatggaaacaaccctcactaaaataaa

SEQ ID NO: 78652 - DNA, 250 bp, Heterodera glycines
atggtatgtacttattcaaatttcttcattaggttttatttccaagaatatttaattcattcatttcttttccttaataactcaaaactaaggcttttttgttttgtggtataaattaaattaaatcgaatattaaattaaaattttttaaatattttctcagttttattcaactttttttcttgttcatgtgaaaatattgagatataaattgtgtgattaattttctttaatattttatccgtcaaaa

SEQ ID NO: 78653 - DNA, 1511 bp, Heterodera glycines
  unsure (1)..(1511): unsure at all n locations
atgaaatcaaattacattaaaggattttatacatggattataattttatataaattaataaagccttcattttttgctgacgtaagttgcttttgccacttttgcaaatgtcacatgatgttccatgcaaaattggcagttctttctttttacaaatatcattttgaaaataaaattattatttttattatttttctttaaaaatgattcaaaatgcttttattttttcttttatttgctttttcaacaaaatattttttgccgaaaatgtcaaaccggccatcaatctgatcaaatattcggctatcatttctccgccgggtttttataaaattgcaatttgggacagatttgaaaagaaaaaagcacaacaatgcaaaaatctttttgaagaagttgaacaagaagtaagaaattaaaagcatttttataaatattcaattttggctaactttgccctgaaactttgagagtgatttttcattatgccaatattctgccaattcgggaatagtaattcataaattaaatattaaatattttaaatgaaaaattctttcagtaattttcaaagtttcaatttcaaaaaacgattattttcaaaatattttctttttttcatgggccaattgtccgaattttgaaattttgtgctttttctcccaatttaattgtctaaatttttacttttaatagttcaatggtaaatttcatgctgttcgtcgcttcaagtattatgatggcattgaattagaatattttgctgaatgttttgaaaactttttcattgctcagaccaatgaagacggtgaatttgatgtgaatttaaggggtaacattggagaaacaatctttttccaaatatttccactctataataataaggtaattaattagaaaatattaaatgtaattaaaatatgacattgatactaatattcaaaacatatttatagctaaacgaagtgaaatttgcatattttgttaatttctttaaattaaattttcattaattccttcttcaggctccaatccgttccgattctttcccctccacttttctccaaagcatacacagaaaacccgattggaggttatgtgtgcattttgagcaacatttttattttctaattcataaggaaaaaaagactaaaatcggcacaatgttggacaattggcagagaagtgccaatgccaacccatcggatgaagaagcctttttcctcaaggcatgtttacaggaaatagcgtcaagaattgttgacacattcaccaagggcatcaagctgaccaataatgaaatcagcatccagcgcaaatattggagtgcatttcaacagatgaaagggcatggaattttggccggaaaattggcacaaattgatggaatgccaaagttaatgaaagatttatgcagatttacggttgctgattatgaggcgaactccgccgatggattcgaatttaatgacaaattatttgccttggctttcttttgtgncgaattataa

SEQ ID NO: 78654 - DNA, 861 bp, Heterodera glycines
atgataaatattgcacaattgactaatgctgatgatgttacgcttttggtataaaatgcttttcaaaaggttttcactaaaacattggtattttagaagggtcgctacagagttcggctgattgattcggaattggtcccgctttgttatgaacattacattgcgtggcaaagtgatcgtcattgatttgccggaggctgaagtttgttggatgtgttaccctacacattgctttcatttttatgagacttcccaatgattggtggtggtcattcagggggacccccaccccgggaaacaaaattttcattggactcacaaaactcaaataggcacataaaatgcaataacaacaacagcaatcatggaaatacttttgccttcatgaattttgggaaaaatgtgaccgagagttggaaatgtggccggggtgggagtaccgggacgcaaagacaccgttttaccgaccgagttttttagccccctccccctctccaaatcccgtttaaattccaccgtgatcacgcttcaattgaatttgtataattttcccatcttagggatatgaagcgacggctgccaaagcgtacgaacgctttcgtgccatggcaatgacagccaaagtggaggacgacgaattgtgcgatgaaaacaaggagaatttgccgtccgattgcacgctcgttggtgacccgctcaaagtgacatttttgtccatcgaaaagttggacgcggtggctgcagcgaacaaatcacgcttcgattctggccatgaactcattgaagttggcggcacttcggccattgacttccacttgatcccaccgtcagaagcacacggccttatcaatgagtaataaa

SEQ ID NO: 78655 - DNA, 1328 bp, Heterodera glycines
atggagccaagaagtcgcagtgttcgtccttatcttattcaatccaatgaagtcgacaaattcttgagaaagcaacgtcttccttcgccatatcgtcgacctcttgcatatactcttgagaaatttccaaaaaacgactctgatgataataaaaatcccaggacgaatacacatttttcaccaccattatcgacgaggattaatggatctaatggcaccgcaaactctgttaattgttactcggactcaaattctgtccagccttcgttgtctaacaaatttttggagaacagagtgggaaaatatttttgttataaaatttaaaattaatttagagaagaacatctgggagatctccatcagtgccaccaagaaattattcctcgtcatattctggaaaaattgatgggtacgacaccaaatcgacttatggacaacggttaaaaggtcgatccattactattaaaatatcattcaaaagataaccattccatttttgtttttttctagaaggtttttttgattaccagcaacagaacggaggccgagttattccggtacagattaatgctgacgaggcgagaaagaacaagacatcggccttaaaaatattacgttctttctttaagaagcatcttggcttctctaatcccacacataaaagggattattccgtcgagccgattgacagcaaacgcttttcctcaacgctaaatgttcgttttgttaagtgcagtttctgctgtgaaatttgcgttgcgtttgaagtgccttttattgcctttaggttaatggtggactcccttcctcgtcttcatcgtcagatccttatgagcgtcgtcgttctaattcaatcatttcgtccgctttcccacggcgtcagtcgttcagttaccgaaatggagggacaactgattatgcaccaataccagccacaaataacatgccgtcttctcaatttaatcacgacaggcgcaaaaacggggtgacaagtactgattgcgagtcggatgaaccaccacagttcgctgaactgatgcaacgtttctcggatatttcgacttccgacatacgtccaaggcttccgtctgcatcaatgtatcaatttcctaccaagattggctcaacgtcgacgaaattttccacgtcgacgcttcctccaacgccttcgcctttttctcgaccaatgcataattcgttaaagcccttacaaccacggccaacgacgagtgatgcacagcattcattcagagaaaaatccgctgctaatgatggggagttaatgctgaaacaacattctcggagttcacaagttccttgtcttaaag

SEQ ID NO: 78656 - DNA, 131 bp, Heterodera glycines
ggtcccggttttgaccagttttgaccgggaccgggaaattcccggcttttttcccggttttcccagccaaaaagtcccggttttcctcccaaaaagtcccggtcccggtcttgcccaaatttcccggtccc

SEQ ID NO: 78657 - DNA, 427 bp, Heterodera glycines
atgacgtaagaaacatcatattggtattagataatgaatcgatttaattacatttgtaatttaaatagaaaaaaagattatttgaaaaaatggtttaaattatttacctatttgaaaaaatggtcaaattaaaaagcgcgtaaaactttatataaaaataaaaacaattttcagtattttcttaacgatttttgcaggatcacaaccggtgcgaattggtccgagggccgggaggggtggcagggatgtaaagtgtggtgttctccttataagggaaatctagggcttgagtgtgcgttagaattgatcgaatcgaaaaacaaatggtattctgcacatctacagactctgctctttaaaatgatataggatagattagggtccgggttcgggaagtagtcgaaaaagggatatcaggcttattaaa

SEQ ID NO: 78658 - DNA, 2407 bp, Heterodera glycines
ttgtacctctttgatcactgttgtacctcttttaatcacagttgtacctcttctgatctctgttgtacctcttctaatcacttttgtacctcttttaatcacagttgtacctcttcatcacatttgtacctcttcaatctctgttgcacctcttctaatcactgttgtacctcttttatcacttttgtacctcttcatcacatttgtacctcttctattcactgttgcacctcttctaatcacttttctatcactttttcactgttgtacctcttctattcactgttgtacctcttcaaatcactgttgtgtctttcccttccgtggttgcacttgtacctcttctcatctctgttgtacctcttctcatctctgttgtacctcttctaatcacttttgtatctgttctaaaatttaaaaaacggcgcgaagcggccgttcgaggccgcaaattggcctaaaaaggccacaaaaagggtgcgaatcgcccgtctgagtccatcaaaatttaataacgggcgcgaagcgcccgtccgactcaacacaatttaaaaaacggccgcgaagcggccgaaaagcacaacaaaaattagaaacgggcgcgaagcgcccgtctgaggccgcgaagcagcctaaaaatcaccgaatttaaaaaacgggtgcgtagcgcccgtctgaggccgcgaagcggcctaaaaatcgctgataattttttaaaaattccaaatcttttcacaacccgatagctaatctaggagcgaagctcaagaagcgcgaagcgctttatcccagctaaatagccgacggttcacgcacccgctagtttttcccttatagagtgaaccaggggcccagtgaaagcgccggggccgctttcaacaccggggccagcatacatataaagcattcctaatggtggtgattttcccgaattcgcaaaaaaaaattcacttagattctaagcctgtacgaaaatgccaagcaccgatcttgagtccggcattatagatcttgccaatttgcacgtaggtgatctctacacatataaacaatatttcctagcgtgttagttttcaaaaattcgctcaaaaacctccctgaatccctgcatagcccactgagccggattcagaaaaacagggcagaaaacatgcacatttttaataagcctgatatccctttttcgactacttcccgaacccggaccctaatctatcctatatcattttaaagagcagagtctgtagatgtgcagaataccatttgtttttcgattcgatcaattctaacgcacactcaagccctagatttcccttataaggagaacaccacactttacatccctgccacccctcccggccctcggaccaattcgcaccggttgtgatcctgcaaaaatcgttaagaaaatactgaaaattgtttttatttttatataaagttttacgcgctttttaatttgaccattttttcaaataggtaaataatttaaaccattttttcaaataatctttttttctatttaaattacaaatgtaattaaatcgattcattatctaataccaatatgatgtttcttacgtcatattatattaataaaaaatttgtatgaataatataatttatgaaaaatgaaaaatgattattttagtattatacaaaacgcgaattataggattacaatttttcttgataatttgcattaaatcattttcataaatttatttcccattaattttttttatagaaaaatgaaaacgaaaattttctatatttttttgtcattgcttttgctattctctctgatacaacgaaatgagtcgacaaacccaaagcatttgaaatttgttggaagaaatgggaaatcagtcgaaaatgggcatgaacagaaagaacaaagtcaaaaaattggtaattaattatgggtaattagcgggtggaaggaattcaaattttattaaaaacccacaagaaaaatgaataaatttaataaaaaaaatttataaaaagttaaaacattgttcctatatttgtgttcaaaaaagaaaagattattttattattcaccggagttcactcaaagtttaataatcgttttaaattttaaattatgcaaaaaagaaaatttaaaaaccaattattttaatgccttttcagaggatccatcaaattctgatgacgccatcgttgatgctaatgagcaagttgaggcgaataatgaagaaatgaaaaagaacagaaaaggaaaggtagcgaaatttgtttaaaatatttacattttaaattttaatttaggcaattattgaaatgataatgtcgcctaaattttcgaaaattgttggaagaaaaggaaaacctatcgaaccaccacaaacaaaagatgttgatgaacaaagagttaaaaagg

SEQ ID NO: 78659 - DNA, 1942 bp, Heterodera glycines
atgatcagattatgcttggcccaatgtggcctgattaccattgtggctttcctgatttcttggaccctttgccgaacaccacagattggtgggtggacgaatttgtgcgtttccacaatgaagtaagttttttaattaactaattaaatgttttttaattttacatttttatcattttattccaacattatttaacattcattaaattttctgaaaaataaattaaggtacaatttgatggaatttggattgatatgaacgaaccgtaaggaaatcaaattaaaatgaagaattcaaaaataaatttgttttaattgaaaaaagtacataaatttattacatagaaattttttaaattttgcatatttttcaagctccgtctttggcacaaatgagaaacatccatggtactttgacacgcaacctgcatttgccggcaagccaccaattgcgccgctgatgtgccaagagccgaacaacaaattggactacccaccgtatcgcacatggaatgcatacaaatgggactcgaagaatacggtaagtagagaatttgcctgacttgaaccaaaatatgatccacctttgggttgcctcaaaaattttggtcctttgatggagatttttcttgattttttttgagtctaactcaattaatttgtttttcttatctcatagcaaaaatttagtttggacactcaaaagatggcaatattttattttattttttaatctcgttagtgagctctaatggtgtaatttagaaaatgcaaaattttatttcattattaattttatttatttatacaatttgcttttatgaattttttaaggatttttaatttaacttggcatattttgtattcaccctaaaataatgtcaataagttttagattagaagctttttttaaaaaaactcaatgttgttaataaattttttagaagagaacgctgaacgaaaaaacattatgcatgattggaaaaagtgggcgccgcaactggacaatgtacgatacggtaaatgatcaaattaataattaatattttaatttttaattatttcttaattggtccagcattctctctacggctggtcagaaatggtcgccacacaaaaagcgttgcgcgtctcaactggcaaacgcggctcactcacttctcgttcaacatttccagtatgcactggaaaataattaaacacattaatataggatatattttgcagatatgtctttttgctaatttcctatttgtaaaacgcacgaaaaacaatttttttaaatttcaaatgctagcttttttgttcttgcattttgaaattttggtcactaatgcccggtctggattttctgaaagtttcttaatataacgtataaaatgaaaatacccctaaaaattttgcaaaaaatactctcttaaaagtgaccttgaaaaaaatatatatttttttaaacacacccgttaaaaactggaaatttttcacaaaaattcacctcctaaattttttctctcaatttagaattttatgaaattgatttaatttcttccgtagttttttttatcatcattgccattttcagaaaatatttgaattaacaaacagcaaatattttaatttctaagttcaaagctagcgcaaattttaacaaagatttttgaaaatatattacaaatttctatattataaatatgcttttaaattaacaataaagataaattaattcctcaattttcagtcatctggccattacggtggccattggcttggtgacaaccaatcccgatggcctgatctccggctgtcaataatcggggtcatggagttcaacatgtttggcatcccacaagttggcgccgatgtttgcgggttcatcggagactcaaatgaagtgagaaaaataggataaagcttatgttatatatattttttaatgattttaa

SEQ ID NO: 78660 - DNA, 921 bp, Heterodera glycines
atggaagcggaagacgacgacagcgatgacaacgatgcagaaaacaactacatgcttggctatgatgaggagggagagaaaccacgctccgtcaccacatatgccttcgcccacgcaggtaaacaaattttaacaaaaataaaaggaaaatttatcgatttttaagggtcacgttacgatcacgtgctgatctacggcgagatgctgcgcatgggtgtgcgtcccgaactcgtgcgccatgggaatcagctgctggagatgaaggcccgcaagaggggagccatcacaacgacaatcttccgggacaggtaaactgtgttaaaataatataaaataatcgattatttttcagttacaaactgattcccatcaagctggcttcctttgtgaagacgttcggcttggaaatagagggagtggacaacaagaaatacttcccgcacaagttcaacaaagtaaaaaaatcaataaataaaaccaaaaacaatcaataattaaggctgcaaattatggtgttgtgctggacactcttccgccgcttgaggactactaccccggcggacacttccctgaggagcgaaagaagctgaagcagtggtacgaggagaaccgcaacacgccgtttgacctgcgcgaagtcatcgcggactactgtaaagcaggtaaaaatcggtaaaatcttgaaaaatatgcaaattttcttcagatgtccaaattctcgcccatggaatggtcaaaatgcggcagttgttcgccgctgcaactagccaggagctgaccgactccatcaccatcccgtccgcctgcatgaagttcttcgtggtcttgtcgcacgtcggcaaagagagggtggccatcatcccccaccttggctacgagaagcgtgggaagcagagtgctatcgcccgaaaatacctctag

SEQ ID NO: 78661 - DNA, 881 bp, Heterodera glycines
atgaattttaaattttccttcgcaggattctcaacgaccatcccgcacatcgagctcgaggcggcgctgcgatccggctacagagttacccatgtctaccgtgcgtacgtctggccgctgtattgtgaatggagtaacggcctcttccactcctacctcaacaaattcctgcgcatcaaatttgagggtaagtagtaaattgatcaatcaatcaaccaatcaataatatttagccagcggtttccctgctgactgtgccgctgatgagattgacgaggaggatagggagcgcagaaaggagcaatacatcaacaacccctggaagggctgtacggtgcggctcgacgccaacaacatcaagccaaatcccggcatgcggtacctttcgaagctgtgcctcaactcgctgtggggccgctttgccttgcgcaatcggattacgaagacggaaatcatcgattgccacgccgaccttgcgaagcttctgaacgacgtcaaaaccgacatcagcagcatcgaccaactgacggagaaattctggatggtgtgctacaaggcgaaagatgagcacgtggtggagcacgacaccagcaacgtcgccattgccctatggactacggcagcggcccatgtgcacttgctcaactcactgcaattggtctacaggcaggaaaatctagttcagcgctacgacacgcgcattttatacatggtaagagtgtgacaataaaatattcataataaaatattcttttttcaggacaccgacagtatcttccatgacttcaagactgcactgggggacccgctgaagggaggcaaccaacttggggagctcgcggacgagtaccccagccataccatcgtcgagtttatctgtg

SEQ ID NO: 78662 - DNA, 49 bp, Heterodera glycines
atggcactggcattttctgctttgtatgcttcaattactaaaaaagaag

SEQ ID NO: 78663 - DNA, 1484 bp, Heterodera glycines
atgccaactgttcgcgaaatacttgagagtctgcaaaagcgagtaaaaaagcctcgcattgctacaaatgaagacagcgtactgaatgttgagaggacagacgcagaacaacaaattgaaggcacttcaaccaggaacaatttgggcgtcgcttcgagtgatgacgaagaaaattgtgagcccgttcaattcaaacgtgaagaaacaatccggggagctctttgtctttggtatcaaggtgttaatagtttttttttgatttttatttctttattttcaggctttcgatttatcaaaaacagaaaagatggtagctggttcaggtgcgaacagcgcaattgtccagcgacagccaaattggacgacaacgatttgatgacaggcattttgggcgcaaaaggacatcaccatggttgcgcaccatcgcgttatgatgcagagacgaaacgaaatcagatgaagcgcctgatcaaggaggagccaaaaacgaaaccatgtcaaatccgcgctcaaattcggactgacatcgacgatgaagtcttcgaattgctcggcaccaatgaagcgctcgaccaaatggcgaacaggtagacaaaattcagagaaaataatgatgcaatatttagaacaaagaacaaattcgttaggtggtgtcaactgtgccgacccactgaacatacaaattccgcctggtcttttgataaagaatgatgagtctgtcctcatttatgacagccgtgaagtgaggactggacaatctgatggttgacaacgaagcaccgattcaataggacatccgttcactaaacattcaagcgcttctgacaacgtaccgaggagttacattcaaaaatgggacgaatggctgacactgccggtgtgctactcggaactgagccgtgacgccattttgcacttcaccgtttgggaggtgggcaacacaattgagccggtgagtgaaatgtcttatatttaaaacattcttccgtccgctattttcccaaaaaataactgcatcggacaatgagacaatcttttattctgattctttcgattcataccatctttatagaactagttttttagactttactccagcataaatggcataaatttatgaagacaacaaatttaaaattcatataaacacacaaattctgtgtcgagtaacatatgaatacgaaaaaacctcatttatggatacgtctcggattgcgaatgatttgcattttcaggtgctggtcgcccaatgtgccaagcctttgttctctaaacatgccattttccgcaacggtctcatcgatttgactttggactttgttgccaatgcggcgacaacggacaaacagcagagacggcccgccgtacaactccaagcagcacacagcaaaagtccgtcgaagggaatggcgacggaaaacgcccggccggcggaacagtcggtagaagccgacgacagcacgccgctgcatcagcacaactaa

SEQ ID NO: 78664 - DNA, 624 bp, Heterodera glycines
atgccaaaagaggaagcttcagcggcaccgttcagaaatgctttccaaccgttgctgatgggaaaagttcggatgtgccaagaaggggccaaagaagaagaggaggaagaagaggagaatgggcacgaagtgccaacatcggaaggtaaatttgaaattgtacaggaaaggaagagggcgaaaaggtggatttgattacatataaggggaagggagggggataacgggggaggggggacgaaagaggaaaaggaagtaggaagtctttgaaaagggaaatggctaatgaaaattcaaaaatcaatttcagaatcctctcaatcggaggacgatgggattttggccaaagatggggaacagaaagtggagatgaaagaagaggaagaggagcaagattttggagagagtgagctgaagatggagcaggaacataagcagacgaaggcggagggaaagagagagggcgacgagagagacaaagggaacacaacgccaagagagggtgcgtttgaacaaccataccagtggaagctcgtaattaaaacgaaagtccccccagggcatactgtactatcaaaaagggaaggaaacggcgatgggggcatcagaaaagcaaaggaatga

SEQ ID NO: 78665 - DNA, 3327 bp, Heterodera glycines
atggcgcccgggggcaaaacgtatgctcgacttaaaaatgtgagtaaatgaataaatttttgatttgtatttttcgtaagtaaatgactaaattttgttatgtcgttaacatgtttaggcatcaaagcccatcggctcgtcaagttcatcgtcagaggatgaacttcccagcaggaaaaaaaggccactaccaaccatgaaagcaccaatggtcagtttaagtgtttaaaatttttgaaattttttcaagtccttttccgccagtgaaaaggatggattttaatgagaaaaatttgtaccaaatgaaaaaaattttttttcttaatactttagaacgttgcgaatcgaaccggcctgggcaccgacactgcactggtccaacagccagcaccaaaaaaattgcccattacacgcaaaagcgtgggtttaaaaaattaattaattttatcaaaataataaatatccgtttttttttttaaaataatttcccgttaattttgtaggccaagggaaataccgccgcaccatcctcctcctccgtttccgtccgcaatccaacgcgccgcgctccttcaacccgtaaagctgttgcacaacaaccgcaacatcacaaattggaaaagcgaaaagcggtaaatttgcgctgaaattttttatgtgatttttcattaaaataaaaatgacaataattgtattaattttggattttttttttttgaatcaggcaacaccgcaactggacgacaattgcccgggggaccaccggcacccatcacagaccctgttggagcagcagaacaatgcgttgtaccggctcctcttcgatggcagcaacgagaactacttcacccatttggagcgagcccgtcacctcgtccacacatgcgccgtgtgtgagaagaagtacgagttcgtgttggtgcggttcccggacacaggagtcgagactccatggcatcctgtgttaccaacgcatcgcaacattcgtgatggttggacgttgctagacctagcaatgttggtaagcgaaatttgtttcaatttttgaaattggtcatcggaaaaaaaaaaatatttgaggagcccgacacaatttacgcttttgacgcagcatggcaacaatgtgttgcacctgatgatgcgattggagggaatgaaaatgatgatggtggcgatgatgagaacggcagaggaaacaacagcggaggaagaaacaagaagaagggcggaggaggtggacagaaagacggaggagggagcaaagacggagcaaatggaggaggaagagaagaggaggagcaaaacgacaacaatggaaagaggggagaaagagagagagaagaggaaagaagagaagaggaggaggaggaggagcaaaacggaaacaatgaagagaggggagaaaaaaagagaagggaagaagggagaggaaaagaaggaggagaacaagacagaagagaagatgaggaggacgaaggaagaggcgaagaagaaacaagagagagaggagacgaagaggaaacggaagaagcaagagaaaaattgaagagaggtgaagaaaaaggaggaggagagaaaggaggaggaaaagccaaagaaggacgaagcgaaggaggaggaaaagccaaagaaggacgaggaggaggagtaggcgagaagaaacagccgccgcccgggtcaaaaatggtgggacatttgttattttgtgaaatacgaaaacgcaaatgtgtattggccatcggaggtcaatcctttatgagtattggctaccgaagggccgggtccgtgggagtgttggtcgccggagggccgagtccttgggagtattggctactggagggccgagctcttcggagtattggctgccagtgggccgagctcttgggggttttggctaccggaggaccgaactcttagggatgctggctgttggtgggccgagctcatagaggctttgactgtcgaagggccgaactcttggggattttcacagattctaaggcgtaattttatctggccaatcaaaaatttcaatgttaaaatttagacccactcacagtggcgcagagtgatgcgcattaacaaaaagaaaggagtgaaggatggacgagccaacgcacatccgacaacaattttcaatgttttataattttttcgacaaattttcaatgttttatatattttttttttgtttaccaacaataacaacatttcttatctcccattcaaatctttagggatagtggatcaaaataacaaaagaaaagaaggaaagggggtttgggaggggggtccaaaacagatccacgctcattcattcattattcacatttattaaaaaaatggaaccaacaaatacaacttggatcattgagcaaaattgttcttgcaacaatgatttgcttcagtgcgtccggcccctgtactacaaatcacccgtattgtgtgtgcccattgaatttggcaccaattttgtgcaccatttgacccaattttcaaaacccccgtccctcaatgtcccacttgttgttatgatcttactgattctgctccaggtataaaccccctacaaattatttatgtttgtatgtgcaattaatattttacagttgtgtcaaatcatcctcactttgttctatggttatcgccgtcgtcgccgtcgaccacgtgtccgttttcctaccaatgtaagacccttcacaaattttggcaaaaatttttttcaatttttaaaggacactccgctctcgccattgcgccgctttcctccaccaccgccgccctcaattgcaattcgggcaacaacacagaaagtgtgtttaattttgtttctgtttgaacaatttgtattagcatttaacattttcaacaggatcagcaccacacggatgagcgcaaaaatgaacagttcaaaaagagggaggaaccgaagggggcggaggacggacggcgcaatttgcacaactcatcggtggttaaaaataaaaccattgttatatttctaataaaattaaagaagcccaggacgtttccgttcaacaacaaagcagtgatggatgggttgccaaacaacaagcgcaacaaggacaagccgttatacggtatttgtttttgttgaaaattaaaaaatatcacaatattattattattattcagctttggcaagcatcccggaggaggaggagacaaaaaagaatggacgtgaaaagacggcgctcgtgaaggatgacaaatatggggacaattattttgaggattgctattaccagtccacttgggtctaggcaataatttttcatatgcatttttttttttttgctaaattca

SEQ ID NO: 78666 - DNA, 497 bp, Heterodera glycines
atgtccccatgccgtcgttttaaatctcgcccccagaaaaaaaattccgaatataaatggcttcatattgtgaagcgtcaaaaacatcgccagcagcggcaccaacaaaaccatttcaatgaaatgtgcgtggcatttcagagtatggaaatgtcggaatcggcaagacccctgcctggtggaccaataaatggaccaaagtccttcggtagaacaatttttgatatgcattttcagttcttactgtaatttttaataattttaggatgtgcatttctgaaagaagaaatcgacaaacagatgacgaatctgattttcacaatcacaaaaatcgaagagcgctcaaacggactacccgacccgcaagcggcgcacctttatggaatagtcaaggagcagctcgaaagaactgttcgtcaaattgagaaggactgcttgtgaatcggtattgatgatgggaattattttggtggtgatgggattattttttaaataaa

SEQ ID NO: 78667 - DNA, 384 bp, Heterodera glycines
atggcagaacaatttgtacaacccgaaactgcggaggagcaacaagtgaaagctaagaagccacacgttgatgagcgatttctttggaaaatcacgcggggccaatttgtgcttgcgattcggctgtgctcaggttaatcaaatttttgacgaccaaattaattgacagctttcagaggactggaacaatttatttcacaacaaagacaaggcacgccggctggaagacgggcgagtggcgattggactcgagatgtgtgaagaatgtgccagaatcaattgctgtgtcagtgacatgattgctgatcaaaagaaaaagccaaaaaccaccaaataattcatcaaatttttcgcattatttggataattttgactaccaataaa

SEQ ID NO: 78668 - DNA, 495 bp, Heterodera glycines
  unsure (1)..(495): unsure at all n locations
atggtccttgtcatcgaattttgtgcccaaattctcggctgttccccgaaatcactccgcgacaagctcaatcatcctgaggaccgagtgaaggcactgaaggagctggtcggaaaaaaggttcggacgacataccaggaccggaatggaatgcagaaaacattttttgtcgacggaatatcggaccatggagcggctttgaccccagcatacggcagacttcgacaaccatacaacattaacattgctgcccatttctacgctcggcaccgtatcaagctgcatctcccatacgtgccatgtgttgtggagaaatattctggatgtggcgaagacagatactacccaatggagctactcgaaattgtggacgaggactacaccatcaaagagcgatggcttggcaactgtttaccgaaatcgaggacgacttcattcctctcaancgctgtggtcgagttgacgaagacgaagaaattgacgctggtcgtttga

SEQ ID NO: 78669 - DNA, 1744 bp, Heterodera glycines
atgctgatgccgaacggaaagactgctggggaggtgcgagagcgggatgagaagcggctggaattcatcgaaagccaagtttctcgtgtggacgtgtactgggagtgccaaattgaaagaatgctgcaccgtgacccgtatatgcgcgaaagttttggtgattatgtggatgacgggccactgaacattcgcgaggcgttcatgggtggaagaacaggaccactgaagctgtaccacaaggcgggagagggcgagaaaatctcatactatgacttcacgtccctctacccgtacgtaatgtgagttttgtttcgatcattatttacaattcataattattttaattttcagtttctccaccacttacccaattgaacacccaaaagtgctcatcttgaatgaggatgtggaatggacaactgcacgggacaacccatacaaattgtctctgctcaaggtgtgggtgattccgccacgaaagtgtgatgtgccagtgctgcccgtcaaagtcaacaaacggctctgttttccgttgtgcatgcagtgttgtctagactacccgaagggaggcgttgattttgactaccattgtgaacacgacgaccaacaacgcggatgggtgacaacatgcacatcaattgaattggacgcagcactagaagagggctaccgcgtgaccaaagtgttccgggtgctgaagtacaggcatggcgacgacaaacttttccgcccatacatcgccgagttcatgtcgcagaaaattgaagcctccggatttgacgccagcatcaagggaaatacggagttggagcagcagttcatcacagaatgtgcggagaaattcggaatttcaatcgacaaggacaacatgaaagtcaacaagggcaagcggtcgttggcaaagctgtgtctcaacaacctgtgggggcgcttctctctgcgcaacttcggtctcgcccagacgttgatcaccgacgacccttcagtgttgactgaatacgtggaaaacagctcaatcgacatcatttccattgatgagctggacgaaaaacatcaattgatcagctacgtccagaaaaaggagtgggtggaggagcacgagtgctccaacattggtgagattttaaagaaattttgtttaatttttgggatttttcagtcatctcactctggacaacatcaaaggcccgccttctgctgttgaaagcgatgcagaaggtgatgagaacgcctggatgccgcctcctctacacggacaccgactcgctgattttcgtccacccgatcggcatgaacccgttggagacaggaccacacttgggacaattcaccgatgaataccccaagcatgaaattgtggagtattgtagtggcggagcgaagcaggttaatttaccgtttatttagtgcataataatttactttatcatttcagtatggactcaaactccggcgtaatgggcaggacgaatttgtgctgaagctgaggggcatcacactgaactacgacgtgatgcagaaccaatccctatgctacgacacattcaaagaagaagtgttgcgatatgcccaaaccggagagtatgagccaataaatgtgatgtaccccaactttttgagacccgacattaggggtggcggacacgtcacttcaggccccctccaaaaatgttatcgcccatatgtaggcaaagggatagtgggctctaattataatgtgcttaattttggacacactttgtaa

SEQ ID NO: 78670 - DNA, 414 bp, Heterodera glycines
atgccttttgtcatgggtccatctgagtccggtgcaaagtccaaaatcagtcagtttaatatggccactccggtcgatcagaatgttatccggctaaacgatttaaatgcatttgaaactttgaaatcaaataatttgcacttttatgtcacgatgaataaagccaagggaatggacatattccacggccaaagtcaactcggcaatgtaaaatctgtaatgtttggcgttaaacattcaaagaagtgaatttagtctgaattgcctggcgagactttcggggaaaatgcccatgttaatctgaaaatgatctgtgtgtagagagggcagtttgggtggaccaaccagaagttgcatcatatcgcctccggggacgtattccatgatgaaataacttatgtaagcaaatgggga

SEQ ID NO: 78671 - DNA, 1197 bp, Heterodera glycines
atgggttagtaggcttgcaaatataatctaaccaatcttaagtaaataacgtacaaaattttgatcgagggaatcacccgttttgagttttgatgggtcgatctcacagcactttctctcagcaaaaatctgaaatacaatcagcaatcccattgacgagtaatccaaacggaccaagtcaatgagtggcttcagcgaattgaataaataactttgaccaacaaatttcatcatttcgtacatgactttggaagccaaagattggctgcgaaacagagtattcacatcgctaaatgaaaattgaatgctttaaattaattaggcttggcgtggattacttgcaacttttgacataatccatgcaaattgcacgaaagaattgacgaatttggttggaatggacaaatattttcatcaatggcttagcgaggttttccaggtcgaccttaatcataattatcaaaaacaaagacacaggctaaggcacacaggtaaacattggatgagtgagattaaagagcatgcgtgaggatcaacgttcagagagcggacgagattcaaatagaggggccggtagttgacaaaggggtgcacttcgtccatgtcgtacctgtcgattggattgaatattctttccttgaccgtatcttcccattcccaaatttaaatgcttcgagttttaggatccgttgtttatttttagcctaccaaagtttgagacggacttccccactgtcctgctgattgtttgacgtggacagtgagcttgaggagaagggcaccaaatgcctttgatttggttgctgcttgttttttttattgtataaaagacaatcattgttgttgagctcatttacgccaaatggagaaaacaatggcgcagcggaaggcgtagtcagcggttttaatcgagcgttagccacagttgtgtgtgaaacagtagcgaaggaggaggccgaagaagccgaggccgagccaggcggacagtgccgatggaaagcgggcgatgaattggatgggacaacagaaacgcgacgatggtgggaaaaaccacttgggcaaggttgtttctgcagcgtttgtgcttgtttttgtggaaaaggagacgttggagttgagttcaactctgacgttgtgagttgtttagaaattgatgaacaaaaagcagtattattggtaacaaaagtaggaaattga

SEQ ID NO: 78672 - DNA, 1151 bp, Heterodera glycines
  unsure (1)..(1151): unsure at all n locations
atgtcccaaccatacgctaaaaggggtgggatcaaaaggtgggtgacgcctaatttaaggggtccggcgtcctaggtttatatgagacaggggtttggggttcgaatccgcttggctgcggattattttttacgatacattaggaaaacccgtggacaaaaacattgattttgcaaatcttagctcatattcgtgatcagcgcattttttaccccgaattaattgtaaagaattttttttaataataaaaattttggaaaaaatcaagtacttgatgaaaagtcatagacaaaatcaatgattttgccaaatctgagttcaattcgtaatcagcacccttttttacctcaggaaagataagacttcgttatcacacgtataatacgaaatttattaagaaatatttttcttttaggattatactgatccagaaacaacaacgccgtcagctgatggttaagaaccggtccatcctgacntcacaagttcagcagcaaatgtgcgctgaaattgacttggaacgggagttacacgtcgtttacacaaatttggcgactcacatggacacactttgtgatcacaattggtgctgtcgcttcgaatgcgcacggtgcgacggtgggaagtgaactcggaatgagtgcacggattcgaggacggatcgctggaattcgatgggaggaagcggccttattaattattgtttttttattgtaccgattcggcatcagaaatattttgattcaggaaatcagaacagaacttctatctcgttcttttttgtaaatgctcttttatctgtccctccttcgtttgtcctctcaaatacattatgataacctctctaccttcacaaccattcaaacaattttgtcacttggatttcatttaaactgtaatctttgtttgttattatttatatttgttgtaaaaatgattgattgattgacttaatgaaaaaaaactccttttttcagttaagaaaaagaggtgtcacatgttgtgatgttaattaggtgattttaatatcaaatatagttatagtttctgttgtttttttgtattgaaattggaacttaatgttagcagtttaaagggtcacatgctcgatgccgacgttgactcccaagtcaattaagatttacaacaca

SEQ ID NO: 78673 - DNA, 1119 bp, Heterodera glycines
atgcgcatcattcgtaacttctttttcattactaaagcaatccgcaaatggctcgccatcaactacaacgacggtgtgattcccgagccgcccgtccgttgcatccgtcccactcgcttgacgcgtcgttcgactccgatggactcgcgcttagacagccaattgagtggaggcctcaaacactcgccaattgaccaccgatacagttgccttgcaattaccaatgtcatttctcctcgttcttcagggtccgttaagaattacgacctcgcaactgcactaaaagagcgacacaatcggagtggtggcattggcattgaacatcgctattacgccgaccattcgtccgacttcctcgcgcattcgtcgtcgctcagtcttcgttttctgctgaatggcctcgcacgcagtttcactggatgtctggccgaccctgacgaggaaatgaacacgcagcagggggaaagtgacgcctcccaggaaaatgtgtcatttacagcatttcttatacaaatagccttttacttgtaattatatttgttacttctccaatctgccgccctgggatggtttcagaatttcgccttggatagggtatggtccggcgatgactttgaaggccaaaaatttttgcgctcaattttcaaacagaaaagaaaggaggccggcggagccgaacaatttgatacgatctgttaggaaaataatcaaatttcccttaaattgagaccatgacatttttaggtgtatgggggcgcataacattgggtgcttttgcatggataatcttaacacggactttctatttaaattggctgcaagttttcagactggtgagaaaaaagctggtgcggacttcaaaacctcggcggaatttctgaccgatgcttcggaaaaccgtcgcagaaatgaaatggtaaacaatggaattcatttgcaaggctaaagtttcattttgcaggtcgtggagtctgttctggagaacgatgccgtacagaaactgaatgccaattcgtcattgagaaagtgccgttaccgatgccgattttcgacgacgccgccactgccttttccacgcgtagagtgacactgaccatgccattgacacttttcaattga

SEQ ID NO: 78674 - DNA, 1808 bp, Heterodera glycines
atggggcaaaagccggtgatttgccattggtgtgagaccttcgattttgtgcgttatggtaagaaatgcgaacgaacctccgaaatcatttcaatgttaatttttctcaaggtgattatgcaatggggcgtttttcaagacagtaagcaaaattgaagaagcaaattaaaattgaattcatcacttttaagttggtggtacccttgccaaacagtgtcaaatgatgaatttccacaaaagaacaaccctttgttgggttctgtcgggtatttgtgtgtcaaatggtgggttttttatgaaccaatgaataaattgtaagttaaattttgaaacttttcaggttaccgtataaagggaaaatactttacaatcttttgtcacataatcggtatgtttgtggaatttgttgtgtaatggtctcttcctcttccttggcaatagaattgttgtaatgactgatcatgattacttttttgtgagcgaggcacaaacatcggacattttcaggggtttcctttgcttacggcaattattattatcattttttttttgttttttagagtggcgagaagcgcaaaatttcatggtacggaacaacccactgaacagaccactcaaaagtgatcaaattcccgagaaagggattagcaatgggcagcggatggtcaagcacctccaggtaatcctaatcaagcaaaaattaacaaaggattcgcaatcccggcctcgttctaccaacgattagcgtcccagtggcatggaaattgtcaaaacgatcggataatttctcacaatcagacaaatctgaccactttcaaggggactatgttaaaactgatttttttcctcgttacctttcccttttataatctttcactatgaaaatgaggcgcatcccttgttaataatgcaatatcattcttaaaaacaccaattatgttggtttacacttaattgtttagcgtaatcactattcaaaagcggagctgaaaactcaaagtgaccgtctgttggtgcccgacttttgcaattgtccgaatggttctgaccgatgtgggccgtccaccaattgcatcaatcgatcgcttctgcaagaatgtccgaagggttgcggagaagacttcaaccttggctgtgccaacagacgcataagcgagggaaacaattgcatcaaaatcgagataaagttcttcccgggcaaaggttacggggcaattgctaaggagaaagtgccatctgtgagttttttttcatcgaattcggcatttttatttcttatgaagcgaatagttctacattctcactgttcgtccttattcagggtggctttgtcggtgaatatgtcggggaagtgattagcaatgaggagggaaggcgccgagttgagaaaattgccgagttacaatcgcacgaggctcaatattacgtgatggagttggacgaacgacggtccatcgatgcgcaattttacggcaacgatatgcggtccatttcccaaattctgtgctttttacatttaatttctttcagttatgtgaaccattcctgcagccccaactgtgtgatccagcaaatccaaagcgattttgacttgcatttggttttggtcgccaacaaagagatttccatcggggaggaactgtcctttgattacaatatgcaggcgaacggacgttccgtgccgaattgccattgcggggcgccgaaatgcacgggagtactttcggcagaaaaaaatggcaaacagagaataagtgagtgggtttattttttaaaattggcatttatgtagcaaagagccctagcaa

SEQ ID NO: 78675 - DNA, 1033 bp, Heterodera glycines
  unsure (1)..(1033): unsure at all n locations
atgcgaaatttgcgtgttccaattttacttatgctattgagcacagtgattattttcatattanaatttttattgcatgaaaatatgccgacaaaaataacaattaaccctgttgcgggaaattttatgcaacgaaggattttgttttttgatagtgacgtagactccccaaagttgctgcttggaatgaacacccaagtaaaaatatgaatatttgagtcgaatcataacacatatttcttggcacaaaaaattataaaattaagccattgccaacaaaaagtcactttggcatatttaatgaggagacagtatttgtagaaatgatgacaagcaataattaaaaagaaactttaataaattcaattagtcgataatcatatttattgagttccaatcaattaaaaacaaggattaatgagtattcaatcaattaaaaagaaactttaataaattcttagtcgataataatatttattgagttccaatcaattaaaaacaaggattaatgagtattcaatcaattaaaaagaaactttaataaattcttagtcgataataatatttattgagttccaatcaattaaaaacaaagtttaatgagttttcatattcctttggcagtcattttgattcaattttgcaaactatttaacaattaagccattgccaacaaaaagccactttggtacatttaatgaagactgggacagaatttgtggaagtgatggccagcagcaatgtgtgagaaagtttgatggcaaattccagcgcaatgttgtgtgtttttgttataaaaaataattaaaaaataattatgcattgttaaattataacttaaattaaattaattaaatatattttaattcaattttagtttattccgtcgcttaaattggccggctgtttaattgcaaaaaattcaaatgttttcttggaggcgttgttttgctacttaacaaacatgaacaaaattaacacgacaaatatcgattacgaacttttcaatttgtttgtttttaactatttataa

SEQ ID NO: 78676 - DNA, 746 bp, Heterodera glycines
atgcctaatttacttgtttatatattttttaataattttaaaattttatttaatttgtttttaactccgtttatttatatttttaaaattgatttagcaggtaaatctggcaaaagtttccgcgattccccagactttgcgtctatgtccaaaatcgggttcaaactcaagttttttcaatcactgatagcctaatcagcattatataaatgatagaaagtgattgtgtctaataatttgctagttattttaattttaaaagtcatcaattattcaaacagctgatcagggcgagaaaaatccgactttggacataggcgcaagtgcccgaggcgcaaatctctgggcactgttgctgcaaatgtgggaggcaaaaaaatggggcgccatttgcaagtctttgatttgtgacccaacggccgcctaaagcgccgtagggcactttcaccatttttaaaaataatatttttcgtatctgagttaaattttattattattgcagagcaccattgtatagatctgatgccactggtggacgacaatattgcaatggctgtgggccaaatttgacatgttttgtcatgacggaatatgaaaaaatgttaaaccattcgtcgtccaatctttcatttgcggccacggcggaggactcgcatttttttccacaaaattggtatgtaatttggctaaggtgtcacgcaggaaaggccctggattttgatagaagacttataacaaatattcaa

SEQ ID NO: 78677 - DNA, 776 bp, Heterodera glycines
atgcaaacgatgcgacaacgaactgacggacgacgcgcgagagatcggcggagcactttactgcttgagatgccacgatttggtagaaaaaagcatttaaaggaataccttggaggagttaattccatgtgcttttacagatgggaattccaatttgtggtgcttgtcaccggcccatcgaggaaagagtggtgaccgcgctgggaaagcaatggcacgttgaggtcagtttcagaatgcctctttctgtgcaacgtcttttagcactttgtctgtgccgtgtgcgaaaagcctttcctcggccacaaacactacgaaaggaaagggttggcctattgcgagcaacacttccatttggtcaccagcaacgcactgaaacttaacacttttctgtttagttgtacggccatctctgcttcaaatgtggcaatccttgtgggggagaagttttccaagcgcttggcaagacttggtgtgtcaaatgtttttcgtgctctctctgcgacaaaaaaatggaccaaaagtgagcattttctttcctcttaatcttaatgtgtcggaaaccaaattcttgatttatttcatgaattattctcaggacgaaattctacgagtttgacatgaagccaacgtgcaaaaaatgttatgatcggttccctactgaactaaagaaacggatcagcgacaatttgaaggagagggaagcagaaacactgcgacggagatcagcaagtcccgcacaaccacagaaatcaaaatcacccggactgaaatga

SEQ ID NO: 78678 - DNA, 144 bp, Heterodera glycines
atggcggacgaagctgaggttgatgaagaacttatcgatgttctcagagaaacagacctcgtcaagtttcaaccaatgatggtttttgacaaacaacttaccaggattgaacactttcgggatgttactgacttcgagcttatg

SEQ ID NO: 78679 - DNA, 579 bp, Heterodera glycines
atggaggccaattgtgtaagggaggaagtgggaatggcatttgaatgggaaggaattgaagatgaagaatttggcggaagggatgccaattgtgtaagggaggaagtgggaatggcatttgaatgggaaggaattgaagatgaagaatttggcggaagggatgccaattgtgtaagggaggaagtgggaatggcatttgaatgggaaggaattgaagatgaagaatttggcggaagggatgccaattgtgtaagggaggaagtgggaatgaaatttaaaggaggaggaattgaagatgaagaatttggcagaagagaagaagaaggcaggtgttgggtgtttatcaaatttgaagatgaaccggaaaacggttgaaatgccgaagcatcctcatcgtcaatataatagccctttttcgaattgtccataaatatttttctataaattttaacaaacaaataatttttaattatttatttacatttttcgtgctcgacatatgtccacgtgtccgtctttgaatgctctcgtgtaaactacacttagcaaatgtccaagtgtaaacccggactgaataaa

SEQ ID NO: 78680 - DNA, 1502 bp, Heterodera glycines
tccgggtttacacttggacatttgctaagtgtagtttacacgagagcattcaaagacggacacgtggacatatgtcgagcacgaaaaatgtaaataaataattaaaaattatttgtttgttaaaatttatagaaaaatatttatggacaattcgaaaaagggctattatattgacgatgaggatgcttcggcatttcaaccgttttccggttcatcttcaaatttgataaacacccaacacctgccttcttcttctcttctgccaaattcttcatcttcaattcctcctcctttaaatttcattcccacttcctcccttacacaattggcatcccttccgccaaattcttcatcttcaattccttcccattcaaatgccattcccacttcctcccttacacaattggcatcccttccgccaaattcttcatcttcaattccttcccattcaaatgccattcccacttcctcccttacacaattggcatcccttccgccaaattcttcatcttcaattccttcccattcaaatgccattcccacttcctcccttacacaattggcctccattccgccaaattcgtcaccttcaattcatccacagttaaatcccaatgccggtccctccattacacaattggcctccattccgccaaattcgtcaccttcaattcctccacagttaaatcccaatcccggtccctccattgcacaattttcttccattccgccaaattcgtcaccttcatttcctccacatttaaatcctattcccacttcatctcctacacaactgtcttccgttctgccaaattcatccactcaagccgcattacttccgtccgattttatggagcctacgagtatctttatcattgactatcaactttataaaaagtatcgcttccttttagcggaaaacccactattttctgacatatcggacgcttccgcttacttacaaatcgacgagcgcgattatgggaatgaacaatcggcatctgcacaagttttacgttcaatcttagacgtatgtttgttctattacactttcaaaaacaattttttctgattaagacgaaaaattccaacttaatttgattctcacattaaacatttgagaatcatgaagtttcatgaaaataaaaaaatatgggaattttatacatactttagtttttatttaactttaattcattttcattgctagttaaatttattctgcaaattatcttcataaaacaattatttagctccgtccaacatcatccacggcgtcatcgcaaacaagttcgacaacaagccggaattttcgggaccatatgaggaaactgtacacagaactgggcgaaacaaatcgagatgaacgggatcgcgcaatgaaagctttagagttcaaaaataaacaaatcgaaactaggtcggaggatggacaaagaagaagatcaaaaggatcaacctccgaagatgataagaaaaaaagcgtattttgcaatatctga

SEQ ID NO: 78681 - DNA, 402 bp, Heterodera glycines
atggcgcaaaacgctgctcaaaacgacgaccaagtcgtttttgctctgaccgaagaagaaatggtggagtgggatgaacgcgagaggagatggcaggaagaagtgcgtctcaggtgtgaagaacggaggagggaagcggaagaaagacggcaagagcggggcgactggcacagtgacatgctgaggcggcaacatgtttgggagcaacaaaaagaggaacgagaaagagacagagagcgatgggagcaaagaatggaggacgaaggaagaaagtgtgaagagagaagcgcagcaatccgaaagaaagagaaagaagaaaaagacaagaatgatgttaccgatcattactctttcaaatgggaagaatggagggaaaaggaaaaattattttttggaaaataa

SEQ ID NO: 78682 - DNA, 645 bp, Heterodera glycines
atggaagggtgttctgtaattgagtcattatgtcatgaggacttaaaatttggatttacaaaatataaaaccaaattttattttaaaaatcctttcctaattaatgcggaggaaaattttaaactaatactcgcatcaataatcgaagaaatttataaaaatgaacagggaaaattcaaaagcattctgaagctttcctttggttttgaatcattttattgccctcttagatgccctagcgaaaacacagccgaggctttgttccaacatgtcatattaaaagaagaattatattcgcttttctatcctttggatgatgtcataacactagaagtaactataatcccagatgtcgacaatagaccaagaaattaattttataaaaaacaaaattacgagaaattggaaaatttctggaaaaatagttaaacgatcaaataatctcgaaatttttgcaaatatgttttttaaacgggtgaaaaatttctacatagcggcatttagtgcacctggaatcgaaaatttatattttacattcttagaaatgcttgaaaaaattcaaaaattaccagggcttattatgcatgaatatataaaccaagccttagctatgcaaaaattagaaattggcctcaaagaaataaa

SEQ ID NO: 78683 - DNA, 456 bp, Heterodera glycines
atgaattctgaaaaatcagaaaaagctaataccattttggtggaagctgcaaaaaaagagacagagagagcatggagggatgcagcggcgttagcagaagaagttggcgattttgccaagtcttctcgcgaaacacttaatcaggcaataaaatctagagaaaaagctccttatgctaacggtgttcgggaattatatcttaaaatgtccgattcaatttgggaaattttcaaaatcgaggaccaaattaatttggagtctgtaaaggctgaatctgcatggcgcgagttcgagagatgcaaaacttttgaccaggcaacaaaattcgaggaacaagcgcaaaattcgttaatggaagcccggagattacatttcgagtcccgaagggttcagagccaaatgttaaattatgaaaataggctcaaaacaattgtttgggagcacgttggtatataa

SEQ ID NO: 78684 - DNA, 567 bp, Heterodera glycines
atggttttttactttttccgacttgtggagagtgtgcacgtaagtctaaccaggaatttgttagggtagaatgtttcaagaagtacagacactcagcagaaggacggggtttagttgggttttcacttctattgtactccgaaaagcgttagaactcggctacaaaataacgaaattttatcgagcatacaattatgagaattttgacacaaatcttttcaaaaattatgtaagaatgtttttgaaaattaaaatcgaatcgtcgggctggccggataatacgactactgaaaagcaaaaaacgagttttttgagtatgcacaagcgtaaatatgatatagagcttgatcctaataatataaataaaaatccaggattacgtttaatagcaaaattggtgagaatcaaattcatttaaatatgtatgtaaaatcttagggcctaaactccttatggggtaaattttcaatgagaaactccctttgtcagaccaaagtgattaatagttcgactgagtggtataatcttttgcttgatgattctatagaactttctagcccaataata

SEQ ID NO: 78685 - DNA, 954 bp, Heterodera glycines
atgtttttgagtggaaaggatgatgagtcctcgatttcggctattgataggaaactttggcaaggaaagaccacgataaaaatctctgatttagaaaaagctcaaaatgatatggggaaattagaagatggagtgaacagagcttttcgctgcctgaatcgttccttgaaccaaaaagtcaattgggtgaaagatgtcgtggccaatacaaatgccaattttgagactctgaaagtccaattcgagaccctaaccgaaagagttgatatgttggaacaagacagtgatgggacgaattcaggtgggactgttagcattactaatttgaatagagcgtcgcgtgcgccgtttgtgacgccaatgggcaatgcacagcccaaccaagttgtaccgaaccaagtgccaattcatcaattatcaagcgaagacgaagatgacgggccgactctttttggcctgaacatgctctcgagcggacccacagtggggtcaggtttggaaatgttttgtgaggagtctgtttttgcatttgacgattgggctgaacgtttcaaggattacctgtccgtgtcaggcaaggcttacactgaacgagaaaaagtcacaagactcaaattggctctgagggacactcctcgggcactgtttaaggaattattgccagcacaaacggacactcttgactcagcattgagtgaacttcgacagaaattggactcccctcagcgtcgggaaattgcgaaacgaactttatcgctgtgcaaacaaagggaggatgagacagtggcgcaatttctgagacgcctaactcctttggtggatgcgacaaattcgtcattaaccggtgacattcgtaaagagaaaatttgcgaggaatttttggatagattgaagcctaacattagttttctgatccgtctggtgggtttgtcacgagcaaaagacttggacctg

SEQ ID NO: 78686 - DNA, 396 bp, Heterodera glycines
atgtccaaatttgcgcccaccgccagcggaggagtcgcgggaggagcgcaacaacagttcatgacggcaccgcagtgccgatgcaaagacttggacgaatgttcaaaggaaattgagaaattggtggccaaatgcaaaacggagtcagtatttgtggccaattagcacgaattaattttaaaatgccaaaaaatctttgctatcgattttttaattttttaaattgattattttaggccaaaatgcgaggcgcatttgaagaaaattggaaactctcaaaaaattcgtcaatgccttgcggacgagcaaaaggacatggaaaagttggaacaatgcgtggagaaagcggtcggaccaattgggtaaaaatattttaaaaattatattaaaataaga

SEQ ID NO: 78687 - DNA, 515 bp, Heterodera glycines
atgcctcctaatgagcggcaggaaaaggcatttggcgattgtgagcaaaaactgggtctgacagcacaaaagcgactaaaaaagtaagtggtttttttgtcattttacatagagaatgacaaaatcaaattttctcatttcttttactttttgttggtaaaaaatcatggtattgtaaattaaataagaacgctatttaaaaatggaaagtatttcgctttaacttttggcttttatgaagttaaaaataatagaaaagataatgctataacatttttaaaattttttttttaactgacaaaatcactgggaaccacaaaaacctttctaaattaataatttcaggtcctgcgaatgtctgaaggcgtccggaataaaaattgtgtgcccaaaataagaaagaacgaagaaatgaaaaaaagccagccagactgatgagagattataattggaaatatttattgtcgtgaatcatttaaaatattatattgctattgtaaataacgggaaattga

SEQ ID NO: 78688 - DNA, 448 bp, Heterodera glycines
atggccactgtgcattttgcttgtaatcaacaatcgttttgtactcctctgataaaacgttttgatgataaaatccagaagcgcgcttttttaattggcattgacttaaaaaatataagaaattatttgatattaaaacaaatataagaaattatttggtaataaacaaacataaaaaaaatatttgatatttttaagacaaaccgaacaagaacacggtttcggttagtaattctgcatataggaagttgaaatgattccggtatgcgaaaacgaataacaccgataagtcgcgaccagacatttagcgatatgatgttatcaaaaaaataatcaatatttgagcccaaatcatcagagcttggggtgatcgtcttggcgccgacaatagagtcgtaatcacacatttcgagattctaggcgaaaaaaatacaaaaaaaagcaaaca

SEQ ID NO: 78689 - DNA, 459 bp, Heterodera glycines
atgtcgttccaaaatacgccaaaagaagttcggcgtgcgagaaacacccgccactttttcaaggcaacccctgacaagggaaagtgtctcgaaaagattgagagccatgtcaacgagcgagccaagtttggtataagggagcacgtaactagtttttatttcaaatgcccaccaaatgaagatgcggaaaataattttagaataattatcgataaactaatacacgaggcaaaggaaaaagaacctgcacaaggatggaagacggaaagaatttcgctgaatttatattgtgctgctttgtctgatcctgttatgataccagtgagaccactacaacaagtaacttcggatgttgtgctaaacgaatttatgcatcgtcagcaatcatttggcgacgtaaaccttatggacgaaagaatttctgtgatcgtgaccacttttgcatatcctctcaagtga

SEQ ID NO: 78690 - DNA, 1220 bp, Heterodera glycines
atgaagatcttctttgaaagtgtgccggacaagggaccaatcaatccgagggatgcttacgcaggaggacgaccaatgcctttttgcttgtatgcaaaggctacggaagcagttgagatttcgatgttcgatataatcagtttgtacccctatgtgaattatggtaaaaaaccgcttgctttttttaatgttgcccttcacttaagacactccatatcccgttggtgtcccaaaaattgtagtgagcagggattttaatgtgaattggacagtgcccgacgatattccttatgatggactgctaaaggtgaaggtcgtccccccgaaggaactgctgtaccccctcctccccgtgcacatcgacaacatgctcctctttcccaattgtggcatttgtgcgagaaaggccaagaatgagtttgttacgacgaaggatgtgaaaaaatgtaaccatcggccagagcagagggcatttttggggacgttcacttcgattgaactgcggaaggcattggagttgggatataggatcgttggcttatatcgggcatatcactttgaacaatttgacaatcaattgttcaaaggatatgtgcggatgttcttgaaaataaaggtggaggcgtcagggtggcccggggaagtgaagagtgaggaggaaaaaagtgcattcaccgatatgtacaaggcgaaatacgacatctgccttgatcatgacaagattgtgtttaatcctggtcttcgaatgatagcgaaattggtgcgaaatgtttattaataacaataacaattaaaattaaggggttgaatagcttgtgggggaagttttcgatgcgcaacacgctttctacgaatgagatttttaacagcatggaacggtgggtcgcattgtcacaagacaatacgcttgatgtttcgacgccaatacaaatatgtgaaggagtagagcgtgttgtatatcgtaaaaaggaggagttcataaaggagcataaggtgtcgaatatagttttatctttgtggactacgagcgctgcaaggataaagttgtacgagtatatggagcaggtctacagggaggagggatgtaaaccactgtattgtgatacaggtgttttattataaaaaatttccataaaattttatatttagattctctggcctttgctcatcggaagggtcggtgtccattgaaggaggggaaatttttggggtaaaataaa

SEQ ID NO: 78691 - DNA, 1127 bp, Heterodera glycines
atgtctcgcttttgccctctcgttgaaaccaaagaattgggacgtctttccgttatgaagggaaaattttgtgagtttgagatccctttaacttcagcacaagatttacaaatcttttacttgaattttaggccttttttatgccctcgaattatctcgtaattaccaactgatcgataatggaatctctaggaaggctttccgttattttatggaaacagagaaaaaacaaagtgaaatgactttcaaactgatggaaaaggcggggataaatgcggaggaaaaaacttttggtctccaacatcttgaaatgatccaaatcttttgggacaaggaattccctgacatgtttcgcattgtggcctttgatatggtaaaaaaactacatactttgaaaaaatttttattttccagagaacgggaatcaaaccaattttcaagggagagggaattcgtaaaaacgaagtatgcgtgataaaagaaggagaccactgggatgggatcaaatcagtgacgcagttcttttgtgttagaaattattgtgtcagctgtgaagtgacttgcgaaaggccggagagacatcgattggagtgcaaggagcgctgtaagaagtgctgtcggatggggttcggctttccatgtgcggacgtatgtgaggagattcattgtgagggatgtaaccgaaatttctacaacaccgactgttttgaatcgcataagaagacagcttgtagggagtacaaaaaatgtgaaaaatgtgatgagacttaccaaacaagatcgaagcacacgtgtggggagaaattctgccgaatttgtaaaatctatcatccgaagcggggctgtttcatccagaagttaaaaattcgttcaacgaggaaatacagaattgttgcatatgatcttgagacgacattgtataacggagtccatgcaccgaatctcgtttgcgcggcgttgacatgcagtgagtgcgttggagagaaaaggaaatgtgagatttgtgaggaaccgagtatgctgacttggtcggcagcagatgtggaggaccctattggcggatttatcgattggattatgggcttcaaacaatttgaaacggttgcttttgctcattatgctggacg

SEQ ID NO: 78692 - DNA, 1789 bp, Heterodera glycines
  unsure (1)..(1789): unsure at all n locations
atggcggaggggggagggggttagcattgaaaatttggggccagatttgtggacttatactactaccgtatcggatttttggccataatcggaatcggcgatttaatcggaatcggattttgtctggctcggcacatccctgctgtgtatgtgtaaataaaaagttattgttgttgttttttacgtcaaccaattctttcacgcattccctttcgatctatgtaaatttgtaaatcgaagtcgaccgcaaaacagtaaatttagttagttttaccatttttgatagttttttgggaaaaacaaaattattacctcatttatttattattataatttccatattcaacaatttttattgccattttttcttagaaatttcaatgtcgagcaatttgctgggtcggtttaagctgatgttgagcacgggcgatggggcggacgttcactttttggttgggaaggaaaaggaggtgagttgaacacaaaaaatttaaaaaagagaaaaaagctccagtggtagcgcgcaacaattatttagatggtctaaaagtcgcaattatacataaatctactcttaagtcgataatttaagcactaagaacgggaaaaagaacgaatggcgttgttcaaatgctaatttataccgctggacacacataaagcgcgcgtcgctttttaaaaatttggaggtgtggccgcatggtcgaaaagtaccaaaaaatgatactttctgacagactgaaatgagtgaggcctctgaaatttatcttttgggtttaaaacttcaatgataaattcatttctattccgagttttttatttagcttttgaaagcacacaaatgcgtgatgatgttcgcttctgctgtgtttgggtcgatgttccgttttgatgacaaaaacgcaaagataaaaagttaaaaaaatcgaaatattttttaaaaatgtttttttttcatcattttttagcctctgccgactgtcctcacgtaattgaagtgaccgatgttgaagcagaagcattcaaagtgatgttgagcttcatttatgcggaagatttgagcgaattgaacggacaaaatgccatggcagtgctttacgcaggtgaaaaatttaaaaaataaataaataattatatttaaacatttttagccaataaatataacgtttctctgatggtcaaagccttgttggatgttccgattaatgaattgccaaatgttttccttgcttttgtcgaagctcgtcttctcaacgaacatgtcagaatctggctaataatgaagcttttccctatttttaacaataaattttaggtaccataggttttcagaccccctccaatttttttttcttatttcactttttattgattcattttaaggatttctctcgtcgctgcttggattacattgaccaaaatgccgaaactttattcgaatcagaagaatttttgcaaattggtcaaaatttgttgtgcaaaattttcggacgtgaccaattgaaaatcgacgacgaactcaccatttggaaagctgtactaattaattaattattcgattaaaatgctaatttttattaaaaaattattttntcaggcactccgttgggctgacgaacgctgtgctcaaatgctcattgattgttccgctaaaaatcgtcgagatgtccttggcccaacactattcaaaatacgtttcccactgatcacaaaaagagaattttcaaaaattattggtaaatttttttggtttaaatttttccataattttgtagggaaatttaaatta

SEQ ID NO: 78693 - DNA, 279 bp, Heterodera glycines
atgaagtatgtgtgtgctctttcagaaaatatcaaattcattaatttttctcaaatatattttctaaaaatcctttttttagagaaaaattgccaaaaaaagaaagaaagttaagtaatttgtttacaactcatttgtcagttcactttttgtctcacccatcatttacattaaatctttttattttttaaatttttaagcgcttaatgtgatacttaatactaatacattaatattacttttttaatttaattactgtagggatatagatttaataaa

SEQ ID NO: 78694 - DNA, 277 bp, Heterodera glycines
ctacgaacattattactcatcagtttgccacggaagcggatggtggtgaacaatttggacaacgccaacagacaaatgcatttgttcaaagcggttttacggcatttttcatgccgacatttctgttttcaatttccaggtgcgattggacgcactcaatccgtcagtgaagcagccattgaaaatgccgaggcggagaatcagcaattgactttgtcacgaatgcaaagtgtcaacggcagtttcgaaaaaattggcgatgaaccgaacgaattcg

SEQ ID NO: 78695 - DNA, 1467 bp, Heterodera glycines
atgattagaagaggtacaaatttgatgaagaggtacaaatgtgattttaagaggtacaaaagtgataaaagaggtacaaaagtgattagaagaggtacaaaagtgattagaagaggtacaacagagattagaagaggtacaattttgatgaagaggtacaaaagtgataaaagaggtgtaacagtgattagaagaggtacaacagagattagaagaggtacaacagagattagaagaggtacaacagagattagaagaggtacaaatttgatgaagagttacaaatgtgatttaaagaggtacaaaagtgatttaaagaggtacaaaagtgataacagaggtacaaaagtgatgagaagaggtacaaaagtgattagaagaggtacaaaagtgattagaagaggtacaatggtgattagaagaggtacaaaagtgattataagaggtacaacagtgattagaagaggtacaatggtgattagaagaggtacaaaagtgattataagaggtacaacagtgattagaagaggtacaatggtgattagaagaggtacaaaagtgattataagaggtacaacagtgattagaagaggtgcaactgtgattagaagtggtacaacagtgattagaagaggtaaacagtgatcagaagaggtagaacagtgatgagaagaggtacaactgtgattagaagtggtacaacattgttaggagaggtacaatattgtttaaaattaaataaataaggaaacgtttttattaaaagttaaaaatcgagtgcattttaatttaaaaattttttaataataaaatactcttttattaattaaaaacaaccttggaaattattaattgaatatttatttaatttgaaattaaatgaatttttttttacaaattcaaaaataaataatgaaattctttaatttaaaaaaaataaatttaaataatttaaaagaaatcttcaaaaattaattaaaaacattgtaaaataagccaaaaatacaaagaaaaataatgttacaccgtccggattcgaacctgctgccccccccccccccctcagaacatgtcccagaatccccaatcacacagggattctgagggcttaacgatgtcaaacgtaaaatctgatcacgtattcgtgatcagcggcccaaataacccctaaagacatgtttttggaagatttttgtcgaaaaaattttttcactcaaaaatcctggtcacccccctttggtcccgaatctcaaaatcacttttatttttataaaaattcttaaaaaagtgataaaaatgccaaataaaatttatataatagagcaaaaaactgcggatttttgtagtattttatttttccagaatatcttttcagaaccgagttatgaatttttttctgaaaattcgaatttttccagaaattctggaataacttttttccttttttagatagaaattccaaataaa

SEQ ID NO: 78696 - DNA, 2543 bp, Heterodera glycines
atggatcccaaattcgcccccacaaattcaatgccaatttttccagtgaatttgccgactccgctgggcccaatttgctgctgctgctccacgccggtgcgctcccctcacaggcatggctttatcctttggctcctaacaaattttctacacttttcatggcatggcttaatttttgtcgcctgacgggggatgatgtccaatttttctgacaaacttttttgggaatttggtcaataaatccgcttctgtttgcaaaattcgactctgattgataagtggtcgtttttgaaaatttattaaatcaaaggaacagaaatcttttctcattgaaagtcgcgaaaaatttttcccggggattaattaacgaccctttggtcgaattcaggcctgatattcggaattggttgaaatggtggtcagcgactcacaatctgaagacccccgggaacatttttctcgacttgtcaccaacttaaaaattttttggaaatttgtaacactaatggaaaattaaaaaacaaaaaaaatatttctaaaaatttaggaagcaaaactgttgcgcaaacgacgcgatttggcatgccaaagtgccgaaagtgttcctgccgctggcgacgacgagccgagcgtttccgaatggattttctgcgatttgtgccggaaatggtttcactgtgtgtgagtgaagcaattgtttttttttcttaaaatcaacaaattttcaaccatttttggaaactcactgtttaattgaccacttagtcacaatagttttcgcggatttaatgtcagtggcaacacaaaaatttaaaaaaaaaccggattttttttttgtttgaaacccttcgctttaagttgtgtcaatgtgcaggaatatgaggtaaaagacaaatgcgaaagtgcacacttttccacgtgcttttgaaatcgtttcccccggcatttgctgattcagaattattattttttcaatccctgatcgccttaacagcatttaaataagtgattggaaattttttgaaaaatcatcaattcttcaaaacaacatgattaatgcccccaattaactagaagactacgatttcttaattttaatgctgtttaggctatcagggcttgaaaaaatttataatttgaatccgattcaggaaatagcgcaaatgtccggggctcctttgaaattatgagaattttaaatctttttttaactttttttcaggtcccactgatcgacaaattccattgtccgacctgtcgctttgcgcacggggacagcatcagtgggttttggcaaaaaattattttctaaaaattccagccttttttcaaaaaaagacccctccaatgattttaaataaattcgatttactcattttccttttctttttgcagtgaaagtgcgccgtctttcccatcgctatgcctttgatgatgagtcggagcgggagatgcccgagcaaatcggcaccgagcaatggattcggcactttcgggagcgctacaaccaattcccggaggcgtaagttggcggacggtgcggtggttacaggggctgtggctgtactccccccttcgctccttttaaaaatttcagttttttaatactttcagtgccccccccccctttatggcaaaattttttgttcttttagttgcattgatttgggcattttttgggatcgctggtcacgaaatggtgacatccattttagcctgttccgaagtcgaacaaaaagtcgaattttaaaatttgcactttcaacatcaaaaaaaaaagtcataccgattcaaacacaatacacaattgtggatttttgttgatttccttgtgactaaaattaaaccaaaataaaatcgaaattttaattcattttatttttctctttttctgtcaatatttgttgagtgctgatttgtccccatttttcagtcatcagccgtcgctgatccaagtgtttgaccacggcgccgaaatgttggccaacttcgactttgagaagggttggcatttgcccatcaaagtgtgccatccgcatgggctcggcctgcgcatgccggacgacccgtactttgacgtgttggacgtgtgccgtcttttgagtgcgttttgaacgcgcatttcttggcaaaataaaattgacatattatgttcaaaaacaaggtttttttgatttttttttttcaaataaacgaaaaatctatggtccaaagaatcttgcggagactttttcagggatattccaagggcaccccaaatttttaaggtaaaaatgcaaggcctacctcatcaaaattcccaaagaattttttgtaaggaatttttgtcgtttttttctatgtgctcttagcaaattttgtttttgccagaaaacataaattggacggcacggcataaaatgcgtacataaaaagccattcaaattgccccatttttcaacttttccccaggcgacgccgtcaccgtggacaccatcgacgtgtacgcccagcgctcgtacacaatgagtttgggccgcttttacggcctgtggcgcaagcgg

SEQ ID NO: 78697 - DNA, 2182 bp, Heterodera glycines
  unsure (1)..(2182): unsure at all n locations
atgcttgatgcggagaagctggaacatgcggtgaagatgaaggagcgtggcaccacctttttgaaccagggcaagcacaatctggcacttgccaaataccaagtgagtgactttggcagaacatatcagatgttgcgttttgatcaatattttctgacaattttttgcaatggagccaaaaaagccgaaatttcaaaaaaaaaaattcagcggcaagattttcgagtgcacccgccatattanattgtccaattttttttttgtatcattttttttcaagtcggtcatttctctattggaatacgcaaagcccaccaaatcggacgaagaaagcggcaaggagttgagggagcaatttgagcagacattcatcgcagcattggtatgtttttctgggattgtttgtttctaatagatcggacaattttcggggcaaagataaagaaagaaagaaaactgtcttacaatggcatcaggggcgtatctagaaaaaaaattttcggggggaggacccgatctgaagactttttttttgtattcacccaataaaaaaaaatttttgccgttttaaggcaaaaaaaaacttgtaaaaataatggaaaatggaggtccggcggtgccgatatgcgccgcaggaattttcgcccgaaatcctgtcctggaggtccgtctcgaaatttgttttatttatgaaaatttttctaattgtaagattttttccttgaaaaatttctgtgttgcaattttttttaaatttctccggttcgacagacattgatgacatgtccatattttcagaaaatcttatttcttaattaatcgtattatttgttttttaatttttttttttttgtagctaaactcggctttggtcagcctgcgcatgggcgagtcggtggaggccatcaaacactgtgacaaagtgttggagaagcagccgaccaatgtgaaggcgttgtaccgtaaagcgcaggtcaacaaaacgataaaaccgaggaggctctttcaggggaaaatgagagagtgtgtgtttaatgaatcaatcgaaaaaatacggaaattttttcttgatacaaacaatgtttcgaatagaaaatttaaaaaattttcattacaaataaattttgttttctttaggaaaggggatttagttgcttggtttttttaaaatataaaattttgaaaatttcagttcgaaatttcttttaaaaagtgtttgtgggggaaacgatcgggggagggggcgtgggtagaacgttttgtgcaaacgacggggtagagaaaaatatgcatttagatttcttatctcataattttttgggtttcaatttttttttttttgcaggccctgcaaaaccgcaaggattacgcggaggccattgagcagtacaagcatgtccaccagttggatccatccaaccgcgccgcggcgcaacaaattttggaatgtggccaacagctggccgcccagcgggaggcggagcgcaaaaagtaccgcggaatgttcgaacggatggccaaagggacggacagcaaaagcggtggtggaggtgacggtggagcatctgctgctactccttcagcgtccgacaacaatgcggaaggggtgaaaaaaacaattcttttgtttttcaaaaaattaaatcaattttcatagaggggggggggggtagcaaaaaaaggggtcaaagtccgtgaaaaaaatgtttatcttttgtcattaacctaatccataccattgagcgcgaggttgatgcgtgacaaacctttgagaccggaattttgcaacgaatgggactggaacttgacggtggaccggaatttccgactaactttctcccttccataccccacccccccttgtttggaaaaaatttttcttagaaaattgtagaaatagaaaatagtgtttttgtgaatgtaattattttgaaaaacaaatcttatcttaatcatttcaacaattttttttaaattttccgcggtcgggaaacgaacgaactgcttcagtatccaaatatgacggaatagattaaacattttttcacacctctgctgtcaattaatttttttgttttatttgtcagcagccgtcgagtggcgccgcctgaactgagagaggagcaagcagtacatcacgataaaacagaccggaaaagaaatgaaaatggagaatcacaaa

SEQ ID NO: 78698 - DNA, 675 bp, Heterodera glycines
atggcgaaaatgaaattgatttttaatgtgaatacaaatgacgacagaaaatctaaaatcaattttgaccaattttgcatattaaaaatgtgaattttgatgatcaggaaaaattatatatgtaatgttttttatttatatttttaaatttaaaagaaaaaattcccgcacatttggacggaaattggacactaaaaattagacattaatggaaaattggacattatttgatataaataaataaatggagcatattaaaataatatcttttagccaaaccaaaatttttgtttatttatttttaatttattatatttttataagcgtatattgttattattattttaccatcactataagaaagccatcacttatcattcataaagaaaaagttttcttttagatagagttcccatttttcgtgcattttttggcacatgacaaatcattgtgcctattgaatgcttgatcaacagaaatcattaattcattaatccatttttcgcgcgaaaagtcaacttgttcctgcatttttgctaattctaaaggctctaaaatcaaatccaaatttgaatggatgcgcgagtgggtcaacagtgagcttcactgccgaaaaccttgagaaattttgatttgcaattgcaaaaacaaccgataaaatttatgaggaataaa

SEQ ID NO: 78699 - DNA, 1455 bp, Heterodera glycines
atgcctttgaaagtgccgcattctccgcagctcccttctctggtcattaacaatccatcgggagcggaagcaaaaaaaggaatgccaattgctgtaatggtaagtcgcgaatacattatcaccgattaaaaaaaccaaaaaatttaatttctattcaatgaaaaataagaactaaatttaattggttgtaattaatcacaataaaaaggattactgttggatgagctgttcaattttgttagtttttgaatattttagaatacattattgtcaaaaaatgtcgaattagagaaaaaagaacagcagcgaccggcgacgaaattgaacaatacgcaaccaatgagccaacatgatcaagtgcagcactttaattatatattttaaaatcaattgaatatttttcagccaaaaactgttcgcgtcgccaaaaaatcaaccagtgatttttatgattaaaaatttcatatttaaaaaaattaatcatttaatagtgaataatgggaccacactaatggcaaatgccctgcagatcagcaaaaattcaactggtgagtgttttatttacattttattttaaccttatttgaaataactttatttatagaatttttattttcagattatttgatcgacgaagtgttatctttgcgaacaaaaatcaacgaaattgagaacaaaatggacaataacaatgtgagaaaaaatgtttaagggtctttttaaatatttatacttaattagcaatttttggcattaaatttacgtggcaccaacagtcaaatccatttgctgtgttgattgaactttttgctagagcttaatattccttttttggttttaataaatttttacatttacataaaggtcattcaattcaatgaattacgacagaacatcacgaaaatcgaacaactcattgtaagtattgtacaaacacaaacgtgtgaagaatatttgaaaattcaaggataattcataaatttattaatatgctctagttaatattttttacttccattagcaatttttcgctttaattttcattacccctatgggcaaagccaatcatgtttgtttggttgaaacatttaagcttaatattccttttttaaacggttggatatttttcagccaacaaatatcagcgtcgccaataattcaagcagtgattttatgtttaaaaattgcgtatttttaaaagaaatttaaatatttgtagacagcgtgaagaagaaactgtcagtgcattcttaaagcgattgactccattagtggaggttgtttatgctaatttggggaaaaagcaactacgagagcgtctggtagaagagcttcttgaccgtttgaagcctaatatttcatttttggtgagagttgcaggattggctaaggagaaggatttagaccaagtgaaagctcaggctgaagaattggagacacttctagcaactcaag

SEQ ID NO: 78700 - DNA, 2501 bp, Heterodera glycines
atggcgattcaattttgggctgcaagtacaattaagttggttttttcgtcttagtggtctgtgagttagtcaaaaaaaggggggtctcaggttcaaatcctcctgtgtttgtgtataaatttcaattttttaaagcaaataaataaaataataataaaaacagaacgccaaaagaacaaatacaaacagtaaaaagtagacactatattttacccttgattttatgaaatttttttagcttataactttgtcaattatagaccaaataaaaccattttatgctcattttgaagggaaaattctgaagaatatttctaagttagtcaaaagtttaaaaaaattgtttattggcaaataaatgattcatgtgttattttatatgtcagagacatggaaatagtatgccaaaatgagagaaaacgaaaaaactttgtcctggtcaaaaatgttttcctagggtcagatttttttgaaattttgcatagactcatacttttactccatttataggataatgctttgtttatttaccaaaatgctttttaattcgagatcggctctttccatttttacaagggaaaatcctaacaaaaatttttaatttagaaaagttttggcgttctgattactaaataaaaaataaacttatttgcactgggagcccaaaattgactcgccgtgtatgatatttcgcttaatgtattctccattctctccctaccagtgattgcatggaatttctgagttccggcttccgaaatttttggggtcggaatccagactttttggggtcggaattccgcctgaaaatttttggggttggaatccagactttttggggtcggaatccagactttttggggtcggaattccgcccgaaaatttttggggtcggaatccagactttttggggtcggaattccgcccgaaaatttttggggcctcggaatgccatccctgctccctaccatcgttgtgcaaaaatatgacctttcctctctcatacagtatcactcctaatttacaattccactagttgtaaaaaatttttgcaattttaatgaatttgtaaatgaatttattccaaattttcaacaattttcgcttttctcccttcgccggcattcaatttctctccttaattttctgaccgcctttgattacaaagagccccccccccctcctcccctctttccagcttcaattacgaaagttacacattttcatgaaatttcttacgtattaaatcgcagcgagaaaaaaaatatagaaattttaatgaaattattaagagagctgtatgaattatcatttttctttcgtttctctcttattctcttcccccccccctcgtcgaccctttctccccttttctccctatgagccctcacccgactccaattacgaacccccccccccccccggttgtatgtttgtttggcaagggtggcttacaaattggcgctgtggtgcctaaagctgaatgctgatgatttggcaatatcgattctgaggtggaaaatgatgaaataattagattatgtttgctaatattaatccatataaaaatatgtcccccatctttaccatttattcatttttctaattctgaaaacaaaaaccatgcatttcttattgttttcttttactttggcattgctttgctatttttcctcaagcaatggcaatgagcagcttctcggtgaaattagaggtgcttgagattcatttttagcaaaaaatgaaaacataatcaaagtttaggagttatgaaaagtgaagaatacaagaaagaccaaaacaggcaaattttattatttttttagttttttattcaaatttaaatgttttaaattatttacattgttttggtcaattttagcgttttattcgagtgggcattggaaaaggggtgccaaacaatttctaatgctagtgttattcaaattaaagagttcgcccaagaaatcaacgagattaagcaaatcgttgaacaaatttgtgccaaaaagggcatcaacgaacaaggaatacgaattcttggccaaaaagttttggaccaattgaaagtgtcagaaaagaaacaaaccaaagtgccgctcgaaaattttggcacccaattgatgcaattggccaagggattgcccgatgaattgccggtaaagagtgccgtcatcaaacaattggaaccaatcaacgggtcattagcaacgccaaatgatgcatttaaatttctgaatggcatggtgtcgtcgacattgaacaacagtgacagtgccaaaaagcaagtaaatagccagaaaaatttgattgtcttaaagaattcttctgcccgtcgtcgccgacgatttgaccgacgtaaattgcccattgtggtagtgattgaggtcttattggtttttgctattatgttgcaaaagcctattttggtttttattgcttgttccatattctttagcttccttccatttttgcttcaaattagagatgatattgaatga

SEQ ID NO: 78701 - DNA, 656 bp, Heterodera glycines
atggtttgtcttcgaagcgggatgattcgtcctccgcggtgtaatatgaagggattatgtgacttggtcagtgagcgatttcgtcagtaaattatttctacttttcttcactatttgctgtgtgtctaagacaacgtgtgaatttgtcagagatggattttgacagtacagagtaattttaaaaacaaataagagtatgtcgaaaagatcaccatttcaaaattgtcgtccagggattatggtggattcgtgatttgctttcaacgtattttgtggtgtgcctacgcctatgaaggagtgatttgatcaagttggtgtaaaataattttttgatgatgatcgaaagataagcaagcatgaatatcttatatttttaaattaagtataaggtgctttttcaggcatttgtcatcacttttccgaccatccattgacagaaagtcgcgccttcgcggagacgcgacgtagagacctccctcattcaaaggccattttgtagagaattttgtgctctttctgttcgtcataatcatcttctacggaaaattttttccaaccccctagaatttttttttcgaatttactcagattttcgtattttttcacccgcaaaaattttgtgtttaatgccttttttatggcataaaatgaataaa

SEQ ID NO: 78702 - DNA, 811 bp, Heterodera glycines
atgtccaattttttgatgtccaatatttcggcggtgtccatttttccggaacctcattttaattttgtgaccttttgggtcggtgatctattggagtggtgggggtgtcattttgaattggtggtattttgggcggcgttttggctggtggtgtttttggttgacccccaatttaacagatatacgacgacctattaattgcttttataaaaaatgagcaagaaattcaaatgattagtgaatatacattgaaaaaacaagcagcttaccttggcattgtgtattttatgcgaaagaattggcaatgtgacaaaattggggcgaaatctgaacaatatgaacgaacggaatgccaaaaatatcgaaattatttggacattttgtacgaatatttgtacagagaatatgccgcaattcccacagcaaaaccaaattttgttattaaaaagaaacaaattggaattgacgggccattaatttatgtgttgaattgtttggtcagaatttcgcagttttattttaatgaaccgatcagtttgaaatatgaatatgaattaaacaaattgttcgaattggaatttgagccaaaattattgaatgaggaaagatttaattatcataatcaaccactaatcacaattaataaactgattttgaaattggcaacagaaacagcgaatgggcgcccaacaaatgaaaacgttgaagggataatccgtcaaaattttgaaaaatatttgaaaaaattgtttggaaaagcggaggaaaatgcactagagggtgtttgatggttgagaaccaatcaaataaa

SEQ ID NO: 78703 - DNA, 1070 bp, Heterodera glycines
atgatgccgaaaaaattgaaatggtgcaaaaatttgagaaatacaaagcccaaaacccaaatgtgagtgatcgaaaaattgaagagaagcttaacattagtagaaaaaatgttcaatattggaaggaaaaatatgatttataatatggaaaaaatatttcctaataattagcgaatttttatactaatgaattagaagaaaaattatttttaaattaaataataattagaagaaaggtttttctgttttccgtttaataaaattgtcttttcatgttgaaaggaatgcataaaattaaatacataatgttacacattttcaatctgaaaatacgtttcaggattcggagtatttatttcctttatgcttttagtcattaattttttatatttattcgatttcttataaaactaacaaaaaatgaaaatcaaaattcatacttttaacggaaatatttattcaaatgaaaaatgcaaaaaggaaatgtttattaaaatgaaaatagtgcaaaaatcaaaaatcaattataaatgatattcaaaaaaaaaaatcggaaatgtataaaatgaaaatattagagaaatcgattctaaatattcataaacccctataaaaagtcgtgcaaattgtttttttaattacacgaaaactgaaaacatgtttattcctgcagctataattttattgctcattattattgtagttccattttcaggtgcgaatctatcggtgagtttcactttttaaataattttttcaaacaacttaatgggcctcctacctacccaaaacgtcaccctccaagtgtctccgcccaaaatttgaccagctaaaaatatttcttactgaatataatcaaaatgaagaaatgagttttcaaaaatgctcgtgtcacaattaagtcaagcgaatttttaatggggaccggaaaattggacacttgaaatttggacttcagaaaattggacaccaagcggaaatttggacaccggaagattgggcaccaagcggaaatttggacaccggaagattgggcaccaaatattatttatttaaaaaaaagaaataaa

SEQ ID NO: 78704 - DNA, 739 bp, Heterodera glycines
atggccaaattgatggaccattttatggctggacttcgctcactttggcacatcataaaaagtagggaatgataaaatggtggacattatgacggattataatgataagttataacgtcttaatgctcaaaatttgcattatgtcataaataatcaagacttataaaattatctctctttaatctcaaaatttatttatttcattaaaataattttaaacattctaaatatttagacaagcatttgcttcctaaagatggcaaacaccaaaaaaggctgacgcgaagaaaaaagcgaatgtatgctgacgattacaaccccaactacgaaaggccaacagcaaattttttcggtgccaccagctcaaaattcatcgtgtgctttggcagtctgatccttttttcattttttggcggttttggcattttttttgcccttaagctggcccaacatttacagaatgagcacaatgatatgacttgggtggacggtggtttgatttccattctcatcttttgtgtccttgttttgatgcttagtggcttggcgttttatcgctcgtgcattagtgctaattaatggggctaaataattttttttaaatatttatttatgtacacgttcatcgaaactcttcattcagtcatggcaaactttgttatattgtcataacagtaaagaaaatttataatttggcaccatttgttagagctttccatgtgcctaatgttttcagtaa

SEQ ID NO: 78705 - DNA, 1209 bp, Heterodera glycines
  unsure (1)..(1209): unsure at all n locations
atggccattttcgacccgtcccctctgatcgccattttggcattttccctttacacgcccctcgccctcgccactcttttgctgaatctttttgccattgtcgtgttggcacatggccatcgctatttctcacaacgcttcttcttcattgttggacgtcatctgttggccgctgaccttatgtccaccgctgcgcaactgtccatcgccgtgcccgtttcagcaatgtcaacggagagtgccaaaagtgggaaaagcagaaaatactccatacccagagtcaaaatctcaaatcgttggccaaaaaaccgagacccaattttttgctcttgagcgttcggtatatntggtaaatacaattcctgccttgtttatgaggaggtctcccaaccgaactgattttgttgcaaaatgcctctcattaaggccaaaagcctcagattattgtttttccaaaagattaaataccctaaaattccataaaagcaataaaaaacccttaaattcccttttcaaaaaattcttattgacaaatacattgttgaaagacatcacatcttggagctctgttaagattgccttacttctgatgatcagagggggcttctctttttatttaaattcctaatatgatttttattgccatattttagcttatctcgaatcaacgtttgcccagtttatgttgaccttggaggcattggcccatttggacacttttcattttgtcaccctccaggcatgctcatttctgggctgttttcaacaagagcaaatggcattccgattaaatgcatttgggtccatcatcggtctcgttgtgtggatgctaattgcaggtaattagctactaatcattgtgctattgtatcttagggtaatattgaatagggaataaataataatatttttgctcaacacatagcgtcactccttgcttaggccaactacttctgttcggtttcgtcccatgtgccaaacggttcgacccggtcactttgcacttcttcgacagttgcaattggccaaatccgaatgcgcgtggctctggatttgccttgctgaacatttggcttaccgtactgctctgtagcgcattttccatttacgcaattgcactgtctcatgtgcgccgtcgaattcagtaatctttttttaatattttcccatctttcaattcaatagctttggcacaaacttcgaattgaa

SEQ ID NO: 78706 - DNA, 804 bp, Heterodera glycines
atgccatcccaaactttgatgccatccgctctcggcagcgtgccatccacatcgccaagcggctcactttcgccaaaaagcagagagcttaaagaacgaaaacagatcaaagagttggcccggttgcgggaaatgatcatgcaagtgcgttttttatcaaaaaaattaatggaggaatccatttgtgtaatttttatttatactatgataaagaattttttaatgggggcgataatttagatttaccacaaaaaattaaaattgttaaagaaatttaaagtgccaaaatctgcatataatggattaattagggtgaactcaaaagctgaaactattttataatggcttcttatgaaaaagtcaattctgaataatggcttcattagggtgaagtcaaagcttaaatttttttttactgtgttgccaaagccaccctaaaaatgcttcggcaattgtaattcagcaaattcataaattttgtcaaaataacaaaacttattctgtttagggttttttgatcatgcaatcgctgcttttgcgctttgtcggcttcttcgttttgccttggttggcattcgctgccggtgccaatggcattgaccaacgagcgcttctctgtgtgctggccaacactttaattttggtaggcttgatttttgaaaatttatttatatttaaaaagaacttttttagctgagcttgatcagtcattcattgatttattggtggtggaactcgaaaattcgtgaactgtgcaaagaagttgttgaaactctgcacaaaaagctccttaaatcgcgctaa

SEQ ID NO: 78707 - DNA, 960 bp, Heterodera glycines
atgattaaaagaggtacaaaagtgattagaagagttacaaaaatgattaaaagaggtggtacaaaagtgattagaagaggtacaacaatgattagatgaggtacaactgataagaagatgttcaaccgtgattagaagaggtccaacagtgattagatgagtccaacagtgatcagaagaggtacaacatggtttaaaattaaataaataatgaaaagtttttataaaaatcgaatgcattttaatttaaaattttttttataataaaatactctttttattcattaaatataattttgaaaattaataattgaatatttattttgaaatgaaattcatttttataaattcaaaaaataaataatgaaattaaataaattcaaacaaaaaattaattttaaaaaatttttcacaaaaaaataatttaatttaaattaaaaaattaattaaaaaaaacaaacactcttttaaatgaattaaaaacattaaaaataaccaaaaatgcatagcaaaaagaatgtacaccgcccggattcgaacttcccccccccccctcaaaatgatgcctcagaatccccaatcacacagggattctgaggtcttaacgatgtcaaaagtaaaatctgatcacgttttcgtgatcagcgtcataaactacccctaaagacatgtttttggaatattttcggtgaaaaaatttttccacccaaaaatcctggtcacccccctttggtcccgaaaccaaaaatcacttttatttttataacaattcgcaaaaaagagataaaaatgtaaaataaaatttatattatagagaaaaaaattgcggatttttgtagtatattacttttacagaatgacttttcagaagcgagttctgaatttttttctgaaaaatctaaaatttccagaatttctggaataacttctttcatattgaagttagaaaacccaaataaa

SEQ ID NO: 78708 - DNA, 3615 bp, Heterodera glycines
atgagtcgcagtcgttttcgcccttttccaaaacttcaaacgacgctcttgttattgaccccctgtgcctttacttcatgtgccagggcacaagttgtctcaatcactgcctctgctgagaaatgccaaaggtccgacttcggctcggtgtgccatctcgagagctcgacaacagttactcttctcccatcgggtctgccggtacgtctactccttcgacatcccgacgagagagtccttggcacgcttgaaatcagcatgcgctcactgactttgcattgcctgccaaaatctgagcaatggcttcggtcctatcacattgagacagtttcggtaaaacggtgcccgagtcgtggaaattgtacacgcgagttctgcgatgacgtcaacaacggaaggaagacagaagttcatgagctgagcgaatggaccaagcatcccggattcaacagatgctcagcatcttgctccttttggtggtgcgggtgtttaaatgccggtgccagctgcatcttctaccgtccacatgccattgctaactcgccaattgtttacgagcaaatctcctgtcccacatgggaataccgcttgcgcacttcactcaaactgtcggtcaacgcaaacttcacgaaagagccgtccgtgtcgctcacacccggcattactttccgttggaaggatttgagcatcacacctattgcctcttcggttcctccggccccaatcatggcaaccaagttcctctcggatggcaataacatggcaatcagtgatgaaatccaaagtgaccttcaatgccccagtcgtgccaatgccaaacgcctcaactgcacactcagatggggctcatgtccgatgtgcctgcctgaccacgattcagcaaaaatcaactgccaatgccgagatgtcaaactcgaaccagcactcgccgatcctgagaagcgcctaccaattcagctcaaaaacttgcttctccggaacgaaaggcgggacatttttgccgaaatcacctacgcgccgattcagttgtccattcaattcgaggggcttcgaatcgctacggaagaggacctaacaaaatgccatgccatgtccaagggtcttttcggatgctattcgtgccacactggagctcatctccatttgcaatgccacaccgactttggctccgcacttggctacgttcgttgttcggatggcacagaattcacagccctctgccacaaaacaccagaagttttgaatgtcagcctgtcattcaaccgtgccgaggtcgacatcaattgcaccattgaatgcagtggaggacggaacccattcgtgattaatggtcatctccgctatgtgccaaaacacttccaagcacctaatgaaggaagctcatttgcctcgaaggccaaacccagcaactcatgcctaatttggtgcccagattggaacttcgacttttccgatgtcttttggtatttctttggcctccaaaatgctctacgaactgttggcatcatcactctggcccttttcatcgtctatatccttttgcgttgcaaccctgcccttcgatcttggagagccataagccgagtcgtccttttgttccttgctctttggcctacgactgattcttctgcagcgggagggctgagccatctactcagcattcaaaattcagcaccaaagctgcagtttgaaggccattcttcggtgtcaagacgtgtgactgagactctcgacatttttgatgcacaaatcgggaccattcatctcgccaaaaaccaaaaatcgccaatggacttcgctataaaagccgtctctgtgccagtccattcaccattcctacaaattcccgaatcggccttccacattcaaacccaagcccaattccctccttttccaatggccacactgctctctttcctcgccaacacaatgaacatcgaggtggaacgctttggtcttgccgtgaccacatcgctgagccgttggaacgaggcccgaacaatcgttgagggactgcatgaacgcggctacgaactcaagacgaggcatctgcacccacgtgagcgaaatgtgcgacttcacggatctgagctgagccgaagtggtgcgaatcgtctcggtgcctacaatggaagtgcccgtggcccaactgtctccgagctgtaccgctctcgacatggcatcactcttcgccacccctctgccccatgcctgatggagcccggcgggaatggacaccatgattttttccccatcgaaatgatccgagtcgtggcccctgaccaagtttctacaccacggggtttgtccacacgccctcttccccgccctcgcccgtctcacttcgcgctctgggacagaattgatcatccgccccggtcccgagaattggtgatcaacgttatgccccatggtgattcaacgagtcgaggtgccgcggaggaataccgcatcggtgttggccgcgaactcacgatctctggccccctcgttctacgaatctatgctggtgcccttcttcttgccctattctctgttgcccttgtcgatggccaatcatctattgccggtctctgccctgctcattcttttgccctttgctcttcacggctgcacaaattttcttgccttggtccgtcgctttttggtccttccgcgtttgattttgtgcaaatcacgaacaaatttgcttcgttggcttactcaccgcttcctggcagcgaacacttcgctgaaagctatgccgaagcagctgactcacccatctctccgctgtgttctgccattctgccatttttgctctctggcctagttcgtatttggccgctatttaagccatggatcgcaagaacgggccaccattcatttccctccgactacccaattctcaacaccttctgtgccatgcccgccaaacctaatcttctctcgcaggagcttgccgaattggaaagaaggaaaatggagctggaacagatgatcgcctcagctaagaaagaagtgccggaagggaagagccgtcgtccaaagaagtgccaaagttcggacgagcccgcccctcaagacgagcccgaggaaaagggacctaaggcggcagctctttctgatgctccgactactcagccatcccatccgccgctcggcatcgtgcctccaccacccccatcacctgttggctccgatatggccgaccttttgcatggtcacgtcaataagtgggcaatggaacgtgaggaggccgtgcattttttgcagaagaaaaaacgagatgtcgccgtgcctgttcacgatgcactcaaaaagttcaacggcggcatcaaacgcctgagaacggcgctggacgacgtccaggaaagtgtcggctcgatagctgctggtgtgaacgaattggccagctccaccagtgacggcttggtcattgccgtcactcttctgcaagctgaagtcgatcgccaggcggttgagttacgatcgttgcgccgagcactgcacccgccacccgacgtcgaaactttgtcggttgcctcgtctgatgaaggcacaatcgtggctgaaccatcttcggcggcgagtgtcgccaaagcgactaagaaagaggagaaaaagaagaaatga

SEQ ID NO: 78709 - DNA, 2675 bp, Heterodera glycines
atgtcttcagctcgatgccggatggctttggggcccgcgctgttccgacttcggcaacatgtcactacggccgaaaatttgctggacgagcccgtgatcaatgccaagacgaccgaaaaccttgaacaggaacgggggcacatcacccgtatcctgtcaaggatggaggtcgagctggacgcgtggggtgccatcatgaacggactgcaaggccctgcgagagaggcggaggaagcgctcttcactgcctttgttcgagatgaccggcacttgacggagtggttggaagatgcgcgggaaatgctggctcacatagcagcagaactcgcagatgagcccaaccagcaaatcgcggcgggaggacagcaaccagctgttgctgtgaatccacccgtgccagccgtgccattcgtcaacaatgccgtatttccaggcggtgccaatgctcaacagccagctgctgttgccaatgctgcaaatcaaccaccaccgatgccaatcaatgccggtggtgtccatggtcaacagccatttgctgttgccaaccctgccaatctggcactaccggtgccaatcaatgccgcacctgtgccattagctactgcacgccttccacagctcagtcttcccattttttcgggcgaaccaatggaatggccagcattttggcagagtttcgagagtgccgtcgaccgtgccgcccttgagcccgtcgacaaactcaactatcttcacggttgcctacgcggtaaggctgctcgtgccgtaaccgcctaccgtggaggggagaattacgcccatgccgttgccgcactcaggcgactcttcggagatccacggaaaattgccgaagcacttcagtccgaactgatcaatctccggcctgtggacgatagcgttggatcactgcaacacttcctcgagactttggagcgtgtgtgccgccaacttttgaacctcaacatgccggatgacagcccattcatgtaccaaatcatccgcagcaaattgccgtcgactgttctgtccgaactcatcaaaatggaacgtgcggcaggcattccatggagtactcctcagctcagagctggacttgccgaagttctcggagtcagagaagaggtcgaacgatgcctgcgcgaagccaatgccgacagacaaacacgatttcggcacgaagcaaggccaaatcgacctcagcgaccagaacggcatgaaaatgcgcgagtttttccgttgctcagtccgtcagaaattctgatgacaagcgagttccgtcctgcctgttctgccctggccagcattgggcctcggagtgcaacaaagtgacagatgcagagactcgaaaacgttgccttttgcagcagaaccggtgcctcaattgcctacggaagggtcaccaattgagggagtgccggtcaaagcaagtatgccgagtgtgcaaagaacggcatcattctgcaatctgccctagtgccaaagggacatcttctgcccgttcaaagcaacagaagccctcgcccaggaacaaacagagtttcggaaatgagcgcaactcaaggccattggtgtcatccgcggttgccaatgaggctgactcaatccctgagccgaaaactgttaacacaatcatggcaattgtctccccatccgttcctcatctcgtcatgctcatggccctccgagctcctgtgttctcagaatccgcaccgaacaagcgccgtgacgcactcttcttctttgaccctggtgcgcaagtcactatggtcaagacaccattgataaggcaactgagccttccgaaactacaagacgatcagctagaggtgaatcctttccacacgcggcaacccatcaagatgaaagcgccgcaacacgttttgtgcgtccaacgagaggacggcggatacgaaactctggttgcccatcggacggattggatagtgccatcagtgcgccgtgccacattcctccagggaatgttagtgcctgtggatgaagaaccggacattctcgttggaatggcagacttttggaagtttttcaacggtgtccaacgagtctctccgcaacttttcaaagtccaaacttcgatcggttccactgtctgcggacgcgatgaaattccatcccgcccaactgccgaccatccactgtccgttatgcccgtcactgtccatgttcctgccaatgaagacgagatgcccaatacggctgtcagcggaattcagagaaacgaatccatctctgatcttgactcgctacgacaattctgggaccttcaaaacattggcatcagagatgatccactcgaaaacgatgacgagacggcacaacaaatcttcgaccagacgactacgcgcctggcaaacggaagatacagcgtaggatggccatggaagaattttccgccggacctgccctcaaattttgccatcactcgctcaaaaaccaaagcactggcctccgttctgttcattctgatgtgcctatttctgattggcgcttcccaaaccaacgccagtagcacgactaagccaaagcgtaggaatggccatccaattcgttgtcgtggatgcgaactaacctgcacaaaaaccggcgtggacattttgatcccaaatgggattgccaaattcttgctatgttgtgccgatgggactcacaaaggagag

SEQ ID NO: 78710 - DNA, 255 bp, Heterodera glycines
  unsure (1)..(255): unsure at all n locations
acagggttnggggaattgaactttagaagaagaaaaaagtatggaaggcacaaccaccaggccaccgacgctcacattggctttacattctttgaaaatgatattgaaaaggcaaaaaggaaaagcttcatatctcggccagaagcttcatttagcaaaaataaaaaaaaatttataatacaaagggggggtaatctacctaccctgaaagtttcattcggaagtcccatggtcacttgggtacctctcctttgt

SEQ ID NO: 78711 - DNA, 582 bp, Heterodera glycines
tcgacatccccagacgggttaccttatatattgaataagcaatgcgcagattgcagatttattggcacctattataagtgaactcttccgaataatcttagattatggggaaatcccaaacttatggcatacatcttttatcattctaatttataaaaaaggagacaaatctaatccaaataattaccgtcccatctctctgacatgtactttatgtagggtttttgaacgactattagcatggaatattgttaaacatcttgaaaaaacaagattttaacagatgaacaatttgggtttttgaaaaccaggtctactaccacactgttgttggtctccctggattatttttaaaaatcaatagaaaatggacaaaatattgatataatttttatagattttgaaaaagcatttgattcggtaccaataaatttgttaattgttaaacttcagaacataggtatctctggaaaaattttgaagtttctccaaaattttctatatgcaggtcatatcaagttaaaattggagaaaacttttccaaaagctttaaaacttactcgggggttccacagggcagtt

SEQ ID NO: 78712 - DNA, 67 bp, Heterodera glycines
tggcaaaatttgagggcaggtccggcggaaaattcttccatggccatcctacgctgtatcttccgtt

SEQ ID NO: 78713 - DNA, 122 bp, Heterodera glycines
atacacaaacacaaggaggaattgaacttgagaccccctttttgttgactaactcacagaccactaagacgaaaaaaccaacttaattgtacttggagcccaaaattgaatcgccgtgatta

SEQ ID NO: 78714 - DNA, 915 bp, Heterodera glycines
atggattttcagaatatctttttgcactgtcagacgacaaatgaagcggcactttgtctatatcgggcccatggttttgaggtcgttcagcaaattcatggccattatcagtgcagggcaattgacggcgaatcggcggatgcttttctactcgagcgacggtttaccaatgaaaatgatgaggagagaaaagttcgacaaaatgcggcatttcactagaacaatttttttgcgatcaattcagaaatttgttttgccattatttgtacaattgcgcgtttttgcctcatcactttgctttttttaatttctactttggttcttaactttaaagtcaatttaaatattttctgtaaataaatcacattgatagaatcttagcttttactcaatttaagcaaaatatggagccctccgccaattgtttgaaggtgagaaaattctttgtttccaagacatgggtattgttaagcaaatttttgtctatttaaattgtaggaagtcatttgtggatttttgtgaatttcaagaaaattatgccatcttttctctgcagttaaaaattataaaaaaaattttttttttaattgattcgtcaccttcgccccgatttcccaaattttcagtctgtcgccaccgcactgcacacggaggagcgactgcgcgcgctgcaggaccgttgctgggcattgtgttggcaccacaacggcaaactgttggcctcctgcggcgaggattgcacggtgaaagtgtggcattgcgttgacacggcggcgatggtgccaatgtgcagcaaaagtgacgccactactgatattgaagggaatggcgacggaatttgggggagtaccggcaacacaaccagcacaaagttggcgttgttgtgcacaatgcgcggagaccaaacacgctcca

SEQ ID NO: 78715 - DNA, 253 bp, Heterodera glycines
attcttgattatgtctatgctcgatttttgcatcaacaatgcggtgattcgcatcggcacctatgcgttggccattttcatgttttctcgaacggcgtggagagagttgagcggaaatgaaaaatttgtcaaacacttggaaaatgaggcgaccggggtgcgcaagatggacaagaaaaacattgtgacatttaattagcgtattatgtataaaatttgatttatgttgttttttgaataaattattgagttt

SEQ ID NO: 78716 - DNA, 1524 bp, Heterodera glycines
atgcatttacttttcgccttttttgtttcggcacttcaatttcattcaaacgcaaatccaaatggtcttatttatgcttacatcaataaaaaaattggaactcggcctgggacccaaaattattaatgaattttctttcttaattaatatttcgttaaaatattttcaaatctgacggagtgttttaaaattttgaaaaagaacacattaaatacattgtataggtagtctaagtttttttttacataaaacaaatgtacatatttttctacttagggtgttaactaggttttgtcgcaattcaaaaatgtgtaaaaacctaaaaaccgatggattctttctggcttttttaaatttttcttttttatacttcttttcttttttatttcatattttgagatttttagggaattttttataaaaataaatcataatgaaaaaaattattcggaatttttttacatattttatgattttcttacaattggcacctctaattatgtgaaactctaaaatttcccaccaatttgcagtagcaatcagcaatccagcggttgaagcggtgaggagcagcgaccaattggccacgctggtgcaagccgccgtcgatgtggcccacgaatttggactgatcaaacgcttgtcggacgacgactcgcggaaacggtgcgcaagtgatagaacggcgcaaggacagctgtttagggcgtgggttcgcttcccactcagtgccgaacatttttgcccattttaacgaaatcgatgccactttgggcgcttaatttgattgatgcaaactccaagtcaaatctgtttaagaaggaacagcgatgtggtttccattcagccgttcagtctcttcccgtccccattcccacgttcggcttaccaacaggcgatggatgtgcacaccgtacgcttttttcaccaataatttgcaaagcattcaaaatttgtcgtttttcaaaatcgggtacaagtaaaatttagggtctgggattcgtcctgaaaattcctattagccgaatccaggatggggccctgacccaaacgaaaccgtgactctctgcacccccgactagcccgacctcgacccgtcaccccgagtcgtacaaccctaagaattgcatttttgtgagggaatgagaaaaaattttgtgcacattttggattttcattaacttttccaaaagttttttattcaaaattatttttggttagcctattattgtttctatctaactatgattttttaaaaccatacgttttctattgtaattcaatgccatggaatgctaactctacgatgatgcaccaatttttttaggggatgcaaaaattgtactttctcgtttcttgtgacttcgactttttggtgaaagcgacagaaggaatggtcaagtcgaataatttgtatggtcgaatgatcgaaatgatgaaggaaattcatcgagaaggccaacggcagccgtacactttgtttttgacacgatcggtcattgaaatattttattaaataataaa

SEQ ID NO: 78717 - DNA, 632 bp, Heterodera glycines
atgagaatgtcctggattgtcggatggtccttttgtatccctttattccccaaaaatacagtttgcaacagtacgcctgaatgtcataagttttgttgactttgtgtgtaaacagcagcgacgttcgaattagcagcgtataatcacttaatatgtgatttgatcatgataaaaaaaaagaagcatggattaatgtatataactgttttgaaaaattcagcaattcgattaaagaaatgagaatttgacgcgaattcaatgaaattgcaatttttataaatatgacaaggaataatttttttctatgggtaaatgaactataaaatcattttatacaattttgtaaatattagaaaataaaatatttggctaaaaattttagtacaattttgtagtggttgaaaaaattttgagggaaatgattgagccctttttgcgaacaggggatcgtttttttagcccatccctgagatatcaaaagaacttaactcactttccttccaccgttctacgaattattcatccattccaaaaaattttgctcaaatagtggccaaaagtatatgctcaaaaatttcaaaattttagagctaggctatgcgaaaattctgaaacaattactgctagcttag

SEQ ID NO: 78718 - DNA, 2981 bp, Heterodera glycines
  unsure (1)..(2981): unsure at all n locations
acaaagcgccggcggccgatgaccaaatggcgcgccttttggaccgtctgaatgaatgtgttggacaactgaaaaaggaggccaacggaggggaagaaaaggttttaaataaaatgagaaaattgttattttaagtggacgagacaaaatcgcggccaaaattttaaaaaatcaaaagaaatttttccaaaaaaaactttggaattttttaagaatataacaagtataaattttattttttttattataaaatttcaaaatttttagcgattttttggaaaaattttgaaattattcatcataaaatttccaaaaaacatttaaaaaatttgcttttttctgtcttaacgatccctttttttattttttgagatgccattaatgaaaatttgtattaatttttttagggcattgacacaaaaagtggagaaggtcaaactgctgccgacgatgggacaaccgccatggaaatgaggggggatgaggaggagcagcaacaaaaacagcccgacgaagacgccgaagagaaagcgccgaagcgaacgccaccacaacaacaaaaggaacagcacgacgaagacggtgtggcagcaaaaatgcaataatttgagaattatttttttatttttcaaatattttggcaaccgggaaaggcccttaaatcaaaaaaaaattgggttgggtgtagaaatccgaaatatatttttaaattacaaaatgggatagtatttttgtcacactctctctgtcatttggccaatttttggtgccaatttcccccgcgtgcgaatcggcatttttgtgccattcttattatactttcattttaggcccttcgttggctgattgcgttcgtgaacttggccaactcgtggacacatttgcagagtaagaactaaacacaaggggggttttttgccatagttatgggcttttgtgctatattttgggggtttttgtgccataattttgtggcttttgtgccattcccccaaatttttttcagctttgccacccctccgcccactaattgttggcttccattccgtgaaaatttcatccatcgacggcatcggcccgccattctgacgttggcctccgtctacgccatttatcgtgtgctcaaatccgccgatgaagtacaaaaatggcatttaaaaaaaataaaatttgaggcacattttcctccccattttgtcacaggttgcagacgcatttctgaccctaagccaagtgctgggcataagccatgaacaaatggtgaaggatttgctacgggccggctttctcatccaggtgaacgaggagaagcacatcaatttggatcatccaaaaaatttggcatggatttctaggatattgtgaccgaaaaaaatatattgggtcatggcaaacggacgggggaagtccgggcttttcaagatgtgctctctaataataattgaaaattttttgcggatttcaacgatatatctgacataaattattatagacggaatttcgacaattccctgtgaaaaccgaaaacctgtacaaaagaggtcaactttcttgtattagttagaccttttttcaaataatacctattctaattttttcccgttctcagcttgaaacagtttcctcctccgttgacggcgaccgccgcgagcgcgaggcgttggccgacgttttcgttttcttcaaattgcccaaagttttgaggtgcgcgaacactgtcgacaagttatttgaaaaaaaaattttaaatccgaatttgaaattacaaatttttcaaaaaagatttctcattttttaaatatattttttcgaatttaatagacttttttgttaaatttcttatggggcgacttatgccaaacatgtggagtatgcatttggagtattaaatcttggcattttgcaaccaaattgcacaaaaaatatcccattcatttttaattgtcctgtatcttggtgccatcctccccgccaccttcgtcggcattggcatttccgctttattccaatcccccccctttttgcagcaaaatgttgtcccgtggggtgccccgcgcgtcggtcaccgccgcgttgggccatttgtgtgctagcgcgtcgctgttggacgaattggacgccaaaaagtcggacaacatgttccgcttcttcatggacgcgctccgtcgtgcggacattgtcggccaaactgaccacgaggcgttggtacttcgccggtgggtggacgcgccaattttcggcatttttggacacggccctcaccccctccgtttttcatcccgaaaatttattccaaaaactggaaaattaaattaaaaaaaagaaaatacacagaaagttggaaacttaaaccttttttaaacctgatttgagactgattttttaaaactggaattaaattaaattcttaattcaaattcaaataaaaattccattttaaaaaactattacaattttttcccaataaaaataaattacctaaatgtgtccccattattcattataaattattataattcaatatggccctaatttaatcaaattttgtgtttcagtgatgccgaccggggccaaaacgatgaactgcttcagcagttgcgctccaccattgtcggcatttcctcatcagcaacaagttgggcaaggaatcaacaacttttaaatgctttttttgcaattttcagcggccgccgaggccgctcaaantggtgaaggcgcgctcggagctgatcaaccgggtgcagaaggccaagagtgccattgaccgggtggtgccggagaagacggaggaaatgttgcgaaaattgatcccccacggtgtcattttggcacaaaaaaagccgtgaaaaaatttttccccaatttcagaggtccccattgacatgctgtgctccatttacagtgccagcggtgaactgtcccaattttcgggttggcttgccgcgctcaatgcgcagacgcaaatgggcggcaccaatgag

SEQ ID NO: 78719 - DNA, 1217 bp, Heterodera glycines
ttcctttcgataaattcactcaacgaacgcaagcaatcgaaggcttattgggtatgcattgatttgttggagttattgtttgaatttaaaaaaataaaaacacattaaattctttgttgtttattttcaggcgaaatttcaccaaaagaggacgagaagggaaaatatggtaacgaaaataagagatataaatcgaaaataattcaaaaaaactttttttttaagtttctgctgagcaattcacacaattgcaaaatgatcagaagaaacttttggaacgcgtcaacgaattggaaaaacaagggccgactatcggtagcattatgataaaataatattgatcattttttaccatgttttagcaatgatcaatgaacaattcgaacagttgcaaaatgatcagaagaaacttttggaacggatcaataaagtggcaaattcccaacagcaggaaaaatacggtaggtttacgatgaataatttacaatcatattgttttgaaattaacttttctctttttaagtttccgttgaacaattcgaacagtttcaaagtgatcagaagaaggcaatttttgaacggatcagtgaattggaaaagcagatgaaagaacggatgcagaaacaggctgatgaggaaacggggccattggcaaagaaaggtaagtgggttcagagagcccgatacgccacttaatccgccggggtgggattttgagggattcccaaaattgcgggattaatcctgcgggattcagtcccacacggctcgcgccgtaaaacgattttgagataataatttgtgctcattgtcatgatttaatttgttaatcaatctttggctttttgtgaattctttaattgtttaagcattattggtcgatgaacaattcgtgcaactgcaaaatgatcagaaggcaattttggaacggatcaacgaaatagaaaacaaacgatacggtaggtttacgataagtgcttttgaattttgaagaatcaaagtttacgcaatgtcaatttctttcatttttcagctgcagctgattacgtaattggtgtgaagaatgacttaaacaaagaagcaaaagaattgaaagaaaaacaaaagcagtttgcgcgagaaaccattggtgagttgatttgaacaatgtaattttatgcatttaaataaacatttggttatttcagcgaatttcgaacggttgtcgaaaaaatacg

SEQ ID NO: 78720 - DNA, 3052 bp, Heterodera glycines
atgtcctgtaatccttgctgctgtttgaagcttaaggatgccgctattagcatcggaatttggtcaacggtgggtaatttcggttaaatatcggaggaaaaaataagacaaaactcagtgatttcttttgctgatattccctcactttgtcaattttgattaattttgttactccaatcactaagtgatgcagccaatttcaatagttttggccgtaatttccgtgctcagttttcaaatgcgacggtcggcttctctgtccccaatttcacacccatttgataattacagattaatttttattttaattatcaaatttaaaaatgatgagtgaagtgcattatgcatgattagaagaaatcgctgccctttgtgcgatggtttcacattataatttgcatttgacattttgtcgagactatcagcagaatactgtaatttcgcattcgttctgtttgtttcatcccaattaaagatttactctctcgcccaaattgccgttttcggatggcaattcagcgtcctcgcccagtgccaacatgttataatggcacagtccaacctccaatgtgactattactgtccctgtgttggcgcttcaaccgcgcgaacttccgcaataattgagggtattttgtggaaaatgtaaaatattaaaatgcatttttacgataatttgtttacacattgcattttttgcactttaatttcagtatttattcctttttaattatttattttttattctttgtttctctctcaacttctgctgctgatcattttcattattattttttgtgttccaacttttgtgttgatttttttatgtattttaaagtgagggaatgtttcggtgttttaaattttttcgcattttaaatttccaattttttgtcccattttctttcattgatcaatcaatccaacaactccaacagatatacagcataatgcaattggccattttcggttggcaaatggccgccataaaatacgaaaaggaccgcgcagcgaacactcttctgcccaattacaacacttatggtcgctacgacattccgacttattacgaaagctattggcaatcaccggaagaacgctattacagctgtaaaagcattgtttaagtgaaaagagtgtgaaaaatgcaatgtttaaacaaaatgaaaattgtcattaattacttttttaatcattttgttttgcccggcccaaattacccaaaatttcagggcttttcgtaatccaaatcctttgtctgatcgccgccttctttcttctgttcgcttccattatgatgatttatggggtgcacacggtaaatgaggtgtcattcaaccaaaatgaaattccgtccccgttgacagtggtcgcgcttccttctcgtgccgtggatggtaacaatgtgcgcttccatcctcacttcgttcgcctattgtgcccatttgcttctggtccccaaaaatgcttttctcctcctccccattaaggtttaatttggtgggctggcgatgtgagggattattggcttctgctaaccatcgtcgaaatgttcggcgttttgctcaatgtgtgccattggctaattctctttcctcatttgggcattcgcttaaggtgtactgtttcctcgttattgttatgttccatcggcgaatgctggtcgaacttgagtattatgcgagaagacgaaagtacgaccgattcagccaattgccaagtgaaacggcacaccagcaaagaacagaacgaggcaagaaatgatgagcaagaagagcatggctaattgggtaaaacattcagcagaaatggacagaaccgacccgaggcccagcaaagagacggcacttacgtgccaacgccccggcgcggaaagccaatggccctaccaatcgcctcatcatccattggccggtgctcaattggcgggtgattttgatgcaacaacaaaccaacggccgaatgaaatggcagacgaaattcacacggcacgacaattggaacaacggcaccaaaaaaggggtaaaagagagggggggggggtggcatggcaaaatgtgaattcaaatatatgctagtttaaagagtcagtctccctaattgtttaccaaagtgttatccttctcggcattagattcaccgatcattttgtctcatcttcaccaaattcggtccctctcggcgatggaacgtccgctacaaaagcctcaatttgatgaatacggcgaaatgccaaggagagatagacggaggaggccaacttcgcacaggaaaaagtgggtgacatcgaattcagttgattacttgtccctcatcgtcgtcatttcggctttcagaagcactccctgcggaatgtgccacagggaccaatcccaccgccggtgccattgttgccacgcgtctaagcattgtcattggcacggtcattccgctgaaaggcatcacaaagggtcgttctcatcgtcaagttcgaattctgcacttggcgaatattcggcagaggaattgccggcctttggacgaagaacaagcagaaaaggacgacggagtaggagaaaaaggagcagagaaagagcacgtgaaaacaccgcatggtcggacagagagagcgaattgtaaaagaggggggggggggcagagaaagagagggcggcgcatttcgggccaattaagcagcgaattgggccatacggtgcgaagtgaacgcgagtacggtaatgtgggctcattggaaaggcgatggacaagaccggcaccccacaagcaattcccaactttcgaggagaggcggagacagcagcagcaacaaagcatccgcaaggggtgggaaggggggcggggaagagaaaccatttttggagtttgggtcaatttgtagccatagggagccgatgccccgggcggactcggccagcggcactttgccgcttcagccccagcccatttcggcacccccaccaccggctggcattgctatcccacagcatattgtgatccctcccgcacaaatgggtgcgcgaaggagcgaaacatggactcgcgggtaattaat

SEQ ID NO: 78721 - DNA, 796 bp, Heterodera glycines
atgtccatatcgattctcaccctctacgagccgttccaccaatttttccaatttttcaagccgttcgatgattgggataagggtaggattcccagacccctggagcaatttttcgagtcgttctagacgaacgagaaattttcattttgaataccacaaacaaaacaaaacaaaaaatcagatataaattttaacatcattgagacacaaatacttaagaaaactgccaaataaaaatggtacttctccggataatatttcctataaaactaaaaaactgccactcttcattgccaactgttattctgacttgtttcgattatctttagacagtggttctcttccaaacatttagaaggaatcaatcgtctttccactttttaaaaagggggataaatttaatccagaaaattatagacctatttccttaacctgctcactttgcagggttatggaaagaattctcagcaaaaatatttataattttctattaaaaaataataaaatttcagagttccaatttggttttgttagaaataggtctacaacaagtaaattaatatcagttgttgaagattggtacgaagcaatcatagaaggaaaaaatgttgattgtatttatattgactttcaaaaagcttttgattctgtccctcacaatttactattatataaattagaaaaaattggtattaggggcaagcttttaaaatggataaaagaattcttaagtaacagattttctgatcacattttacaaataacaagaaatgcatattcacgtatgcgatccttg

SEQ ID NO: 78722 - DNA, 1208 bp, Heterodera glycines
atgccggaggcgatggacggacgggcattggtggaacaaattgcagaagaatgtggcatcaaagacaaactttcgccggacattcaccgccatccaaggacaccacctgagagcggggcaaaaagggaccgaattttgaaggtgccgtttttggataaattatcacgtgacaaattcctttacaattttcgtaatgcactgaaaaaatttcctaattttccacaattcatcaaagttcgcagggatatgacccaaagcgaactcaaaattttgtactccctgcggcaacaagcctatcaggccaatattgccgcaggtgagtacaaatattttgtggtcgatttggagatcaaatctctgaaaaacccccgcccgctcagaactcgctagggatacgcgagcaaaccaaacaaaaaaattaggaataagggagaaaaaaatccctgggtttcctgcctattaataaatgcccgatcaatttcaaataaaatatctgatttagaacatatagcacaaaagtatgatccatcaatattcatcatcaatgagacctggttaaaccccagaaatacaattgaaaatgaactatctataaatggtagatatagagtaattcttgcgaaccgaaatgagaaaaagggcggtggatcagcaattctaactaaaacaaatattccttatcagacactattctctgggacaaaattccaaagcgaaattttacacattaaattactttttaaaaaaccaatccaaatcataaatatatatcgtccaccgaattgtacagttcagaatactaaaaagctactcaaattcatttcggaccagagtaattctgaaaatatcatatattgtggggattttaacatcccaaatattttatgggacgacaataaggtacttcaaagaaatgagcctgtgtcaaatttattgattgagtttattgaccaaaaacaattgaaacagcatgtcaaacaaccaacaagagaaaaagctattttagatttagtaattactagtgaatcagaaataattaatgatttaacagtacttgaaaatttttcaacttccgatcacaaaatggtcggattcaaaataaagggaaaatttagtcgtaataatcacagagtttatagaagagatttaaaaatattaatttttcgaaattaagtcaggcgatacttgaaaatcgaaatgatttagca

SEQ ID NO: 78723 - DNA, 583 bp, Heterodera glycines
atggcgggggggggggggtggagcggtaatcgaagaatggtggaaggcagtggaaggaggaggagagaagtggtgaggggaggaaaacattggtaaatggaaggaaggggtaattcacaatcagcagtggaagagggatgagaagtgggaagtgttgcctggtactaaaacattcattcgtttgtgagagaaactgaatatgacagtaaacgtgtacatgtacgtcgtacatgcgattatcatgaaaacaaaaaaaaagaaaacgcaacttcattacaggaggaggataagtatactgtatacatatttgtggagcaaaaaaaatatatgcttcagtacccgtatgcataaagatcaggatcggatccccggatcgtgatccacgaatcactgattcgaggatcgaaaaatccgtggatcaaaatccgtatgcataaagatcggattgggtatcccatggatctcgatccgtggattgtattccttttcttttcctcagtagttctcatcaaatccaacgctattttcctttcctctaaatcgacctgatccgcggatcactttatttaccatgaataataaa

SEQ ID NO: 78724 - DNA, 1655 bp, Heterodera glycines
atgggatacccaatccgatctttatgcatacggattttgatccacggatttttcgatcctcgaatcagtgattcgtggatcacgatccggggatccgatcctgatctttatgcatacgggtactgaagcatatattttttttgctccacaaatatgtatacagtatacttatcctcctcctgtaatgaagttgcgttttctttttttttgttttcatgataatcgcatgtacgacgtacatgtacacgtttactgtcatattcagtttctctcacaaacgaatgaatgttttagtaccaggcaacacttcccacttctcatccctcttccactgctgattgtgaattaccccttccttccatttaccaatgttttcctcccctcaccacttctctcctcctccttccactgccttccaccattcttcgattaccgctccacccccccccccccgccataattttgcttccttttctttccacatacagctagctctttacatctctgcatttctctgttcttttattttcgctctgtctctctcttttcacaatcatcatccacacatactacattcggcttgttccccgtgacatttaattatttccacttctgggtctttccatttcatcatttattctttccatttcatcatttattcttttctaatttgtacattccgtcatttggtcatatgacagctaattgaatttaactcaacgcatttatatttgtcccattttttatttaactcaatcatttatctattttgttccttctaattttttagcgaatactctttattcattataatgcaaatctttgtcaagaccctcaccggcaagacgatcaccctcgaagttgaggcgagcgacaccatcgagaatgtgaaggcgaagatccaggacaaggagggcatcccaccggaccaacagcgtctcatcttcgctggtaaaactccctttgctagacattctcgtaaacaattactgttcaggaaagcagctggaggatggccgaaccctcgcggactacaacatccagaaggagtctactctccatcttgtcctgcgtcttcgtggaggaatgcagatctttgtgaagactctcaccggcaagacgatcaccctcgaagttgaggcgagcgacaccatcgagaatgtgaaggcgaagatccaggacaaggagggcatcccaccggaccaacagcgtctcatcttcgctggtaaaactccctttgctagacattctcgtaaacaattactgttcaggaaagcagctggaggacggtcgaaccctcgcggactacaacatccagaaggagtctactctccatcttgtcctgcgtcttcgtggaggaatgcagatctttgtgaagactctcaccggcaagacgatcactctcgaagttgaggcgagcgacaccatcgagaatgtgaaggcgaagatccaggacaaggagggcatcccaccggaccaacagcgtctcatcttcgctggtaaaattccctttgctagacattctcgtaaacaattactgttcaggaaagcagctggaggacggtcgaaccctcgcggactacaacatccagaaggagtctactctccatcttgtcctgcgtcttcgtggaggaaagaactgtattgatgaatga

SEQ ID NO: 78725 - DNA, 106 bp, Heterodera glycines
atgacagccttctcggtgacgacgagtgcgatgacgacggcgaattggcgcagaatggaaattccgaccatttcgacgaaccttcggctgctgctttgcacgaatg

SEQ ID NO: 78726 - DNA, 742 bp, Heterodera glycines
atggaaccaacacaacatatactgataaaggtaggtgcgtaacatgttagagttagttacgtgcaagtgtcgcaatccatttttgagtcaaattttcagaattttcacaggcaacgcctttcgacatcgtcggacccattactgaaaagaaatttttgtaaaagtctaggtctcgagtcttgtctcgggtttttggttctcggtatcgagtctcggggtcaagtctcggaatcggtttcgagtctcggggtcaagtctcggaatcggtctcgagtctcggggtcaagtctcggtctcgagtctcgactcgagaaaagtctcgggttttttggttctcggtatcgagtctcggggtcaagtctcggaatcggtctcgagtctcggggtcaagtctcggtctcgactcgagaaaagtctcgggttttttggttctcggtatcgagtctcggggtcaagtctcggaatcggtctcgagtctcggggtcaagtctcggtctcgagtctcgactcgagaaaagtctcgagttttttgggtctcggtatcgagtctcgggtcaagtctcggaatcggtctcgagtctcggggtcaagtttcggtctcgagtctcgggaaatttttggtctcgagcatcactactatcggcaccgctggccctgctcccaatgccacgccaagacattgtgccattttttgaccattctgattagtctaatttctcaattactgtactgcaaaatgaaa

SEQ ID NO: 78727 - DNA, 62 bp, Heterodera glycines
atgtggaagaactacgatttcatcaacaacaattgcaagaattggacccgtgatatgatcgg

SEQ ID NO: 78728 - DNA, 739 bp, Heterodera glycines
atgtacaccgatcgagggctggagtttgtggcaaaaccgttgaaggagttttacgcggagaagggcattcaaaagtttgagaccagttcaaagaagaaggccgccgtggcggagcgtgccatccgcaccctaaagactcggctgtacaaatatttttccgccaacaacacttcggtttgggtggatgtgctgccaaagtttttgagtgccatcaacaactcggtgtgccgcgcgaccggccttaggcccaacgaaatcagcgacgccaatgcgagggaggtgtggaagagggtgtacggcgaaggactcgcacaattggacaagtcaccaaaaatcagagccggggaaacggtcagaattcccgagcctaagcacattttcgagaagggtactgtatttcacacattttttcggtcaatttattttaattttaggttatatacccaattactctgatcacgtttacacagtggatgaggcccgctcaaccaacccccagcattatttgctcaaagactattatggcacaaagttgaagagaaaattttatttgccagaattaacaaaagtacaagtggatgaaaacacaatgtatcgaattgaaaagaaatacaaagaacgagtgagagatggtaaaagagaaatgttggtgaaattcattggatttccggaaaaatattgggtcacaaatgaagaaataaatgaataaaaatattacaaatttaatgaaaattaaaaa

SEQ ID NO: 78729 - DNA, 314 bp, Heterodera glycines
tttgtttggtcattgacgcggacggtctgttcttcgtcaagaaatgttcgcagctgttcaaagggtgcacagacaaagtgatcattacgccaaaccacagaggcaaaacgcaccccaaaagcaaagcaaacaaaatgcatgtttcttaagattttgttcgggtttatacccaaatgttccctaaccagcagaagggagaggacacggacgaattgaaaattcaatgcgaaatggcggaacaattggcaaagatttggaagtgactgtgatgagaaagggtcggtggcacagaaacgcaaccgaaaaatatgagg

SEQ ID NO: 78730 - DNA, 2189 bp, Heterodera glycines
aacagattcaaagacatctgtcaaatggaaggcacaagagaagacagcaagaaacaccgtactattcaacgggagattgaggtcgcagttgattgggagagccacccgattgcaatatctggaggacagcccagccatgaaggcgttcttcgacaactgcccggactccggaccaattgacttccacgacgccttctttggcggtatttttgggtttaaatttgcaaaataattttgggcacaggtcgaacagggcccgaatatttgggcgcttcggtgatcaaccctgagacgggcgactggaagagccgtacgatcaaagtgaaggactttaacagtctttatccgtcgcggtaagaaatgtcggaaaaaaaaatgaatagttgaaaaatctttggcactttaaggaatatgttcaccaattatccggttggccacccgaccgtggtgcagtttgacaaggacgtggaatggaggcgtcaggaggacgttgttggcgacgacggcatccgccttgagggaatcatcaagtgcttcgtagtgccgccccgccactgccactacgatatcccggtccttccgtaccggctcaacaaccgcacgctgtttcccctctgccggacgtgttccgaaatgtacccgcgcggcttgatcgaccccgagtacaattgcgatcattttgaggactctgaaaggggtgagtttgaagcttgtaattaagcaaatattttttcttaataggcttttcgacaacagtcacacacattgagctggaagccgctctccgctcgtggtacaaggtgacgcatgtgtaccgtgcctatatctggcctctggcgtgcgattggagcaatgggctgttccactcgtacctgctgaagttcctcaaaatgaaatttgagggtaaaatttgaaaaacttaataaaaaaaaaaaaaaaaaaaaaataaacaaacaaaattttaagcaagcggatatccagcgtcttgtacggaggcgggcatcagcgaggaggagtcggcacggagaaagcaggaacacatcgacaaggccaaagaaaaggcccaagtccctcttgaggcggaccgaatcaaacacaaccccggactccgctacctgtccaagctgtgtttgaattcgctgtggggccggttcgcacttcggtaaaactttttagaaaaatttataaaaaattaaaaaaaatcaatagaaatcggctcaccaaaaccgaaatcgtcgagtgccatgcggagctggccaaactgctgaacgactcgaagattgaggtcagcagcatcgatcagctgacggaaaagttttggatggtctgctacaaggccaaggatgagcatgtggtggaacacagcacgagcaacgtaagaaaaaatttgaaaatttgaaatttatttgcctttctcaggtggccattgccttatggactacctctgctgcgcgaatccatctgctggaatcgctgaaaaagttgtatgggcctgctccgggtgttgagcggtacgacacccgtattctctacatggtaaaaaaatttggaaataaatgaaaatatgaagtaatttttataatcaggacacggacagcatcttctacgactacctgacgcagctgggtgacccacttccgggtggtgagcagctcggggagctcgccgacgagtacccgaaccacacgattatggaattcatttgtggtaagactcattaaaaattaaacaaaataaatggaatgtttgtttagccggccggacccaaggcatatggattgtggctgcgcaacaacgcaacgggggaggacgagtacaagctgaaggtgcgcggcatcacgctcgactcggatgcctgcgagcgcatcaccttcgagaagatgaaggacatggtgcagaacaagctgggacagccggacaacaacgtccgcttcaactacccaacgaagaactttcggatcaccaagaagggagagattttcaccgtccccttggtcaagcagttcaacccgaccgtgaataagggggtggtcagggatcacgggttgaaggtggtgccctttgggtacagcgacgaagagtggtgtaagtggaactgccctggcgcttgcacctgtctgttcaacccagacctcaatgtgaacatgttcacagaagaggagctgaacgaccccgacattatgccataa

SEQ ID NO: 78731 - DNA, 1188 bp, Heterodera glycines
atggagcccggagcgaagaagcgcagaaagaggaaaaacattgacaacaccaacggcgaagccatggaatgcgaagaagaagaggatgccgtagatgaggacgccgagaacaactggatgctggggtatgaagaagccggggagaagccggagtcggtgacaacgtacgcatacgcccacgccggtatatttgaaaataaaatttttgtaaacataataaattgaaggatctcgatatgatcacgtgctgatttatggtgaaatgttgcgcatgggagcccgccccgaactcatccgccaaggcaaccatctcctggaaatgaaggcgcgcaaaacaggagtctacacacccaccgtgtttcgggacaggtaaaaattcgaagatttaaattatttaaattgttattcattcagttataagctgataccgatcaaattggcaaattttgtctagacgtttggcctggaaattgagggcgtggaaaacaagaaatattttccacacaaattcaataaggtaaggataatttattgaaaaattgataaaaaattaataaaaatttaggcggaaaattatggcactgtgttggacaccctgcaaccaattgagaattattacccaggtggactcttcccggcagagcgcacaaagtttgagcagtggtacgaagagaaccgagaaactgggtttgagctgagcgaggtcatcgcggactactgcaagactggtaaaaaaaaatatataaataagaaaaattttaacaaatattttgaagatgttcaaatcctggcacatggtatggtaaaaatgcggcagatgttcttgtccgagactcggcatgacatcacggattcggttaccatcccatccggctgcatgaagtattgggtgcagttggcacaccacgacaaagagcgcgtcgccattattcctcacttgggatacgagaagcgcggcaagcaaagctccatcgccaggaaatatttgaaggtgtgccaaaaaatattttaaatttacattttcccatctctcagtggcgtgctgaggaggagttgcgtgagaacggccgggtcctgcgccatgtcgaaagccctggaggggagttcaagttcggcaactacagcttggacgggatgatggagcggccggatgaggacaaaaacttggccattgaggtcaacgggtaa

SEQ ID NO: 78732 - DNA, 630 bp, Heterodera glycines
caagagtgaaaataatttttaaatttgaaaaaaacagaatgccaagggttaaaataatttttaaatttgaaaaaaaaaaaaaatgcaaagggttgaaataatttttaaatttgaaaaaacagaatgccataatttaattttgaaaaaaaacagaacgccaagattttaaatattttttaaacgagaaaatggggaaaacaaatgcaagaaattggccagaaataaataaggaaatttggcacaaaaatgtgcaaaaatttggcaagaaataaatagggaaatttggcacaaaaatgtgcaaaaattggcaaaagaaagggttaaaaattgtggcaaaagaatgccaaaaattggcaagaaataaatagggaaatttggcacaaaaatgtgcaaaattagcaaaataaagggttaaaaatttgggcaaaacaatgccaaaaattgacaagaaataaattgggaaataagggggcaaaacaatgccaaaagattgcggcaaaatggcacaaaaaacggtgccatagtaataataatgccaatctggcacataaataataaatggcaaaaaaacaaatgccaaagaaggaaaaattaatgcataaataaatgataatggattattgattggct

SEQ ID NO: 78733 - DNA, 1285 bp, Heterodera glycines
atgagtcaattttctgatacttcccagcccccaatgctttatgggccctattcccctgttggggatgatggtaccgaactgatggataaagcgccgcctctagaagacatcatcaaacacatgcctaataccgtaagttttggcttaatgtttttctaaaattcattgctaattatgcgagacgttttcaggttgtgccgtcggaagagaatgagtgcaaggcccgaagggagccatcgattacccgcgagctggacgcggagttgttcaacggtgacggatttgcttgtctctctgccgcacaggcggaagctggacggttcaaaggtgtggttgtaatcccaaccttttttaattttaaaatttccaattttattaatgaattttcaattaagatttgtaaaattattttttcaaattcaattattgtccattttgaacgaaatatttttaatacaccgtttagcgtttcggtttattggccaatttttgatgagcatttcgttcggcgctgttttcccagaggacatattgcgcaacctgtttaccatgtgccttgcctatgcgattgaaggagctgagtcaatgaagatcacggcggaccacttcattttcctcctgacgtcaaaacaccttgactacgaagtggctgtacactttaaaaaaatcgacaacacggcaactgagaggattctaactcgcttcgaaatggtcgaccaaagcaacaaagctaaggaaaggccgtcgctcctcgaggagccttttgtaattgacatcacggcgatcgagagcaagtgcgccaaaccgaaaatggctggaaaggggcgtaacgacctcaatatcgattaccgtatcgccgatggtgcaacgtatgagcttctgaacaacgacaatctctgtctcttccggtcgtttgaaatgctacggatgaaatttgtcctcgcgcaacagcgattttcggaatacaagagggatgagagaaagcagcttgagggtgtttatgcatagtgccgtggatgcgacattgacgtgaatcagcccttttattccattgaggaatacggagaaaggattcaggcattgataaaaaattttattaagttaagttattaattaaggaatattatgctgcgcttcatccaggaatgtttcgacttttttgctttgacacatttggaaaaatgaaaccatcgtggaaagcgaatatcaatgaatacatgcatgagctctgtgtggttttttatgagggtgctgatggcggtgtggggcattacgacgcaataaa

SEQ ID NO: 78734 - DNA, 340 bp, Heterodera glycines
atgccatttttccatgccacctgtaatcaatgcaaaaaccatccgaactcagagacatatttggagaaccaagagttgcgcctttacattggcattgtggactttttcacgccattcagtggaactcggaaacaaaaatatattggtggtcttaaaaattatattaatgtggaaacaaaggatgctaaggatttgatggcatatgtgaagacggggagaatttgggtaaattaatcgaaaaataattttaatttgaaaataaatcaaattatttataattttaggaaacgtttggaccgattccgcctccaatgtatgcagatcgtatgttggcttttag

SEQ ID NO: 78735 - DNA, 1782 bp, Heterodera glycines
atggtcggcaaattaaatttttatgctgccggaatattatacaaagaaaaagatgaaaaagtgcaaccaattgataaagggccagatgagaaattggcaattgagaaaatgccagatgagaaagtgccagatgagaaattggcaattgagaaagtgccagatgaaaaagtgccaattgggaaatggcacaaattcgaagggcaagaaattgaactgatgccaagagaaattgatatgacaggtgaataacgaaaatattaatttattatttaattcactatatgatttaaaattaaattaaatataattaaattttgccatttgaaagatgaaaatgacaacatttgcattgaatttttggcattggctgatgctgatgaaatgaaagacgatgcgcactttaaaatggacgataaagaacgaattcaagcaaaattgggcaaatatatttgcaaaaacatgaaagaaaatgaaaaaaacaagcaaaaaaatcccaaaaagctaaattacgactttgattggacaacggtggacgatgttcaattttatgcggaagaagcaatgggcgaaatgcgggtgaaatttggaattacttacaagaaattagcggtaaaacttataataataatattaatttatacgcaagtgcgtacgccgcaaataaaaagtggtgaacaacaaataaaaatatcaaataagaaaacggatcaaaattaacggtttcaaggagttaagtaaattcattaggattatgtaatctcgcgccttaggtagaagcctatagaggcgagacatttgcacaaaaaatgaattgtatcgaacgaatgtggattagcaaaatatagatttaataatatttaataataacattatcattttcttaaattaggtcaaggcaatgtataagattcatttcgctaattttagtatacctaaaatttgtcgtaaaataattcttagacttttacctacgattttaagagattcttgacgaaaaaagaatattcttcaagtggatttttattgcctaatctaacaccaagcatttgtattcataaaaacatggaaaacctatttatttacgataaaagtcaatttaaattttgaacaattaatagactaaaaattaaaactttttaggattcttttctatcggatgacttaactgaccttggtgtcaaagggaaaagctcaaacggattctatcgtacgaaagacgagatttttttgttaaagcaaattccaaaggacgacgaagcgaaaataattgaaaaaactttagaaaattattttgaacatatgatgaaaatgggagacaaatcatttatcaacaaaatctttatggtgtttcgagtgcaaattaaggtaattaaaatttcaaattaaataaaaacaccattaaatcaaatgtgtattttttattatttcatttttttattgtaaacaaattttcgtttcctttttttgtggtacttattttgtttaggggatacttttaacatacaatttcagatgcgtataaatgtgttttataaattaataaaataagttttaacaaattttcgaattttacatatatgttcatatggtttttaaacaatttttgctgataaaaatcctttcccagaacactccaacactctttctgctgatggaaaatgtgttcaaaaatgccaaggatttgccacttttgaactttgatgtgaagggcgtcttctcccgtcagcccaaattggtcgaagttgacccaaaacagcgtttaaacgacgtcgtgctcaaatg

SEQ ID NO: 78736 - DNA, 1052 bp, Heterodera glycines
atgaccgcagcggcaaaactcagccgtttcttccgccgtttggtgcacgtccgacagatggactttgaattcgctgcttggcaaatgctttacctgctggtcaatccgcaaaaggtgtacaggaatttcatgtacagaaaaagtttgttgtccctctcaattaattcattaatttctaatttcgttcagaagccaaagatcaatgggcccgcgatgaccccgcctttctcctccttttggcactttctctgctcggctcgagtgttctgtttgcattagcgctcaatttgtccttttcttcgttttgcgcctttttcctttgggttgtgttcatcgattgcatcggaattggcattgccattgcaaccgcactttggtcgctattttgcgatatttactctccgatttcacatatttttgtgtccctccctttttaggttcatttcaaatcgctttttgcgtcggacgagggattgcgacgtggtcgagtgggcctattgcttcgatgtccatttgaatgcttttttcccgttgctcattcttctccacgtcattttacctttgcttttctacggtccctctttttttctttttttgaacaaaatattttttaggattggttgattaccaaaattttctcgcccgcttttttggcaattccatttggtgcattgccaccatttattataattacattactttcctcggctataccggttgtattttaatgatcaattgaaatatatttaacaatgtttgttttcagcacttcccacgctgaaaaacacgcaattcttcctctacccaatcactttccttttcattttcttcgttgccgccacaagcgccggttggaacgtttcgatcaccgcgatggacttttaccatttccgagtaacgaacgcagaccttagaggatgacatggagagagagaaagaggaagcaaaatagacgaaggaccatccccaacttaaaaccaacccaagtcattgtccgttccaaaagagtgcataaatatattccatagacaaaaacaacgtgttcaaataaa

SEQ ID NO: 78737 - DNA, 587 bp, Heterodera glycines
atgtcaggatcagggtcttatatcaacttgccgagatcaggattgacattaggaatccagctaggatatgattaccgtagttcaaatcccggtcaaaaaacttcttctttttagctaatcgaggcaaattacgaaaaagcaaatctccagcactattaggcgctgaagcattctcagacagagaacagaggacgttagaaaaatttcatgagagattcgaaagggaaagaaaaatagcacgggaagagagaaaaagacggagtaatgaacgacggctagagagtgaaacagaagaagagagtgatgaagaaatggtattggacaaagaaaacacagacagtgaagagatggaaaaaacagacataagaaagggtggagaaagcgatgagaaaggaagaaataacaatggcaaagaaaaagtggaacggaatgataaaagaaaaagccacagcggagacagagaagaaaagaaagcacagaaaggaagaaaagaatattgaaaatgaacggagagtaatgagtagggatgggaattttaaaaaaaaattttgaaaatgttaaactaaaaaatcgggttttttcaaaaa

SEQ ID NO: 78738 - DNA, 511 bp, Heterodera glycines
atggaacatttccattgcactgcaaaacctgcacaagcgcctaatttccgaaggacttcaaaaggtaatttcctgttatcagaaaaagaaattgtctccttctcaaaaaaaattgtctcccgtttaacgctaccgaagtgaccccgttttcgtagaaacggcgcgtatgatcaccgcgctcatttttgccaaatcagcatttaactgctgcaaactgcgctgaacgacatcgtggggcaagaactggaccacaatttgcttataaaataagttccttcagtgttccctacaatttcgcgcttcatcgaagttcttcgaatggatcagcgtgcgcgcgacgccgattatgtgaacatcgtgaacggcgaagaaccaccgatgaagaaaaagaagtttggaaggcggaaaagcgaatttttgaatgttatcgaaaattttgatgcccaaaatattattgtttctcaggggaattttaaataattgtgttatggaccgtggttttgttaataaa

SEQ ID NO: 78739 - DNA, 1664 bp, Heterodera glycines
  unsure (1)..(1664): unsure at all n locations
atcggcgctgaagcttctctatcgggcgcgacatcttttgcttttggcccatggcgagcagcatccgtatatgggtcaaattgatgtaatattctacagataatatttcaagaagcaattacaataattggcaggccaatatcggcatcattctgtacgccttgcaagaatttgacacgtcgctaaagttcctcaacaatgctttaaccctctaccaaaagtacggcgtccctgtcaagacggcccttctccaccacgtgatcgcccgtgcccattcgtgccgtggcgatttccgcacggctctgaattttgagaaggaaacattcaacatttactcacgtgtattcggcaaagaacacgagaagacgttggtcagcaacgaatgtttgcgtcacctcaccaaacaggcggtcaatttccaaaagcatatgaacgacgcatcgcaaggcctcaaaacgtccaagagtctcgtgccaaacgtaattgattcagttaccattccctgtcattttcgttctctttttagtttcaagtacattctccttctcttcccaacattgtcgagctgctcaacgcatttaacaactttttgtaagtcttactttttgagacttactttccgattttaaatatttcgtttcaggttttggaagttgcaaattcacacggaatgaagcagccttcgtcatttcttccctaagacaaaatatattgacatttgttgttgcgtttctcttcaccattttcttattcttggcacttattgcagttgttatttgttgtttttgttttcgcgctgatatattctaattaacttagatttaccatttgcctcaaaagttcaatccatataattttgtttgtttatcttttgtttttttataaagcacaccaccattgctcatctgcgcagctttattaaatgatacacttgtaattcgaatggtattcaatttcatttcatgggtactgtagataatgcttccttcctttaacatttttaagctcggaaaccgttccgaatactgctcagaaatctgactccatttaattgcatttttgttaatatttttgggaaaaaactaaaataggatctaaaaactcgaaaaatagcttaacaacaacaacagaaaagatgtttttcgtgctttttaggtcctggaaactttttggcataaatatttttctcgctaagattgacttatttttcggaatttctccgataaaattctaattttgccttaaaagaaaaaaattcattaggggtcggggtcacttcgccgcggngccaactcgccgcgccttgtttttttttttgttaaaaagtagtcatctctcagtattttaattataaaattcagatgtttattaacaaaaccacggtccataacacaattatttaaaattcccctgagaaacaataatattttgggcatcaaaattttcgataacattcaaaaattcgcttttccgccttccaaacttctttttcttcatcggtggttcttcgccgttcacgatgttcacataatcggcgtcgcgcgcacgctgatccattcgaagaacttcgatgaagcgcgaaattgtagggaacactgaaggaacttattttataagcaaattgtggtccagttcttgccccacgatgtcgttcagcgcagttt

SEQ ID NO: 78740 - DNA, 801 bp, Heterodera glycines
  unsure (1)..(801): unsure at all n locations
atggataatgaatgcgcacagcttaaatttgaaaaagccgaaaaagagaagcacattaagtacctcgaggtagagggcgcaaagaaagacgaacaattggataaaaaggatgaccaaatcaaaaatatgcaaaatgatgccacaaaaaaggtggaaatctgataggggagggaggagggggtagggggttaacggccaatttacaaagagtgtatatacaagccccgtaaattgaatttttgattttttctgttacttaaatgtttgttcaatttttgcgagataaagcaaaaattcaaaaaataattagttattaccgaaaggtgttgctctgcttgtagtgtgtcgacttcgcttgaacattgaagcatgcctcgggcattttgcccaatttttcaaatttcttactctcggaatattcccaaaggggaaaaccctccatttatccattttcctctgtgtctctcccgcccattgcttcttcttctccaatgtcctttcctccacgtggcagaccattgattgtttttgtcttcactgccatttgcttctttctctctccggtttattgctcttcttatttttgttggttgtataccagggatggcacggaattccgacttccgagttccgacttccgacatttttggggtcggaattccgacttccgacttccgaaaatttttggggcctcggaatcccgacttccgacttccgaaatttttgatgaaaagtcggaatttttcggaatttttttgagttttttttcaaaaattagcattntttgtacaatttatgtta

SEQ ID NO: 78741 - DNA, 479 bp, Heterodera glycines
atgcgggtgacctggccacggtttggtaagtgctcgtccggtagcaactcccattcccatttcggtcgttcatccacacaaaattgtacacctttttccaaattttaaacacttccagcaattgaaatcgctcacattttcttggtagcccctgtcacggcattggctttgtgtccgaacattttgtgccggttctttgctaccagttgaatgagtgagcaaaaagaataacaaatgccgaattattgggcgcctgtttctgccagtggcatcaccaattgaaaaggaatttgctaaattaaggaaaagcggtcaaaaacgtttaaagagtgatgcctgtgtcgttgagataggcatcgatttgtcggtcattagtggcatttgttagcgtgcggaaaagcggacatgaccaattggcaacgaaaaaacactcgcccaattctttcgcctgtaacgtaccaaaagataaccgaaaaata

SEQ ID NO: 78742 - DNA, 999 bp, Heterodera glycines
atggactctttctccaccttccgtggtgccaaaggtggcgatttgtcagtgctcagttcgctcgtttcccttctgctcgttgcccattctgttggccaaaaaatggacatattcaatcggctcgccagtctgtcccgtcgtcagttgttgttcgcctttttgcacggcgagtcgctcggttacattggcagcagtcgatgggtgtgggacatgggacgagggcatttccctgccgtggcaaagaacttctccgaagagtcgaagaatgtccgacagattggcgtggacgaactgtcctttttcatggaacttcaacaaatcggcgcgtcccccaaactttacgcacacaccgacgcacaaatctacaagcaaaacaaaagcctggtttgttaacttaattaaaagacgattttagcatttcttatcacactgttcagattgatacggttcttcataatgcaaaaggaagcggtgaacatttccatttcgtcgatccttcctcagtgccttttggtgccgctcctccgtccagttaccactccattatgaaggcatctgataaagtccccggtctaattctgagctcatttggatccgccgactacgaatatccgtattttctatcttgatctttttatcagcataaccattgtttgaggtatttgaactcattcttggatgaccaaattcgtactcaccccaaacagttggacgagtttctccgcaagattattgacgcatcaaacattgctttgagggcagcactttcttatttatttgctaataataatgcaactgaagtggaccaattcaaaatcgacgagaattatgtacagatttattatttttcggttatcttttggtacgttacaggcgaaagaattgggcgagtgttttttcgttgccaattggtcatgtccgcttttccgcacgctaacaaatgccactaatgaccgacaaatcgatgcctatctcaacgacacaggcatcactctttaa

SEQ ID NO: 78743 - DNA, 1012 bp, Heterodera glycines
tctttgcttatgatggcgtagaagatcaaatttttatcagactcaataacaccgatgtccaatgtgttcgaatgttgaatggtacacattcaattggatgtcagtgtaagtattcacactttttaacttaatttggatttattagaattctcgattacatattaagcgagtcgcaatgggaatgttggcgtcctgactgaaattgtccatgcaaaagacgtacaaaatgcgattggcattttaccattggggctatccaacataatcgctgttattcaactcacaaatattaatgagtaagtgacgaaaagataaagttctgaattaacgaaaggtaaataataaattttagtgctttaatcggaatccttcgttcacacgcgcaagttgttgggattctgttgatacatcgtgggaaagataagcctaaagagttttctgaggatggctcatgtccaaatcgtcagttcagtgagttttgaagttgtgaccgctaacaatcacatctcaataagctgagttttttagcattttattccaatgagaaaactatcgaaagttgccatggatggaaccaaaagaacgcgattcactcggatgggcttaagtttatcgacttcaacaaacctcttcgtcttgtcaccagcaacgaagagatcgacttaatctttgataaggttttaccagcacaatttgcatttactaatcttttgcttcagtgcattgagccatttaacaaaaaactgatggccgagggattgcgttgtgtggggcgcatgacacaatttatgtccgctgctgggaataccaaaatttgtttggaacggacggctgactttggcgaaaggtggggtttttaaatttaatttcttcaattttgctcttaagttctttatgtgaagtacttgaagatatgaatgtttttctgatgttgcctccactgagtaagcagaatcacagtgccgaccaatttgtgttagctgcccgggtcagttccctttttcacacttaa

SEQ ID NO: 78744 - DNA, 170 bp, Heterodera glycines
aatttaaatttccgactttttgttcgaattcgggtccgggattaagaattggtctaaatgggcgccggattcgtgatcagcgatcccgaaaaccccataaaaagtgtttttatgacttttgaaaacataaaaaaatttcgaaaaagggggtgggacaaactgaactatta

SEQ ID NO: 78745 - DNA, 837 bp, Heterodera glycines
atgcgggtgacggtgtgtcttacagcacggaataacggacaaaaactcaagccgtacgtgctggtcaacagaaagcgaccggtgccgcaaattgtcaaacaatttgctggaaaattggttatcaatttcgctgggccgatatggatgaacgatgacacaacggaggactacctgcacaaaataatcggggcaaagctgttcgttggcgaacgcctcttggtttgggatgcgtttggcagccacaagagcgagagaacgacgaaggtggtgaaagaattgggagtggaaacggtttttgtccctggcggttgcaccaaattcattcaggtggagtgtcatctttctcagtaaagtttatttccttctctaggctcccgatgtctcgtggaacaagccgctcaaggagcgaattcggcatttctacaacacttggatgtccaatgatgcagaaaaagagttcacaccggcaggcaacccgaaggcaccagcgcttcacatggtacttgactggatccaccgatcgtggcaggaaatttccaaagccgtgatcatcaaatcattcgagggtcagtttaaaaaataaaaatgcctacgaaagacgccgaaacttttaagtctgtgggttgactacgccattggacggaacaggagacgaaaaaattgcttgcttcaagccggaaggagcaattggaccgatagggacaaaatttttgcgcgagtttagagaaaatgaaacggtgaaagatggacgaaacgatcacgaagaagccggcttatctgatgatgatggtgatgtagagctggatggagtcggagatgacgatgaatttttcattt

SEQ ID NO: 78746 - DNA, 1509 bp, Heterodera glycines
atggcccataaaagggtaataattttttttatctgttttattgttttattttttgatttttcaatttgcagaagcgacaaaacaaggatgcgccgtgttcatcaacaaattccgaccttgtcaaccagtgttcgtttccgcttgaccagctcccactgaacgcacttgtcattgtcgcctcacaactcccgttcaaggacttcaagcgggtcggcacgatctccaagcagttcaaccgagtgcgtacaatcggcagaatttgtttatttttccgtccaaacgatttcctttttttgacaggctcaacgaatgaccaggttcagcagaaagcgagtctcggtcgacctgttgcgcaagctgttccctgacgaagtgcccgacacggacgtggaagacgacgacggcactgagcgcagcgttggcatgatggaagtgatggacccgctacgtcagcacctgcgaagttcgcggcccagaacatccgcgagggtggacatgagcaagttcagctcgttccgcgagtcgcacttcgtcgaattgtttcgtgtcagtgattttggcgtcgcccattgatttgattcatttgtctcctccaaatttcagtcaatcagcaacggcagagaactgttcacggaagtacgacgcctcaatgtgcagaagtgcgtgatcgagttgcgcgacatggaatttttggcccaactgatgcccaaagtgtggtacattcgctgctccggccaaacgcttgtcatcccggaagagtgagcgaaggccaagcggcccccccccgtccgataaaccccaatttgatcatcgcgccattttcagcatcgatcagtccaaaatggcactcagcgtggaacagatgcgccaactgcacgccaagctggacaacttcgactacgtggcgagcaagtgcaccaaaaaacatctgtggttcatcaacaaactcaccgaattgttcgccgagctcgaaatcatacaattggacaattgacgagccaacggcggtggtggcgcgaaaggatttgagaagaaaatcgggcgaaagtgatcgatcaatccgatgctattttctatatgtttgttcataatgtaaataccgccattattatacctatgtatatgttgtacatatgtgcatcattatgaatattattttcatgagttttatttgtataaaaaggaatttaatttactaacaaataagtggaaatagtgctgctactcccccagccgcccctccaatttttgaccgactttttgtatcaaattcgaaccctaaagctaagtcgacaaaaatcgaaatttttgaaattgcatcagtgtttcggtacttgttcggtttgtaccacacagggacggtcccagggggggggggtacgcggggggtgctgggtcgtttcttaaaaactgccactatgggcgtttcttaaatactgccaagtgggcgtttcttaaatactgccaagtgggcgtttcttaaatactgccaagttgtagtaaaataaa

SEQ ID NO: 78747 - DNA, 1432 bp, Heterodera glycines
atgacaagtgcgttcagtgggagctggtcaagcggaaacgaacactggttgacaaggtcggaatttgttgatgaacacggcgcatccttgttttgtcgcttctgcaaattgaaaaatcaaaaaataaaacaataaaacagataaaaaaaattattacccttttatgggccattttcgttttttggtgaatgttgtaaaataaaatgcgttgtgtgtgataattccttctcttttatagacaattctacagcaataaattgtataaatttcgagaaatttcaaaatgttgaatgaatgcgttgtataaaagggaattgatttagcatttctggccattccattccaaaacatattaataattcattcctaaatattattaccgcctctgttctccgtccgtgccgtcatcaacaaatcaaatcaacggcagctcagccagcagcagaagtgcgcacaaatcgacgacatcaaacaaaactgggcaccgcacaatcaaaaccatcatcttcatcatcatcggacgaagaagaaaaaaaggtggcgcaggaggagccgaccgttgacaaacagaaacaatcagaagcaaagcaagcggagcagcaccagcaaccgcagcaggaagagaagggacagcaagacgcaccaccgcggcgacgcatggacaacacgtgagaaagtggaaaatttcttaaattttgttttttaagctgcacttttagcgaccaaatttggctggacacattggcatggcttaaccgtggagaggtcggcacgaacattgcgctggtcaacgcccgcttcgccaaactggtggacaagcagctgcagcaaaggcactggtggttggaggagttgcacatctgtgagcagaaaccgaaagggacaggcgccgaagcgatgagcttgaacagcgacggctcctactactcgttgccattggccaccgtaccattgccggaaaatgtcgtcggcttcaacagcacattcaacatttggtggccatttcttcaactacttcccaattgaattttaattgttcccacgttttctgcaggtatttcgacgctgaagtgatcgttttcctgcaccgaatgcgccgtctcttcaccacggacatctctctgcagttcgccattcggatgacggaatatcgcgcttggaaagcaatggcacgtcacatttggcccctgctgaagaacggactcatcattctggtcaacctgaagcggaagcaactgtccatgatgcgcaaacacgtgtcgccgaccgtcctcctcgactgcccgaaccttgttcaaatcaccagctctgttttgcccgaacgtccgaccgatgacgacactttttctgctgacttatcgggccgtgacctgtacatgtggctgcacacgccgcgccccgacgatcgtctgctggtgtacaaactgaccaa

SEQ ID NO: 78748 - DNA, 871 bp, Heterodera glycines
atggggtgatcgtttgggggttttttattccttttctttgtcgggcatcgctgttgcggccggttcttcacatgcactcgctgagttgaaaaaggaaaataaaaccaaagactcaatatatcaaaaaattaaaaaaagggggagccataaacccatcagaccacattgtaagataaattgaaatttaaaatccaaaaaaaataaaatttcagaatcaaaaaggaattaatcgctttttttgcaaaagaaaaggtcgaatttgagacccgaattgaatgtctggagagtggggccctgctgcccgccccagaggaatttgttacaattgggaggtccaatgcagtggaggatgttgtgccggttaaaagaaaaaattaaaaaataaaagaaaataaaagaaaattataggattcaattttggatggcgacacagcgcgatctgagggcggtgagagcacaaaaaagaggcgcaacagaggaggaggacagagaaagagagagaggaggaggaacgcggaagaagcgcaaagtcgggcgggggacgacagcgcggcaccacagctcaatgagcagcagcagcaactgaatgccaatggggaggaggagggggaagaaacaatcgccaatccaatgccaaagacacgggcattggacgagcaatcgaacgcctcgtccacgctctcgagcaaacagaggcggaccgaggaatggcaagcgaagcagtggtacaaaaatgcgagaggaaagggcagcggcggcaaagaaaaagaaaattgaaatgaaaaaaagattggaaaatttaattggattggatatggaggggccaagtgggcaatgatttaaaatgcccttttaattgtttgttaataaa

SEQ ID NO: 78749 - DNA, 1491 bp, Heterodera glycines
atggaaggatgggaggttgtgttcaaacagcagcaagaagaacattttgaatcgtcggcagcggccatcaaacggttgtgttttttaaatgttttaattatttttttaacagtttgaaagatgcttgtccgttacttacgcatacgcattcatcatctgtgcacacgactgcaaagaaaccaacattgaggcagggacgtagttcaagtactataagtctagggcgcttaccgcgaaatgcgagaccagcggatgagattgaattgttgcaaaagtatgatgtgcagcaactaattcgttgtttttgctgtggcgtgcaacggccattgggcaggggcggccacacgcaattgtcatgcccatatcgtcatcccgatagttaccgtaagagaaaaatatttacttcttataattaggaactattcatttatattttatagcactttgtgagaatgcaagcgcacgggatccggacaaatgctggaattgtgcgagtatagcgcacaaaacgaatcaatgtccggagccacgtcgtaaaccgtctcgccgaaacaaagttgctttgccgcgtgagcaattgttggacaaaaatctgtgagtttgtatctttcttctttattgatctatttattacatttttaagctgctcgtcctgcaacactacggggcattttgcaaagaactgtcctaagaagcgtcaacgacatgggcaacagaatcagaaaaatacaaaaatgccgtcaacatcaaattgtttttcatatcagcatgatagtagtggcagctctgtgaacgacgagtcggatgatgtgatttacttgtcttctgatgattaaaaagtgattcgatgagtatcgcattgatggcaggggcttagaacaaaacaaaatttaataggacattcgggacatttattaaattttttgttctttttcatttaatacatataaagagggtatatacgctatatcataatgctttttagatggtttatatatctatataaattcaaaccatttatattttttctttgtgtaaggtgcattctttagcatgttgctttcattttattattacatttacaatatttttattaaaaatcatctaaaattatgacgattcagcaagtttaaattacgatgagataaatgaaaaaaataatttatgtatgtgccaattacatcatagatcggttcaaccacggataggagaggtattccaatggttggaaaggtgcaaacacgtattgatgagccacaatccatgcctttatgtctgataggaaaggctgcagaaaaactgagaaattcagtattccattcgataaaaatttaaaagaaaaaaaatgaagtatggtttgagaaaaatgtatatttattgactttttatgtggcctaaactgcacaaatatcgatatttttattgtcaattgtttcaatgtgacttgagataaattattttaaaatcaaaaattattaccaagaaaataaa

SEQ ID NO: 78750 - DNA, 1030 bp, Heterodera glycines
atggaggacagcggatggtaccgggctaattacaggtcaattaaccgatggagtcttcttttggcccaacttattcatgtgattagcattgccgagcagctccactggggacacgggttgggctgttcgtttgccatggaaagttgcgggaaatggatttgggagaagttggaaaggtgggccaagaaaaggcatttgggggagggggagaaactggcacttttaagcaatcagtcgacggcaccgttttgtgccaatataaaacacgatggaagccgatcattggccaccacacgctgcacagatcagagggtagggaggaaaacagacagatgaaagtgccattgcgttgataatcaaccaaaacacagaaatataaaagagcaaattattacagaaaacaaaaactttacaggagaagcacaaaaaacatattttctccactcaattttcgaattttagcgaacttttagcaaataaaaaatattggagtttagcaaatagatatctttgcttgtgtccaaaaagtttgctaagaaaaaggcattaaaatataaaaaaatttctctcgaaaatttaaataatattttttataaaacaaatattataaatatattacatcataaaatactttataaaaatttaaaaaactcttttttgtggatattttgaagcacaatttaaacatttcgagaaaatggcctgttttgaacaattttttgaatttttctcgagtttatcacaaattttgagtcttttttggcacataaatcccatccctggccattagtcaattttaacacaccataaataagtgaatccccaggattcgttggcattgtgcaatttggtgccttataaaaagccgctgcccgttgactatcgcaactttgcacatttgcatggagttcgtcacgaaggcaccaaatattatggaggttctgtggaattggcagacttttgcccatacaatcaggtggatgtgtctccggagggcgggggaggaggggggacagtacggtcgggatga

SEQ ID NO: 78751 - DNA, 369 bp, Heterodera glycines
atgaacgaaacggataaagaggagggaaaagcacaaagggggggggggcgagaaggaaaaacagagagaaaagaaagggcaaaaggaagagagaaggaggaaaaaggaaaagaagaagaggaggatgaagagagcggaggtgtggtggtctgcccactcacaactcaccgatcagtcattgtcacttgtgacatttgcgtaggccgcgcaaaaatgatcaaggggaaagtgacggagtgtggccaagtgggaggtgcagacgaacagcgaattggaaaatgggcgagaaagcaagacaatgtcagagggcagcagacacaacgaggaaacaatgcaatgccggaggcaaaaaaggtgatcagaaaatga

SEQ ID NO: 78752 - DNA, 652 bp, Heterodera glycines
ttcagtccaattctttctctttgtctcgtccaatcatctttgccaatgtttgtccgttgtttcattttgcctttcatttctttggcattttttgtgtccttttgcacggcaatgagaagaaatccatcgggtaaattgccattttaaaatgaatgtatttggagttaattaagattatgatcagtcacgggtgccgcccaatctgaggataatttcatggtcaatttattttctattaattgtatttaaataattaagattcattaaaatattttcgcattgaatatttttaataattgttttcttccaaaataatttatttaaatatctaagttttttaaagaaatctttaagtaattctgcacataaataaaattaattatatttatttaaaaattatttaagtttaaaatattcagaaaaaatgcaaaattaaatatttttgtgaaaattgctgtataattcttttgtggggttgaattctgtccgattattaattttaaggcttctcggcgtttggcgttcagagcatgacggcaaagcggtgaaaaattcacgctaattaattttatttttttgatatttttttaagatgtttcccaccatcccaaaattcacttacggcgaagaaatttcaattgcactttcggac

SEQ ID NO: 78753 - DNA, 267 bp, Heterodera glycines
atgtgccaaaaagccgaaattaagcaacgcgtaaatatgttcaggtgttggatgccgatgacaactctcaggaggaattggaacactactacagccaaaacttttattatacgcccaggacgacgcgccaatgtcaaagaataataattcactaattaataaatatcattataattaattaatgtgttttcagtgtatacaattgaggacacggaggaggagcagacagtgcttaatcgtgaagtaaatttgttaaattttaataaa

SEQ ID NO: 78754 - DNA, 1447 bp, Heterodera glycines
atggaagatccctggtctccgtcactttgcgcaccgcccaattcgctgctgatggatgacggcggtgcagcagacgcaaaaagcacaaaaagtattagtcgttgatcttatcattattggcgcataatcaacctaagacaattattctaacaatgataatttttcaccaaaattagagccatttaaaaaaaggccactgactgatcagtcgatcattttcagcatctttggccccccacccggtgccaccgatcattaccgtaacgacaacggatgacagggccaatgccgagggctcggaggaggaagaggaggtggaaacggcggacgagcaccaccggcggcccagttccagctcgtccgaggaagaggaggacggcgattatccggacactgtgcagccggtgaattggaaaaattatatggcacaccaattatgtctagaccaatttttgggttcgatcagtgctatttaataaattcagaattcaatttgtttattagcgtgtaaactttcgagagtctcgactattttcttttttgaaaatttgcaccttttctgactgattttgggttttttcgaaaaagataataggagatgtataacaatataatatttaaaattcccttgattctgaccccgataaaatcattaaaacataaagtatcgctttgaataattttcgaattcaaaaaatagaaataatttaaaaaaaggaaaattaaattaattaagtataattacaggtgcccactgtgtctgccgcaaccatcgcacaactgcaggaacagcaggagatggagcagcaaaaaatggctgcccaagtgctgcagcaaatccaagcatttggcgaggcggccgacgacgaattcgacgtccaatgggccaagccgaagaccaaagtgggtataaagcaggggctactcgggattctcagtcttggcttaactcaattaatggttcagtctcggcggttaattctcgctctttgttcttctcgagttttctgaaaaaaatgactcacagatttccgttgacgacaaccaaatgcatcagccaacagagcagcgggacaactttttcttggaggaccaagctaatgtttattcaccgcccgaagcagaagaagaagcagcatcggcaaagtcaatcggcattgccagaagatgctccggcactgatcagtcggctgcacaaagcggagaagttcagcagcaacgggacggtggcggcgcttgcgaagaagcgtccggcagcagcagcagatcaacaaccattgtttatcgaaatcagcaacagcagcagatgacgaacccgttcctaagcgatgagaacggcacgctgcacaacgacggggacgaggaggaggaggaggacgaacagagcggagagggccatgagggcggcattgttgtgcgacaagtggtaaatgccaccattgaataa

SEQ ID NO: 78755 - DNA, 1760 bp, Heterodera glycines
atgttcttctcaagcgcccaaaaaccagcaacagccacgtcgacggcatttgccggctttggcaacaaatttggcaaatttgcctccgaaacgctgaagggtgccaagcaggccaaggaaatggcggtgacggcgatggcacaggcgggccaaacgctggaaacggccatggtcggttgacaactaataaaaaaaagctccccccgggggtcatcacatcattaaatggttgtcaagtccggcaaagcctaaccgcttgccagaccagggctaatggattaaactatttgatattgttgtactggcttatgtttttctacgtgcaaaatttcacgcccacttcccagaccaccaccattccggcttcgtctcaacaggatgaccaacaaccgcaaactgtccagctgcaaccggaaacggtgccgcaacggccccattcctcgttgggactgtccgccgcgggccccgctggcggagaccagcaaatcgccccgggcactggcggtggtagcgcttcgctgaacaaatccgcctccctgtacgatgttgcgcttccgcccggctttgaccatctgtcggaggaggaacagttgtgcatcatttcagtgatgcaatgtgccgaacttgacgcccaaatggatgcggaacgagcgcaagcggtacaagcagcaccaccacttccacaaacagtaccgagtgcgctgcggcacaaagctacggatgatgtcactaccatcaccgcttttggcattatgtcgcagccattggccaaatttgaaccgtctcaggcggaacaaactgctgttcccccatcatcaagtgcagcatttgctgatcaacagcatcaaggcaatgctggagcagaaacagcaattgaattggccgtagaagtacgtgctgacgaggcggagggtaacaacggacttggcacggctgcgttcatcgacacttctgctgctgctgcagttcagcttgaccttgcccgatatggccatccgcttggtctgttccaaacagaaactgagcaaagtgcagcggaaaagggacaagatcaaacggttgaggaccaaaagcggcacaacatcgaagaggacgatgagccatggatgcaaccgccaacccagaaattcacggtaaatatttatttcggcatcagtttttagggacttatggcacaacttgtgactgaccccttaatccgagaaatccccaagcctcggttactggccttttggactcagattggttctgcaacaaaattttaatgatttttttgggatttaaattacttttgagactgaaatttaatttgaaaatctctgccgagtcgcggaatgcacaattttgcgatatttctctaatttaaaattagatttctattctcgcgtaattaaatttcaaattcaaaggcaccgcttgaccaatgggacgacatgcccatgaacacagtaacaccgcgcaaacagctgtggactacggtgttcactgaggacactgatcagcagcaacagcatcaacaacaccaacagccgaatgtgctacaagctgacggagcagtagcagcaccaaatgcggaggagacggaggaggacgaactgttggagcaaatcagcatggaaacagtgcgcgggtgttgggagcggagcaacggcgacgacagaatcgctaatcagtttggcagggcaagaataaacactgatcagattgataagcggaaggaaggccaacagatgatgatggaggaggacgagctgaccaga

SEQ ID NO: 78756 - DNA, 357 bp, Heterodera glycines
atggccgtttccagcgtttggcccgcctgtgccatcgccgtcaccgccatttccttggcctgcttggcacccttcagcgtttcggaggcaaatttgccaaatttgttgccaaagccggcaaatgccgtcgacgtggctgttgctggtttttgggcgcttgagaagaacattttgccaatatttaaggatggtgccgattgttcggcagatgatgatgcaatggcaacaccaaaagtagaagatggtttgggtggaagcggcggtggtggcggacgaggcacggcaggacgagctaatcaaaaaatatgattttttaagcgaaaaattatttaaggtttattttttttgattttttaa

SEQ ID NO: 78757 - DNA, 2077 bp, Heterodera glycines
atggagagaggcagagaaagtggagaaaaacccctgagggggacagaggaaaaagagaaaaagagtgagagaacaagcatcgctgagaatgacatggggacagaagcagagtccgacgagggaaaattgagcgacaatgatgccgcaccgcttgcggtgacattggcacagccaatggagcggcaagacgaagaaaacggggacgacatattggcatattctttcaacgccagcggcagtgccgtcgtccgtcccaactgtgcttcccctcaaataatgccaacgccatgcgaatacagcgaaagaggcatttgtttagccggtgatggtggttttgatggacaaattgtgccaccggcgtggcagatggaaaaagaggacgacgacgagagaatgggaagcattacagatgctagagaaagagaggacgatgagagaggtggaaagtgcattgccgatgccaaagaaaaagcggatgacgagaaagtgggaagcacgggtgatgccagagaaaaagagggtgacgaaatagtaggaagctttgccaatgctagagagagactgagagatgagaatgtgagaagcattggtgagaccacagaatgggaagacgacgagcgtgtgagaagctttgcaaatgtcgatgtcatggccagcagtggccaacccgtgcacgcgtccctctctgtcatcgcttcccgtggtttagagctgtccccctcgtccccggcaaagacgacgacgtctacggcatcggcggcggtggtggcaccgccgcttgctgatgctaacccattctcattaccccaatttccttgccccgcggcgtcaatagtgcaccagcagcagcagaaaggggaagaagaaaatcaaaaaacaaagcaaaacgccgccgctgccgccgccgttgcttttccctttcctttcattgtgccgccggcggatgcttcttcttcttcttctatttcttcccattgttcagcagcagcggtgccaattgtaagccaagaacagaaacagcatcagcagcaacggcaaaatgccgaaactgaacacggcacagagtcagccgatggacaacaacacggcggaagcacgaaagagcaaaagtaaaccatgcatttgtattgtgtaggggggggggcataagaaaatggaaggccaatttgaaagtaaatatatgaatggtatgcttattgttagtcagtctttgcttgttcttattaatgccatttttggcatcatttcgaaaagaagttttatgggtttaaataattctttttatttatgccattttgaaaaagtctgtctcatttgtataggtaaattcatttaattattaaaaatataaattcattttaggcaatacaataatttattttaaaataattttacgaataaaaacaaatttttatttataaaattttttacctggttttaaaatatttatttgtttttattttttcgagaagattgccgaggcaataaaagtgccatttttagacttaattacttttcaatgaatgtttaatgcccttaaaattaaaaatttaagtataataatattgatcaaccaaaccgttcccttaaattaatatttttaatttattattattatttttataattgttttttaattttaggtcattaagcgtagcgcaagaaattggcgatgctttttggacagaagagggacaaccgcagcagaacaatttgtccacaaataccaccacatcaaaaacaacaacaacaaccactgccatcggcactaattaccatcatcaacaacaacggcaccaccaatttgttggtggtcaaaaagatgggaagagagtgccgaaaccatttgtaggggacgaagaaggtgaagacgagcaacagaagcagaagcatactgtacaagaagcagtgccaattgcaaaagcagcagcggcgggaggtaagcaaggaaataaatgaaaacaaatgaaaaactatgaaatttggcgcggaaaatgccggattattttgggattgaacgggaatttggttgggattcaaaatttcatcggttttttgcaatttttttttaggctga

SEQ ID NO: 78758 - DNA, 352 bp, Heterodera glycines
atgtgctcccgctcttccgtgctgagcccggccagcgcactctcaggcaactcttccgtcaccgccgccgcgccatcctctggcgatccgccgttggatgtcctccgcaacagttccatgatgtcgccaccaccgccagcggctgtttcgcctgccgccgctccgccaatggacaaacgtttggtggtggtgttgctgctgccgcttgtggcggtggttgtggttgtactgatcgaaaatgtggttgcccgtggggccaaaaaaggtgtcaatttggcggaccagggacgagcactacttgatgactagaaaatgggcgaaactataactttaaattttaaatgtgaaaata

SEQ ID NO: 78759 - DNA, 719 bp, Heterodera glycines
ggccctttactttgatgacaaatactgtgaactgctcaaagatgggccacaacattcgcatgagcaacaaccgcaacaaatgtgctcatcgcctgactccgacggatggtcagtacagtattttatacgttggggtgtactgtagttttccagtcgattctatgaaccatggtttaaccgcatttcggcaccctttggagccggaatttttcgcatttcgaattctggcattatctttgcggctattaattttattattgtccttttgatcaattttaaattttgatcactagcgacgccttacaaccaatcagccagtgtttttcatttctcattgttagttggattatctgcttaattaggttaaataagctccgtatgccaatcaatcaatgccaactcattgaccacgtttcatatgatcatgcccataaaacaattaaagggacggtgccgaaatgtcatgttggcaagcaacggcagaacatcaccatgccaacaaagaggaggaggagctattgttgtatgaagtgcaccacgaaatgggcgaacagcagcagcaggaggagcagccagcagaagcagcggcacgtgccggcttcaagcaggagctgatcagcggactgaacgtgttcgctggcctaatgcgacgcagttcaaccgcaacaacgacagcggtgagcatgcgcaatgtcattctggacattctgggaaattga

SEQ ID NO: 78760 - DNA, 2775 bp, Heterodera glycines
atggcacgaattgaagcagtccagagaagggcacaagaagaagagatggcacgaattgaagcagctcagagaagagcacaagaagaagagatggcacaaattgaagcagttcagagatggacaaaagaaggggaaccaaagatgccagaactgacagatgaagaaatggcacaaattcaatccgttcagagaagggcacaagaagaagagatggcacgaattgaagcagtccagagaagggcacaagaagaagagatggcacgaattgaagcagctcagagaagagcacaagaagaagagatggcacaaattgaagcagttcagagatggacaaaagaaggggaaccaaagatgccagaactgacagatgaagaaatggcacaaattcaatccgttcagagaagggctgaagaagacgagatggcacgaattgcagcagctcaaagaagggtacaagaagaagagatggcccaaattgaagcagctcagagaagggcacaagaagaagaaatggcacgaattgaagcagttcagagatgggcaaaagaaggggaaccaaagatgccagaactgacagatgaagaaatggcacaaattcaatccgttcagagaagggcacaagaagaagaaatggcacgaattgaagcagttcagagatgggcaaaagaaggggaaccaaagatgccagaactgacagatgaagaaatggcacaaattcaatccgttcagagaagggctgaagaagacgagatggcacgaattgcagcagctcagagaaggccacaagaagaagaaatggcacgaattgaagcagttcagagatgggcaaaagaaggggaaccaaagatgccagaactgacagatgaagaaatggcacaaattcaatccgttcagagaagggcacaagaagaagagatggcacgaattgaagcagtccagagaagggcacaagaagaggaacgaaaggtgctaaaacttaccgatgatgcaattaaaaaattcaatcgcaccgatgatgatgaacatgaaatgatttcatcttctacttctccagctgactccaatccttccccgttggattcatcaacggatttgcattcaattaaagaatttcatggtgatcactttgttcgacaagattttcgacatctttcgacaaatgcttttccgcctgactctcggcatgacccccatgaaattgttcatgaagttcagtctgtccaacaacagcaacaacaaccacctgtggatgctgcatgtccctctccagctccttcttcatctccttcaacttccggtgccgattccatccgttcttctgccgaacattctcaactctacgagccatcaactccgttgctgctttctgacaatgacatggaaccacttgatgctgctcaacaccgacaaaatctgccacaaaaagttgaaccggatttgagtgccgaaacaacgatgtcacaatctgagaaaactttggcacaaagccgagtgccattgtacaacgagtgtccgtctgagttcgatgtgccgttgtcgcaagaagggaatgactcaatgccgccggaacagttgccaactcaaccattggtattgccatttgcagaatttccaaacgtgccaatggaaactgactatgaaaataaccttgttggaatgagtcataagcggcgccaatctggtggtggtgatgccagttgcactgtcatgttgctgtctggtcggcatcaacaacggtggttgtccctcggcaccgtctccggcatgatggcagacagcttcgacggtggagacaatatactgacgccgctcccgtcattaccatttctacagacggcaaaactttacggtgataatgccaagaatattgttgctgatgtagctgaaccagcggtggtagagcatcagcaacagttcaagcggaacagcagcagtacaaaggcgacgaacagccgaagcagaagcagtagctgcacatccagcaacgtgaacatcatgttcactgacgaatgcttgcgtcgatcattttgcgacgatcaggcggatgatagtgaaaagcagcacgaagccgagggtgagcagtaccgtcggcacggtgccgtcgatactgtcaacattggcacggacaacaggaacagcattgttttacagagaacaaatcgaatggcatttggagagaaaagcatgaccgaaaatgggggaagtgtggagaaggatgacgaaacagacacggaagccaacaaacaatgggcggagcaacaacagacggactgggcgaacgatgtcgacttcatgtataaagtaagcggcattttgtttttttagttttaatgacgagatcccggcattttgaaaagcgccacatggaaattgaaaatgatctggcttttcgagagtaagagccagtttaatcagtggatggcccggtggccaatcataatacgaacgacaaatttcagaaaacacgttaatttttcgtttatcgccaatcacaattaaaaattatgtcgtttgactccttaaatcagatttcccacaaagtgtcctccaaattacccgggtccaaaaaattgggctgtttaagccgggcactggagctggaccgggcgggaccaggatcactgggactaaaattgatcaacctgatccagggattttttttaccaaaaaggcttaccaagaatgccgtaaaaatgtattttttcagttgaatttcttcgctcagcgactttctgagcaaattgcggaagaagcggcacgggacataacaaatat

SEQ ID NO: 78761 - DNA, 561 bp, Heterodera glycines
atgccctttttcgtttcgttttcgtatacgaaaatttttttttgtgattttcgcacatccctgcttccaatgaatgtgagtgattgttttcatttatttgtgttaattaatgctttaagctaactctgtaatataaaatccgccatatgttcgtttttccatcagaaaattagttataaatagagacaaaacacaattttgcaaatccgcctagtcgggcaggggtgttaattccaaaagaaaccgattcccggtcccgacatcttcaaagccagtcaaaccgggattttgaattgccgggccgaactggtttacgagttgataaaaatttaaattctcacattataagttattaccctttatacatttaattttaaattatttacctcataaattaaattatataaattatttaggtgaaaaatcacataaagcaaatactccgtcaaaaaggaaagtcgttggatgaaaaagaaactgaattggaagaatatgttcaatcattgcaagaggacaagccaaaagaagcatgaacataacaaaattgtatacagaattaaa

SEQ ID NO: 78762 - DNA, 280 bp, Heterodera glycines
atgacttttttggtaagaaaaaataagatatttcttgaagtattatattaaatctgccaggaaattgtatgtaaagtttgaaacgttgatattttttttagagagcgacatttggcgaaaatacggatcaggatcaggactacggactaggcatccatacggactacagacttacggactaaaaacccggaaaacccttactccgtataagtccgtatgcaggaaaaatacggacccgtatacggatcagggttttttgaaaagttttttaatcaataaa

SEQ ID NO: 78763 - DNA, 2725 bp, Heterodera glycines
attgggtcgttggagatgccacgctccgaatggcttttctcctccgtcgcgacctttcagcagagttacggccaagtgcacccctatttggccgctgttttatgtattgtcggtgagtaaactgagtaaataaggagcaaatgaaaggcaattaggagagacattaaggacaattaataatttttacggcttttttcgtttggctgaaaatagcagcactcatttgggctgatttgtgctgctgttggcatttcgttttgagttccctttgtcttttccgattacagaaactaattaattgtcccttgggtaattattaattgcccattggccaacttttaatggccctttgctaattgcccccccccccctccaaggcactttgatgaatgctatcactgttttggtgctcactcgcccctcaatgcgttcccccgtcaatgttttgctcagtgcggtcgccgtctgcgacatcgtcgttatgtcctcctatttggtttttgttgttcactttttgttgaccgccgcttcgcgctgcgagcccagcgacttcagttacggatgggcactgttcatggcaagtgaaaaagggcagaaaaagggaaaaaggaaatgaaaatttaaattaaatggagatataaaataaataaataataaaattcaacagaattcctaataaattgttcagattttccatgcccatgcttctgtcatttttcatgccgcttcaatttggatgacggtgagaaatgagaatcgaaatgccccccctttttcccccgaaaatgctaattactattagctaatgcacaaatgcttttccgctgaagtgcttggcatccaaattcactttcactttgcaatttgtcaaggtttccctagcccaaattcgcgtgctgaccattcgccgtgccaccgccggcccttcctctccgctggtcacagaacgttttacggtgctattagctgtgctgatgctttgtgccatgaccctcgtcaatttgccaaattttctaaccttcgaagtttgttgcctctgcccgatcaataaaaactcaatcattcgataatcgacgatcgattgccggatcaattaataaaacgatctttacagataatggaagtgccctccagctcaatgttgccctgcttacattcgcccgactccaccgaattagaaaatgacggctctttgcaaaatgtggcaaaagtcatcggcacagacttttcacaaaatgacaccgcagtgaaaaatgaatcaaatgctattttaaacggaaaaatgctcaatgacagcgaactgaacatatccaatcactcttctgataacttaacatttacaacaataacgactgcacaccggatgagaaggcacagagagacgaatatcagcatgtggggaaagaagcagaaagaaaggaatgataaggaaggatatcaaaacagagaagagagagagagagagagaatgggagaaagagaaagtagagagagagagaggaatagaaatagagtgagagggagggagagagagagaaaaggggggagaaagagagatcggaaaagaaagaagagatacagatgagtcataccgtatgacaaatggtcgatgcgatcactgatcagattaggatctgctgatgggatggggttgaaaaacaaaggcttccccatttaaaggcattcccgtggaaattcggagccctttggcaccaaagacagtttcgcctacaccgtccgagcacatgacagcgattgcatgaaattgaaagtaatttgaaaagtgccggggaatatgccaatccatttcttccgattttcccatgcctttgcctcttcagttggccttttggtctaacggaatgatcttcaaagtgatcccgtgccttttgctgactttgtccatttgggctttgctgcgcataattgcggacgtggcacacaaaaggcgcaatttggcacaggttaattaaggtagaggagggacacgtgccaatgccaatgccaacgatatttgaggtgatgcgcaagaaagtggtgccaaaggaccacacgacgccaatggtgagggaggaaacgcaatttaaattcaaattgaattcaaaatatttcgggcaaaggctccaatttgattctcttttagctcgccgctgttctgctcatttttctgctggctgagcttccccaaggccttttcctggtgctcaatggcattttctccgccgaatccttccacaaacgcgtttatttgccgttgggcgatctgatggatttgctttctctgctcaattcggccgtcggctttttcatttacgtgggaatgtcccgtaaattccgcaccgttttcctgcaattgctcttctccgtcctcagctttctcacgaggtgatcaattgttctgatcagtccataaaatttcgaccattccccttgtgccatccctttttttcaatttgtcattttttgccattatttttttcttttgtttttcgattggcttccgccgatcgttttttggcctttttgccgttttgtgtttgatcagtagggctcggatttttaggggcgaaaaagtccaaaatagggacctaaataggggcaaaaaaatcgcgaaataggtgcgaaaataggggcgaaaaagtttcaaatgtaggggtgaaatttattaaaattgctgttttctctatctaaataagttaaaattaaggcaaacaattttatcact

SEQ ID NO: 78764 - DNA, 1105 bp, Heterodera glycines
accaatccaagtccttttcaccattggcctttatcaaatcattgaagtgaacgagccgcaacaatacattcttctcaattcgtggattgttgaagtaaaacatatattagtttaaaaattttctaataattataattacttaaaaagcatttaaaataattaagattaattttaacgcatattttggaatagaaactaatgaataaatatcttacactttaagcgatgaataagtttaattatttaattaatttttaaagaattaaaaaataattttaaattatatttcaaataaaacttaattattatattttatttgtaatcacattaagtgataaatgaatttatttacttaattgaatttaaagcacttaaatagtataaaattaatttacacatttcgaatatataatttattaattatttgttaatatgtaagcgataatatattatatttacataaaaattataaaaacataaaaaatcaatgattttttcgaataaaatttaattaataatttataaattaataacttatttaaattttaaaccattaaaaatatttaaaattaattagttttttgaataaaatttatttaataattttatttattaatttaacacattaagcgatggcgcgatgatttgctgcactgggcgcccgctcaatttggtggattgcgtgaaattgtgctcccacgtgattcagtgattgatttttttaaaattttacttctattaaatgtatatttttaaataataaaacataattataggtgtggattccggacacaacattatacaattcattggtcatggatgatgagcaaagccgtcgaattttaaatgtcaaagtacggtaaaagaaaattataattggaaataatatttaattttattaaaaattatcaaattgattaattttatttataatttattaataagcttttcagttgaatacactacaaaaggagaaatcggctttagtagagtgagtttaactgacagaaatgtttaaattttcaatgtttttagaatgctttatccgacattatatcaattttcttgcatgttagaccttcggtttttcccgtacgacattcag

SEQ ID NO: 78765 - DNA, 278 bp, Heterodera glycines
atggttcctggacaaatacaaagtcagtgcaaaacatttgagaagcctttattgtgaagtggcctctcttttttctcaggttgacaacgtgaactttcaaacgaatggcgccgaaattggccaatttttgcacaaacttttcaacgccaaaaaattattgcttttggtcggtctttaaaaaaattcttataataataattaagtatactgcttcagaaggcagaaaatacggacagtggaaatgttttggagcccgcaaagttcccgggaatggacag

SEQ ID NO: 78766 - DNA, 2093 bp, Heterodera glycines
  unsure (1)..(2093): unsure at all n locations
gtgcgtgttgtttcacttgcattttntgggaatttcnttttgaaaattcaaatttattctaatatttttttaattgtaatactcaaaattgcttttccccttttttggccatttctcgtccattaatgccatgccatgcttcttggcaattgcattagttaatttggtaatattcgctctaaaacatctcagatttgtgatcactgccatcctaattgagcgcgatttgcgctgccgccctcaatattatttggtcttctcattagcagtggccgatttaatggtaatttgaaagggcacttacattcattaaattacatcattaaaaagcacactttgttgtcaggttggtctgatcgtcactccgctgggtgctctgagcacattgagacaatcgtgggagttgggggtaagccaattaattaattatccgattaattagtgccatgctcgagagtcttgcggaattattcattcatttatttctaaaccccctttaaggtcactttgtgtgacttttggataagtgtcgacggtaatccttcccctttcgtatttgttcttctaccgtattctttcagtgctcgtctgtacttcgtccattctccatttggtggccattgcacttgacaggtgccgggggatgccacttttttttcccaattagtttggcattttgccgaacatttcgtcccgttttctgtcacatttttattcaaaaaattcctgcctttcctttattattaaatttttaattttagtctttaccctttttaataaataataaatgtgtttttttagatattggtccgtcaccaacatatcctactcaaatgtacaattaaattatttatttattaatacggtattttaaaaattaaagcaaaattaaaccccaccgaggggtttttttaatttaaaatatttattttttcaaaacaacggattgcatagggttaatcaaagaaatggaaaacttaattcatcgcaaggccaagtctcgaacataatttatttacattttttaaagaatcgaacgccgcgacgcattttttcaatgctaatggtcatttgggtactttcactgctcatttccttggcacctcaattcggcttaaaggatggtgagtggggaaaactaatggaaatataattaaattaaattaaaattttaattaattaattttatataaatataattaattaaataacttttaaattgataataaaaaaaacagagaattttgtgacacgagttcgggagcagcaagtgtgtttgatttcgcaggacattgcctaccaagtaattattcattaattagttaattaattaatttgctaatgacccttcaaattgttcccttgctaaggttttctccacttcgaccgccttttacattccgttgtttgccattatgctcatttactacaaaattatgcgagcggccaaaaagcgctttcggcgcgaaagggacagaagaacggtgaacagaacggtggtggagacagtgccaccgaaggccagcaaaatgctaattgcacaacaacacgtgggtgatgggcaaagaattcagaggcccaaaatttgaaaattgaaattccatttaatccctaccggtggggcacatttggcacgacaaattgaccggcatttgcttagtgcgttttttgggcccggatcttccgattcgggtaccgaatattagatttaaaaaaagaagagtccaggtcttgaaaaagccgtgtgtccgggaatggacccgtcggatacccggaacagtttaaccctcttaattaagcattagcccattttttatttttgtacaataaagcattaataaaaagaacagaaaaatggaccaattttttttttgcgttttctctcctttcatcggttaaaaaatgttatttaaatagaaaagtaaaaaaatcaaaaaaaaatgtctacaataaaatggtcggtctttcccacgcgttgctttttcccctccgccgtttcagtctccgctgaaccgccactctcagcccaatggttccaccagcaacaacaacaactacagtaacagccacagtaacaacatgttgggcgcaaa

SEQ ID NO: 78767 - DNA, 1900 bp, Heterodera glycines
  unsure (1)..(1900): unsure at all n locations
atgactatatccgataatttatttgatgatatttggaagaggagcggcattttaaatttgccaagaaaaagtgaaaatgtgccgaaaataaaagtaataaacgcggaaatttcccaaaattatttgaaatatttatttttcatttttaaggttgagccatttgacgagcattcttcggcagcagcagcagatgcaaaggcaaatacgaaatttgggaaaataaaaaaagaaaattttgaaattttcgaaaaaaatgctaaaattaaacaagaagaatttggtggcagcgaatcgcgccaatttggagcaattaaaattaaaactgagaatgcttcaaacacagaagttaaagaggagaacgaaaattatcgaaatttgtccgaaatttatgaaaaatggaacaaaaatgagcatgaaaagactgttataagccggacagatcagcaaaatccgagtttatcaagtaatgtgaaaaggaaattaattaaatatttatgggccattttagtcggcaaaaaaggattagagaaataattatttattttctaagttaaagttaaatttatttaatttgaatttgcataaaaatcaatatgtgtaatttttgagttgcaaaataaaaattaaaatatattagtttaaagtaataatttttatgaatatagatttattttatatatttttttacaaaattcttttttttataaattttttaaattatctagcttttttagtctatacgtcatcgagcactaattatggtgacagtaattacacgaatgatgattgcagtaattatggtaatgatgatgccagtattacggtaatgataatgacagtaattacgaaagcgagtacagtacagcaaatacatatgaagatgaattnggatgatatgattttgaagatcaaaatgaagtcacaaattcaaaatccccaaatttacaaagagtaattacttttttaaatttttaaatgatttttttttgtatgatttgggaatattttttttataattttttgcagttttgccattttgggaatttntaatttgtttctaattaatttaatttcacagaggaaaagcgttattacagtgaatcggaaaaggaagaatttgtgaggaaatacaaccaaattcagagggaaaagccggaaatgaaagacgaagaaactgttcaaatgttgaacataccaaggcggacaatattcagatggaggaagcaattagcagaaaaaagtaagcgccacaattaattaattaattaatttaacaaagtaattaattaagtcaaattatccgaaaatgacgaaatgcgtgaaattgtgagcgaatttgagagaagaaaggaacaattggcacaacaatgggggagagtgcccgagagaaggacgcaaaataaaattgcgaaggaattgggcgtcagcgcacgagcaattgcattttggaaaaaggaatttggaggtaattaattttaattaattagttttggcgaattcattaaatattaattatcatgaaaaagaatttgtgaaaaataacaaagttttctaagaatttgttccagaaagaaaagcataataagaacaactcttttgcgctctgtttagagcttctttggtcatttttataatgtatgtttttgcctattttggcatttttatcttggtttttggattttagaaatatcaaattcacatcctaacaatggcactaaatatttcaaaaaaaaatccctatgaatagcgagatttttcaaaaattttcccatatattagagtacccccaagcatttcgtaaagaaaatttggggtttgaaaatatttttcaatatttttgtctattttacaatttgcgtgcgaaatattgatcgaatccctgttaatttgcattttaaaa

SEQ ID NO: 78768 - DNA, 272 bp, Heterodera glycines
atgcgaatatcccaaaatttgtcagttaaatgttataatgacgccgagaaaaaagaattgctgaaattgtatgaaaaaattaaaaagaaacaccccgaattggacaaagaaaaaattgggaaaattctaaatgtgacgggacgaaccctaacaaattggaaaaaccaattttatgggaatgattccaagaacaaatgtgaaaatgtacagaagaaaagtaagttttttttattcaaaattaaataaatttttgaaatttaaggcaaataaaa

SEQ ID NO: 78769 - DNA, 157 bp, Heterodera glycines; identical to SEQ ID NO: 67642

SEQ ID NO: 78770 - DNA, 1563 bp, Heterodera glycines
  unsure (1)..(1563): unsure at all n locations
atgccaacgttgtggaaacgcccgcatgctcaaggactgcacttatcgaaaggatgtcaaatgtcaaatgttatggttgtggtaatctcggccatataagaccaatgtgcccatccgccgtgtctcagtcgcattgtgtggcgtcaaccttcagtgttgttcaggcgcgagattggatcatggttccgatccaaatcaatggacacaaaatcgaattggcagccgactcatgctcacatctcacaatcattcaaaggccgatgtggttaagtctcggagggccaaaattgattaaaagtggtaaaattgtgggatctttttcaggccataagctttgtttgctaggccaattcaaatgttcggttgagtttaaaggtgttcacaagtgcctcgattgttatgtggccgacaccaacgcaccaaatttaatgggtttggattggattgctccttttgaacaggcaactgaacaaccaatcgcaacgacgttgagttccgaacattttcaaccgaaaactttggcaattgcaattcccgatgaacctcaagggctggcggaacagcttaaaaatgcttttccccaagttttcgcccccggaattggcagatgttcaaagatgaaagccattctgcatctgaagcctgatgcatctcccattttctgtcgagcacgtcaagtgccacatgatgttcaagacgcagtggacaaggaattggatcggttgctcgaaatggatgccatcagaccagtcgacttctctcgttgggctgcacccgtgctctacgttcgtaagaaaaatggagcagtaagaatctgcattgatttttcgacgggtcttaatgatgcgctagaactaaataggcaccccttgccccgaacagatgacattttccatgcattgcgctgctcgaaaattttctctcagttggatttccgtgatgcatatttgcagttggaattggacgacaaatcgaaaactcttgtgggaataaacactcgcaggggtcttttccaatttcagcgtcttccgtttggagttaaatcagctccatcgatttttcaaaagaccatggaccagttgacagccggaattcctggtgtgttcacatatctcgacgatgtcatcatcgcttcaaggaacgcaaatgagcatgtttcaacacttttgaaattattttctcgaatccattcgtatggtttccgaattcaaattgagaagtgtcactttttcaaaaaggagatcaaatttttggggcacgttgtttcaacggaaggcattcaccctgatccggaacgatcagcagcaatccgcgacatgcctccgccccatgatctcccaactctccgatcatttctcggtgccctcaactattatgggcgttttgttanagagatgcgtaagttgcgctctcctctcgctttgttgcataaaaaggatactccttggttttggggtgaagagcagcaatccgctattgaaaaagccaaacaggttttacagtcggactttggtctcactcagtatgacccgaaaaagcccgtaatcgtggcagctgacgcaa

SEQ ID NO: 78771 - DNA, 684 bp, Heterodera glycines
atgcaacaaaggcaaatggactcgcagcaaaagcaatttttggatttgttgaatgctttcactaatcggacggcacccgttgccaataattccgatctcttttcccaaattaatggacagattccggagttccgctatgatccggagcaggactcaacctttgcactatggttcgacaggttcggcccattcattgaaaaggatggcatggcattgggagaggatatgcgagtacggttagtcctggtaaattgtcttccacagattatgttctttatgaacagcaggttttccaaaaaaccgactgaattaaattttcaggaaacaattacatgcctcaaaaatttgatcggtgaaacgaaattaatttttgttcgtcgatttgagtgctttcagctctcctgtgctccctctcagaatgtgctcgactttggcgcgcttgtcaactccaaatgcgaaagagccgacatgaacatcaccaaggaggagataaaatgtctgattttcatttcaggccttggtgacgcgcacaaagatttgaggcacgaatgtttgcgacaaatggagaaaaacgacaggaacaaagacagaaatgccaacgttgtgcaaacgcgcacatgctcaaggactgcacttatcgaaaggatgtcaaatgttatggttgtggcaatctcggccatataa

SEQ ID NO: 78772 - DNA, 50 bp, Heterodera glycines
atggttgtgatcattctgccattgctcttctgcttctacggagagtgtcg

SEQ ID NO: 78773 - DNA, 423 bp, Heterodera glycines
atgcccaccgatctttacgaagtgatcggatgtccgaaagaggcgacagtgagtgatcagtgaaaagagcgaagaaaaatgactgattggcacttttgacaacagaaagagcaaattttggctgagtaccgacggaaagtgttggcattgcatccggacaaagtcagcggaggggcggcggaactgcgcaatttgagggacgacgaagcgaacaaacgattccaacagctgcaggtggttttggcaattagcagggatttacaaggctggcacagcaaaaattaatgataattaaacggattaaaacttactaccctaaagtttgcaaaggaagtgctgtccgatgagaagaagcgcaaacactacgaccgttggcttttgagtgggcaagggatggcactggccgatttggatggcaatcag

SEQ ID NO: 78774 - DNA, 310 bp, Heterodera glycines
  unsure (1)..(310): unsure at all n locations
aaaacggagccgacaaaagtcagactgatgccaaaggtcagttcttgatggcattaattagccaataaaaaacaaattaaaagggagacncgcgctcgcatttgccgatgacctgcgcgattcgaaagaacgtaaccagcttttgaagttgttgagtgaccgctgaagtgagaggaaagggacggtgatcagaaaattctttgtcagtgattagaaaatgttttgccgttgttgattttgaccgtttaatgtgttcatttctaaattcgttggtgcttctttttactcatccataaagcgcctttacaac

SEQ ID NO: 78775 - DNA, 2150 bp, Heterodera glycines
atggagtgtcgggcagcggccaaatttgtgaatggagagcccagcgacgatgtctttttttcaagaatcgtttttacggcacggccttgtccggactacgattcagtcccagtcagaaatggacacaccagtacccgattttttaaataaaatggcaatcgcgcccctaacttggctttttccaaaatcacagctctggtttaaatagtgttaaaccgttcgaccacgacgcttaactccgatttgggtttataagatttgcttaagtatgaacgaacccaatcaattccaattccagacattccattggccaatatcccccccccccccctccacattctcatttatgggatctgttttttttttgttcccacccgatttaatctgctacagaagtgactaatgggagcgttgaaaaggcaattatccaccgattaacacttttctttccatctcgtgtacagctacataaaaatcatttttaaatttagttgtattttatttatttgccttttttcgcattcatatcccatttttcacactcttgcgacacaaaaaatttcctcggttaatctaaaacctattaaaactaaagatcggctacggaccggagccgtatacggatttttacggactaggatttttatccgtaatcctgaatcctgatccgtattttctaaaaatgccgttctctaattaaaaccgtcttttattctaattttactgacattaaaatttggaacttaggtaaacattaaaaaatatttgtattctgtttcttttattgtttatgattctccattaaattctaaaaaatttcgtagtgttccgttgttcagctcgtttactgtctctgttcgattaccccaggcatttagtattaatcttcaatttttaagcaagacaaataccttcaatcattttcattgtgtaaaatggccagtaattcaaatgcccaactgttggatgcatgcgaaaaaggggcggaattaaaaaacagtacgtttgagaatttatggttaaaattggcaatggcaattcaaaataagtttttaatatgctttaaagtgacaaatcattttgtttttattcctttttagtcaaatccctaattgagcgcggggcgaatgtgaactttgccgatgaagacggtctttcccctttgatgggggcatgcgtcttcggtaacgttgggattgcgcactgtcttgtcgagttgggcgcgacaattgagcaaaaagatgacgagggtcagttaccgtatttatctgctaattaggcctctggcacttttttagatggagagacaatgcttttaatttgggggggggattttttaggaaaaagcaaatggctaattctttggttgtatgaaattttcagaaaagtttgtccccaaacattctccccagacaatataagtgccagtgttatgatcagatcttggaaaaatagaataaacaatacttgctagaaaaattgggaccaaattttccatttaaaaaaagaatggtcaagcacccggtaattgtaccggtggtagcccccctttttcgaaaaaaatttcaatgtgaaactcgaaaaatttgaagttttgactttttgttcgctattgcgtcagattacggaattgaatcgaaatgggagtaaaaaccgaattcgcagaccccgaaaactccaaaatagctttagtttgagaaaaaaaaaaaatttttttcactaaaagtaggattaccagcgatattattatgagcaaacacccttcattcaaatgagtgaaaacagagccctttgagctgtaatttgaacaattagagtacttaattatgttaatttgtaattctagcagcgtaagatcttttatgtagatatttcaattgctaaaatgtgcagaattttgaatttttcttattaacttttttcactttgttcgtgtgtatcttataaaattattaaaaatatttttcaatgcttaaataatataaataaatcattttaggtttgaccgcccttgggcatgctgtcattgcagggcagctcgagtccgtcaaaatgttgaccggaaaaaacgcgaactgtttggtgtttgccgaagacaatcgctcgccgttggtcatcgcctgtcaggaaggccgcatggaaatccgtca

SEQ ID NO: 78776 - DNA, 349 bp, Heterodera glycines
atgaatacttcaagtgacaaaaatgccgaaaagggacccgcaggagagaagccagttcgagagcggcaccttcgccattcaaatgtagaagaagccgaagttgaagcaatggatgtggaagctgaagcggaggaggaggaggacgacgacgacattcattactcgccgttttccaatgacgccaagctgctgccagccctgcataagcccgccttccaagtcaagcagttcacgctgaaggtgaaccagctgcctacatgccctaccgttgaaaatgcaacactttttgcagaccttctttgaactgcacttggaagtgatgggccgacgcgacacccgggcgagctga

SEQ ID NO: 78777 - DNA, 419 bp, Heterodera glycines
aaaaagagaggcgaggaacaaataaaatggacccaaaaatgaatgacgaagaggtggcgagggagggacccgttgtcttaaaaagggaataattttgtattttttccaggactttcattccaattgtaaggacaggccaatccataaattattttcgaatttattttcaaggatattttttaaacattttccctgaatttcgtataaaaaattgcagggttgtgggccagaggaggacctttgtaacaatccaatggaattcttgaaaaaaggacccgttgctcttgtccatgtgcccttcaaaataagggcaaattaagtgcacatagggaggagccctgacttggctctatttttttcgtataaaatgcggaatgaaaaattgtttcgattggatgcatttatttgtatggcgaata

SEQ ID NO: 78778 - DNA, 1071 bp, Heterodera glycines
atgggacctggatcccgcaggattttctgggcccatatcccggcttttaaaaacggctcaggaccgggaccccagcaaaagcaggatttgagtcccggggtagggctcaaattccggaaaaatggagtttcaatcccccgtaatcttatctcggtctcaggccaatccaaattcccgactttatattgttttaagtttgaatttaaaaatttttcagcattttttctgcaatatgaatacgcttgctaatcgctgctctttttctaaattgtcgtccttttctcgttcgtttcactttttggcgaccggaaaagatttgcaaaaggttttattaccatgaggagaaaatgtgttggcactgttctgaaaatgccaatttttagttcaatccgaagaaaatgccatccgattttaaaagtgccgttggacgtcgtcagttgtcagtccaatgcaattccaaccgatttttttcacgagaggcatcagatttggaatcattggaggtacaataagtcaacaaataaaaatttacatgacccatacggagaaatcttggtttgtacaaaaaaaaataatatcaaaacataattttttatcaaaaaaaatattaaatttattaatttcgtggggcgggctcgaacctccaccacccctcttctcactttctcacaaaaaccactgagctacagctttttcaattttgaggccaaaaattgaaagggtttataaaatagtacgccttattttcttcatttttttaggcgcgattgcagcgctcacgcaaatctttcgaggagtcactaaacaaattggatgagatgactaaaatgcttgaaagagacaatttgcgtattcaatattgtatttactttcttgttttttccattgttgcctattgttgttatgatttcatctccgaaacgtcatctcgaaaatgagctccatttaccaaaaattatggtatacatacctaagttggttttttgaaaaacctcttgaagtgacctcattttggtgtggatttaaaatgttgagagaaaaaaaaacacagcgaattgttagttcattaaa

SEQ ID NO: 78779 - DNA, 1746 bp, Heterodera glycines
atgaatacgcttgctaatcgctgctctttttctaatttgtccttcttttctcgttcgtttcactttttggcgacggcaaaagatttgcaaaaggttttattacaatgtggagaaaatgtgttggcactgttctgaaaatgccaatttttagttcaatccgatgaaaatgccatccgactttaaaagtgccgttggacgtcgtcagctgtcagtccaaagcaattccatttcacgagaggcatcaaatttgaaatcatttgacgaactttttactgaggtacatacacaattcaacttttttgaattattatgccccagggcataaaaaatattgatgttgtggtgaggcgggctcgaacctccgccaccccctcttcccactttcttgcaaaacccactgagctacagctttctgaattttgtggccaaaattgaatgtttaagtagaattgagcgggaccgggacctgaacacggacaactgagtaccgaagtcccgattttgaccgggactagtcccggtgttttcccggtttttcaacccgaataggtccccggttccgggtttgcccaaaattcccggtcccgctcaactctatgtttaagtaaagtaaaagtcaccttattttcttaatttttaggcggatttgcagcgcgtacgcaaagcttacgaagagaaactcaaaaaattcgaggaactcaaaaaaaccgctgcggatttggaagcgctcgatcaaaaatttgtttgtctaaaaaagaaaaaaatttttggttttcagggtcgcagaacccatggctgacaatccatttcgaatcctgaaatcgaacaaaaattcaaaacccaaaaaacagtctcgaaattttttttttaaatttttcttttttacgaaaatggggctaccatcgacaatatcaccgggttttctagtaaaaataaattcgtgtaccttattttttcaattttttagttggaattgcaacgcaatcgcaaacttggcgaagaagaaatcaaaagattcgaggaactcaaaaaaatcgctgcggatttggaagcgctcgaccaaaaacttgttctttggaaatatgccagtggttccttggtattcaaatttttaaataaaattctcttttctatggtaatttgtggcgctgatcaacgagtattaccttaatttttcagaagaataccgaacccctgatccgaacttgaacaaaattcgaaactaaaaattacactgactttggcataggcttacgcttaggcccaagcttaggcttcacggttttgttgcgtattttgaatttttgacgaaaattaaatttcaaatttttgctataatccacttgtcatgggttcgtaatgggccgaaatggatgttgaaatcgggttctccgaccttgaaaatttggaggccaaaaatgaaaggatgtgtaaaaccatatgcctaattttcttaattttttaggcggatttgcagcgcgcacgcaaagctgacgagcagaaacaaaaagcaaaaagagtcgtacgaaacactgttattcttgtatgtggcttttgctttttttgttttttcgttgtttcctatgtttggtatcttataatcttcgacccattatccagtagaaaaaaagtatgtaaaacgtagcaaattgctagttcatctatcattttttgagcatggtatgttttatgttaatcattttcttccattgatgacggacggcaaatttaaatgatgacaataaa

SEQ ID NO: 78780 - DNA, 1160 bp, Heterodera glycines
atgcacaggattcgaacccaggacccctttttgtttaccttctcgttaccactgacaagggaacattccgagctgtaactcggaaaacatttatttttgcttattttcactaaagaaaaattatcatatatttttttagtctaaaaaatcattttttaaatgatttaattatattatatcttaattaaaatttatttatttttatgttggatttgaacccgagctccaaaaatgcgaatttaaccaactgaaaaccaattttagtgaaaacacagccaaaatttcgatttttgaggcctcataacttttttatttttgatctcacaccgctaatattaaaaattcacaacagcagaagtcgaccctgctctatccaatgataccaaatttatacctactttttaactaacagttcgcgaggttcccttgtaagccaatccttaggaaactgataaattttacaccgtttggatggtcatattagtattttttttgatgttgtcaattatctgtgctcctctatctttgtgtttgtaccttattttcttgtctcgattctcggaaaaaaaatatttctcgcaatgccctacttattttttgtaaattcttaaattttttttgatttaaaaagatattttcattacacacctacatatttacccatttaaaaaaatcaatcatatccacgtatttatattatatggccctattcgaatttctgtttttttgccaattcataaagacatttatcaataataaaagcatattttaatattatatttcatattataatttgtctattatatattaggattttatatgtaatattaaaaagaaaatttaaaaaaaattgaaatttatcccattttcgcaaaaataaattttaattacctaatttaaaaatatacaggtgaaattttataaaatattcattgaatgtctactttcattatacctttgcttctgtttataattattgaattcagcagttccgtctgctccgaaattggttaaaatattattaaaaaataaaataaataatttttttaaaaaatttagcattgagcgtggaagaattggacaatttttatgcaaaatttctcattttatgcgcagaagaaaataatgcagcaatcttaaatattaaaattagacaacaa

SEQ ID NO: 78781 - DNA, 1990 bp, Heterodera glycines
atggacaaattttcacacataaacaactgcaaaatgttgaaatttcgcggggaagtcatccagtttatgggtgggttttcatcttaaacatacattttattaaattttttataattaaaaattttattttttttgattgaaatttcaaaaattttcaaaaaaaaaatttcttttggtgtgggtcagaggtggggcgcggacagaaaagtcccgcagtcgcggatcgctctgcgcggattaaaattgccgcagtcgcagatcgatcttcgcggactcaaattgccgcggtcgcggatcgatcttcgaggaacataattgccccagtcgcggatttcgccaaagcggtcgcgaatcgcggattcaaattgcttcggtcgcggatcgcgccaaagaatcccgcggtcgcgaatcgcggccgcgtcccacccctgctgatatagttataaagtcaaatcttttttatgatattaattatctcccaaattaaagtggaaaatcaattgatggatgaagatgattctttgtacacgaagcggaacctattgtcaatggcaaattgtgccaaaattggcaaatttctggaagaaaatgaacctaacaaaagcaataaaaataatgccgtgccaccggaagtagcggagtatttgaatgaagtgaaagaggcacattacaaagtttttttcagccttttattttccgattcaatttggtaataattttgcttttttttaattttctgtatgtttacctttttttttatttaaaaaaaatatcatttttttacaaatttattattttattatttaaaatttaaattattgaaaaatggttttggttttttgaatttattatttcaagtggccagtgactttttttgaagttttcaaaaaatgattaaataaattttaaaaaataattgaactcgaaaatttttacagttcgacttatgctcgagtttttgaaaagcttcggtctatttattgaataatataaataaataaataatttttatattattaatttattacggatttgttattattaaaatttcattttcagtgatttttcacaatattttgactcgaaaagaatggaaaacgaaaaaaactttgcgtttagcatgcgaatgcttcggttggaaaacttggagtcaaatgaaaaaattgccaaaattaaaactaatattgaacaagcattttttgacactgaattaatgcgccaaattgaattaaaatttccgttttacatggcaataggtttgttgaatcaaataaatttaatgacctttttattaataattttgtgtttcaataaattttcttcatcttattaattattttacataaattcttaataataaatttagcttttaattttcgttgctattttaattttctgaaaattatttaatttattgttattttttatattaatattttgcgattctataagaattatgtaaaaattttaaaattttgaaattttttcattaatttttttgttaattatcccatcagatatcattaatgatcacagcttagctgagacatatgctaatattttgtcaagagacgaaacaacacggcataatgctgaacatttgttggccattcgaatttgttccgcacgaatttggcaaatttttcagcaaattcatttggcactcaagcagcagcataatggcaaaaaagccaaattaaaggatgccaaaacaaatgaaattttggcacaaattcaatcaaattggcgtcgcttttggaaaacacggcacgcaacttacaaatatatgccaaatgatttgtatgcacattgggttgcagtgcaagatcaatggcaagatttgacatttttggcgtgccaattagtccaacaattagcgaccgataaagataatgttgctaaatattttcaacacataaagcaattgttgccagagcggaatctgttttatcagttggctgaggagcatgccaaaaacataaccaggtga

SEQ ID NO: 78782 - DNA, 753 bp, Heterodera glycines
ttctgcttgcagcaccccgttccgagttgggcctgcccgagactcggctggccatcatccccggctgtggcggcacccagcggttgccccgggtggtcggcgttgcaaaagccaaggagctgattttgaccggacgcaaagttcggggggacgaagcggcacaaattggactggtgagtgagccatggcagcaattggcaaattattttaaattttttaataaatggggcctctgggtatcataaaattttttggatttttttttttgctctaatatcccttcatttgattaaatttttacattaaatttcattccccccgttaagctcaaccatttgacggacgacccttatgccaaagcgttggaaattgcgcgggatgtgctcaaaactgtaattaatttatttttgagcaattttccctcattttacatttttttttgtttccgcagggccctctcgcaaatcgggtggcaaaattggccgtggagcagggctttgacttggaattgcgcagtggtcttgtggtggagcaacagtgctatgcacaggttggccccacaaagcgcaaattattattttctctctgcccaattttaaaaaaaataaataaaatgttaaaaatggacgagaatgttttttaaaacaacaaaaaaataatgtgccaatttccatttagctgatgccgacaaaggaccgtttggaagcgttggaggcgttcgcgcaaaagcggccccccaaattcaaaggggaa

SEQ ID NO: 78783 - DNA, 629 bp, Heterodera glycines
atggtcgctgacggtgtgctgagcgagttggtgctgtgcgagtcgcgtccaacagtcgccgacgcggcggcgtcagcggagaacgctgggccaccagcaggcacaaccggcgacaatgagacgtcgccacaaccgcaccaccagcaacagtgccatcgaccgcagcgagtgtatgacgcgttgcggcaacggtcggccgaagttgcggactttttgatgcccactgacaatgaggcggaggagttgggggagggcggtctgttctacgcgtgtggcgacgtgaagaacatgagcagagagttgtgggcatgtctcagcgatattttgcagcgcgagaaaggcgagcgttatttggctgacttaaacagggacggcattgagcccatggttttggttgagacaaatcccgaatatccattcgttaaaaaaccccaaggtcgggcccactcaaaatccctgtggccgcaccccaattcggcccctaacccgacagggaaatcaggatagatttggtcgacttgatcagaccgaaaattattttttttccaggcttttcccctgtcgaagcgattcaattgttgaaaaaactgcgtgaaaaggagcgcctaattgaagatgtttggtcctaa

SEQ ID NO: 78784 - DNA, 504 bp, Heterodera glycines
atgtctagtaaaaaaaattcttatttcaaaaaaaaatttcattctttcttccttgatcccttcggtgtattttatctccgacggtatggggtgctctggattccaagtttccgaggatcggaatttgtggaaaactttattaattttctatgatttttaaaatctatttttacttaagaactatgaaacatttgaatgctcaacatgttctccagttctttttcgtattcacattacaaatttcattgaacactggcatcgaatccgctgcagatgaaccactgatcacttacaccgacgatgatggaaacaaattgcaaatgaaacttcctggtaattatttggtcaaggcataaaaaagtggcatttttttattataaacatttttttattggccctatcaaaaatttagaatgaatttgttagttgatttcgaagtggacatttaaatagtttctaatgactaaccacaagtaaactaaacacagaagaatgataaataaa

SEQ ID NO: 78785 - DNA, 312 bp, Heterodera glycines
atgtggtaccacaagcgcattggggcctccaaccccaatgcggaaccagcagtccagctgcctgtagcgggtccgcgcaacacagttgaagaaccaatatgtggtgccgccagacagggaagccagcacacccgcatgttgctgccacccggaggcttcaacgcggtgcccttcgccggtgcgcaggacacagttggagaccgcgagcggacccgctggcgtttgctgagctggtcggtgatcaaccgaaacgacgatcaggcacagcgggctaaaaactcaacacattacgaaatggcatttgtaaattaa

SEQ ID NO: 78786 - DNA, 316 bp, Heterodera glycines
atgacgaaacagcgcatggaggcagaaaagaagaaaagaaaagaaatgagagatttgaagcaaaaaattaagaagaagaaaaaatctttaactgatcaattaaagcagttaaagagagagattgcggatggtgactattcctttctcgaacacctaaaaattgttgcctatagagaatgtccaaacccggttcaatattgttctgaatcgccagtttattgcccaacatataattaccacgatctttaatttgaaattacaaaccgtgctgagaacaacaaaaaatatgcaaaatattatttgatttgctaataaa

SEQ ID NO: 78787 - DNA, 93 bp, Heterodera glycines
gacgaatgcaaggaattgtttgcccaggaagaggaaaaccgcaaacgattggatattatgatggtggtgaacccccattggtctcgtgtataa

SEQ ID NO: 78788 - DNA, 75 bp, Heterodera glycines; identical to SEQ ID NO: 69209

SEQ ID NO: 78789 - DNA, 187 bp, Heterodera glycines
atgttctctgtcatcaatctggtaaaaactagcaacaacgacaacaacaaagccaccgcaaccagtaacaacggaaatggaagtggaaatgctgcgcaacaaccgcagcactcacaaccattgcatggaggcgtggactatctgttgggcattggccaaagcgttcagcgtgcgttgatgaattttg

SEQ ID NO: 78790 - DNA, 2206 bp, Heterodera glycines
atgtattttaagtccgcaaattcgtcgtcccccaacactccgtccgctccgttgccgcctcgtcctgcgttggaccagcagcagcagcaggcggctctgatggctgccattgcgatggcacaggacacggtgaagaagacgcttcccgtcgctctgtccggacttgaggcaacgtcggcggtgattggcgaatttttgtctggcttcgacccgtccactggacaggcggcaaaccgtgttggacaaacggtggtgagcaaagctcgacaaggcgtggaaaatgtacggcacatcttcaaatgaattgaattttacaaattaaaaaatgcatttcctgatatattttctgtcgctattcattcgcattttttaaattgtacaaccgacaagaattgaccatcaaattcttcccattttagctgaccgaaatgttgagtcccgaattcgcggccagcgttttgcagttgccaacgcccgtcgttgtgccgccgacaaaccacggacagaccaacggagaaccgaagcagcaaaccgatgagaagaaaactgcagacaaacgtatggactgacaaaaatttaatattaaaaaatgaacttttttcaaaattgtagactcacccaatgccaacccggacaacaacaccagcatcaactccgaagcagcatcggttgaccaaaatttgccgcatttgatgcatcgtatggaagaattgcagacgaaattgatgtcattgaacatgaacttggccaatcgcaatcgcgacgaaattgtaaatgatggcaaagaaaaggaggaaccgaagaaaggggacaaggcggaggacgaggccaacaaggaggaggaaattgttgtccttaacccatacctttatctgaccaacgaagcaatggaaaagacggagaaggagcacaaagaaaaggattccgctgaagccaattcggacacggtgaaccatttttgtgattaaatacagattgatacagtgcctagtactactaatttatacttttttaaagtttaactaatcgttatccgtataaatggaaacattttttatgaatttaaatatttttcgattcactttcagaccaatgccaattcgttggacaaagaaaagcagccaacggcacccatccaattgggcaacaagcgcaaattgggagacggagtgaacaaagacaacggcgaagaagaccttatgaagttgagcacgcacaactcggaggaaccagttgacaatggaaatggtaaaattcacttaaaaacaacattagctatatacctagtcttaattggttgcaaatcgttttccgtttcttcgcgttgcttgggagtcgatgatgaattgttccctttgccatccactcataattcaatagatattattttttagtatcatacgtctcttcgttctcgtcccgctcctccacgactactatgtcttccgttgaggacgaggaggacagtggcaccaacacgggtgacgacggttggatggtggtgaagaaggagtcgttcaagaagttgtgcgacttctacgagaagcgtcgtcgcgtggagtgcggcggtggcaccgtcgccgctgacccattcgcggaacaattggagcgcgaatttcgcgaggcaacgatggctgacaacaaccgcaccgatgaacgcgtggatgagaaattgacggcggagagtggtgagttgggggagggggataattttcgaagattttttaacttctaagttaggaaatttttaaaaattgggggattatgaaaagttcaatttggtctactaaaataactgaatttacggtttataataaatttattagtccaataattgagtctcttgtttaaaacttaaaagatattcacaattttagcctaatatgctcgaactttctacatgacaaagccatttagtgttttatttccctcaaatgcttcattttgattgctgtatttatttgtagaaccgaaaaaggcagacgaattcgtgaaggaagttggacaagaaccggctgccgaggtttatgtggcacaaattgtggatttgaccaccgaaaaagatggaaagtcagaaaaatcggagaaggtggtacataattcttcagtaaaagagggaaaaggaacattttttaagaccactccctgtgtccattcggttgtgatgcgcggcgtatgtgccggatgtggacaggattttcgtcag

SEQ ID NO: 78791 - DNA, 147 bp, Heterodera glycines
aaccaatggcaaaacgaacggtggcattgaaacgcaaccgaaaaagacgacggaaaaaacgtaaaggcatttggcaattttcaaaaggttttccaaattttcagttctgccttttgccctttcgttgtgaatcaggcgcctgttaag

SEQ ID NO: 78792 - DNA, 289 bp, Heterodera glycines
atgccttccctttttgcccagtgccgttttctgccacttatgcgaaaatgccaattgccttttccattcgtaaattttgtgccggtaagtgcccaattccatggcaatttctttctcaatttggaagcgattttcttttttgaaagcatttctaactttgtagctgttctttattttctcaaattcgttaacaattctcaacattttggcagttaactttttctataaaatttctttttacatttatggaatgtttctgagagattcgcccaattccttagcaatttaa

SEQ ID NO: 78793 - DNA, 244 bp, Heterodera glycines
atgtccattcgtgagcaaaataatacgagcaaagaagcaattgaccagcaggattatccatcaagttcaattgagcatcatcagtctaatgacctggtaattagttatacgaaaaaatatataaattaaaatatgaatttaaactaaacttatgcaggaaacaaaagttaaaatggaaaaggtgcgaattgttaatgtattcctggaaaggagaaaataaagcaaaaacagaaatgaaaataaa

SEQ ID NO: 78794 - DNA, 927 bp, Heterodera glycines
atgtacaaattaacatactatttttgtctgatattttcatttgatcagttttttgatcatttttccgccgaagccaaaaaaacaaaaaattggcaattcaaatggacaatgctttatatgaaaagtgttttaaaagtgatttggacactgacagttccaaatgttcccttgtctcgaacttttgctttgccaccaaacccgacacactaccactctgccatgagaccacttgctagaaaaaggataattgcccactatatgctgcaaagacgatcacgtcaccactgcgaggggtactgtatcccggtgaaaaatccaataaattagccacaggcaagcggactcgaactttcggtctgtcactaaacccaacacactactttttgaaataagttgagcgaataaagcaaaaattacacggaccaagttaacaatcagactgcacggaaatattgaacatcttggcaacccatctgcaggatatgtgccgctgaattatcttttcgtcgcaggattctcatagagaagtcggtcgatgaatctgttgtccattacgaattctctctcgcaagaataaatagaatcctactgctgccgccttcctcgacatggaagcggaatatgagggcagtgattacaacgatgccgaaaacaactacatgctcggctacgatgaagagggagagaagccgcggtccgtcacgacatacgcctacgcaccagggatgggccaaattgaaaaataaaaagcgaaaagcgaaatttgcgaaactgaaaaatgcgaaatgaaaaaaaaagcgaaatgcgaaaagccaaaatatgcgaaaatgcgaaatgcgaaaagcgaaatttttctacaactttttaatagttaaaatcataaagcaaaaatcatttttttaaattttattccaaatttaaaaatca

SEQ ID NO: 78795 - DNA, 947 bp, Heterodera glycines
atgatcacctcgatggcttttcttcctgtccaccatctccgtgctggcctcaatgttttgcagacacaactccctcaacaacttattggcgtcttcgattggtgagttttttggaatgttaaatcaatttttttttatcttaaaggttcatggacaattacaccggaaggccgtggttcaatggtggtttgacagtgccacggttcgcacaggaagaatggagtgtgcatcaacggacgttggatggaggagacagaaccaacaattacgcagaagcattccatagaaaacttcaacaggcatttgattgtacccatcctagtgtcttccacttcatcaacacaattcgatgtgagcaaaagtcaattgatgctgacatctcacgatgcgtcgctggtgaatccctcctctaaagaagcccaaatatcgtgccgccgatgcgagaattcttcgacttttgcagggatacaataccatcaacaataacccggctaaccaaaatgaccacaattaccatgccaatgtcaatgttaatcccgataacatcaaccatttgctcgttggtgcttctcgaaattatgaaatgcgcccgtaatttttcaatgctttgttatttttttttgttgttaacacattgataaatattttttgataataaattaaacatttttagaaaaaaatcagaatataacccatgtggcacaaaaacagcttgccagactaaaacgaccccctgactaaaacgtcccctcagactaaaccggccagactaaaacggccagactaaaacggccagactaaactggccagactaaactgacccggtccgctacgcaaaatcatttcccagcaatccggggatttaactacactacggcaacatacgccaagtattttagaatgaaaacaaaaaatatttcatctcatcatttaaccacttaatttaa

SEQ ID NO: 78796 - DNA, 234 bp, Heterodera glycines
atgagcaaagtgaggtaattgatggggtcacggaatgccctaattaaaattttttttaaatagattttggtaaaaaaaattgttgtgatttcaattttttacccactttgtcttaactattacaaaaatgacagaaacattgaaaacgatcacgagcagagcgatgattacaacaattgcagcgcaattgagatcagtgccaaactcggattggcatctttgaatgtcaaatag

SEQ ID NO: 78797 - DNA, 189 bp, Heterodera glycines
atgtttttcactggaattgacagactttatgtcgtaatttttgatgaaatgtaagaaaaaaatagcttatttaattttttgattaccatttttctaatgtaatgtcaattttaatgtggatccgaaattttataaaaatttacaaaatttttaaattaatattaaatgtttaggtatgccatctgctga

SEQ ID NO: 78798 - DNA, 420 bp, Heterodera glycines
atgttagaagggtcagggaaccccacattggtcccagtcatcgaacgacttgaaaagttagaaaagttagaaaagttggtggaacggctaattgcgggtgagaatcggtatgggaatcgatttgctgacccccagcatatctcatcctcaccatcggcacacacttccaacaacggccctcaactccaatggggtcaaccgccgcccttcgctgggaatggcgctgtttcgcgtatgataaccgacgcaatcatcaactccgagcagcttaaggagaaggcgaaccgggcagtcattgaaaaattgccggaggcaatcgacgaacgggcattggtggagcaaattgccgatgaatgcggggtcaaggacaaactgtcgtcggacattcatcgccacccaaggacgcggactgatggaggg

SEQ ID NO: 78799 - DNA, 587 bp, Heterodera glycines
caaaagtgccgaaagaggctgctgagaatgagtcggatgaaatcggcattttacggactcgtacctatgacttacacatcacttacgacaaatactatcaggtggtacgggatgaaggattgccttcatcacaccataaatgaaatggttggggcttcataaaggtcgggcgggagttggacagttcacacacatagataaaaagagaaatatctgtccggggctgtaaacggtgcacgggagaataggaaatttatataaaaaaatatcctaaattctcaataatttttttaattaaaaattagttaattttactgcctacctttatcacttccggactcaatttctttttttataaaatgatgcaagaatccataaaattggaaactttgatctttcggaaaaaactaaaaagtttaaaaacttcccctggcgctgtcatcatcggccgacccttggaccacctcccccgccccattatctcaactattctttaggttccacgcttttggttgattggctatgatgagaatggcacgcctttgacggtggaacagatgaaggaggacttctcacaggtcgaatga

SEQ ID NO: 78800 - DNA, 648 bp, Heterodera glycines
atgaatgtcaatgacctggtaaatcagtttaaaagtgccgcacttagtgtgggtgaatatttgacgccggttttgcgcgagtccaaattccgtgagactggagtgcttactcctgaggaatttatcgcaggttaaacctccaaaaagctaaaagtaatcaatggatggtgaattcagctggcgatcactttgtccacctttgcccgacttggctttggtcaaaggccagtgattcaagcaggtttcgactgttcattttattcttttaaatctttttttaagagcgcgcgattatttaccaattgacaagcaatttctgatcagcaaaaaagtgccatgccatcatagatgttcagaaatgaactacaacgattcattggagaaggtggaaatttttattgaggggatgaaatcagcttttcgcataccccgaacaaaaacagtctaatgggaagttgaaaacaaacaccgagagagttcaaaaaacaagagggaagacagttagagattgatgagagatttttagcctcaattcgcactacatctatcttataaatttatcagatcatcaaggaggagggcgacgaatgggtggacacgcaccatttcgacacccaaaccaatttggcaccaaaagaattggacgat

SEQ ID NO: 78801 - DNA, 232 bp, Heterodera glycines
atgcggagtgtcaaaaccggaaaacgtcaattcgaaccgaggcgaaaccgcagcggatgggtcttggttttgcatcaagtgaagcatttctcagtgttcaattatcttaatcgatgttcagatgtgggtttgccaatcaaccgatccgggatacttgtttttgctgtgacacaatggtcactgagaaacaattgcacgaagttctcaaaaaaagcggcatttgggaatgcag

SEQ ID NO: 78802 - DNA, 643 bp, Heterodera glycines
atgcttgttgctgctggtcagctgcggaaaaatggggcaggcattttttcactgtttctggcatttgcaggcaatgagtacggtgttgtgcgcgggtgcatgtccgacttttaccatggtcaaacaacgtcgacaaacactgacaagtcggtattctaccacttggcaacacgtagtccattcttaaaacaaacatccttaattggtcctaattaacgtgtcttaattattccacttaattgggtcattcatccatttgttcttttttctctttgcaggtgttactttggtgaatacccacacaatgtgaccatttatgacccaaccaatggtgccaagacgtacagtcagctgtacgtgggcgtgcgctactgctccaccgtgaatggcgcgtgcaacaacaaattcatgccaaagaaagaggcggccgaaggaagcggcgcttttgccgaaacattttgtcgtcagacccaacaaatgccaagttaactgtgaaaacaaaacaaaaaagcaaaaaactgtccaagtgcagcaacggcttgtctgagctgctggcgctacgactcggccggcgattgcaattcgaattggaaggagacgtgccaaggacagtggtgcacgaagactacgggatatgtgaacg

SEQ ID NO: 78803 - DNA, 793 bp, Heterodera glycines
atgtcgcagcaaaagttggcctgtaatctgaaggattgtgccacatggagtcagtgggtaagttcacatttttggggccaggtactgccaatctacgcgctaattaggggcaattaactacctaattgattaattaaattgctcattaattggccagggggcatggagtgattgctcattgttgtgcggcaaaggaatgcgatcgaggagtcggtgagtggtgcattttctgatgggtcaattgatggggcgggcgtttcgtaaaagtgccaaatttacagaaaatttttttgagaaaaagtttcataacatatcttaaaacaaccaaactaatagcttttcgattgtgctctattagcatgaaaaatttcaaaaaattttatttgatttttcagaaagttaatgaccaaaattattcaaaaaattgccataactttctgaaaattcaatgaaattttctgaaacttttcatgctatagaacaatccaagagctatcgaatgacacaaagataatgtcgactttttcttgaaaaatctataaatttggcgctttttacgaaacgacccagcattctgccgcgcaagcgcatactgttgcatattatgattctttttcgtcttgctcacacgaaacgggccagttgcgtctgagccaagtttagagcatcataacttttttctttgttgaccaaatccaacaatgttggtatcattcgaaagctcttaacaagctctatcggctatccaaaaatcacaaagacgtaccgacatataaaaaagttataaattaaa

SEQ ID NO: 78804 - DNA, 627 bp, Heterodera glycines
gtcttcatggtccccatgtacggcatcgtgcggaagtgctggcgttcagttccgttctcgcgtgtgccccgcgggcggtcggtgcgatggcgggccgagcagcgagagtcagccgtgcaatcggatctgtcagtgagagggatggctcaaaatttgtccttattttctaggactgtccttatttgggagagaaatggccagattttcttacgaaaattcgattttttaaaaatattttcgatgaaaatttttattttgttgatcaagcgccacatatacaaaatttggatttcatcttaaccttggcaaggacatttcaaggacatagattgacacaaaaatgaatagaacccgtaggaatgagctaaaaattcataaattattatttttatttttttgtctttatttcagcatgtccagcacctttggctggtgatgctgtcaaatggtcggaatgggtcagtttttaaaataataaattttaatttttactccgacgcccatttcagtccccgtggacacggtgttccgtcagctgcggtcgtggcagccaagcgcgttaccgtcgatgcacaacaacaccctcaacactcacacagcacaccgtgtcctatacatgctcaccag

SEQ ID NO: 78805 - DNA, 5286 bp, Heterodera glycines
tttcattttaatcccctcaaaatgtttaatcatttttgtatatatttatttatttatgttattttttggccttttctttttacatattgcttaaaatgacacgctcaattgatcagctgaacaccaaagcactttttttcatgttttttgagtcattttggcgccaacccaagttttttaactttaactttttttcattgtcaaccagatcaaaaatcttggtattattcgatctcttaaaaggctctattagccttacaattagaaaaatcacaaaagtgttttctagcttataaaaaagaggtttcgaaaaaatttcaataattttgacttttttgcaatttttgtgttataacttttttgggaattgtcgaatctccaagcaatagcatacaaacagcttctaaacatgcactaagctttcggttgatacataccaagattgttggatttggttgataaaagaaaaaaaaagttacaacccaaaaacccgggctggcgccaaaaaacgatggtccaaaacgagccccactcatttcggtgcactattcacaacaattgtcaaatttaattatttttttggataaactaattaactaattatgtaccacttttcctaattaattacgtttacaaaccattttttaactccctgctgcccaacctttagttacgaattgattaaaaattttaattaaattttaaaggaaatttaattttgtccacataagtgacctttgtttgtcttttcaaagtgatctttgctctttgatcttttgatgatctttgatctttaatctatgattgttcgtctccctttgatctttagcctttctctcttttttattgtatccgtttgaccttgaatttttttttctcgcaattttccgctctttccctcataattacctgtattttcttgttgtaattttcccactttttttttttgcctatctctcgctccgtttcaaagtgtggcgctcgtcaaattttaaaatttgcactattttttttgccttactttcccctccggcgatgtttttggctccgccctttcgcccctttcatttgcacaatttaattaaatgcgaaaatttgcacgcggcggaaattttgcgattaaaaattaaattcaatcttttttccaattgatccctgtccttttcagtcccaagttgacggccaatggtccgactggtcaccgttcgagtgccatcaatgcttctgctcggacatcagcggtgccattggagttgtgggtttttttgccggttaatccaaaattcttgagatttcagacatcatgaattacttggaacactaatgcccccgaattcccaactttgggcacattcccgagcccccaagaattctggcccagattccggggccacacccttgaaaaaatatgaaagtttccatgatctggggcattttggcatttttttgacttctaaaaggtacaccccttacggcatttccatcggatcagttcccctcccctccggccgaataaaaattttcaaatttggaagttttttaaaaaaacttttaaaatttttataaagaaaagttcctaagatttttttaaaaatttcgaagattaaaaacaaataattgggatacgatccccgccaaaattattaattgcttaggattttcaaatttatcacaataaaaatccttttatttcgggatgcatgcggatttttaaaataacttttttgtcctttggcacagacactttccgaacggaactgctccaatccggcaccacagaacggaggtgccgagtgcagtgggcctgcgcatcgtgccgccgtctgttcgcgcaaatgcccgcaggagcgccagtcggtcaaccaggtggaccaattagggtcaatgacgccactcgtgaaattgccgaaatactttttcggctatatcactgaatttaataatggatatttgaaatgccattgatgagacaggtcataaatgagtttagtcctttgggaaagcaagaaaatttatcaattaacggattaatttattcgtgataagtctcttcatccattagcacgattgggtcattttgtaaattggttaattagcgagtttattccattaacggtccgatcattagtggtcattagcctggctcatagcaaatggctcattagccaattgattcattagggaatgtgtgggttatttattaacaaatggctcataataaatatttgggccattagcgaattgacttattataaatgtttgggtcattagcgagttggctcattatgaaaagtgtgggtcattagcaaattggctaattactaatgataacaaacaacaactgtccagtacatttcggcaaaatgcacggagcaccaacgcgttcgccaggaccccgagctgaccggcaccggcagtcagctgacccgctttccccagagggcatgcaaagtgttttgtgacgtcaaaaatgaaggcggagcgccgcgcaactaccgcttttacggggacgacttgccggacgggggtgagagaggcctaagccttaggaatttcttgaaattttttttctaatcaataaactggttttcctacgcacttttcggttaggggttggaataaaactaaagggagtgcccaccaaaatttttttactaccccaaaaaaaaattattttttcattatttgagtaaacaaatttaattataagttttgaaaattcccaaaagttaattttttgggcctgggccaggttagaccctcaaatctcgaaacccgacatttttctcgcaaccaagttttttggtcgtctcgacccgaattccaatccaatattttttttcgactcgcggaagtccttttttggaacttttttttttgcacatttgttcattaattttcgtcattttgtttttcatttaaataatgactagggattctttttttaggcaaatgcctaaaatttttgcgcacttgatacgctcagataagcacaaaaaacgcgttttccgcttggtttggggtgtcgtctacaatgacttttataatgcctgtttttgcctatttcggggtttttgtgcctaaagtgcctatttaaggattttcgaaaaaatccttaacaaaaatgcaataaaaacgaaaaattcacccctaagaaaaggcccgaaaaaatttcagaaattacatcccctaagaattgaaaaaatatttttaaaaattgatcaccaaaatttatttatttttttttaataaaaattttgctctaaaaatgtatccttatttgaaaaaaagtttatgcaattgaagtttttatgtgttttgctacctatttgcctattttagtgcctatttgaggatttttgtgcctatttaatgcctattttgcgatttttttgtgcctttttaggtgcctatttcgcgattttttgtgcctaaaaaaagaatccttaataatgactatggattgtaattttacaaattgacagctccctgcggttggaatcgttactgtctgaacggcgagtgtacggtaagtgcctttgaaatacaattttttcattttcattttgtttttacacatttattctttattaacattttcatccattatttttggcactaaacatgccacttaaaccaataacattcaacgggactcacacttttttgttacaaaatcattgggtttggcttacggtatggtaccctatcgccggttactgtacttcgttttttaatttatcaattaatttgctcccctcccatgcttttgcccttctccctttaagttttcaataacaattttgctttaattaccatataatatatataaaataatatatgcatatattatatatatatatactgtatacagtaacgagtcgctaccatataccttttgcctttttcgtttccataacaaaaacattctctcatccatcagtagattgtccacaaatacttttggcgcgattgccttcggcaacaaacaataatgacgccgaccagcactgtcgccacacccgcaccattccggcgagttacaagtggtgaaaagtcgccaagcgacagcgaccggcgagttttgagcgacggcgagtcgtcgagcgacagcgaccgaaagattttgagcggcggtgagtctccgggaggcagcgatcggcgagttttgagcgacgacgagtcgccgagcgacagagaccgaaaaattttgagcggcggcgagtctccgggcggcagtgatcggcgagttttgagcgacggcgagtcgtcgagcgacagcgaccgaaagatttttagcggcggcgagtctccgggcggcagcgatcggcgagttttgagtgagtcgccgaacgacgccggcgactctggcattccctcgggcgtgctcgttggaccaaagcgttggcgtgaccttttggtgttggaggacagaaaatggcttcaacttgatctactcacaaacaattagctaacaccacacacttattacacttattcaacagaatacgggggacttttgttgcttgtgacggaaacactctattttttgtttttgtaataacattttttatttcttggcattttgcttataaactctgtgatctctgatctgttttaatcattagggaccgaatttatatggacaaaaaatacgaaaatatggacaaaaatttctgaaaattatctgaatttttgtaaaatctaaacccacaaaattttttgtcaagaggaaaaaaaaatcatttaatacatgaattatagaatttgttaactgagacttacgaaaaatattgaacaaagaaaaaagattgcaaaaattagtaaattttgcaaaaaattcattgttattttttccaaaatttttcatattaataggggtgtatttttcgtttttttttttgtgaaaatgccgaaacatcgatataaaatatggataaatcaagcaaaaaagatcttttccttgccgaaataagtgtacaaaaataatccatacaaatccggtccctattgatcactgatcaaagtcaattgtttttgtgaaggcgctcagctgtgatagttcgctgttgctaatcggtgaatacggtgagcattgtccggccaaggaagaacggtgcccgacaagtgccgtcgacgagccaaaaacggcggcacagttgaacatgccacggcatttcgccattgggcagtgggagcaatggtatagtgtatacatctaactgtatttctccgatcacttgggagctctgaagctaactgatcggttgatcaatgttttgatta

SEQ ID NO: 78806 - DNA, 644 bp, Heterodera glycines
atggcattccttaccaagatgttcatgttcattacagtactcgaagattctgttgaatcgaaggtaatgcaagaaactgtaagtggaattgaatatttaattgactattttatacaaagaatataactcttagtatgatgaaatcagaagaatatccctttcctacacccagttggtcaggcgaggctgctaattgaatttaggattctcagaaaaggcttaaaaatttcagaatttttaagcctccggttcaggaggacctttacgtataaatttattgccttaataatgaagtagcactagttgaaggcactttttggatgctctttgttgctctttgaatgatgcctttcatttcttgcgaccatttcgttttattggtgcccaatttattttttgcaaattccacaattctttcataattaacagatctgataaattgaaccgactcgtccacatacaaatagggcgggtcaagtgggtaattacccacaaaaacggggcgtaacaatccgtcatttattttaacatagattctttcctcctgcaattccaattggtgcccaatgcatgcgttctgaagctggacaatgaagagaacaagaatatggaaaagcataattagactaattaggggcaataaa

SEQ ID NO: 78807 - DNA, 416 bp, Heterodera glycines
cgcccgtcctgaggccgcgaagcggccgaatgttccccacaaaattaaaaaacgggcgcgaagcgcccgtcctgaggccgcgaagcggccgaatgttctcaataaaattaaaaacgggcgcaaagcgcccgtcctgaggccgcgaagcggccgaatgttccccacaaaattaaaaaacgggcgcgaagcgcccgtcctgaggccgcgaagcggccgaatgctctcaacaaaattaaaaatgggcgcgaagcgcccgtcctgaaaccgcgaagcggccgaatgtcccccaaaaaattaaaaaacgggcgcgaagcgcccgtcctgaggctgcgatgaattgctaaattacatcaatttctagcgacgcggcgaagccgcgtccctgagcgcgaagcgctttccccacagcaacagaa

SEQ ID NO: 78808 - DNA, 142 bp, Heterodera glycines
atggtcacccaaaacgaccatttgatggcaaatttgtccgaccaactcacaaatctgcaaaaggaattggacacactgaaaaaggacatgacggcgaacaacgacgcatttttcaattgtgccatggcactgatcatttttc

SEQ ID NO: 78809 - DNA, 228 bp, Heterodera glycines
gctttcaaatccacgcaattacttccgctgcgaaagatgccgtggaacaatcggcggacgaaggccaagagacggcggacaaaattgcgcggtcgcttttgcatgccacgcggcacagagagcgaacatttttttgcataaaatcgtaaattttaatgaggggacaaattgagaaaattaatgaaaataagtttttcatttagtcaatgctttgtcactgtgctttat

SEQ ID NO: 78810 - DNA, 588 bp, Heterodera glycines
ggttggatggcagccagcggatttgtagtcgacgacgctcaccaagtcacttacgtggactttgccggctccggaatggttcatgtgtgcggcggcactatctctttgatcgccgccgtactgatggggccacggatcggacgcttcccggagaggacagtcagcgtgccggtggggggaccgaggcggaagcagaaggagcccaaaagtgtggagatcaaaggccattcagtgccggtgactaacgaacattttaaagaggaagcaaattaaaatgcaaaaaattcgaatccgatcaatatcaaaatttttgtgccgaagtgtccagaatttatgcaaattaaattggcacagttcgcctctttggggggcttcattctgatgttcggctttttggcgtttaatggcggctccaccagtgaaatttcctcgccgggcattggccaaacagtggccaaagcgatggtcaacacaattctgtgcggagcattcgccgcactttcatatttgttcgtccatttcatccgaaagggcaaatggaccgttctgttgacgataaatgcatgtctaactggtattttaccctaa

SEQ ID NO: 78811 - DNA, 270 bp, Heterodera glycines
atgtatggaagccaagcattcactcttcgacaaaacccacaacactatgaacacccggagcattgggagagggcccgagagccgaacatttacaaaagagtgagagagtgggagaatgattactgtacaaatagggattactgtaaccacagttttacaacaccaaagcgaacagtgtgggaccaatggaaggacactgacaaatgaagaagaaaagacgcaaaaaatgagcaaaatatgcaacagtgaaaactaattcagtgcataata

SEQ ID NO: 78812 - DNA, 718 bp, Heterodera glycines
atgtactacaaggcacgcgtgttcggcgacgaggccagtgccgtggccattctccgctcgcaggacccaaaagccatcaaacggtttggcgcgcacatccgactgttcgacacggccaagtggagaaaagtgtccattttggtaggtcggcattttttaatttaaaaaattccaaactttgcggcaagggaaagggaaaaagattcaaattgatgggtttagtagagtttttgtccgatagatcggtaaaattttaaaatcatcaaaatttttagattttggaaccaaaataattcgtgtccacatgccctttctcctttgccatcctaaatttccatttcaaaatagccaaaatttaatcattttctaaattttgggtattatttttttctggtgcattaaggccccctttaaaatttgtcatgctattttattataaaaagtttacctatttttttgttatttaattttttaatttttttttgataatttcttaagtgaaattcttcaaattttccaaatcggtttgaaaatcaaagtttatctatgggttcattatactcacaatttttgtaaaatataataattgcaggagatgctaatcggcaattggaaaaaatacgagcagaacccaatgttgcgccagtttctgttcgaaactggggacgcgtggctggtcgaagcgagtccggacgacatttactggggctgcggagtg

SEQ ID NO: 78813 - DNA, 382 bp, Heterodera glycines
atggcgcggacgtggcgccaaaaatgtgttgggccggctgctgacccggatccgggacacgttcaaggagcgcgaccagttcaagcacgagtgggcagaggtgcagtcgaagttgcccgaattgtatggcatcagcagtggcggcggcggagggatgccgagacggacgatttgaatggacggagtgccaaaaagttttcgattgattatgccgtactcaaactttatttatggcagtagttcccctccccttcgtgtgtttatgttatatttttccccattcgtccaccattcccattttagtatggcgttttgtgcgtgtgtctgtgttggcattttgcccattcattttactcaaaaaaacccaaattctccttctcca

SEQ ID NO: 78814 - DNA, 625 bp, Heterodera glycines
atggttgcaagagagaatatttctgaattcttcaatcagcggttgccacaaatgccggacgaagtgcggcattatttgacaggtaagagggcgggagcagctcgtttccccccccccccgcatcgtttccccccgagaaaatttttttttgcgctcttttcgaaaattactaaaatttctgcaataagcaaatttctaggtatttttggacgctgggcttgaatatggcatcattcatttttaccaataatcccatgacctgaatgtgaaaactcgatagaatgtgaattttgaagaatttaattttttgatcaaattcgggtctgtcgtttagaaatgggttaaaattatcatttcaagatcagcgaccctaaaaaaagctccttccaaagcactagtcttgccaaaagcgggacatttgcccagtttccgtcatttatatgttttgcagatctgctcaaggagaacgaggatgacatgggaacggagcaggacctgacggaaatggtcggagatcatattcaggttggacaattaaacgaatgttgatgaaaaatccaaattaaaatcccattttccttgtacagcgtctggcatgaaatttgctgacttgagacacttttaa

SEQ ID NO: 78815 - DNA, 618 bp, Heterodera glycines
atgagccgtggaaagaagatgcaacatgaagagacaagcaaagaagaaaatcaaagaaataaaattcataaaacaaaatgtagcactaatgcctaatgattttgcggaataaatttaaattctttaaaaaaattcttaaaaaaaacattcttcaactttttattacaggaatttcatttcttgtttcttttttttatgtattttatttaaaaatttaagttgaaaggaaaatttgagtgtcgaacattggcatttcactcatttttgtccattctgcttagttcaatccattttcttaacatgtctttggcatattagttaaatacgttcgtattggagactaattagcaaataacaaatttgttaattaggtttctctgtctgagactaattagtcaaccaaataaaagtatatttacatttcttttataataattgaagtttctaattacttttttacacgataaagaagaaattcgtcagaatgtcttcgccgattttttttcatgttcatttgcattaagttttatgttaatagtaaatttaattttttatttttttagcggcgcaaaataaattatatttcaccaatcgagactaattattcacccaaataaa

SEQ ID NO: 78816 - DNA, 230 bp, Heterodera glycines
gcatgtaatccgcccaaaagtgtgggaagaggcaacttggcactcaaacgatggtggtgggacggccgtagttgtaaggtacaacaagcaatcaaacaatttaatggatgagataagcaccggcttttcccattttctgatttttgagatttaagcaattcacctacaaagggcagggcggcaacacaaacaatttcccatcaaagaagcattgtgtccaagtgtgcaag

SEQ ID NO: 78817 - DNA, 502 bp, Heterodera glycines
atgactccacccacgattgaatcttttctcacaattaaaaattctccctctgcagctttatctgctgatcattgggtaggcaaaatgaaagagtgatttagcaaattgtgataattattttttgtaatgagccgattatgcacatttacccactgactgattggaaatgaataaattatttattatttttcaaaaaataaataaccaaaacaaatttacacatagtagatatagtgaagcaaaataaatgaattaaaaaagaaatatgtaatgcttggaaatgtgatatttcgatattcacatcattaattagttaattatcaattatcgcgtttttaaaccgattttcaggaaaaaatcggtcaaaagtcgcaattttcgcaatccatgatcacatcaaatgcacttctcgccattgctccttattttgtaatcggatattgatcagtccgccatacccaaaaatgtcttgaattgatataaacaattaatgataaataaa

SEQ ID NO: 78818 - DNA, 77 bp, Heterodera glycines
attcagtctcgaaaaagaaatgaagccatcattcaacttccagcttttcgcatccgtctttcttgtgctttgtgtgg

SEQ ID NO: 78819 - DNA, 603 bp, Heterodera glycines
atgtgttgtggtgatgcactttttctgtgtgtttggggcttcgctaaccaaatgactaatgggagaagaaacggacaaatggaaaatgagagggacaaacggtcgacagacaatacgcaaaatcaatgcttctacagtatgtgaaaacacaataagcaatatctaaacaaaaagaagaagcataaaatggtatattttgcgataaattttaggggggggggaggtaaacttttaaaataatgcagaaaatgaaaaaacgaaacgaatgcttttggtggatttagcaacaaaatttgcacacgacggagaatttgaattgtaaaattaaagagagagagagctcaaaaagggcgatgaaagcacgaaattggtgggagagattgttgggaaaacagcagcggaagacaaaaatagcacgtcattttaggagggcagggaggagaaaagagaaagaggaaaaaactgaccgatcggtttgatttgatcaatcacttcagctgatcaatgaaaggcaacttcatgtgtcaattatcgcctctgttttttgattaatatccttttgtctgttttcacattcttattttagggattttcaccaataaa

SEQ ID NO: 78820 - DNA, 433 bp, Heterodera glycines
  unsure (1)..(433): unsure at all n locations
atgaaaaacgacagcagagaaaatgcggaagaaggacaacaatcggtgggccgaggagaaaactgcagacagcagcagaacaaagcgatggacggaacagatcaaatttcttttacaaataaatttttacggaatgaatgggcaaagggaaaagaaactaagacccccgngggtgaattgtgccagctagttcatatgttactttgattttggcaaaaatgcctttcccagtaacggcgtccaaatttttggtattcacatttattttcaattcttttnttggttttgggncgcgttttttgaatatttaattttaaatctaaattattcagtaatttcgtataaatcttttaattcccaaaaattccgtccacttatggccacattccgtggtgccccgccttggccatgccnttcgcaaatgtgcacataa

SEQ ID NO: 78821 - DNA, 1803 bp, Heterodera glycines
atgactctgacggttggtgcccataggtctaacccccttgaaaattaaaagggaattcgttaaaataaaaatctccatcatttaaaaaaaaatttttttgtctaggcctgcatttgccacaccattcactatgccaagcgattgtacgagacacaatttgtgcatcggttcagcaacggcacaatgccattccaaaacttgttcaaggttggctgattgggtagaggagggcctcacaaatgcaaaaattttcatgaaaaattcaaaaaaaaaaattttttttttttttttttgtaaaccaaaatttctaaaattccagggtccaatttatatatttaactaaatcatagaactgcacgtactactggggcttctccgcgttcatcgcctattttgtcaaccatccgttgtacacgtcgcccagcttcacccaagtgatgattggccttgtcggcttcacaatcagtgaacttggtgagtttttgtttttgttttggctaccccctggaaaatttttttgcttttcacaagctccaccctcgggtttttttcaaattaaaaagcgataaatttgaagaaatcctggttccgaactctaatgcattaaattgtcaattttttttttaattcagaatttttttaacgatgttattagaaaaaaaaaccaataaaaatttgcaaattctcttcataaacattaaaaaaaatacatgttgtcctcaaaattaattgtaagaagaaacacaaaagtcaaaattctttttaatgctcaatttccactgaaatttgtgccagtagtaagtgtgaactgcttggcccagtggttagtgcatttgttttgttttgtgtgttgttgttgttgttggttcgattccttcttccccctttctcccgtttgaccgcactttggctctctcaactttgttgtggccaaattgtgaaattgtgcttcagtggcgggtaaatgaatttggaggactgagtgcagaactcgtttctctgggactaaggtcccgcgggtgcaccccaaaatcacgccgccgaaatcacgccgggacaaaatcacgccgctagaaatttaaaaaatgttttcaaaattttttcccttaaattttcctataaaaaaattttctaagaattttttcttgaaaaaattttagggttgaaaattttttaaaaaatttctagcggcatgatttcggcggtgggattctggcgccgtgattttgtcctgttcccggttccgctgatgcgttgaaatttgaactctttgacgtggtcattcggtctacatttttccattttttttttgtttttttctaaattttttttcgagttttcagccttttctacaggccgagaattcaaaatttgaagttgcctatacatttccaaaaaactttggcatacaaacatttttgaaaactcttttttttgtttttgcattttatttaaatattcctgaatttttgcccaattttaggcaatttgtccatccatcttctgctgcgtgaccttcgccccccgggctcccgtgagcgcaaaattccctaccccaactccaacccgttgacgctgatgtacaactttgtcagctgtcccaactacacttatgaggtgtgataggccaggccattgtgcgcttttgatttttaagattttcaaaaaaaaatcactcaaaaaattaattaaaaaaaatttcgttttaaaaaatctctatttaaatccccttttcatttcaggtgtattcctgggttttcttctgcgtcatgactcaatcgcttcccggttaatcaatgcgca

SEQ ID NO: 78822 - DNA, 1104 bp, Heterodera glycines
atggccgcccgtgatcttcagtgtgttcaatgccaacaattcatgcataattggggcgtatgtgttgcctaaatcatcctagtaatttatttcgaaaaaatgataaataaatggggaaatacgtcactaaagtggtggtcgtacaaaaccggtcgaatttaaaagatttttaaacttttggaaagtttcgaaaaacaaaaaatctaatttaagttaactaattttgataaaccggttttgctggcaaaggtcaaacttattattagtgtgatatgcatttaacatggccaaggcataatatattttgataagtgaaatgaagtgcatattttttgttttttaaatggcaacaaacagcggcaattttgtggtggtgtgacaatgctaaactgatcaacaaaaataataataatttagagagaaggaaattggcgtggacaattaattaatttattgggtaattacggtgtagagaatggtagaaatgctgatggtgtcttactccgtcatttttgagaataatttatgaaaaaagcgggtttccggagcatttcaaggtcaacattgatcaaagtgatcacaaaaatgacattcaaaataattttttgaaaaaatacaaatttaattaattatatgcctctggaaaagtgttcaaatgagggaaaatcaccatcaacaagcagtagtagtcagtgtattgtaatatcgagaattaagaagtttttctatggcaaaaacgaaaaaaaaacattaaatttcgttggaccgatcattcggctgctgatcaaatcaattttcgaattagccgatcaccaaccattcaatcagagacaacacaacgccaaagaaccccacatcaaatctgatcatcattatcatatccctatcataatcttccattcatcagcagaggaacggaatgattggcattcgcttgcgcgggtaagcggcaaagtcctttttgtacgcccggtgtttgccgtccgcccaaattttcatctgcgcaaagccggccaaagtgaagaaaacggctgcaaaaaaaaaaaaaaaaattaaatttagattagtgagcggaaaatttaattgatttatggcaacaataaa

SEQ ID NO: 78823 - DNA, 468 bp, Heterodera glycines
tccaaaatggcaaaaattacaatcatgaaattgaacgggtttaaatttaaattaacaaaaatgattaaaaagtaaaaaattaattaacgaaaaaattaaactaaaaattgccaaaaaagggcaaaaaaataaatatataaaaaataaaaataatagtattttttaaacttaaaaattattgcaagaaatttctcaaacgccctccggccggagaaaaagggaaaagtgccatttttggagtggtgccatttcttgtggtgggaaaaatgccaacaaaaaatggcacaaacactcactcattctaacgcctttaattgagggcttgagggtggtggaaaatggtgaaacaataggacaacaacaagaacaagaactagggacggagaagaagccccctgtatgggttggcacatttttaatttggcacaatttgtggcgaaatgacaaaaaacaaataaaaataaaaaa

SEQ ID NO: 78824 - DNA, 1146 bp, Heterodera glycines
atgttgcacgaggccagcctgatgcactcggtgaagcatgagcatttgctgccggtcgccggcatttgtatgggcgccgccggggggctcaaaattgtgacacttttgcgtccgttgggctcgatgctcaaatttctgcaggaaaacgaaaaattgctgggttctaagcatctgatgctgtactgcttccaaatttcttccgtaaatatttctaatttttcttgaatttttccattttaatttataggccatggaatatttggccaacaaaaaggtggtccatcgcgacttggccgctcgaaatgtgctggtccgcaacgtaatgcacgtggaggtgggcaaaaaacaaattatggaatttataataaaaaacgaactatttaaggaatattataataataattaattaattaattttgcaatcgatgccctttaggtgaccgacttcggcttggctgccatgctgcaacagcccggcgattcggtggtggtggacggacgcgtggcggtcaaatggctggcgctggaaagtctaaggcgccaaatttacaatcagaagacggatgtgtggtaagcgcgtaaataattgttaattaattttaaaaatcaatgcatgacaataaaaaactaagaaattctcaaattttattattttgagcgcttttctcttcttacaatcgcatttttgacatttctttcgtttaattttttttttttacattttttaattgagctgacgaatttgggactaattttgtgattttttaaattaaatattttcaggtcctttggcgttacgtgctgggaaattttgacgtttggcgagtcgccctacaaggatttgctgctgagaagggagaaattggcttccgagttggcctatgagttggagcggggataccgtctccgacagccgaccaactgtagccaggaactgtaccaggagctgctcaactgtgagcattggaattgaagccgaaatttggggttatgccgttccaacacccgccaaaaaattccggaatgcggaattttaaattttgaaatttttccaaaaggaaaaaatcggttttcttcaaattttcatttcataaaattgccgagatgcgttttctcatatttggtattgtagtgaagatcaaaaaa

SEQ ID NO: 78825 - DNA, 471 bp, Heterodera glycines
atgacccacagtaatatctcaaaaaataatttctcagatggcgcttcttcctgcagaggtgatgatgacgaagtgcattatctgatgccaaaacggtcaaaaagtgccgacccaaggaccagtcgcagtagtgacgacggcacaacgcaaccacagcaacaccctactacggtagggtacaacactgtagttggaggaggaaaggaaacggtgggcgcacgcgtttcggaactgtacacaccggtggtggaaggtgccaaaattagtttttaaaaactcagctattttttgctgttttcagccgagcatttgccaaattacataaatggaatgccaaaaaatgtcattgaatatgcgaatgggacgctggtgccgcagccaatgccgaatggttaccaaaatacgccgaactcaatggcaccaacgatgaccaagattaatgcaaaatgtcaaagtgaatcagtcatgtga

SEQ ID NO: 78826 - DNA, 337 bp, Heterodera glycines
atgccgtcgccgttgttcttgcccggggcatttccgggcgtgactcttcgccctacgggcatcaatttggtcgaagaggtgcggttttgttttctcattaaatcctgtgagcaaattttgtatttttcaagcgcactgaagatcacgcggtggatgccggcccggtgtatgcgccgactgtatcttccgccaggatcgatgtccacacagaacaggcagaagaagaagaagatgatgagttttaagatgttcggaggaatttacgatcttttatttttaattattcgatcttttatttttaatcattcgatcttttttaatcctgcgatcattttaa

SEQ ID NO: 78827 - DNA, 952 bp, Heterodera glycines
atggcagatgcgatgcaggacggtgcgcgttggaagaaagcaaaaaccgcaatcaatgttctgggtaatctccttttggcggaatcgttggacaacaacaataacaacaaagtgacaaacagcccagcagcggaggaagacaatgtacaggaggaggaacataaagaagaagaaaagaatgaggacctcggagacattgacaagactctggacgagttcttcaacagtattaaagcttccacctcaaacttgtaaatcatttttgtccacaaaaatgcttaacacacaatcctttacaaataaagatgtttgtttcaaattaccgtttggcctgattatttctggtccctcctcatcagggaagactgagtttttattaaaattcattgcggaatcggaccaattaatcaccccaaagcccatctcaatgctctactgctttggtgaaatgaacgcggcggtaccggcgcttcaaaaggcgggagtcgatgtgtacgcaggagttccatccgaagaattggtcaagcgtctccctaagccactcttgctaattctcgatgacctaatgctgtctattgatgagaagtatttgtccgatttgttcaccaaaaagtcacaccatcaacaatttgcggtggtgttcgtcacacaaaatttgtttgaacggaagatcaaagtggcccgcctgtccgctcaatacctggtgctgatgagggccccgaattctttgttgtctatccgtaacattggtgttcaactcttcccccgtaagctcgactttttccttgatgcctatcgcaaagcgaccgcccgtccctatggctatttgttgattgatatgcatgccgcgtccgatccatcgctacggctgcgaaccaacatatttaaggacgagcaggaggatgaagacgaaggaacagttgtattcatccccaaaaatggagcggcataa

SEQ ID NO: 78828 - DNA, 1403 bp, Heterodera glycines
  unsure (1)..(1403): unsure at all n locations
atgcaagaaactgataaagaaagcgaacacagaacaattgctttcacttgtggaaatttgtctaaacctagtcgcttcgcgtttccgactgaccacccgccagaaaaagagattgctaccccatgtggataccgtacgccaaatgagcagagcgagaagtgagcggggcgcccgacgtgtgcttgtccagaaaggcgcaggatttggaggactgtttgctgccgtattaacccccgttctaattgaattggcaaagtctgttatgaccaaaaatgcataaatacccacaactgctttgtttttatgtgcattcatcatcatcattcattcaataaaacatggcaaataagtttttacttgtcccacaagaaatttacaggggtttgacctcaatgtcggacacgggtgacattaatttggatgctgtacgacacgatttgaaccgaaccaggggcgaacgaacaaatccctctgctaaaaatgtcaactacaatcaacaacttaggcggtatttgaaaatgaggagggaactaacaaacatgccgacaaaagttgagatgtcaaaaggaataagtatactgttaaggagaggtggcgaagatgaagatggagaggttgtggatactccacctcgaccacccgctccaccaccaccaccacctccaccgtcaggtaaatgccctccacgtggaccaaatcctcccgctcctccaccacctccaccgcctgggagacgtcctccacgtccacccagccctcgttctccaccaggaagtccaccgcctcgtccacaacgtccccctagaccatgtagagctgctgcaccttctcggagaggtggtctcatagagcaatggcggaaaagacgatatgatatacaacaacggcggcccgtggtgcgggatcttttggcggaagcagctgctgctccattgcccgaaagtgacgatgaatatgactatatgctggagagtggattcgcgctgccagcaccatcacagtactatggagatttgcctgtactacccgacaacgcagacgaaattgaggagatggacactgttcagcgcaggattgccaccagacgaagattaaaaaaggacttggcagatgatgatgatgatgatgaagttgatttacagcgaaaaagaaataggatttatcacccttcacctccacggctcccatctccgccacggaaatctgagccaagacctcctctaacagccaagagagaacaccaaaaacaaacaaaggcagaattgaaatcctcgacatcaaagaaaaccggtcaccccacccctacgcctcgtccaaaaagagagccggagtttgngctggaccccgcacatccacatcaaggaaagctgggtacaacccgcctccctcaacacctaaaataa

SEQ ID NO: 78829 - DNA, 3607 bp, Heterodera glycines; identical to SEQ ID NO: 231

SEQ ID NO: 78830 - DNA, 861 bp, Heterodera glycines
atgtgcaacaacgacaacaacaaacgtcgtttaccatccgaacttgtttgggaaattgtagctgctatcccaatcatgtacctgttcggaggagttgtgaaaaaaccaggttttttacacctttatttaatcaactaattaaattttgaaggagttacacgcccaccatctggcataccggttgtaaaccgtgggttcgaaatttttcgagcaaaccgacactgtttcttcgtaaaattggtttgtgatcacatttttaggactttaatattaatatttttagatcgaaattgctctggatttcgaattggcttgcgcaaaaaggaacctccctggtggagagctcttcatccagttcagcttcaaagatgaccaactgctggatcctcaatacttcaccgactttgtgcactacttgtgctttgggcgctcgggcacaattgcaacgacgagaatcatcacatatgcggcagtaagcgcggataatttaatcataaaaaattgttattgctatttaagtcagctcaaatcggtgagcttttcggcattctgctcgactatgcattgagcagcgtaaatccgctgaccatgaagaagcgaactgcgggaggttatctgtctcgtcagcattttccaccgatcctcaagctcactgccactgagatggcatcgcggggagttggactgttggtgcgcaccgacggaatggaaatgtatcgactgatgaacccgcaccactcaaatgatgttggtcaactgattgtcattgaaagatctcgacaccctggctcgttttatttcaatttttcagttgagtaattctcgtacaaatgttaacaatttattattttacgtaataaa

SEQ ID NO: 78831 - DNA, 2398 bp, Heterodera glycines
atggccacgatggaagttttacgattatctacaaaaccgacatggacaacgggagaacttcaacatgatgcaattcagcttatgaatcaaattggtgcacctttgaatttgaacgcgtatgatgcagatacttatgtgccgcgcgttatcaactattggaacaacaacaacaacaacaatcaacagcatcgattctctgtcttcatcttcggtgcaacaggccactacaagcccatctacaaatatgtggacaacacctacaacacaccactgctcctttatttcaacaacagccattttgatggggtgcagaagcagggtggccttttcggaaagccttactgtttggagtgtgaacgaccatactcgagggcaccgcaacacaataaatcgtgcagggctcgctgtttgttatgctcacggacgggcccactatttccatgtcaagcacatgctggattctttatgcattgcgatgggtgcaacaaaaacttcaacaacaatgactgcttccggcaccatctccagtcaggtttctgcaagaggtccaaaaagtgtaaggactgtggtgttgtttgggacgtgaatgataacaacagaaatggaagaaaaggtcacgtgtgtggcgaacgctactgcaacctctgcaaaaacttccacaatcccgaacgtggctgcttcatccaaccgcttgagccaagggaaatggagccttatcggattgttgcgtttgatctcgaaacaatgcagcaccagcctgttagtcctcgtgagccagagaaaagggagcatcagccaaactttatcgcagcaaaagtgttctgccctgagtgcattgacaacagcagatggcggaacggaactgcgggttgcaaagtgtgcggtcctcaccgaacagttgccttttgtcagcgccgctttgtcaacactaccgtcgacaaacaagttgtcgctgacaaccctttggaggcctttgtcggctggctcatcaacgctctgcccaaaaaattcgacacatacgcgttctctcactttggaggacgcttcgacatggtcctcgtgttccgcgaactattcaaaattgggttcaatcctgaaatgatccgacaggtaacttaattgttatatttttttattgtgttattatttttagggcaataaaatgttcgagatgaaagtcaagaagcagaagaaccgcaaccccaacatcgtgttccacgactcgttcaacctaatgccctgcgcattggcgcagctggtaccttcctatgggctggaggtcgaggacaagcccttcttcccacatttggccaaccgcccggaaaactacggtcgacacatttacccaacagtggatgactacctcgcaaatggaatgatgccggagaagcgacgacaatttgacctgtggtacgagcagcatcagcatgagccatttcaactggatgaggcattggcttcctattgcaccaatgacgtggaaatcttatcggctgctctcatcgccttccgccgcgaattctttgaagtctcgaagcggaatgactacgtcgatggagttgatgaccgcgaaaaccacgacggcatcgacgcccttcggcaatgcatgaccattgcgggcgcctgcatgaaacacttccggctaaaccacctaccagcagaacaccttgccatagtccccgaaaagggctatgacaacgctcaaaaccaaagccggctggcacttcagttcctccactggtacgctgaggaaaacaacgtacaaatacagacagcctattcgcctcaaggagaaaaaagaattgccaattacacagtggatgggtggattgaagaggagcgcagggttattgaagtgaacggtaatttttatctatcataataataatttttatgagaaatttttacaggttgtgtctggcacggctgcaaaagatgctttccatcggacaacatgatgctaccaaatggaaaatctgcaggagaacaacggaggagggatgccaaccggctggaattcttgaggacgcaagtggcacgagtcgacatcttttgggaatgcgatattcagcaaatggtggagcggagcaaagcgataaggaagtcatttgcggactatgtggatgctggaccgctgatcatccgcgacgcgttcacgggaggtcggacgggtcctctgaagctcttccagaaggcaggcgaagggcagaagatttcctactacgatttcacgtctctgtacccgtttatcaagtgagaaaaacgtaaagatttttttttgatttttgaaattttcagtttcacgactcgttatccagtgggccacccgaaggtgcatgtgttgaatgaggatgttaattggaccaacccagcagacaacccttccctttggcactga

SEQ ID NO: 78832 - DNA, 996 bp, Heterodera glycines
atggctgtcaacaaaggaaagcggtcgattgcaaagctgtgtctgaataatttatgtgggttttccttttcaagtgtcaataataattggattaatttcaggggggcgtttctcattgcgcaactttggactttcgcagacgctgataaccgacgatccggttttcttcagagagcacttggacaaccggtcaatcgatgtcactgccattgatgagctcgatgaggagcacatcctcctcagctacgaaaataagaaagagtgggttgaggagcacgactgctccaacataggtatggatcaataaattagcgcacaaataataattataaatgttcagtgatatccctgtggacgacctcggctgcacggctcctactcctaaaggcaatgcagaaggtggtgcgaacgcctgggtgcggactgctatacactggttagattattattattttgtggcaataaaaaaaaatttacatttttcagacactgattcactggtctttctccacccggaagacatttgcccgctcaaaactggcccacatttgggtcagttcaccgatgagtacccacaacatgaaattgtggagtactgtagtgggggtgcaaaacaggtaatgttttattttttacaaaggtaaattaaagcttttgttttagtatggtttgaaactgaggaggctgaacgcacctgcagatgcggagtttgaatatgtgctgaaggtgcgagggatgacgctgaactacgacgtcatcaacaaccaaggactgcgctacgattcaagcagcaggtgctgaacttcactgcgacgggtgactatgaaccaatcatcgtcacatatcccaacttcctgagaccaagcattaaagatggagggaaagtggtgtcgggaccccttcagaaatgttataggccatatgtaggaaaaggaattgttaactctaattttgatgttttgaattttggtcacacattgtaaaacttacttttga

SEQ ID NO: 78833 - DNA, 387 bp, Heterodera glycines
atggaagctaattcgggatccttgacggcttcattgcaagcagcagaagctgaaattggcgctctgaaggaaatggtcaagctgcagaatgagaaaatgaaggacatgcgccaccgttttgtgaacttccgctcccggctagatcagctggaggcgtgggctgctgacgtaaaatttaaacttttttatttttattttttttttatttttttatttttttaatcattaaaatgtgtttagaacaagcaaacgaaatttgtgcgccccgacacacgcaaacgcgtgttgttgaacgattcgccagagaaggaaatgccggcgacatcaaatgctgctgcttcaggcaactttttcttagttatcaatttgacattatttacattatga

SEQ ID NO: 78834 - DNA, 1990 bp, Heterodera glycines
atgcttttgccatcgtttaaccgtgccggattcgttggcctccttttgctttgccaattggccttggctccgtttgccacggcatttccattggcgacggatgcgcagcgaatggccacagaagaaagtgccgtcgttaaaactcaacgaaggcatgaacaaagcaattaaaagggggccaattatcggcttcttttggtttagccatcgttcgccgggcctttggaagaatgtggcggtgggtgccgcgatcggagttggcggcgcgttgctttaccacgcgtacaaaaagagcaaaagcgggcagacggcggcggcaccgacggagggcaaataatttaaataaatcgcaaaaatccaatgaatggcactgattaatgatgaagccttattcagatgcaggcacagaaactgaacagcccgcaaatttgagaagaggctaaaggcgcagaagaagaaaaaaggggggggcaatttggcgaaaggaaaactcattaagaaataattaattaataatctacgacggcattcttttaactgtgagtgttttatcggtttttactttgcataaatacataatgtatcatttcaagtttaattgttgggaaaaagagacactgaacggtgccgggcattatcggctctttcccaacggcactcgttttttgccgagcaaataacttccaacttctcactcgttgacaatagtgctgcgcgagacagaaaatttcccggaacagagacttgacctcgagaccgagaccaaaaaaaacccgatacttttctcgagagcgagactctcgagcagcactcctgacatataattttgaaatttgcgcaaataaatgatattttaagtttctttgcctttttcattttcaattcttcccaaaattgggcaaacaaagcgaataatattaaaaaaagaatggacaaaaaataatttccggttgaagtggcacttttaatgtgagtgcccaacacaaagagagattatttatgtgctgttgccgtccgtccgttctttctcacggccttttttcgtgccgtcgtcgaatgccccggggagggggggggggggggcgcaatttgccaccgattttcccaaaatgctcacatttcagcagcaattggaactcatggggctgttcgagagcattgagtagaaaaatttcccaggctttttttggggtctcgagcctgattaaaatattaggctttgaaacagccttaaaatgttgtaaaacccagaagaattcactatactattttgttgtctctctctcttttctcctctaaccatttatcacagtctctccaatgtctgaccatttagtgagtgtctactatgtactatctcttctttcctttcttctctcctcctcatattctccttccttttttatcttttccttgcaactgtatatcattccaatggtcatacacacaaaacataaataggtaaatggtgtttgattttgtagttctcgaggtaaagtccgacctcgagactgaccgatgaaacggtgagtcattcgtctcattctcaaataaccctaattaaatcaaatacatttataaaaaaaattattaattttttagaacatcaattatcttgacaaattgactcccctccgaattctttgcaaattactccttttctccccaaaatatggactttaacctgaaaagattggccggggaggcgtccgggatgttcagccgagccaaacaagtgccaaaaatattgaaaaatgtccatttttgaaaattaaatttcagctaaccgaggaaaagctattgaacgcggagaagacggaacttggtaaaagtggaaatggaaaattaaaattgcaaaatggcattggcattttcagaccctcatttcgagcaattgctcgccaaggcggataaaacggaggaacagtcgaagaaactgttgtccgccatggaggcgtatctgcagccgaacccaggccagtgccaatga

SEQ ID NO: 78835 - DNA, 330 bp, Heterodera glycines
atgaaaaagcttcttctctgtgtgtttctgctgcttcagtttctgctcgccaccgatgcgatttcagtgcaaagcgaagttggccaaccattttttgaccaacagagcgaatttggcacagtgccattgagcgaaatggaaaagtgacaaagaaaaataaataaataaataaaaatttaaaaatttagacgtcgccgtaggcgcttttccaaactaaaagccgccgccttgggagcagctgccggattgggagccgccgtcattgccaaacacgcgggatgaagcggaacgacggaagggagtaaaagaaaggagccgaagatcaaaaaa

SEQ ID NO: 78836 - DNA, 99 bp, Heterodera glycines
atgcgaaggtcgatccagcgcaaaactgacaaggccgaattggtcaattatgagggcaaacaattgccatttgccaaggcgccgcctccgaatggaatt

SEQ ID NO: 78837 - DNA, 1381 bp, Heterodera glycines
atggctctcagccaacgtttgttggttcgcctgcgccgtctctgtggcccggccgttctctgcgcctgtgccaaccttcgcttcgtcaacgtcgatgatgaaaactttgccatgaaatctccggcggacgacgccgccggcgcttcgccgggccaagcgctgctcaaatggctctacacaccacgggaggacgggcagccgaaagtgttgacgatgaaggagaagccgaaaaagatgatggacgacatcgcaaaggcaaaaaagggtctcaaaaagcgaccaaatccattgggttttaatgccttttaggactgaattcatacatgaaaaaaagggggagggtgagggtcaacacgccaattttgcgaatgcgtccggccatgtatcgaagaagttttttttatccttttaaaaacgctttttacggcgccctattttccaaaaaaacttttggggaaaggggtctgtaggcgctgttggaatttttttttttgaaaagttgactgattttttaacaaattttatccaaaaaatgacccatttttgcgatttgaaacatttttcgcgcaaacatttccatggtaacacttatttccatgtccctcctttaaggaattctccactgccaccactcccgtcagtttcattgtccgctttcgcaaatcgtcctgggatgcctacgatgacgcggccctcaagccgtttgagctgtccaacgaattgacgggtgagcgactgacacttcgccatgtcatcgaccagcagagaaacgacctcggccttcctgctccgcctccaccacgcccttctaacaataagaagatgatcacctattcttctgttgtgtctcgccgttccaagttcgacatttggctgttggagcgcactccgagcgaaagggacgaaaagcaatggacgcattgggctaatgaggggccattcgacacgtgctattgggaggaggacaacgtggtttatgtgaactttgacgagcgacgccaactcgggtgggttcggattcggaaaaggaagggcacaaatgctgtgatggcatagtccgtcttgatctattggggccactggaattgggtcagacaaacagtttattgttttgtagttgagtcttggctatggtcccaaaggggggatattaccatggtgtgaccggggctggctgtcaaaacatttcgggcacccgaaaagcgtggaactgggtcgcctccgattaaacaaacgtcgattacacgctaattataatagacttttatacccgttttacgaaaaggtcttttgtcagttgagttatcttttccaggccattatggaagcatttgacaattcacttttgacgtttccaggccgagaatggtccgacgaatga

SEQ ID NO: 78838 - DNA, 217 bp, Heterodera glycines
atggcgctgggtgaactgcgaaagtacgttaatcatcttgaactgttcgccgacggtgggtgaatcgctgtttttatttagtattgcaattttttcagatcgtcagaaaattttcttcaaaatcgacattgacatttcttctgtgccagagtcaacgcctgaagctaggcccgcgttgcgaggatggttcgttttacctttgattttatggctctag

SEQ ID NO: 78839 - DNA, 1892 bp, Heterodera glycines
  unsure (1)..(1892): unsure at all n locations
gacaaatatgaaaaagatatcgccaaattgggcctcgaattntgtacagcagcaaattcaacatgggaatggccgtcgacagaacactttggaaggcggtgcagaactgttcaaaagttgtcttggtttcatattttaaattaattaatttaataacattttgcagttgttttgctcctacgacgattacaattgggactggactttgctccaactcagtgtcaaatgtatggcttcgaaaatgcgcgtcatttacaccaaagcaccgaggtgacaaatgacaacgactgatttgaacaaaatgggctcattcctccattacccatcttccacttcctctgattcttctttccctgtttagagttctccatatcggcgattgtggcgttcacacccatcgatgcaaagccgaacgtgctgcaaatgatgctttgtttgttcctttatttttaatttgtatttttaaaaatggattggggatggattcagcgacggttcaactaattattcttttgaatttaataggcgtaacgagagaacaggaatttttgatgccgggccgttataaaaaaacaccataaaaaaacatcaaatgaaaattttcaacaaaaaactacccataaatttgctcaaactaactaaatttttaattttcgatatcattcgatagctctaaaattctctattagctggcaaaacttcaaaaaatttcgtcaaagtttgaacaaagttatggccaaaagtactcaagaaccaggttttcagatttttggtcattaattttttgaaattttttcaatccctgatagcttagatagcattaaaattaagaaaacatagtcttttagtttcttaagcattaattctgtttttgaataattgatgattttttcaaaaaaggcgcaaatgtccgaggtgaaaatctctgggcacgatcgaataatatcaagaattaaaattttaggtttaagcaaaattatgggtggtttttgttgaatattttgcgtttgatggttttttataacgacatagcaccgaatttttgacagaattgcatacattttcgaaattcgcttgccttaatcattgcttaatttcttttcttcaaatttgcatattttttttaaacctttttaggaaacttttcgaacgcgtaaattcctcctttttccccgcctcaatgcgcgtcttggaaattggcaagcgaatgttaaagccggcgaaaccgaacggagggtggggcgacccgcgggacattcgtttgtgtgaactgaacacgcacccaacggagtcgaacacggcgacggtgctcaaagaagcgcggcacgcactcccaacgaacgaattgtgagactggaatggccgcaatgggagcgaaggacgacaaaacggcaccagcggagggaattaccgtatttgctctaattatccctcatgggggattatttttcaacctcctcgtagactgggggataattggagactgggggattaagatagagggattatttttcaaacccatcctagactgggggataattggagattgggggattaatggagattgggggataattagagaaaatacggtatccctcaaaagtcggtctctagcagggctgttgcaagtttcgctttttttgggcctttcgctttcgctttttggctgaaaagcgaaataaaagtacacccctaaagattgggtttttaaaataataattaatataaacattaaaggagaaaatctatagaatttatcttttaagcttttttatgaaatgtctttaatttggaatttcttcaaactttctgggcgggttgctttctgcaaatcatgtaattataaaaaggattttcctccgcgatcaactggcattccgatttctttctgc

SEQ ID NO: 78840 - DNA, 1029 bp, Heterodera glycines
atggcggtacttatcatttacattacgatgcacgggaaggcgcagtcgaaagaccccgcccctccaaaccccgatggaccaatggtacttctggtgattttttattgtaaaattatactattcaaaattcattcagcttttattgaatggcaaacaatcggcggctaatgaaaagggaaaagcgtcctctggcgaaagtaatccaaatccggggcagaatccgagcggagaacggtgaaagagggacgttttggggcacgccggcggatacgtcggaggatggggccatcccattgactcgtcactgtaagagcataaatttaataaaaatggcatattcaaaaatgaaaaatacattttaaattaaataattattattaattgagttattatttttaaaaagtttacaaattaaaatatttcttttgaatttaattgtcctttattttagtgattgggcaaagagtcagtggaatgatgccaattggctcgccgatgttgtcaacagaaacggatgggaaaacaccggcactccaaccggcggacgatgaatcagtgaattgtgccgaccaaagaacgaaagacggcatttttgtttgggaatttaattgacttttcggaatcaaacacactttcctttttagttgcctatttattgttcattttctacgcaaaacaaattttttacatattttttggttggggattatcccaatggtcccatttttcgcataaatatgaattgctaatccgtgggctttgcccaccatttctctcttcccataaatccccacaggcattttggtgacttgcactgataaaatccggaattggcttggcgttcttggccctgctcccccctcccccacggtccgattgtgccccaccctcgccgttgcccgtccatctgttgcccgttgctcacccggcactgtcgcccaaccaccggttggcccaccaatcagaattacccacccaccaccaatcacccggacactgtggaccgcccatcccatttggcccaataaa

SEQ ID NO: 78841 - DNA, 321 bp, Heterodera glycines
atgtctcatcacactcaaatccaacaatacttttgccctccttcggcccctgctgtgacctattacaattacggcaacatcaccaacattgacctctcgccgcaacaagccgttccacagggctttcaacagcaagttcagctaactgcgccggcttatacggtggctcagtattggcacgacgtcccttcacaaaatggcggttatcaaatgccacaaaacaatggacaccacgcggctgcctattcgtcgggggatcacccgaaaatgggaaagcacaaaggcattgggaaacgttttcatccgcagaagcatcagcag

SEQ ID NO: 78842 - DNA, 357 bp, Heterodera glycines
atgatgagtcattcttcgattcaaattccttctgctgtccctgccgatgtttctgttgtcgtcgaacaatgccaacaaaagaaggaaatggaagaagaaaaagtgaaacatttgttcaaattagcatttcaattttaaattaatttttcagtttttcgtgttcaaagaatggctccattggttgcattccgtcgccgcggacgaacggctcaaattggtggcacggcaacgaatcacaattcggcattttattgtacgggcattgaaaggcacaaaatttgccaaatttttcagtggttcacgcaaatgcgcgaagaattttgggaacgacgggcggcgattgtcgaccacttgctg

SEQ ID NO: 78843 - DNA, 1051 bp, Heterodera glycines
  unsure (1)..(1051): unsure at all n locations
atgccaacaaatcaagaggctgaattttatgtgcaagcagttaaactttttcgtcaaattgagcgggagcacatggccaatttcaaaatgagcacatatgattatgaacgactaaaacgcagtaatttaagacaatattttaatcattctttcaatgcattttgggttcacgttcccgataagtataaaatgttaaaatcatatgataattccgagatttttgatggttttgaaatgagaatcaccgtatctcgagcccgtagcgaaacgggatccccgcgcgaacggaattttaggtgctaaaaacgcaaaataggtacctaaatagttgctaaaaaactgccaaaatagttgttaaaaactgaaaaacgccaaaatagttgctaaaaagttgccaaaaattggaaaacatgccaataaatttgtgaattttgcaaaatttctcatctttatcctttttggttgcacaattgtaaatcaacacatttgaaaattttcaagcgtaaaaatttttcgatcgtccgccaaatcatggcaagaatttttgctttttgaaaaaccgattcttgggggagggtgcattttttcaaaaaaaggggtgtatttttgaaaaaattaacatcgcttcttagaggtgcattttatttattttttattgcatttttcataataattttttttgttgaaaagcagaaatagttgaaaaatagttttttttaaatttcacaagtcaaaatagttgttaaaaagtttcataagcgaaaatagttgaaaatagttgctaaaaagtcgctctaaatcgaaaattgatcgaagaaaatgtgttttttgcgcttatctcaccatatgctatccgcaaaaaaataggtgaaaacctaaaaatccgttccctgattattaaaatacaaaaaaattcggtgatggatatctntcattaaaatatttttaatataacacatttattatatgctttattatttcagttttatttgataattggacatcattcttcacaaatttctgtggtgtagcaaagtaggtttttaataaa

SEQ ID NO: 78844 - DNA, 150 bp, Heterodera glycines
gaatttttaaaaaattttaaaaatttttttgaatttttaaatttcccggttggtcccggttcccggtcccgaagaaaaatcgaggtcctggtcccggcttctcaggcccggcaagtcccggtcccggttttgcccaaaattcccggtccc

SEQ ID NO: 78845 - DNA, 188 bp, Heterodera glycines
atgaggggattgccgatctttgcagcggctaacaaagcccgctttgtagtgagttcggtttccgtacgggtcaatgatatcaaaataaaaacgctcaatttcaactattgggtcggtaacgacctaaaacaaaattttgttaatagttcgtttttataaataaaattattatagtgcagctcatgtag

SEQ ID NO: 78846 - DNA, 158 bp, Heterodera glycines
  unsure (1)..(158): unsure at all n locations
atggttcgaactccaccggaaaagcaacttcggcaccggcagctaacaaacttccgattgggcccgaatagcgaacaaacgttgctgcatgcttgcttatgtgcttcaacttttgcactacgtcccaagtcgcttgagtanatgttgagaattcggaa

SEQ ID NO: 78847 - DNA, 595 bp, Heterodera glycines
atgagcagaggtacaactgtgattaggagaggtacaacagtgatcaaaagaggtacaacagtaaatagaagaggtacaacagcgattagaagaggtgcaacagtgattagaagaggtgcaacagtgattagaagaggtaaaacagtgatttaagaggtgcaacagtgatcagaagatatacaacaatgatgagaagaggtacaacagagattagaagaggtacaaatttgatgaagaggtacaaatgtgatttaaagaggtacaaaagtgataaaagaggtacaaaagtgattagaagaggtacaaaagtgattataagaggtacaaaagtgatagaagaggtgtaacagtgattagaagaggtacaacagagaagagattagaagaggtacaacagagattagaagaggtacaaatttgatgaagagttacaaatgtgatttaaagaggtacaaaagtgatttaaataggtaaaaaagtgataacagaggtacaaaagtgatgagaagaggtacaaaagtgatgagaagaggtacaactgtgattagaagtggtacaacattgttaggagaggtacaatattgtttaaaattaa

SEQ ID NO: 78848 - DNA, 654 bp, Heterodera glycines
  unsure (1)..(654): unsure at all n locations
ctctctctcaatgcttttctcgccgtctgtttttacctgtggctgctgtactctgcccgttttccattttgtcctcttgctcatacacactctctccattatttcaagcgtgtgaaattgatgatgaagcgaatgggctggggagggtaaagcccaaaagtgtaagccaatccgcgggaaattgagcctgtggattaagtgtaccacctacctacaataacaaagaaaaacaaatatctttttcaaaaagccaaataccaaagccattttgaattgaaaactggcatttctgttccgacaattccgtttcaaccaattcaacctttgacctgttgaaaagctaattaaaattatattttttaaatatgaagaagaagaagccaacaaattagaaaattcactttcttctcgttctatcatgtttcttttactctctctctctctcttccccctctctctctccctctctctttctcttcctcgttgtctctccctcactctagcttcctctctctctctctctcttcctctttcattaacctatatatccttctgctttttcttcctctctctgttcctctctctgtatcattctcttccattgccctctttcnctttgactcctcttcttctctctctctgttccctcctctc

SEQ ID NO: 78849 - DNA, 2119 bp, Heterodera glycines
atggcaccgtttggttgggtaaaaatcaaagttcttttttctcataccattgcaccgcctcccccacacacaccgcaggaggaacgcgttgccgactgccgcaccaagcttggcgcgctcaaggaacgcattgcgatggcacgcgacaaggcgaaccgggtccgtctcggcgcgcactttgagcaacgcggcggcgttggcgcatttctcgagttgccgttgtcggccgcggacgaactgtccgtctacaacgacatccgcttcttcttccgcacgcgcgaaacaaacggtgcgttaattgttttttaattgttcattttggcgatcgacacattttttttaatgaacttgcggaacattcgtcctgcagagaatattaaaaatttaatttttgtttttttttactaattatttttcacaatttatattttttaagatttattaataaaattaattttgcattttaatattcttttgagattttctaataaaaataaaatgctgaacagtttataacccaaaaaaaaaaatccaaaggaatttcttaattaaaaatctaaaagatttttgacagaaaatatttttctaaataaaattaaatataaaacacgctctttttttgggaagcagctcgtttgtcgtttcccgccccctcctttaaaaaaatcgctagaaaaatcctaggggtttttttttggggaatttctaattttgatctttgcaacctactcacaaaaaaatatatgaaaattcaaaaacaaaatcttcccaactcttaaaggccaactgctgtttttgggtgcggacaatgcccatctgtccggcgaatacattggcgtcgagttggaaaatgagcgcccaaaactgacggttagccttggcgcgcgaagcgtcgatgcggcccagttgcaaacgcccgtcaacgacatgcagtggcgtgagctggtggtcaagcgtgtgggccgcgctgtcacgcttgcgctcagcaaaccgagcacggacgagcgcgcggaggaaaaggtgcgtgcaattcctgcttaagaatttttaaaatccgcacaaattcaataaattttgattaaatatgttaataattattgtcagaaattttttttattaattttggcaaaatataattcaattatacaattaactgagggtgcaaagccataaaatatagtcattgaaaattttttgatttcaagtcttaattaagtctttttttgggggatgcattacgttttcacccccgcatcgctccgtattttttttttaatttacaaaaaatattttaaaaattttgttataagaatatctcttaaaaaaatttgaaaattttttcactatttaaaaaaatatatatatttaatggacttatttgtttgtaatttatcatcaaatattgaaaaatttgttagaaaattttgtttgtttttttttcttgaaattttcttttattttcattattttttaaaaaggttttaaatttggaaaaaatttttaatttttcgctcttcttttggttctctcattttccattcgttgtacttcttttaaatttttaataaaggtcaatgaaatttttgttcaaaatattataaaatatactaatttattcataaaatttaaaaaaaaaacggttaaacttttaatttttcctgaaattttttaagaaaaattttaaatttttaaaaattttcaaatctttattttttttaaaatttcagtcatttactgttggtggacctccacccaaatcggtgctgaatttgtttgacgattcgcgccgtttgtttgtgggcggcacgccgcgcgacttccgcatgcccgccacgctgaagcagaaccaattcacgggcgacatggacaagctgcgcatcaacggcgagctggtcggcttctggaacagtgagagaacacaggtgtggtaactatgcaatttttgaatatttatttatacaaaatttattttgccatggtaattattagggatggaatttcatgtaaatttgagagttttttaaggaatttttcttgaataccccaaaattaaacatttttaattgctactgttcgaattagcttgacaaattcaattcaaattttttgttcagctaca

SEQ ID NO: 78850 - DNA, 379 bp, Heterodera glycines
atgggcaaagaccgtgatcagctgatggtggagcttgttggtggtcgaatcagtttgtcatttgaccttggctcagggcttggcaaattgttgaggtaaggggctataaaaaaaattttttttgaaaatttattaataactttttccagcaatggccaacggtacaacgatggaaaatggcatcttgtgcagatggatcggcaagaacgttcggccaaactaaaaattgacgacacggataaagtgaggaagaaataattttttgcatattttttgtttattattggaattttaggtctcaaaattttcttggaattggaaagataattgtgttttctatgattaaaaatttaaactttttactcaaattacttgatca

SEQ ID NO: 78851 - DNA, 1640 bp, Heterodera glycines
atgaataaaacagaatggaacagtgaatggaaactacaaaaaatattccgggaaaagcataattatttaaaaacaattaaggaaattgacgaaatccttgacacaattaaggatataaatttggaggtaaaaagaaggctgaaagcgctcaaaccaaattccccttcagaatccgacctagagaatgaatcaattgatgaagagcaagaaaacgatgatgaagaagccggagaagaagaagatgaagatgaaaaggaatatgatagtgatcaagaagacgaatcacaagaaatgcattcaagtgatcaaacacatcgtaatcgcataccatttgttcatcaacgatcaagaataaagcttccggcacaaactctaactcatttttcgggaaaattttcccaatggcccagtttttgggacgattttaaatcctcagtacataatgatccgaacatggaaaatatacaaaaacttaagtaccttcgtggactgttacatgatgagccttatcgaattgtatccccatacccccttattaataaaaattacccaataataataaaattgctgaaatcacgttacggtaaccccgaattaatcagagaaaatcttcacagtgaattacgtaacttgaaaaggcctagtgaatccacgattgaattaagaaaatttattttactaattgatcgaataattttgcaattaaaatccgaaggcgaagacataaatcatccccaaattaagcagtctatagaaacaaaacttccatataatctaagacttaaattgagagaaaaatttaaaatttattcaacaaagcagttaatggactttttaaatgctcacacacaagcgcgtgaagacatggaacgaatggaagacttaaatcgtcaaatccggaactttccttctaatcgaccaaactcaaacaggatacagagacaaccatatcaaaatttctctcaaaacaaaccaaaatttaaccaaagaaatcaatatcaaaccccaattacaccttttccatatacttctgcattaacaacaaaatcaaaaccattgcatccggcacagattaaaccaatacctacacaaaccaaaactcaatataaaatattttgtcgtttctgtgaaagagaaaaccatacaagtaaagaatgtaaaatatattcaaccccggagaaacgaaatgaacgagtacgtgaactcaaactttgtctcaattgtctaaataagggacatatggtcaatgaatgtaaatcgacctatttatgttataactgcaaacacaaacataatactctcctgtgcactcgtaaacaaactcagtacaaaacgaaggaacaaaaaaccagagtgaatatggctcaaaattacgaaaatcatgaagagactcagacattcatgacaatggagggtgataaaaatttaccaaattctgatgaagaagaattgcttatgactactgaagtaaactgcataaatcccgacaaatataaagtaaaaagggaaataattttgtttgataatgggtcacaaaaaagctatataaccgaagaatgtgctcagactctgcaattaaacacgattgaagaaaagttattagcaatttccacttttcaaccaaaataagccaaagatca

SEQ ID NO: 78852 - DNA, 447 bp, Heterodera glycines
atggttaataaagaaactgttgatgtacttggagtaaaaatcccaatcagtcatgcacgtcctcaaattttaattggaatcgactattactggcacttcatgctaccaaattcacaaattcaattacttccatcaggattttactcaataaatacaaaattaggaaaaatattatctggaaaaggaactattgaggacaccaattgtaactcagtgaccgaaaaaagaaaaaaagacgaaacgaaccaaatacttcagaaattttgggaattagaaaacattggaattatcgactcaccacatatgacggatgaagatgcagcaatgatacactttgataaaaatgttacatttaaaaataatagataccatgttcgatggccttataaaagagagaacccgaatttaccaacaaattttggattatgcatgggaagactaagaaat

SEQ ID NO: 78853 - DNA, 868 bp, Heterodera glycines
atgaatccgggacccttatccgatcaagaccgaccaattgaatttcgttttggtttcagttgtggtgatggtgttcagcgacgggagggcatgtgcgttcgtgagcctgatgggcaacgattggaagagaaggattgcgaaccaagggaacgaattgtggagaagcaatgccaaatggccgcttgtccccattggtcagttaattatggctaatccaatttcatttatcagggttttgttatccaacaaaagcttattcaccattgatcagtcaataagttttcgagtcgacctaattttgtatcgcaaaatgaacgggcatctaaattttttgaacattttctaaggaaactcggcacgtggagtccatgttccgtcagttgtggccaggacggcttccaaacgcgccttgtccaatgcgtggattcggaaggacgaaaagtttcggaccaaaagtgtatgggcatcaaaaaacaacagcagacggagaagccacaaagctacaaagtgtgtagtccggggccatgcccatattggtaagaaatgaatggtttgtgctgaactgggcgaactcgttggattttttgaaggcgtgccgccaaatggggccattgttctgtgtcatgtggcaacggcgttcgcatgcgacatgtcgagtgtgttttgaagggccaaattgtggacgattcgctgtgcatgaaggcgatgaggccgaaaaccagctttcgatgtgtattgttggcatgcacagtttggcatggagttccacaggcggcggcgactgggcaaatcggagagcgacgggtggatttaaaaattaaattgaaagcgcaggagggggaggtggatggaatgtttgatcatccag

SEQ ID NO: 78854 - DNA, 1305 bp, Heterodera glycines
  unsure (1)..(1305): unsure at all n locations
cccaaggtgccgctggcattgacatcacacagacggcacacaatggattaaaagaagatgacaattatttggcattgcgcacaaccaccggagagtatttgttgaacggacaattccaagtgtcggtgtttcgtcaacaaatcccaatattggacactgtgcttgaggtgggtggacaaaataaaactcataaaataacatttagcgaaaatctatttgctaaattgcttttttaaactaaacacaaattatttatttttttcacttggaaaatattaaattaatttttttaaatatctattaaattaattgtctcattataaaattaaatgcatttaaaaattttgggttacggattgcagtgattacggcctttgtttgcttacctttacattagtttgttgctcaaggattagctaaatcgtcagcaacaacagcagtcccagtgttcgctccttttcagtattccggaagtgatctgcccattgaacgcatcaatggcagtggaccgctgcgatcggacatttatttgcatgtgctcagtgtgngcaacataaataagccgaacattcgctaccatttcatgacaccaattgcaagcagtacaaaatctgaagcagcagcaacacaacaaattcaaacgaaacagagcaacacaacgcagggagcaacagcttttattggcaggcggaaaacaattggacagaatgctcaatgaagtgccaaggaacgcaggtggagcctttagtgtaccggttcccgacccagggaatttcccggatctttgctcatggtcgcagtcccggttgccaacttgggaaattcccggatttttggtcatgatggtcgcagttccggttgccaacttgggaaattcccggatttttggtcatggtggtcgcagttccggttgccaacttggaaatttcccggatttgatcatggtcgcagttccgttaccaacgtggggaatcacccggtttttggtcatggtcgcacttccggtccccgtccagggaaatctcacttttttttttctgttttgcttcttttgattcgcttcccaactcagggaattcacggttttttttttttttgctaaccggtctcggtcctcgtccccgactcggtaaatctcccggtacacagaatcagcatgtccgttgtgtggaagcattctccaacaattttgttatggacgcccactgtgccgcggtcgtgcgtccgaacacacaaaagcgaatgtgcaatgtggactgtttttacaaatatttgcagagacttaacactgattcgtcgggaaaa

SEQ ID NO: 78855 - DNA, 761 bp, Heterodera glycines
atttttgtgacagtaacggcatttgtcacctcttttcgccaccataccacgcacagtcaaacggagcagccgaaaagtttgttgatttcttcaaaagacagttgaagaaatgcagtggggataaaaattggttgaagcaatcacttttgtcttatcgctccatcccaattgcagtcttaaacaatcggtcaccagcagaattgttcctcggccgaccactccggaccaaactttctcttatgaaaccggaacggccgagtccattcttccgaggcccgtatcagcaacgcatggcacaacagtttgataagaagcatggagcaaaaagggtagagtttaacatcggcgacaaggtgcaatttgtgaattaccgtgatggaaaaacattgtggttatttggggaggttgtcaccaaaaaagggttaatttttggcattcgttccccacaaatcgcaaacagaattgtcactcgccatgcaaatgccatgcgactcacacaagcattgggcactgatcaaacatggccaaattttgatgaagagcccaagaagaacagatcacccgttcgagcaccacaaattcagcaaaatgtcacaccaacaccaccagccgaaagaaaccatgatcaatttgaacagaacgaagaacaagaacggaaccaacagcaaacaccagtgcttcgacgatcagaaagagttccaaaacgtgtccgtttcctgagtccaagcatgacgggacaacggcacaatattcgccagtga

SEQ ID NO: 78856 - DNA, 1661 bp, Heterodera glycines
atgaaggactgggactcattttcgcaattcaaaaatttcaccaatacatttttggtcgaaaattcattttacgcactgatcaccgtccattgttggggatttttgggtccaaaaacggaatcccgattttttcagcgtctcgtctacagagatgggcactgattctactgaattatgacttcagcttggaattcgttcgcaccgacaacactggacaggcggatgcactgagtcgtttgatcagtgaacagcgcaattccgcagcaagcgaagacatggtcattgctcaggtgacagtagacgaaattcaaacagcacaataggacgacgaattgataaaggaagtgatcaaatttactcaaaacaaatggccaaaccatggcattaatcccgaaatcaaaccatttttctcgggaaggcacaaactatcaattgtttcaggatgtttggtgtttaatggtcgatcggttatacccccatcactcaggcaccgcgttttgaaggcacttcacttggcacatccaggaatcgttcgcatgaaaaatctcgcgcgaactcttgtgtactggccttcgatcgattccgacatcgaagaaatcgtgcgaaaatgccgccaatgtcaagaagcagcaaaacaaccgcaaaaacaaccgctacaaccatggccaacaacaacacaagttttccaacgtgttcacattgacttggcaggaccttgtagtgatggaaacacgtatttggtaattgtagactcattttcgcggtggcccgaagtgtttatgcttcgccacacgtcatcacaacatgttattgaacaattacaatggctttttgaccgatttggcattccgaaaacgctagtttcggataatggtcctcaattcagttcatcccattttaaagatttttgtgacagtaacggcatttgtcaccttttttcgccaccataccacgcacagtcaaacggagcagccgaaaagtttgttgatttcttcaaaagacagttgaagaaatgcactggggataaaaattggttgaagcaatcacttttatcttatcgctccatcccaattgcagtcttaaacaatcggtcaccagcagaattgttcctcggccgaccactccggaccaaactttctcttatgaaaccggaacggccgagtccattcttccgaggcccgtatcagcaacgcatggcacaacagtttgataagaagcatggagcaaaaagggtagagtttaacatcggcgacaaggtgcaatttgtgaattaccgtgatggaaaaacattatggttatttggggaagttgtcaccaaaaaagggttaatttttggcattcgttccccacaaatcgcaaacagaattgtcactcgccatgcaaacgccatgcgactcacacaagcattgggcactgatcaaacatggccaaattttgatgaagagcccaagaagaacaaatcacccgttcgagcaccacaaattcagcgaaatgtcacaccaacaccaccagccgaaagaaaccatgatcaatttgaacagaacgaagaagaacagaaccaacagcaaacaccagtgcttcggcgatcagaaagagttccaaaacgtgtccgtttcctgagtccaagcatgacgggacaacggcacaatattcgccagtga

SEQ ID NO: 78857 - DNA, 394 bp, Heterodera glycines
acttgaaaaaatcgatttttttgttttcggggcagtccccccgaaccgatgcgcccagatttatggggagaccgaatccttcgggaatagcttccctatagcctgtactttaattctgcgttggatttttactccccataattgtttgagtaccccaaacggacacttgaaaaaatcgatttttttgttttcggggcagtccccccgagccgatgcgcccagatttatggggagaccgaatccttccggaatagcttccctatagcctgtactttaattctgcgttggatttttgctccccataattgtttgagtaccccaaacggacacttgaaaaaatcgatttttttgttttcggggcagtccccccgaaccgatgcgcccagatttatgg

SEQ ID NO: 78858 - DNA, 2832 bp, Heterodera glycines
  unsure (1)..(2832): unsure at all n locations
atgtcaatcacctcggaacaattaaaagccattttggctgaccaacaaaatcaatttgtcaaattgctacaaaacatgcaattaaacaccggccaaggacagcacaatcaagcacagtcctctgatatggacttgttttgtaaattgagtggccaaatttcggaattcctttacagtccagacgacaaccacacgttcgaggaatggtacgagcgattcggtccttttgtcgaacaggagggaaagcacatgccggaccagagtaaagcgagactcattgtgagtaagttgggccctgacgagtaccgccgctacacggaagtcatacaaccaaaaacaccggatcaagtcggtttgaatgagacgttagcaaagttgcgacaaatttttcccgaaatcaaatcaatttttattaagcgcttcgaatgttttcagcttaagtgtggacaaaatcaagacgttctcgcatttggctcaacagtgaatgccatggccgaaagatcgaaactggacctgactaaagaccaaatcaaatccctcatttttgtcacaggtttgggagatcacaacatggagttgcgacatcggtgtatcaaattgttggacaacaacgcgacattcgaccaactcctgtccgagtgcaaggaagtcattgcccttcgccaaagttcggccgcactttccagcaaacaggatttcaattccaatgcaatccaaattcgtccacataaaattcaggattttccaaagaaaaggaagccgtcgcacacacgcacaccgtcgcgcacacgctcgtggtccagtcaaccaaacaacaactcaaacaccccgcatggtggaacgcgtcaatcaaggacatttccaagcagtccatgcacacgatgtggtggtcaacattggaattcggactgccggtatccgatttcggttaagtgtcacatttgtggtaagaccgggcacatttcaaccatttgccgggctcggaaacccaaatcaaataattttggcaaaaacaccaatgtagttgagtgtctgcacattacgccaactgaacggcaatgctcatggtcaacaccacgagtcgaacacgagccttacattgaacaggaagtgaaatttgggacaaagagcgtaaaaatggttgcggacaccgggtcaaagttgacaattttgacaaaggtaacatggcataagctgggaaagccgaagttattcaaaacaaatttgtgtggtcgatcatatacgggcgacattttccaatttataggcaaaggccaagcttatgttgctttaagcggtggatgccaactatttttggacttttatgtgacggacaaaggctccctggatttgctcggagttggttggatccgtgcattcgagcgagagtacaaccgccccgttgcaacaacactgccattcgaccatacaacgaacaacattcaacacatcaacaactgtgagctcacgtcagaacagctcaaagacaaattgcaagcacaatttcccagtgtgttcgccaatggtttggggttgtgtaccaaagttcaggcacaactcaaactcaagggaagttcaactccggttttctgtggggcacgtccggtacccttgggtgttcaaaatgatgttgacaccgaattggacagattgatcgagttgggtgttctcaaaaaagttgactacagcagatgggccgcaccaattgtggcagtgcgcaaagcaaatgggaaagtgcgcatatgtttcgactttagcactggactcaacgcggcactcgaaccacatcatcacccgctcccacggcctgagaaactttttgccaaattaaacggcgcaaaaatattttcccaaattgattttaaggacgcttatttgcaaattagcgttgatgaacagtcgcgtcaactcttaggcgttaacactcacaagggactttatcaatgccaacgcctggcattcggaatcaaaagcgcaccaggcatttttcaatggacaatggaccaattggcagccggaattcctggtgttgttggctatatggacgacttcatcattgcttcaagcacagcgaacgagcatttttcaacaatttttaaattttttaagcgaattcaagaattcgggttccgaattcaaatggacaaatgcaaatttttagttaaggaaatcaaatttttgggtcaaattgtttcgtccgatggtatccgtcctgatcaaaacagaacacgagcactgcaggaaatgccagcaccgacggacatcacaacactccgatcattcctcggggcaatcaattactatggaaagtacatcaaaaacatccatcaaatcagagcaccactggatgaattgctcaaacagggagtggaatggcaatggaatgaaaagcaccgcgaagcttttgaacaagcgaaatcaattcttttgtccgatttagccttaacgcattacgacccaaatttgccaattattgtcacagctgacgccagcaacaaaggaatcggcgcaacaatttctcaccgttttccggacggaaaagaaaaagtttttcaacatgctgcccgaacattgtcaaagacggaacagaattattcgcaaattgagaaagaaggacttggactcattttcgcaattcaaaaatttcaccaatacatttttggtcgaaaattcattttacgcactgatcaccgtccactgctggggatttttgggtccaaaaacggaatcccgattttttcagcgtctcgtctacagagatgggcactgattctactgaattacgacttcagcttgnaanttcgtcgcaccgacaacactggacaggcggat

SEQ ID NO: 78859 - DNA, 595 bp, Heterodera glycines
taattaaatccattccttcgggggaccgtgccgggtgccgcggggtaagcagtgctggttcgtttcatcacggcaccgaaccttttggctagtcagcaatcgttgcttaacttgccagatcggacgggtgcgcatgattccactgttccaagcaccccaccaaaagcaaaacgatataaccaaaatataaggaaaaattttttctccatcttcctttttgatactaaagcatcagagtgctaaaattaagttgtaaataaaatttggtgcgctttagagcactttctgaaaaaaatatttatgaaacaaaaaaatcgattttttcaagtgtccgtttggggtactcaaacatttatggggagcaaaaatccaacgcagaattaaagtacaggctatagggaagctattcccgaaggattcggtctccccataaatctgggcgcatcggttcggggggactgccccgaaaacaaaaaaatcgattttttcaagtgtccgtttggggtactcaaacaattatggggagcaaaaatccaacgcagaattaaagtacaggctatagggaagctattccggaaggattcggtctccccat

SEQ ID NO: 78860 - DNA, 3297 bp, Heterodera glycines
atgtgcaaatggggtttctgtgcagtgggctgttgttatttagtatgggcatatggtgagtactcgacgcagattcccgatctggagcggcagggagttgtcccccacgcaggtgccccgtctgacgagatgctgaaaaagctgccaaagccttgtctgattgtttacgatgacttgatgggtgacattgaggccaagaagttggccgatctgtacaccaaaaagtcccaccataacaatttttccgtgattttcctcacgcaaaacctgttcgataaatcaatgcgggtgccaaggtccaacgcccagtacatcttcctgatgcgggctcccaacgacatgcttagcattcgtaatttggccagccagatgttccctcgcgagcaggggttcctgatggatgcctaccgacaggcatgttccctaccgtacggctacctgttggtgactctccacgcgaacagagacaacattatacgcctaaggacaaacattttcccagacgacgaggagagaatcatttttgcccccaaaaatggttaagcgggaacagaagatcggtgagcgggttgtgcacaactacgactatttgaagaagttgggaaagacaacgtcggagaagaagcgccgtcatttgttgaacagtgccggttgtgaggaactgttaacgcttgtcgagatttgtctcaacgttttgaacgggagtttctgtctgagcaggaaacaaaagcagagacttgcgccatttgccaaagacatcagacagttggcacgtgtgcgaagtgagaggggtgcgcgaaaactagtgcagcagtcaggcggatcactttttgcccctttgttggcccccattctgattgaggctgcccgatacctgctttcgcgcagcaataatggccaataaacttattctgctgccgtacgagcactacaaggggctggttgcagcgagggagacaaagaatgacgacgacgacattgctgagcggacaaacttgggctttgtcaaacgacaggtgaccgctgcagtacagaagcggaagggaaacgtcagcgagcggaacgcaatgtacaaccagcagctgcgccggtacctgaagatgcgcaaggaacataaggagcggcccgtccgagtacagctcagcaacggcgctcaactgctaaataaaacagtggagacgggtgtgcaggtacggcctggtccggacgaaccgaaggacaagtccgtgatggttaccgacgaagatgaagaggaagaaattgaagtgccaaagtttttaaccccaacaagccagacgcagggaagcagccgatcacccaggaccaataagaaagcggctaaacagcaaaaattgatcgagaagaaggaccgcctgttggccatcattatgtctgatccgcagagattcggcgcaactgaccgtgggaaaatcattaacccaaagacgggccgagagtttatcgactcggacctggcctggtcaattgaacgcctggtggaccctcgcccggagaatgcgccatcgccaagcggaaccaaagagttgaagaggaaactcgcacagaatccgctcgccagtagcctactcaatcgactgtttgttgggtctgggttcgtcggacaagtcaaacaaagcgggcgttttattccctcaaaatggacaagaaaataaacaaaatatacaccgatccggccaatccgagcgggtatgcgggggcgagtgctctgtacgcggcggtgaaggagaagcacccgaagttgaagcgtgccgagtttgaggactttttgcaaaggaacaccacctacacgctgttcaagccaaagagagacaagttccgacgcctacgcactgtgcctacgggtttcatgaccggtaagttgtaccggggcttattgcgcacaattcagggttcagatgttcaggctgacttggcagatttccaagccctttcgcgcaagaacagcggctaccgttacttgctgttggcggtggatgttctatcgaggcgaatgttcggcgcgcccgtaaagagtaagcgcccggtggacatgaaaagggcgtttgaggagctatttgagcaaatgccaagggtgccggacacactgtacaccgatcgcgggctggagtttgtggcaaaaccgttgaaggagttttacgcggagaagggcattcaaaagtttgagaccagttcaaagaaaaaggccgccgtggcggagcgtgccatccgcaccctaaagactcggctgtacaaatatttttccgccaacaatacgtcggtgtgggtggatgtggtgccaaagtttttgagtgccatcaacaactcggtgtgccgcgcgaccggacttagacccaacgaaatcagcgacaccaatgcgagggaggtctggaagagggtgtacggcgaagggctcgcacaattggacaagacaccaaaaatcagagcaggggaaacggtcagaattcccgagcctaagcacattttcgagaagggtattgtaattcacacattttccggtcattttttaaatttttaaggaaatatcgctcatactgcgttcaacttcccccaatcgaggcgccgcgcagtaccgcgcgccatccttcatcccgaaccctctattaggcacgcaccccccacccctccccctcccaccacaccacccaataggcaccgaccccccagctgatcctctctcccttcattgggtcaaattcacttggaaaaaatgcggctttgaacaaaataacagcaatatgaattttcaaaaagagaaccaaagaattaggaccgacaatttaccgagagcaaaaattttcccaaaagtctccgcccctaaacgagcaaaggatgaccgaagcgaaagcaatttgtcgcagaaaccgatagagtcagccgatgtttcaacaatttttgtaggtctttttgcttcatttttggttgttgccaacgcgttttcgaatgtgaaggctaaaactcatagccgccgaatcagctctatggctagtagcagctcgaaattgccggcattatggaatccgttgaatgttgcatttgaaaaattgaggaaaagggaaaattccaaagaaaacggaatcaacagcaaagtgaaaacaccgaaagggaatggccaattgaggacaattgttttttcgaaggctggggaggaattggccgactcaacaggtccaacgacgaagttgttgaaagccgacacagaacgaaaattgtcagccgttgatggcacaattacgaataaagctgcgtcaagtcacgctatcaggcctgttcaaaatt

SEQ ID NO: 78861 - DNA, 597 bp, Heterodera glycines
atgtttgtcggctgttgtgccattctttggctttattgggaccgcttcagaaaaccacgaggccatcacaaaaagaaaatgtaaaaaaaaactacaaaatttttttttaatttcaatttaatttttcagtttcatctccggcgacggttggctttgtgtgttcgatttgcttgagccttctcaattgggccttggaattgcacttgtcagccaccgttttgacttttacgtcgacgaacacttcaagacgcggcgttgggcgctcaaagccatggaaattaaagccaaatttgaagcggacggcacaaaagaaatggaaattgtcaattgcgatggaaatccgttgccaattccacaaaaagcattgccaaagaaagtcgtcggaaaaattttcgttgttcgacaaaaagttcgatttagggttatggtgtacggaattagttgaaatttacgccagattcttaatcagcgatgttgaaaacccccggaactattttacatgaatttagacaaaaaaaatttatgtcgggtaaagtgcattagtagtacacgaaaatggggcaattgtgaagattattggtcccacaaaaaaaagga

SEQ ID NO: 78862 - DNA, 148 bp, Heterodera glycines
ctttgagcgcccaacgccgcgtcttgaagtgttcgtcgacgtaaaagtcaaaacggtggctgacaagtgcaattccaaggcccaattgagaaggctcaagcaaatcgaacacacaaagccaaccgtcgccggagatgaaactgaaaaa

SEQ ID NO: 78863 - DNA, 235 bp, Heterodera glycines
aatttttgcttgagttaatgagttgcctcaaaattccgcttgataaatcctgtcatttttgtttgcaaattaagaatattatgtggatttctttcgctgcaaggagctgatgggcgaagactacaaaccgtgcaaattcttccagaatgtctacaaagacatttgcccatcattttggaccgagaaatgggatgagctccgtgaggagggacgttttcctgcgaagttcgaccgt

SEQ ID NO: 78864 - DNA, 1204 bp, Heterodera glycines
gtttactttttctcaaaaacccgagaaacgcccaaaaaaggatgacagaaatgagaacaatgacacatttgagcacaatacgcaatcgaactcattcgttggggctgcaatttccgcgctccaattatcagctaaagacgtggacacgacctttcagggcatcgttgagcagacggtgttcagagggtcaggtactgcagtacaaatgggacggactgttttggctctgtttggggcatagtgccttttaaaccatgccccagaaaataaagtattttcagccgatggcaacccatttgcaattcgcgaatgcacggtaacaaatcgcattcatttttttttttatttattgttacgcttcggattctccttaagggctctgtgcttgtactgcttggccacgctgccaccatcacaattgacaagtgcagcaattgtgtgatcatttgcggcccgtgcagaggcaggtccgccgtggggggcattttggcatacaaagcggtcatatgattgttttatgacgaattcggctttagatgaaatgtttatatttttttcagcatttttatgcgcaactgtgccaattgccttcttctcgctgcttgccaccaatttcgtctgcaaaattcgcgcgacattgaggcgcacttacactgcagcacaaacccagttggtggcattacaattcttattttttatgaaaactgcttttccggtatttttctttaaaattaaaggcacttaatttggggctattccagagtttctttgccaaatcaatggctatttcattagaccacaattttttattgcttacaattagctttgttagtcaatgcctactcttggtatcacttgaaatttatagtcagcccataaatttctaaccctccattcattgacagacaattgaagactcggatttgattgtggccccgttgctgatgagatacgacggcttcaaaggcgtgttccatgacgacgttttttttttgtttgacttgaacgttgttcagaggacatggaatccgccagactggacaacgcgccgaatttgtgggacaaagtgcagaatttcaccgcggaaacgggccaattccaacggatgaatttcgacccctttgccaacggtgccattagcagcgaagtggtcagtgatgaactgctggagaagctgagcacgttcatggaggagcccgaggcg

SEQ ID NO: 78865 - DNA, 187 bp, Heterodera glycines
ttgttggtgacattggccgacctttacgatgactacgaacagtgcaaatcttctggccattttggggcagaggacggctcgccatctttggtgtgcgactcggagggacggttgacgccgcaggcgctggcccaactgaacggaattctgacggatatggggagagacgcggggtgccaatgtgcag

SEQ ID NO: 78866 - DNA, 1711 bp, Heterodera glycines
atgcaaaataatttaatatgcaaaacttattggttatcgttgctaaccgaccataagccacttcttgccattttcggaagcaaaaagggagtgcgccagtgcagtgccaaccgacttctccgatggtcgctgatcctcctcgcatacgattttagcattgagtacatcagcaccaatgattttggtcaagccgatgtgctttcaaggctgatcgcaaagggaaaaagcgacgaagaccgagtgattgcatctctccgatcagattcggaaattgacgacattttgatcggatcaattgaagcactgcccattaaatttaaggaaattgtcgcagctgctgaagccgacaaaaccattcaaaaagtcaagaaatttttgacgaatggttggccaaggaacgtcggagacgaaagtgccgaaataaagctttttcatttgatcaaagaacagctttgcatcacgagaaattgcctgatgtacgccgaccgagttgtcatccccgaaaaacttcgacagaaaactcttcattcattccacaagggacacccgggaatcaaaagaatgaagcagttggcgagaaattatgcctattggccaaatatggacgccgacatccaacagatggtagaaaactgccaaccgtgccaaatggaagcaaaggcaccagttaaaagtaatcttcaaccatggccaaaaccatcacttccatggcaaagagtccacatcgactatgccggaccatttttcggcaaggaatatttaatcatcgtcgatgccttttcgaaatacccggaggtattcgaaatggccacaaaatcgacagcggcaacaatagaaaagcttcgatatttgttcagccgacacggcatcccggaaattttggtgtccgacaatggcgcccaatttacgagcaacgaatttgctaaatttatggccatcaacggtgtcaaccacctgttttcagcgccgtataatccaatgtccaacggccaggctgaacgtttcgtggacacgttcaaaagaacatttcgaaattgaaaggggagggagccccaagcaaagacggccgccaccagcacaaccgatcgaaagagacgtagaaatggcgagacgcttcaataagcgatttggaaccaaattaagggagttttcgatcggaaacaaggtctttgcccgccacagaatttcccaaaattggcaacagggcaagatttcaaagcgaactggtgtgatttacgacgtgacattcgccgatggtaagtcagggcgataccacgccaatcagcttcgtcctcgcaaaacatctgactctgacgaacagctctcggtgatgctcgaagtcttcgacatcccaagaccggttgctgttgaggagcaaagggaaatcccagtggaaatgccattggaggacccgcaaatttgggaggtcaaattgaccatggacagcaacgacggtaccctcagcgaaatcgccgtccgccgcagcgcttttcaccgtaacctcggaaccgcgcttaaggggggaggtgttcggggcactgccgccgaagtttgaatgacatgacataatgccaatcgatttctgttccatttcatgttccttccctcgcccataaatatgctcccattccattttagattgtattcccttcattcatttttcatttatatatttgttccccaaattgttgtgattttattttcttctcca

SEQ ID NO: 78867 - DNA, 1813 bp, Heterodera glycines
atgattttccgcggcggcgattggccaaggggcattgattgtgccacaatctgtggccaaatgtttggcccatggggcatcaaatcagcagaagcggcggcagatgtttggctttgctttgctggtttaattggggagatcggtccatattttttaaaatttcaaattttatcgcgaaaaattttgccctcattaaaataaaaatttcttatttttgaataaatcaatttaattagcaaaaagaggagaaatatgtaatattatttaccattatttgctttgtgttgtataaaaaatctttttaattattaataaaaccaatttacttacgcacaaaaaatgtttctttctttttggtgttaccactttctatgaaggaaattgagcacataaactccccaaaactttgttattttatcgccaaaattgtgaaaaaattgcaattttaatcgattttaatttataaataattttttataaaaaatttaattatataattaatatttataaaaagaattttatttattcattttaataaataaataaataaatatttataaaagaaattttaattaattaattattgaattatttttaagaaatttatttatttattcaattaaatttaattaattttatttttgcagatttatttagagcaatttatttgttttttttaaatcttttttgtgtaaatgttcccaatttttggccaaattccgcgttttgctccctttccattttatttgcccatttatttctcttggccacccaaaaatgtgtgctctctgtgaaaatttatgggcttttggccatccaacggcgagctgacgacatttattttattatcatcgacaacacaacagaagttcaattgggtcaaataatattattctgctgcaaagggacgattcatttagtgcaaaaaattatttatttgccaaattttggcatttaattaccgaaaaagtggaaaattaaattagaaaataattttaaaatcacttttaaagaaaattcaaaattttaaatcgatgcttatattaatttcgattttataatgagcggttaaaaatagatacacaatatttaatgttttaatttcttattttatttttaaattttcctttttatttttattaatctatattttgtattttagttaatcatttttcatttccatttgtcctttcaaactttacaaattgcttcaatggatgaacacatcgccgccgctggtgccaaatcgtttgtgccacccgcgccggcgggcacaactcatcaaaagacttcagtgcagcacgagttggacagagttgaacgtgaaaaattttggaacgaagtgagttggaatgggccaattttgcgctgccaaagtgccaaatggccagcttttgggttggctatgtgcccgattaaggcgggtcccgaacagggatggacgtaactgattttcaattacggaaatccataattatggggtccaaaaacgccgtagtttttgttttaatgcctaaagaaccgtaattttttatctgtgtaaatttaaaaattaaacatttcgccaaaagatgcgcgacgaggaggaggcgaggcgacgcgaagatgctgtacgtcgacaaaagcagcaggaactgttcgccaaggagcaacgtgaactgaccgacaaactgcacaaggcgcacttggaacatcagcaggcgaaaagcgcagtgcaacaggtggccacgtcattggcattgccagggagaaattgacccacattggcatttaacaatatgccatgccatccatccccagcagcaggggggta

SEQ ID NO: 78868 - DNA, 624 bp, Heterodera glycines
gtcacaatcacaaggtctgcctcgtgaccctgcattgaatcagctgtggctgaagcagccatccgctccaagccattcgctctcagttcacacccaatttgtgctgcttggcctgagtaaagtgaaatgatccggactgaaccaggaaaacccctccagctccttaaaaggtcaatgacagtccgagtttgaccagaattggtcgcagaaaaactcgtttcttccgcttccattggcgaatcttggtgaatgagcacaattggagattcagcaattggcattttggcaaaactcgtcaacatcctaaagattcccggtcccgatcttagcctttcaccatggggtgtgtatgccgcatattcaacgcaattgacaatttctggatgtgaacggtagttcacttccaacgttgttttgtccacaccaggagatgagtctgtgttgagtaaaactgtgtcaaagccgaagccgactcggagttgttcagggatgtccttcatgctcacggccagccgataacgatcaccagtgatgaacagcttaagagcttcctgaaggggtgagaggaccgagcagaccgccagaagaggcgcttgacccgattcgtcaagcactatcatgttt

SEQ ID NO: 78869 - DNA, 1154 bp, Heterodera glycines
ttgttggggccaccattgggtttgtttttatttttaattattgaatttgcccgtaattacaccgactcacacattaatttgttttcagttattcaatgcttctccatggtacagaaggcatccgatgggtcaaagtgactaaaatttgtgagtaattttttaatttttcggaatgaattgccaaattcgaatgatggattaattttctctttttcagttgcttcttggttcgtctcccccattctgtccggctgtgtttccattctcatttttctcttcattgaccattccgtcctccgaagggttcgtttgtcccgtcttttgccccataactttcgattttcgactgtttttcctcccaaattatttctttcgattgtttcttttaggataggcccctccattgtggccttctgttgctccctttcctttactttgtctgtgtttctgtgaatatgttcgccatcacttaccaaggatcgcactgtaaaatagccaacttttgctttgcaattactcatttccgctctaatattaattgtcagatattggcttggacaaatggcctttgtgggctgtggtcgcacttagtgttgtgtccggattggttacgatggttgtgacccgatttttcgtggtcagcagattgaaacgatacattttgggtacggtatttttgttttttttttgtggattatcatttcatatttggatagagcacacaatagggccggaaacatgcgaaggacagcaacaaaatgggctgggaaaaagcttaaacggagtggtgactaacaaaagcgcaaaaagtttgacggagggcaaaatggcgctactcgaagaaggaaagacggaacagaatggagacgaaccatcgacaaaagtgaaaatggcggaaaatggaggcggaggaggggcagaggtggcccaaaacaaatttggtaccacaaaatcgaaattcattggacattgccatgtttcccgcaggttcctcttcaattcgcccggcttcatctgtgctcagtttcttccgttcctcaaaaccggaggatccgtacgcctcgaaactgttcacttttctgcaggtgctcacagcctgtttttccggatttgcacacggtggaaacgatgtcaggtaactaaagtctgaattg

SEQ ID NO: 78870 - DNA, 992 bp, Heterodera glycines
atggtcgttgctgatttggccgtcttccaattggaccttttttggacaattgtaaattaaattatttatttatttgtttattttgctcatatttttgcagtattaacaaaaatatttttcacagatattgggctttcttatcgcatttgttttggcttttgcaattggaggtaagcgaaaaagcaaataaacgcaaaagtcgctaatgaattgccattattcagccaatgacacggcaaattccttcggcacgagtgtcggctcccgcgtgctcaccctccaacaagcgtatttactcgcctccattttcgaaacgatgggcgctgcccttttgggtgattttttatcccttttaattcaaatgggaataaacaattgtactcgttgtttttagggtatcaagtgacggacacaatgcgcaagggagtgattgaccttaacatttacgagggacgcgagaaggaactgatgttgggacagatcgccgtgttggtaatgccattccgtttcgaatgtcttcattttttcatcccctcttcttcaattagaccggttgtggtgcttggctgctcattgccactttctttaaaatgcccgtctccaccacgcgtaagtgaatgtttcaattttggcacttttgtcatgtgtgattttgattaaataattgtcagactccattgttggggccaccattgggtttgtttttatttttaattattgaatttgcccgtaattacaccgactcacacattaatttgttttcagttattcaatgcttctccatggtacagaaggcatacgatgggtcaaagtgactaaaatttgtgagtaattttttaatttttcggaatgaattgccaaattcgaatgatggattaattttctctttttcattctctttttcagttgcttcttggttcgtctcccccattctgtccggctgtgtttccattctcatttttctcttcattgaccattccgtcctccgaagg

SEQ ID NO: 78871 - DNA, 1812 bp, Heterodera glycines
atggcagaatggcagaacacagcggagagatgggtgagtcagctgatttggaatggctttcagcaaagtgttcgctgccgggaagtggtgaataagccagcggagcaaatttgttcacgatttgcacaaaatcggaaggtgaaggaccaaaaagcgacgaagaatagggcaacaagaagtgcaccagcatagattcataggatgagggggccagagatcgtgagttctcgaccaacaccgatgcggtattcctccgcggcacctcgactcgttgaatcaccatggggcataacgttgatcaccaattctcgggaccggggcggatggtcaattctgtcccagaacacgaagtgagacggccgggggcgtggatgtgggcatgttgacaagccccgtggtgtggaaatttggtcaggggccacgacgcggatcatttcgattgggaaaaaatcatggtgtccattaccgccgggctccatcaagcatggggcagaggggtgccgaagagtgatgtcatggcgagagcggtacagctcggagatagttgggccacgggcacttccattgtaggcaccgagacggttcgcaccacttcggctcagctcagatccctgaagccgcacattcctctcacgtgggtacagatgccttgtcttgagttcgtagccgcgactgtgcagtccctctttgtagaaatggtgaattgagtggcgcagaaacagcttttatagagcagccatgtggcaatttttgatctttggcgagatgaattcatagaaatatttgaaaaataatgaggatgagttggaaaaaggactattgaaacagttaaataaagacgacaaagaaaagattcaaaaaagacgaaatcgaagattgtacaaattgggtagcattactctgataatttttctcattattaatacaattatccaaataacggatggagcagcagaagttgtagtaatacaatcgaattccgaagattgtgaaagaaagtcaaatggatcagtatgcagaatacgcggaactgcagaattaactatattaccggctggacaaaaaatcactttagctttaaaagatgataatggaaaattagcaggttccttggatttaactttacaatttttacgacttcactgtaatcaaaacactgtaaaatggttacggtcctataaaataaatgttgtgtctaaaaaacggtgtccaactatgggatcatgtacaaaaggcaaatgcaaacacacacgaatgagtgatcaattaccggaaatgaaagattatgaaaaatttccaggaaataatttttgtaaagaaggcgaggctatttggggccacaaatgtgctttaccttccgcgggttgtttcttttatcggacttatgccaaaccaacatcagaaaaattatgggaattaatccgatacacaggatgggattacgaattaaaaatgaatttgtcgtttaccatgggaaatttgacaaaaaatacggaattaattatgtttcctggattaacaaataattggaatgaattttcatttacgccggaggcaataactcctccaatttctccaattttaaatgattattttattgtatcagaagatgaaatcatttatggtggaaaagaattaaaaagtgatttgttttgcgcaggccctattgaggcaaagaaattttcgtgtaatatatctaaagaagcatgtcccgaatgttggatagatagagaaaaggatatagttgaatgcgcatgtcatgattcaattttagaaaaaatggagccaaaattaccatttacaacagcaaaa

SEQ ID NO: 78872 - DNA, 999 bp, Heterodera glycines
atggcatatcaagcggcacaggcgcgacagaacttctcgccttctgtggaggaggcagtcaacaagcaaatccgaaatgagctcaacgcttcctatgcatatctggccatggtttcaaatttcaacttttctctcttgtttgagttggttttttccattttcaggcaaactatttcaaccgcgtggatgttgcgttgtccggggccactgagttctttggcaaacaatcggtggaggagagggcacacgctctgaagttgatcgactacgtgaatgcacgtggcggacacgtcaaactgatgcctttgcctgtgagtcacttgtttatttaggtattcatgttcgatgttctctttgttttcaaggcgcccgctcaacaggaatgggtgaatttgcactccgcacttcttgacgcattggaattggagaaggcgaacaacgcgaatctgctgaaactgcataagttggcttctgacaacaatgaccccgatgtgcgacgtagggagcagaaaaacccattaaattttgcttttagtttaccaacttcctcgaagagttttacctccgtgagcaagtggatgagattcagcgccttgcacgcatggccaatcagctgttgcgcatgggtaccagcggactcagcgagcacttgttcgaccaggaactccgaaaagggacggtgctttcggatgaataagcgatggaacacatgggaccaaggaataatgcgatttaatgagtctatcaaatgcagttaattataatacctaattagaaatggaattttaaaaagcacgaagagggttaacaaataattttttgtttatgatcattgtttttgaaatatagaccaaatgacaaaacgccaaaatggatcaggaaaagcctcaaaattccattcctaatgtgacagttttattggtcgatgtctgtttaacaaaattaatccccaattccactaatgtaatgtttaatgatacccatttattaagtataaaa

SEQ ID NO: 78873 - DNA, 1123 bp, Heterodera glycines
atgccgatgttggcacaaagccaaaagtgagtttaatcgcaattgtcgggacggactcaattcgattttattttttggttgggtaatccaattaagtgttttagacaatttaccttatttttctttctcaaccaacaaaacactgaaatgatttcaaggggcccaaattggcacagaaaatgccaacggttttttcctttcattttgccaatttcgcttcagctgccggcatccccgactttcgggggccccgcggcgtttggactttggagcgacagagtcgcgaggcggacagtgtccgctttgagtgcgctcggccgacctttgcgcactttgcgctcaatgcgctggagaggcgtggcattgtcaagtttctaatcacccaaaatgtcgactctctgcacgcggccgcgggctttccgatcgatcggatggcggaattacacggcaatgttttcgtggagaaatgcgagcggtgcggcaggtggaaaaaggggaaacagacagagttagacacacagagttagaattaatccaaaacttctccaaaagggaattcccaattccatcggcagggctttttctcttacaatttgaaccattctttttttatttacataaatttgacttagttttaattaagttttttttgctggtgacactaaaatttacaccgaattgtattagagacttttaaacgattgaatcactgaaaaacttttatttttgatggaattccgttggaaaacactttaaaatttgggacagctcgtcctcccgaaaaattttgtggttttcgccctttatggaagtgataaataaataaagaaaattaaatttaaaaatatttctccgactctcagaaaattcttccgtccgtcgcccattccgtcgattggcctcaaacccacggggcgaagttgcgactcggctcgcccgaggggaaaatgccgcggaaagctgcgcgacacaacgctcgactgggaggacgcgctgcccaccgccgaattccaaagggcgtgggaatatgccaagttggccatggcaagcggataatttgtgcatgcatttgttttccttcagaagggccgacctcgtcctctgtctgggcacaacgctccaa

SEQ ID NO: 78874 - DNA, 1151 bp, Heterodera glycines
gacgacaagcccctgaagggatcagaccgattaaaaatcagcagccaaaaggacgaaaaagatccgcagggaatggtgttgttgttggacattcacgaaccacagaaggaggaccaggccaagtgagacaaacaaatggggtgggacaaaatgccgacaaagacagaataaaatgctgacaaaaatgagaacgtgacgacaaaattggacataatattgaaaaaaatgggacaaaatgtcgacaaaaataggaatgtgtgggaaaaatgggataaaacgtcgacaaaaaggaacaaaacgtcgacaaaaatgggacaaaatgaaaacaaaatgggacgctgtgtcgacaaagacagaataaataaaatgttgacaaaatggacaaaatgatacaaattaacagaatgttgacaaaaatgagaacgtgtcgacaaaatgggacaaaatatctactaaaaggaacaaaatgtcgacaaaaaatgggataaaatgtcgacaaattagcagagacaaaaggtcaaaataagtagacaatttatagttgctaaatactagaaaattataataaataatagaggaaacaatgggaaaaagtgtcgacaaacacgcgaaaaacgacatcaaaaaaacaaaatgtcaaaaattgtttgtcgtgaaatgcatagattaaacaagaagacaaaattgccacattaagagggcacaaatggcaaaatgtcccaacaaaattcaaaaaaattgcaaattcaaaatttaaaatttttaaatttaaattttcgaaatttttttaggtacaaatgcgtggtgaaaaacgcggagggtcgcaatgaacagtcgctgaacctgcagtttgaataacagcaccagccaggcgatgaaaatccgatgaaaattttgagaaaaaaaaattggcaagaaattttcggcaattttttcttgccaaattctcgtgccaacctttgtgtatcttttaatttgcataaccattattcatacaaataattagcttagtaaagcatgaaatttcgaaatggtatttgaaaaaatcttttaaaattcgagaaaacgtggcacaaaaaatccggcatctccgaaaattcaaaatttttttaaaaattgaaattttaagacaatttttttaaaaatgtaaa

SEQ ID NO: 78875 - DNA, 1933 bp, Heterodera glycines
atgtcgggaggcaaaagcggcaaagagagaacccttctgaattttagtctggccggtttagtcagagggtcggtttagtctggcaagtcgttttcgccttttcgcccataattcttacaaatgtttttttctgtcaattatttacaagtaaaaacttaaaatactatgtttagctacaaacacgaatggggaacaacgcaatcaggaaataaagacaaagcgaaacaagcaaaagctggaacatgaaggtgcactttatgttcttcaccaaatcagtgacgatggacttcggaagtattggcgctgcgagtttttcggacctaacaacaaatgcaaaggtgtatgcaaaaaataaaatatagattattttttaaattcagggcgacttcacactgacattaatggtaatgtcctcaaaattattggaagccacacatgcgacatgagtgccgcacaagtggaatgtcagcgacgcgtgacccagctcaagcggcgtgcagttgagacgtgcgaagcgcctgcaacaatccgtgcgcaagtcttgcagaatacagcaacccccgtgttggctgcttttgctaccaaagctgcgacaaaaaaggtcaacttttacgaatttttctgccaaagtatgatttgttcacttattttaggttataaaacgtgttcgccatgacgaagatgtaccacctgctgcaccactcagtttggaagcattggaattgccgcctgaatacagaatgtacaatcgaacagagactgaagaggagaatttcttattggcggacaccggcgtttttcaaattcagggacaggctggaccgcaaaggtaaaaaaaataaaaccattaatttttaaaaaattccgtgttaagaattctgatatttgctcgcgcttcgacttcggaatgggccggtattatgaaaaatgtgtacgcagatggcactttcagtttggcgccgcctttgttcagtcaaatttatgttctacttacaaagtaaaaccttaatttttaccacttttttttgtctttttaggcgtgataaatggggttttccgattgcgtactgccttctcacttcaaaatgtgaagtgatatatacacacggatgctttaactgattgtccaaagatggccaaattttgcacctgacaccatatcgttggacttcgagcaagcgacggtcgctgctgtccgcacagtctttccactttgtcgtgtgcaattctgcttttttcacttggtgagaagtatgaagaaacgaattgcttccgagggtttaacacaggcattgattgcatttttgtattttccaatagaatttttcatattaagacatacaacaatgatgccgtctttgctgaaaaaagcaaaatgatcacttctatggcgttttttcctgtccaccatctccctgctgccctcaatgctttgcaggcacaacttcctcaacaacttatgggcatcttaaattggtgactttttaggaacgaaaaattaaaaaaattattttaaaggttcatgtacaattacacctgaaggccgatgttcaatgggctttgacagtgcctcggttcgcatcggatgaatggagtgtgcatcaacggacgttggatggaggagacagaaccaacaattacgcagaagcataccatagaaaacttcaacgggcatttgattgtacacatccaactgtcttccgcttcatcaacacaattcgatgtgagcaaaagtctattgatgcagaaatctcacgatgcatcgctggtgaactccctcctcaaaaggcgcccaaatattgtgccgccgatgcgagaattcttcgactcttgcagagctacagtgccatcaacaataaccaggctcaccaaaatgatcacaattaccatgcccttatcaataacccctataacatcatcaattttctccttg

SEQ ID NO: 78876 - DNA, 1368 bp, Heterodera glycines
atgctcggctacgcggatgcggagagcgctagtgataataagagactgaggtatgtgctcttcttatctccttttgaagttgttgctcttattttaaacaactttgcggtgttttgatgactttgcgattttgttgttgctttgcagtaaattgcaagatttaataaaaaaacgcaaagcaatgattaaaggatgttcagaatgaaactcatggaaacacttaaccagtgcataaacgctggtcatgaaatgacgaaggctatcgccattgcacagtttaatgatgacagcccggaagcgaggaaaataacccggcgctggagaataggtgaagcagcggatttagttggggtttcttctcaggctatcagagatgccgagaaagcagggcgactaccgcacccggatatggaaattcgaggacgggttgagcaacgtgttggttatacaattgaacaaattaatcatatgcgtgatgtgtttggtacgcgattgcgacgtgctgaagacgtatttccaccggtgatcggggttgctgcccataaaggtggcgtttacaaaacctcagtttctgttcatcttgctcaggatctggctctgaaggggctacgtgttttgctcgtggaaggtaacgacccccagggaacagcctcaatgtatcacggatgggtaccagatcttcatattcatgcagaagacactctcctgcctttctatcttggggaaaaggacgatgtcacttatgcaataaagcccacttgctggccggggcttgacattattccttcctgtctggctctgcaccgtattgaaactgagttaatgggcaaatttgatgaaggtaaactgcccaccgatccacacctgatgctccgactggccattgaaactgttgctcatgactatgatgtcatagttattgacagcgcgcctaacctgggtatcggcacgattaatgtcgtatgtgctgctgatgtgctgattgttcccacgcctgctgagttgtttgactacacctccgcactgcagtttttcgatatgcttcgtgatctgctcaagaacgttgatcttaaagggttcgagcctgatgtacgtattttgcttaccaaatacagcaatagtaatggctctcagtccccgtggatggaggagcaaattcgggatgcctggggaagcatggttctaaaaaatgttgtacgtgaaacggatgaagttggtaaaggtcagatccggatgagaactgtttttgaacaggccattgatcaacgctcttcaactggtgcctggagaaatgctctttctatttgggaacctgtctgcaatgaaattttcgatcgtctgattaaaccacgctgggagattagataa

SEQ ID NO: 78877 - DNA, 811 bp, Heterodera glycines
taattaaatccattccttcgggggaccgtgccgggtgccgcggggtaagcagtgctggttcgtttcatcacggcaccgaaccttttggctagtcagcaatcgttgcttaacttgccagatcggacgggtgcgcatgattccactgttccaagcaccccaccaaaagcaaaacgatataaccaaaatataaggaaaaattttttaaaaaattttttctccatcttcctttttgatactaaagcatcagagtgctaaaattaagttgtaaataaaatttggtgcgctttagagcactttctgaaaaaaatatttatgaaacaaaaaaatcgattttttcaagtgtccgtttggggtactcaaacaattatggggagcaaaaatccaacgcagaattaaagtacaggctatagggaagctattcccgaaggattcggtctccccataaatctgggcgcatcggttcggggggactgccccgaaaacaaaaaaatcgattttttcaagtgtccgtttggggtactcaaacaattatggggagcaaaaatccaacgcagaattaaagtacaggctatagggaagctattccggaaggattcggtctccccataaatctgggcgcatcggttcggggggactgccccgaaaacaaaaaaatcgattttttcaagtgtccgtttggggtactcaaacaattatggggagcaaaaatccaacgcagaattaaagtacaggctatagggaagctattcccgaaggattcggtctccccataaatctgggcgcatcggttcggggggactgccccgaaaac

SEQ ID NO: 78878 - DNA, 497 bp, Heterodera glycines
cgatttggctgcaggaaaataactgatgatttggtgacccgaatcgaaaatctgacggggaaaaaagcacatgcgatgttacggcgtcgcctcttcttcgctcaccggtccaattggaactaaattttgttgcttttggtggtggggggggggggaagggcgttggaaaaaagtatatccgatttcaaaaaaacttcatttttctctttagtgaccttacatcaattttggaccggtttgagcagaaaaagcccttctatctttacaccggccgtgggccgagcagtgggagtctccacctcggccatctcatcccatttttcttctgtaaaagtttacaagactcttttgacattccgctgatcatccaggttcgtatttccatcgtcaaaaaggggcgtacgccggcacttcgtcaggggatgaattttctattggcagattaccgacgatgaaaaatttttgtggaaagacatggacctggagcggtctaaaaa

SEQ ID NO: 78879 - DNA, 638 bp, Heterodera glycines
atgagtgaggagcagaaggaatatgaaatgatgaaacttgtcgattgtatggacaaaatgatggtattcgaagaaattaaacaggtaataaacagaaactacaggaacagggaatgatcaaaccgggagtgattggagaggacggaaaactgagacaagcgaagcacgtggcggaactgatcaaagatgtgaaagaaggggaggagagcgaagaggactgaaaccagggagagaggagggtaataccgcagaattgtggtccctattaaaaattaaattaaaatttttttttgtttttcctggtgcaaaaataaactcaataactttgcaaactctgagctcacaaccagataattaaacggcatttttacccaaaataaaaatttaaccttgttttttatcgggaccataattctgccgggaggagaacacacaaagtgtgagagtgatctcgaaaactagtcaaaacaatctcacaaatgattttggttctcctttttgtaattctaaacaaaataaattaaaaaatcaacagtttgaagaacgatcacttcatttttctttcgacaatttgttcaaaaacagtatttctcacgaaatcagctaaaagtcatatgccaacttccttggcgtggtga

SEQ ID NO: 78880 - DNA, 454 bp, Heterodera glycines
tggcctgttactaatacaccatgaatattcgatctgaccagcaccggtatcctttttgcattgtttggacgccaatccccctcatcagttggttatttccctttattggacacattggtattgcaactagcaaaggtataaacaattctttcctttttgcaatattaaatttaaagctgcagttttttaaattgattatattttttgagtagaaaaggagataagcggataattactaattaagttcatttaattgacaaggtataattcgtgattttgccggcagcaattatgtctctgaggacaatatggcatttggatggccgacgctttatcatcaactaaatcctgaaaaagttaatggaggttcagaggcatgggataattctgtggcagaagctagcgatgtaagcatattttattattccaacgtcgaaatcgcttttttaggaat

SEQ ID NO: 78881 - DNA, 956 bp, Heterodera glycines
atgacttcacgaaaattttttgtcggtgggaattggaaaatgaacggcacttttacgtcaatcgctgagttggtcaatttgctcaaccaaagtggtggtaattctgacgtggatatcgttgttgcgcctccaggtcagttggatttactgtggaatatatattcaattatcatttctttaattaagcaccttttcttcaccatgtgaaacaaaaattggaacatggcatccaagtagctgcacaaaactgttacaaagtaagctaatacttggcaaatttggtaaaatgttcagttacaaaggttgccaaaggcgcttttactggagagatcagtccagaaatgatcaaggacgtaggcgcgacttacgttatcctcgggcactctgaaaggcgtcacgttttcggagaagaggacgcattgattgcggagaaagcggcgcatgcactcagcaccggtttaagtgtgatttattgtattggagagaaattagaagagcgtgaagcggagaagacaaaagaggtggtagagattttaatttaatctattatactaattttacgcaagatttaaggtgaatttcaaacagttggaagctttactttccgtcaaaaatttggtctggccaaagatcgtcattgcttatgagccagtgtgggcgattggcaccggaaaaaccgccacccccgaacaggcgcaggaagtgcacggatggatccgcaaatttttgagcgagaaagtatcgcaagaaattgctgagaaaactcgaattatttatggaggtagtttattcaattctctgatatatattcagcgtttaaatgctttttttgtctaggttctgtgacagccgaaaattgcaaagatttggcagctaagcaagacattgatggatttttggttggcggagcatcgcttaagccggattttgtgaacatcattaatgcgaaatcctaa

SEQ ID NO: 78882 - DNA, 188 bp, Heterodera glycines
  unsure (1)..(188): unsure at all n locations
ccatttctgagctttttagtccatataatttcgagccctactgatggcactatttagtcatttttaattttattatttgtgaatgggctgctactaatacaccatgnatattcgatctgaccagcaccggtatcctttttgcatttgttggacgccatccccctcatcagttggttatttccctttat

SEQ ID NO: 78883 - DNA, 1221 bp, Heterodera glycines
atggcccaactgtttggctttttcgtttgggcccacgcacttttccattgtgagtgagcaaatggaaaacaaaaagctcaccgaaaattgaactttgaaaaattaccaaaaaaagaattttcctaataaacttaacaaatcaaaaaaaaggaatgaaattttaaaaaatgaatttagaattttttgtatttcttattttcttttttcatccatctctcccaccattagagcacgggaagggattttttaaagtataattcattttatagttgtccgaattggaccataattattatattattatttatgtgaattttttgaaaaaatttaaatgataatttatttttaaaacattaaagttttattgaaagttagctgatgaatatttggaaatgaatttgaggcatacttttgaaattttccgtcaaaagaaatagggctgttatggtgccttttacactttgtccctgctcttcccaccagacattttgaatgtgcacaaaaatggttcaaaattaaaccagggatttcatgccaggtttaagaccggctggtcgacgagtacaatgaaacagtgtgagaaagagtattttttgagtaaaattttaattccttagcggttttttcaattttattttactgtattttaccaattcctccaaatttatccttttcactcatttttagtggcaatcaaatggtgcgcgagagcaaaagccgcctgaagaggctgaactggtcaaatcgacgctcgctctgctgctgatgcgtcggtttggcaatgagctagctgtgtgtgccgcgttaaaaattgtcaattaaacccatccaaatattgttttttaattaatttgagtggccgaccgaattaattttttttttaatttggcatttttgttttcttagtccattaatatgtacagtattccttgtatttatgaaatcacaagaaggaatgcatttctgattaggagcttttcaggggggggaatgattaatcattgaaaaacatccccctgagcgaatttaagaaaataggcaaaaaaaaagaaagaaaaaagagtggagaagccaaaacatggggaaatgatgacgaatattgcgtaaaacgacacgaacgaatattcttcatttctccatttttgtcctctccatttaccgtttaaaacattttgaaaaatatttgtttttttttgatcgccaatttttttttgccgacaa

SEQ ID NO: 78884 - DNA, 1086 bp, Heterodera glycines
atgaacggagctgctaaaatgtaatttttgcgcaaattaaattttttggtctttaaattccttattaaacaaatttgctgaaaactttattaaaataatattcaaaatttatgtatataaataaaaaccattattattagtatttaaatgaaatgaaataccatatattaaattgttaaataatattttctttttccagtttttgtccttacaatcatttttgggccactgttagccgttgcattagctctgctgtgtggcatcgggatcaaagtcttagtgaaaagaggtacagttagattttaaaccaaaccacattaatagcttataaggggtgggaccggtgagtcgggggtcgttctagcgtcaaaaatacgaaatcgcatacatcatggctaatactagagttgagcgggaccggaatttttggcaaaaccgggaaaacccgggaatttcccggtcccaatcaaaactggtcaaaaccgggacttggtactcagttgtccgtcttcaggtcccggtcccgcttaactctagctaatactatagatggtaggggcccttttaggaagaaaaaattttttttttaaatcgtgaaaacatgtttatgggggttttctgggccggataacccgaacccaacattcattttgactaatttcgaattccggacccgaatttgaacaaaaaatctagaattcaaaattttcaaaattctcacttttgttcctaaattgaccataacaagctaaatttagtctaaacccatcgaaacatcaaaaatggtcattctgtacaggtatgaacataaaagtgaattttgaaaatttgaatgtttatctttttagaaaaaaaataattttcttccgaaaagggggacattgcatctatagtattacgcacatgactgtatgccacaaatcttgtattttttgggatttctggcgtaatgatgacaagttctgcttttgaaagtcaggtttctgcggtcagacgctaactgcatgaacctgtcaaaaatgacaggttttttccggtcggggtcgttttcgcgtgagggccattttcgcgcacccccccccccta

SEQ ID NO: 78885 - DNA, 521 bp, Heterodera glycines
atgacagcatttggagaacaaatgaagaaaatgaacaagcgaactttgaagaaaatgtgagccaaacaatggcattgacaatctttgttttttgggggaatttcgaccaatttccgcattaaatctaaacagggaagtgaattttcgactttttgttcgaattcggtacaggggttcgaaattggtcgaaattaatgccggattcgtgattaataatctccaaaaattatgtaaactcaacactctttcagctggatttgtagcgaggttttgatggacattcttccgttttttgaccgccctcaactcggcctcaaattggcattactttcgccccgtttcaatgcgctggtggacacgcatttcgatgacaaaacgacggaattaacaatttggaaattgataaaaattaatggaccaaagccgcaactatctgttctaattgatggcaaatttgtgggttttccattgcccgaccgtccgctgcccaacaaaattcgatttaatcaacttcggattga

SEQ ID NO: 78886 - DNA, 596 bp, Heterodera glycines
aaattttttgaatattatacaatcgtgctttttgctctctatcaatttattataaaaaaattcacttcccttcgaaattgaaggcagaatgctcatttgaaactacgcaaatataaattaatatttgctataagaactgactatttagtcaacagaaaataaataaatcataaaattagaacaaaaaatgattttattttagaatgcacactgaagatgcataataagctaatatattcgaatttattttgaaataactgttcaacagattattagttgtttctaagaaataatgataggaagcttatctgaaatgtgtgctcacccaggttggaatttgtcatttcctgcaataaatgttttcatataaaggtttaaaaaatttgatcgggtttaggaacattcaacaaatgcatagataaatttttgaatattatacaatcgtgctttttgctctctatcaatttattataaaaaaattcacttctcttcgaaattgaaggcagaatgctcatttgaagctacgcaaatataaattaatatttgctataagaatcgactatttagtcaacagaaaacaaataaatcataaaatt

SEQ ID NO: 78887 - DNA, 516 bp, Heterodera glycines
atgacaaattccaacctgggtgagcacacatttcagataagcttcctatcattatttcttagaaacaactaataatctgttgaacagttatttcaaaataaattcgaatatattagcttattatgtatcttcagtgagcattctaaaaaaaatcattttttgttctaattttatgatttatttgttttctgttgactaaatagtcagttcttatagcaaatattaatttatatttgcgtagcttcaaatgagcattctgccttcaatttagaagggaagtgaatttttttataataaattgatagagagcaaaaagcacgattgtataatattcaaaaaatttatctatgcatttgttgaatgttcccaaacccgatcaaattttttaaacctttatatgaaaacatttattgcaggaaatgacaaattccaaccgagcacacatttcagataagcttcctatcattatttcttagaaacaactaataatctgttgaacaattatttcaaaataaa

SEQ ID NO: 78888 - DNA, 592 bp, Heterodera glycines
aaattttttgaatatcatacaatcgtgctttttgctctctatcaatttattataaaaaaattcacttcccttcgaaattgaaggcagaatgctcatttgaagctacgcatatataaattaatatttgctataagaactgactatttagtcaacagaaaacaaataaatcataaaattagaacaaaaaatgatttttttttagaatgcacactgaagatgcataataagctaatatattcgaatttattttgaaataattgttcaacagattattagttgtttctaagaaataatgataggaagcttatctgaaatgtgtgctcggttggaatttgtcatttcctgcaataaatgttttcatataaaggtttaaaaaatttgatcgggtttgggaacattcaacaaatgcatagataaattttttgaatattatacaatcgtgctttttgctctctatcaatttattataaaaaaattcacttcccttctaaattgaaggcagaatgctcatttgaagctacgcaaatataaattaatatttgctataagaactgactatttagtcaacagaaaacaaataaatcataaaatt

SEQ ID NO: 78889 - DNA, 760 bp, Heterodera glycines
atgggcacaaaggggaatggtaaagggaaggcgcagggcacggcacagggaagacgcagggcacggcacgggaaaggagcagggcacgggaaaggcgcacgggcacggcacggggaaggcgcagggcacggcacgggaaaggcgcacgggcacggcacggggaaggcgcagggcacggcacagggtaggcgcagagcacggcacggggaaggaatggaaacttcggagggaaccaatgagcgatctgaaatcactgaaaacccagccccttttatacggcttttttgaaaccatagtacgctccaatttataatttttaattaaaatctgtttttgttatatccgtttgggttttgcgattttcccattaattgtttgttttccactttttcctttacaattccaattcctttaatatattcaattaattattaataatttgtttagaacgcaatccttaacagaattcgccatttaatattaattaattttcgttcctttcattcctgaggaaatgcacttttccttttcaaacaattttccgttattcatttcaaaaggttttcaagaagtcaggaaaatggagaatgggccgggcttttataccctcacaaatcaatgggggcggggccaggcacgtgaaaaatgtgcacaaacaaatagaaaaaaatccataaaaatatgaggaagagagaagatgactcataattaacgagcgagcgaatgcaaaattgatcgatgaaaaggattaaaaaataaa

SEQ ID NO: 78890 - DNA, 514 bp, Heterodera glycines
  unsure (1)..(514): unsure at all n locations
attgaaggcagaatgctncatttgaagctaaaattaatatctgttataagaactgactatttagtcaacagaaaacaaataaatcataaaattagaacaaaaaatgattttattttagaatgcagactgaagatgcataataagctaatatattcgaatttatttgaaataactgttcaacagattattagttgtttctaagaaataatgataggaagcttatctgaaatgtgtgctcacccaggttggaatttgtcatttcctgcaataaatgttttcatataaaggtttaaaaaattcgatcgggtttagaaacgttcaacaaatgcatagataaattttttgaatattatacaatcgtgctttttgctctctatcaatttattataaaaaaattttcttcccttcgaaattgaaggcagaatgctcatttgaagctacgcaaatataaattaatatttgctataagaaccgactatttagtcaacagaaaacaaataaatcataacgaatt

SEQ ID NO: 78891 - DNA, 665 bp, Heterodera glycines
atgttagcaaaaagtcgtggaatcgccgccaatcaaaaggtgggttttatttgaaaagggtgggaaaatcagtttttacactgctgacataaattttcatcgcctttggcaaaattaatcagccgaatttgatgatttagggggcgtaaattttgaaaaattgtggttgtgcgataggggctttgaaaatttgataaattttcaaaatttaaatttttttggggggggggcttgagtttgctttgttttttaccaaaattaaacaaaacatttttttttttgctttagaaacagattctcatcaaaaaattgactgcaaacttcagcggcacacatcaacaacacaacaccaacacaaatggacaaaacgatgatggggacggcactgacaatgagcaaagtttcggcgacggcacatatggacaaagcgatgatggggacggaactgacaatgagcaaaattttggcggcggcggcggcggcacaaatggacaaagcgatgatggggacggcactgacgatgagcaaagttttggcggcggcggcggtgacaacaatgttgagggagagcaggaggggggccagcaacaacaacagtccactgagtttacccgacgtcaaaaaattaaaaaaatatttagaaaattaaaaaaatccttttgaaa

SEQ ID NO: 78892 - DNA, 553 bp, Heterodera glycines
atggaaagcttcaaaaaagattttttggaggccaaaatgaaggcacttgtggaagagaaggtggccgaggcaaaagaattggcagaatttgccatcgctgatgcggagcgcaaaatggaacaaagtttgaacaacgcaatacacgctgaacgtgaaagaggccaacaacagttacgctctgtagtagaggagcaacatatgcgctgccgacacctcgcactgcaaagctaccgcgccgcaacaatgacaaaaccaacatccgttcgcacctccgatgtgtctcccaaatgggagccacattgcatgttttgtctgatcgacgaaccgatgtttgggagtgaatggtgcgcacatgtgaatgtgtgcgctgaatgctcgatcgtatggtcaggggatgatcagtgcaaatgtttgacttgtcaaactacatgtaataagtttgtctattttgggcctaatccatccccctaaactttcgcattttcctttcattttttagtaatgccatttttaattcataaatgaaaaaatgatttgaagcatttttattaaa

SEQ ID NO: 78893 - DNA, 1284 bp, Heterodera glycines
atgtcatcatcatcatctcccgaaaaaattttggctcaaccttcgtgcccaaaaaaggcaaaagtggacgagcgagctctgtggaaaattttcaaaggcaaatatatgttggcaatttatctctgcgatgatgactggcggaatctgttcgagaacaaagagaaagttcgccgaatggacaacgaccgtgtggccctaaacttcgaaatgtgcgaaaattgtgctcgtgtgaattgcaacggaacggacatattgactccgtcaaagaaacgaaaactttcaaccgatcaagcctaatgatatcatgatacctttcttttattattattatgtgatttgccctcaactaataaaaaataatttaattcaatttgcgcaatggtggctggggatgggggggggaaggtagccatctgtcggcagctacatcgcatggttgttgttgttgttgtgttgttcggcaaatatcctcacacactctgccctcatccttttccttccttatttttgcattttatctcccaccctcttcacggttaataaaaatgagtgcaaattccgcatcggttgaaagtgaaattgcgtcactgaaacaaattattggcgcacagtccgtaaaattgatgcagatgcgtcatcattttgtgaactaccgcttcagacttgagcaacttgaggcttgggccggggaagtaaggtattcaatgttttttgtgatcacagtttttaacaaggtaaagacaaaaagtttgttcgttcaccaacacgcaacaaacgattttctgtggacgacgagccagcaacatcggccgcaacttccggtaagggtagtgtaatattactgggaacagtgcgctttttcagatgggatggcaatggaaagcttcaaaaaagattttttggaggccaaaatgaaggcacttgtggaagagaaggtggccgaggcaaaagaattggcagaatttgccatcgctgatgcggagcgcaaaatggaacaaagtttgaacaacgcaatacacgctgaacgtgaaagaggccaacaacagttacgctctgtagtagaggagcaacatatgcgctgccgacacctcgcactgcaaagctaccgcgccgcaacaatgacaaaaccaacatccgttcgcacctccgatgtgtctcccaaatgggagccacattgcatgttttgtctgatcgacgaaccgatgtttgggagtgaatggtgcgcacatgtgaatgtgtgcgctgaatgctcgatcgtatggtcaggggatgatcagtgcaaat

SEQ ID NO: 78894 - DNA, 735 bp, Heterodera glycines
atgccgagtttaaacaaattatcattttatgaatctgaaatggtactcgtcaatgtgttttgtgctcagctattagactgtcccgtcaagtcactgcgcgaccgacttaaccaccccgaagattgtgtaaatgcgatgaatggattgatggggaagaaagttcgaacaacctacaaagatcgcaatgggatgcacaaaaccttttttgtcagcggtatcacggagcgcggtgcagctttcgttccggcttatggcaatctacgggcaccatacaacgtaaatgtggccgcttacttttatgcacggcatcccataaagctccatttcccttacgtgccttgcgtaattgaacgcttttccgggagaggtgaggaccgtttctacccaatggagttgctggaaattgtggatgaggaaaacaaagggagattgtttggacgaatgtttatggaaattggtgaagatgatgatgatgataatgacgaggatgtttcaacatcctttgactcaacactacgatttgatatgggacgcgatgagtgttcccaattatggcgatgatcaatatttgcaatattcatcttctattactaaactatgcacttttctacctaaaaatagcattttcacactcttaattatttaatcaatatattagtttttcactctattaattcggcatttttctacccaaaacagacaacttcttttttttcatttattcaaattcacaaa

SEQ ID NO: 78895 - DNA, 1482 bp, Heterodera glycines
atgttttgccgatgggctgctgttccgattgtcccttcggccgatcagtccaaaaatgagacgccattgggcgccgaactgttcgtctcctccacaatgttggcaaatttgcatttaaccctgtgctaattttagttcatttaatttacagaatttcgcgcaaattggcactgatcacgcgccgaagacaattcggggctttccatttgtcggatgatcagttggaatatggtaaaagaaaaattggaaaatgatttgaagatatatatcaattgactgattaaaccgccgctgatagggctttttatttgcccaattatcagtcctcgtacagtatttataccgtatcgtatgaccaattagggcatggtaatagacccctaattcgatcgtaatatgactgactatccaattataagtttgggtacggtatttataccgtatgactaattagggtatggtaattgcccctaattcgatcctaatttgttgtttttgttttactgagtctctctggctaatgcccttgctcagatccggccactcctcgtgaccaccttccactcgacgtgcacttcttcttccacccttcctccccttctccgtcttcttctgccgccgttttcctctccaattgtcccaacggcactttgggcgtcgtcacagtgcgctgcgagccaagcgttgtggcaaaaccattggttgctttttttattaattaactttatttaattttaatttaaaatttaattaggcccgcctttcacggcattgccccgatgggacgtgcgacgggtgcctttaccacgtgctggtggagacagtgcacggctgtccgctgtgccgtgctgatgattttcgcgaaattcgcggcgaatgtaacaaaaatggaggggggggggaagggataatggttagagatcgacctggaaacctgaatccaggtctagattttcctgaaaccaggtccaaacatggaatccaggtctaggctttttcaaaatgtcaatctttaataatggataaccgattgatcggcccgaaaatggaaattttaattttaaattgaaattgaaatttccaaatttaatctttgccaggcatcgacgggtcccaaagtgtccattcgctgccctccaaacattgcgctttgtcgggcgcccaaacgcgcgaacggacggagccgtgccgggtgattctgtcccaaaatgtgcgccttcttttggcggttgccattgtgctgatccttttcctcagccttatcatcgcggccatttaccggcgaaacaaagcgtaaaaattaaaaacatttaattaatttatataattttaattgattttagattggaatatcgttatatgcgtttggcggaagggcgagaaactgatcagagcgtgaggacgagctgtgcactgatcgaaagtgatgtggacggatcagaggaagaagaggaggagggcgtaaaacagcaagggcaaaag

SEQ ID NO: 78896 - DNA, 2251 bp, Heterodera glycines
cctccaccgcctccgccaccaccagcgtacgagccaccagaagcgccatgcaatgagccacagcagcccccaagctacggagccccggcgccgcctccccctccccctcccccaccgccgcctccaccaccgcagccgccagcgtatgaaaaaccagaaccgccaagctacggagccccgccgcctccgccgccaccagcctatgagcctgccccaccaagttaagaagcaccggaaccgccaagttaccagccgctcccgcagcctccgccaccgcataagcctccagcgaaaagaatcaacagataccaaattcgagaagacattattattttatttgagataaattaacattttgttatatataaaataaatgttttgagtgaaattttcctactaaaaaacgaaaaacaaatcgcagaaatgtgaaaaaatgttaaaaaaggctttatctataataattatgctttaacaaagttgattaacaaacaatttattctttaaatttaaatatgttcaaaaaacttagaaaaaatttttaaattctttttttttgcgccggaagtctgatacttaatacaaaattgatctttatagtttattttatttcatttattaacacaattcttatgagaaatcggtgttgcgtgtgaatttttgaatttgaagcggaaattccatattaattataaatctcaaacgctaaagttttaagatgtagataacacaatttaaatgcattatgaaattatttaatattaaattcatttaaaataatttttttacattttcaaaaattaattttatttgcgctaaattaataaagaataaaactgaaaaagtttactttaaaacaccagacaaaagtgttttatgcaatggaaattaccaacaaaaattccagaaataaaaatatcactgacagaaaatatgagtttttgcccaaaaattatgaaataataattctcgaaatcagtgatgtaagctgataccactcctaatttgcctattttttcggctaccgcttaaattttctaaaataaagccgccgcctccccctccaccgccacctcccccacctccgcctcctccaccaccgccacctccatcgtatgagcaaccagagccgccaagctacggtgccgcaccgccaccaccgcctcctccaccgccaccaccgcctccgccgccaccagcctatgagcctgccccaccaagttaagaagcaccggaaccgccaagttaccagccgctcccgcagcctccgccaccgcataagcctccagcgaaaagaatcaacagataccaaattcgagaagacattattattttatttgagataaattaacattttgttatatataaaataaatgttttgagtgaaattttcctactaaaaaacgaaaaacaaatcgcagaaatgtgaaaaaatgttaaaaaagctaaagctttaacgaagctggtttattctttaaatttaaatatgttcttaaaaatttatacaaatttgctaaaaaattttgcgcctgaagttaagacttaaaactttatggttaaacttttttcttacattttacggaaattggaaacccccaaaaaaaggtttcgtgttcgattttaacctgagacttgtgtttttttaaatctgccacttcactcaacccttcttttcacaaaataatattacaatcctcactaatattatccatagaaagaaataatatttaaattcaagaaaaatataaatcaatacaaatatatagaaagcataatatttttccccaataaattgccaacaaattttcattttcatttcactcatttcaaaaaaatgctcccattatcattaatgactgtaaccactcttgttctgctactggtagccaaaatgaccttcggcgatcccataacattcaaatttaaccaaaactataaacatattatttatttcttaattgtcaacaacgaacaaaatccgctccatgtttataacactaatgaggtagtaattgattcaagtgaattgcttggaaaggaccatgttgcatttattcgctatgctaaccaagaaaaacaagtggtttgttgttattccgtttaaatggagtataaaaaaggggagtgtacgccgcacgataatgggattgcactcgcttcagttattggctaaacggttttcaatttttttttaaatttaaatcttattttaggaccccaccattgtattgtctgttagcaaaataaatgaaaa

SEQ ID NO: 78897 - DNA, 771 bp, Heterodera glycines
tcaaaatgaaactgatttcattggctccattggtcatttgttcattattttttgtggggattcctgtcgtgctcagtgacgggaaaggggcgccaccgcctccaccaccgcctccgtcaagttacggtggacccccaccaagttatggagcggcgccgcctcctccgccaccgccaccgcctccgccaccgcctccgccaccaccgcctccaccaccgcctccgtcaagttacggaggacctccaccaacttacggagccccgccaccaccacctccgcctccgccaccgccaggctacggaggacccactacaggctatggagctccgccgccgcccggaccgggaccgtacccaccatcaccaccacaaaaatgtaaattgtttcttttgattattaaagcagccattaattatattttaggcaaaggagagggactgtcggcgcctaaatattgcgcgtccaacgtttactacgcatgctcaggcggtgtgtccacgaagctgaactgcccgaaagggcttgtgttcgaccaggcaaaccaagtgtgcaactacccaagcgattgcggaaagaaacagccgtaaaaacactcaaaaataaataattattaaaatttatatttattttaaggcctcaaccgcagcctccatctaaaggatacggcaaatacggcagaggaaaacgcgacgcgtctggagcaccgccagcacccgagccagctcctccaccgccacctcctccgccaccaccgcctccgccaccaccagc

SEQ ID NO: 78898 - DNA, 1750 bp, Heterodera glycines
atgaacattcgtccgtcgctgagcccagcggaattggacgcacgtcgacagctgcagaaagaatgtgcagagaagcgaaaagacggaggtgactgggtgatctatgctgggacggtcggacattcccaatttccgcaaaatcaattgacttatccccaaatcacttttgacaaatacatatttttcaccaaataagaatatcttttccggtcttaagcatgttaagcccaataaaccaatgatgaaaataggggaagttaaggtctgcttagttaatataagatcaatccacaacaaaattgatgaaatcgctttaaatttggtaaattaaaacatagaaatttttctgttaactgaaatatggacaaaggaggaaaaccaaatcctctttagtccatggataatcgaaaactataactttatttttttgtcatagaaaatctcaaaaattaacgcgtgggggtgattgcggtgttttaattaagaaagaaattgagtttttttattaaattttctgaaacaaaatataattgcgaaattttggtttttcaattacaaaaacgtaaatcaatcagatttgtgcttgtttaccgacgacccaagacaacatatagacaaaccaaagaactttttaaatttttagaaacattctatagccataattgtgttgtgttgggtgattttaatttcccgaataaagacctggtatggaaggaagggcagccctattctatgagtaaatttggtgaaattttttgccacttttttagtaagcttccttttttaatcgccacgaatggactcaccagggaaaattcgtggttagacttagttttaccagcgaatgatcaaattgtaaagcaatgtactattgaaggtagtgttttttcctctgatcatttagcgcaaattttcacattgactattccaaaaacactacaaaaaacaaaattcttttacactcgacgcttttctccgtcgaatgtgtccctttttaatattatgatttcttctagaattagcgctttatccaataagcattttactgtaaacgaaaaatacaacgcctttaataatacactgctagaaaccttaaacgagtgtattccaatgaaaagaattaccaaaaaagatatgaccctaaatatccaacgcatttaattgcatcaatcagagagaaagccagactgtataggcaatgtaaaactgatccatcaaaaaaaacactatatgatagcattagtttacacataaaaatacaaacaaataaatttcattctcaaattgaaaaaaggctatttcaaagggaagaaattctatctttaaatatatacaaaaatacgatgttaatccctttgaaataccaaatttagtttttgaaaacaaatgctatcatgtgtttttccacgataacatactataaattttttctttggcatccaaatccaacatttttggtagcattcgtaaagcttaacatgattagaagcttttatacttcgaaattttaaagttttttcttaataaaatttttctaggcttgaaaatcttttcgctttttgtaaagctaatagagcatgtgaagagctttcgaatgataccaacaatgttagatttggatgataaagaaaaaagctatagtggaaaagcatgctggggcccaaccgtgagggccgaactgacgggttccggccaagaaaccttctctcatttacctaaaaattcatgattattttgccgaaccaagtca

SEQ ID NO: 78899 - DNA, 1247 bp, Heterodera glycines
atgtacctggatccagccctgtatttttcctggatccagccaggtacaggcacaggccatttttcggcaacctggatttttcctgtacatttattttcctgtacttatgtacagaaaaaataggtacaggccagggatgggccgaggtttcgcttttcgcatttcgcctttcgcattattcgcattttttggcgtttcgcatttcgcttttcgcatttcgctttttggcgcgaaatgcgacttttacacccctaagaattggattaaattcccataaaatttttaaaaattttacctataaattggctaattttcagtgaaaacctgtttataaatgatcaaaatttccatttttttttccccggcggcgcctatcggcaccgccgcgcccccaaaactcctattttttcttagaaaatggcccaaaatcgcaaaattttgtaatttgatgaaaaactgttctcagcggcgccccaaaactcttatttctcattagaaaaatgataaaaaccacaaaatttgatcattagtagtatagagcgtcaaaagcgagcgggttccgagcgggtgtttaccgcacgaacccgtacctatgggaggggtgcagccctttgatgttgccgcccgtggacccaagcctatgggaggggtgcagccctttgaagttgccgcccgtggacccatgcctatgggaggggtgcaaccctttgaaattgccgcccgtggacccatgcctatgggaggggtgcatccctttgaagttgccgcccacccaatccaattcccaaatccgcacgggtgcttttttttgttgcctatccctccccgccgatgcatcgccgcgcaaattaatcgataaaaataatcgataatgacactagcactgtcctccctatcgatgtcgctgccgcgcaagcacccgtgcctatgagaggggtgcatccctttgaagttgccgcccacccaatccaattcccaaatccgcacgggtgctttttttttgcccatccctccccgccgatgcatcgccgcgcaaattaatcgataatgacactagcactgtcctccctatcgatgtcgctgccgcgcaaaaaaaaataatcgataatgagaccgccactctcatcgctctgtcgatgcgccgcgattccgagtcgtgaaaaaaaatcgataagcaccaaaattgtcaatgaaattcgaattaattgtatgatataggaatattaattggacaatagttgaataaa

SEQ ID NO: 78900 - DNA, 288 bp, Heterodera glycines
attttctaagaaaaaataggagttttgggggcgcggcggtgccgataggcgccgccggggaaaaaaaaatggaaattttgatcatttataaacaggttttcactgaaaattagccaatttataggtaaaatttttaaaaattttatgggaatttaatccaattcttaggggtgtaaaagtcgcatttcgcgccaaaaagcgaaatgcgaaaagcgaaatgcgaaacgccaaaaaatgcgaataatgcgaaaggcgaaatgcgaaaagcgaaacctcggcccatccctg

SEQ ID NO: 78901 - DNA, 1378 bp, Heterodera glycines
cccagggcaacacaataatcagccaggtttttttttttaattatcaggcctggctcggacgccggaaaaaatttgttggcgagttgtagtgttccggtttccaagaccaatccacaattcacacccaaaacaattttatccctaaagaaccaaggatgagacggaatgcactaaaattttatgaaatttttgcagaggatttgaccggcagtgttcgtctccatctcggcacttgcacatacgacgacggcctttactttgaaggcggcacttttgtgtttgagggcctttgttccccaagtggcgaccgcttggacgtggaacggatggcgttgccgacgatgaccaccttggaatccgctgaatcggttgatggtgccccggggcttgcaacacgtacacaggaaatggcacggcgaacacgcggcgatccgaatgaccgaattgtgctgatgtccgatgtgcatttggacaatgagcgggtttgtgtggtctcaaagtttttgcaattgaatttttcatccacggcgcaggggaggggtggcgaggcttaattaaaagtagtcaattaatgatgatgcctaggcccagaaaaccgatgcacttcaaaatatcgccgtcagcaaaactaatctgctccgctagaaaaacatttttttatttttaaggtattgaaagcactgtaccatcttttacaaggcttttcagccagtccaccgaacattgtaagcattttctgtcatgtctatatttcttaatttaaaccccttccccaaaaaaagttcgtattttgtggcccttttctcggcattcaacgggcgcacagttacatggagcaggcggccaacgcgttcaggcattttgcaaacattttgtccgaattttcgcacgcttaccacgccaccgaattcatttttgtgccaagtgctgacgatgcgcctccgttgcaaatttttcccaggcattacaaaaaaaaacaattagccattttttaccggttttcccccatttttaggcccactttgttgcagttgatacaaaaatgctttaaggaggctaaaaatgtgcattttgccaccaacccatgcaaattggtgttcaaggaccggcacattgtcatctttcgtgacgatgtggtggagaaggtgtgccgttcagcagttttcatgccaaaaaacgcgatggccagccgaataccaaaattggtgcaaaaatgggatttttatcacccaatttttgtatttttttggctctactcttcagttctgtgacacaatttgggcccaacgccatttctcgccgttgccactgttcatcaacccaattcaaccccattttgacccactgtttcaactgttcccgtctcctgatgctcttg

SEQ ID NO: 78902 - DNA, 834 bp, Heterodera glycines
accggttttcctgtttgcattttgacgccctgcagcaactcacatccttttgaggaacggaggtgtgtttttgctgtttcattttgatgatccgcccgggttgaattggttgctaaattttattttattcgtacagttataataacatcattttttggtcagaattttggtcacacggacggaggaagacgcggtgaaaattggccgatcggtggtccgactgcagccgtcatcgaacaacgcgatttttgactgcaaagtgattggaaatttatttttatcctaaccccaccttggatccaagcctagcctggacctggatttctttttaatttgttttaaaaggcaaacaattgtttgaaaaattaattgaaatatctcgaactatccattaaacaatttttgataactcgaaatgaaacgttggtcagttgaaacaacaaattctaattggtaagatatcatccaggaaatccaggtttttggtgcccaaatctggacctggacccagatttatcggcgtacattcataaattttactgtttaaacaaaaaattttaattaccaaggttttgtcacgaaaccatgccgttctgtgggcgaatggcgccggtcatttcatgatcaaagacacgcgctcatcaaacggcacattcatcaacaacgaacggttgagcgccagcggggaggagaacgagccgcgcgagctgttctccggcgacattcttcaggtgtttatttattacgcctgacatatcagttgagtccaaaaaaaaccgtggcaatttttcataatggcgtctatccctgaattgttcggtttacatccagaaa

SEQ ID NO: 78903 - DNA, 336 bp, Heterodera glycines
atgggaacaaagccaccggtgaccagcaattgtcacaacgacggcaacaccgaaattggcaaggcggcacggagggggcgagtgggggctgcaacggcatcggaggagggtgccaaatttgttcgggcgacggggcgatgggcggaggagaagggaaaggagcaactactggcagggggagaggaggcggcggagcaagaggaacagcagcaggatgaggaagaggaggagaaggaggaagaacaatgggaggaagaggaggaggaggggcgtaaattggcgacggaatgggaggagaggccggtagaaaagcagcagcgggagggggagggatga

SEQ ID NO: 78904 - DNA, 4352 bp, Heterodera glycines
tgattagcaccagcaaccggaagattcggctgattagcaccagcaacaggaagattcggctgattagcaccagcaaccggaagattcggctgattagcaccagcaacaggaagattcggctgattagcaccagcaacaggaagattcggctgattagcaccagcaacaggaagattctgctgttccaaattgggcggtccagctaaatcgaggcattttctgttcgatataatgatatcgttttaaaaataaacctgaaaggcgtgcatatatttgaaaaagaagtgcgtttgtacgctccatccgttcagtgtcggctctcaaacgctcgttggacccgatcagacgataaaccgcataacgcattcctaaattttgatgttttcattaagatattgaaattaatttcttagtcaaccacaacaaaacttttagcctaaattcaaattttaatatgcccgaacatctttagtaagacgaacgcaagaacgaggcgcactcaataaaaccagagcacgctcatcctgggagtccaactctcgaatgtacatcactaattaaaacaaggggttttcccttaaaattgtatttttgtgtagtatcataaattgacacccataattatctattattagagtccggtaaaaaaaaatttccgggagcgggagcgggatcgggagttcaaaattttccgggagcgggatcgggaatcccgtgaaaatcccgctcccgttaaaatcccgcagaaattttacgggagtcccgggcgggagcgggagtaattcgaaaatttaattaaaaactaacaaaaatatttttaatgcacaaatttgaaggaaaatccttttattaaagaaaaaatagataaaaaaatttataaaggagaaatttgaaataaaaaaatcacatttatgggtcgaaaatcagtattttttcaaattgcttcaaataaaattttttaataatttatttgttgactccctttattaattttaacaattttttgcggcttattttttgaaaaaactttttggtgaccagggaggaagagggagccggcggtgccgataggcgccgccgagaaaaaattgatatttgaatacaatacagtgtcagattatgtccaaaaatagccaatttttgaaaatttgaggcattttttaagaaaattaaggattttaagattccggcggtgccgatatctattatattatttgagaatgtctttccgaaaaataatgctttttccgaatgaaaaaatgagttttttttgaaacgaaagtttctttcaaaaaattgttatgaaagaaattcgtgcgatattaaaaacaacaaaaggcattaatttcttcaccactgaaatttgtttatattgcataaatttttcattcattatttttatctttaaacttgcctttattaaaaggcattggccatcaattaaaaccttttagaattgggaaaatatgctttttgattctgcatttaaatgcaaaaattctctcaccaacgtctaaaaagctttatttgtataaaatggtatttattattttggtgttaaaaaattagatgtaaccttttagttttttaattcctttttggcacttttagttttttaattcctttttggcaatcttttatttcggtatatatctttttttgtttgttttttcgcttatttaattaactttttaaacattgtgttttttaagcgtgaaattttctttgtgctaaaatggttcgacataaacagaatttaaaagttgatgattcttcgccaaccacatcatcatacctgaatatagggttcaaagctccgtaaaaaaaagcggtaaagtgatagaaacggttccaagctccgttcaaaagcggattgaatttttacaagaaagtgatgaaaattttatccaaaaacatgcgataaaaagaaaggcatatataaaagaagttattgatttagacaatctccctgatgagttcttatctattaatatgaacaaagaaaaaaatgaaagaaaccgagagtatgatagaaatagaaaaataccgcgcatccaaatgagtgaggaacagagaaatgaactaagagcgatggatgctaaggttgttaaagcacgtagagatagaattaaagaaggtgacttatatttaaaagcagccgaatccgatgttctacatataggtgtttatggtcttggagaattgaatataaagtgtaatcattgtccggccattcattttccagaagaacgaaacaaaccaaagggtttaaacgaattttttgaatgttgcaattatggaaaattaagtaatttggaggatttgctgcaagaatatcctataggtttaagggtattatttcaacctgaaatcgacgaaaataattacacaaaaataaaggatttacacaaaagttttataaaaaatataagaactttaaattcttctttttcatgtgcttcgttgggttgtatgaggtctaaatttcctgataaaaatgttccgatttttaaaatacaaggaaatatttatcattcttataatgcagttgcccagccgaataacgatgagttaccgacaaacgggcaattgtattttattgacacagaccaagcaattgattttcgattaaacatgttgggtgaaaaatcctctgattcaaatgataatataattgaaataattgcatatgttgaaaattatgttcgtgaaaattatgtttactcgcattcatacgaaatgatgaaaaatgtctatgaaaatgcggtagaagagacaaaaaacatgggcacaaatatccccgaaattatgatgttatttgatattcgtgaaggtacagatctaaggcgttataatattccaaggtctaacgaagtatgcgcaattctttggcgagatgcaaatgatgatattccagcggcaaatattgtagtgcatataaaaggaagcaaaaaaattgaaaccattttccctttaagtccattggtggaacctatgtgttatcccctattttatcctaataattaccgagggtggcattataatatgaaagatacaaacaataaaaaaatatcgttgtgcgattttacaaaatataaattatttttctgaaatgaaggaaaatttttgcctcatcattatggtaatagactttttcagcaatggtgtgtcgaccaggctgccagaattgaatggagtagcttaaattacataagattacatcaaaaagaaatctgtaaagagtcgtataatgcaattgataaatttttcaaaggcgtgtttagcacgtggattaactaaagacgatgatgaatggaagcattgcttaaatgaagcaagtcagttcaggtttccagcagcgttaaggagtttgttcacaagtatcttattgtatggtgacccaaaacaaccagaaattttgtgggaacaatttaaaaataatttatcagaagatttcttaattaaaaagcaaccaaacattgcttatgtattggctttgacccgtatcaataaaaatttattacaagaggggaaatctttgaaagattttaaaaatttaccccaagaaacctctttaacagaagaaaacgagaatataaactatgaagaagaaaagaaaatcgcagaaaatttgtataagtctatgaacgctgaccaaaaaattatttacaaaaaaataaaacaaatagcatcaggcaaacttaatcctaaattaatttacattgatggcccgggtggcacaggcaaatcatttacattgaatgcattatatcatttatagttataaaaaacatatgacaaacatggcattttcaggaattgctgctacattattaaaaaatggtagaacaatacataatcgatttaaatttccgcttaatcttaatgctcatattatttctggagttgttcaaggcactaaagctgccgaagaaataataaaaagtgatttttttgttatagacgaagcgccgatgacaccacgatttgcacttgatgctatcgagaaaaaattgcgtgaattaactaactgtaaacaattatttggtggcaaaacaataattcttgcaggtgattttagacaaacgttacctgtaaaaaaatttgcagtaagaagcgaaattattgacctgacaataaaaaagtcaatattttggagtaaatttgagcagatgaaattaacaataaataatcgggctaaagaccaattttcgctgaacagatacttgaaaatggtaatggaacttttggcgagtctattcaattacctaataattggatcataggcaacgattcaatttaatagatgaaatttatgatgatggtttttaagaacggaattttaatgaatt

SEQ ID NO: 78905 - DNA, 762 bp, Heterodera glycines
atgcgttatgcggtttatcgtctgatcgggtccaacgagcgtttgagagccgacactgaacggatggagcgtacaaacgcacttctttttcaaatatatgcacgcctttcaggtttatttttaaaacgatatcattatatcgaacagaaaatgcctcgatttagctggaccgcccaatttggaacagcagaatcttcctgttgctggtgctaatcagccgaatcttcctgttgctggtgctaatcagccgaatcttcctgttgctggtgctaatcagccgaatcttccggttgctggtgctaatcagccgaatcttcctgttgctggtgctaatcagccgaatcttccggttgctggtgctaatcagccgaatcttcctgttgctggtgctaatcaaccgaatcttcctgttgctggtggtaatcagccgaatcttcctgttgctggtgctaatcagccgaatcttccggttgctggtgctaatcagccgaatcttcctgttgctggtggtaatcagccgcagcccgctggtttgtcatttctcttgattttaccaatctccgctcatttcttagcattagcacgttcttattggcaaacaaaaaaaaaatgaattaaaaattggagtttaaaatttcattttattatgatttgtcagtccatccaatttggcgtattttagtccaagatgctggactagtggccgctaaccaatacatgcatcttctttatggtgtatgtttgtacatattgtattattaa

SEQ ID NO: 78906 - DNA, 1312 bp, Heterodera glycines
agccaccgatcaaatatgtgttcttgacaccattgccgaacaccatggagatttaccgcaccaaacaaggcgtattgacatgcaaattgaacagtgccagggcaccgttggtttggcaaagggacggaaagccaatcgatgtgtaagaaaattttaattaaatcattttaattgtattaaattatttatttcaaataattaaataatccaatttcagtgatgatccgcgctatcaaattgagaaggatgcggccgggcgcttcacgttgaccatccgtgttgtggaacaaattgaccaaggcatgtggaccgcatttgtcaacaaagacgtgaccaggtgggattttgcgaaatttttaaaatttttatttattgcgcagagcctaattttgtacgaaagtcctaaatttactcctgaggctatcttttttgccttttttttgctattcgcacaactttttttttgcctttttttgcggtcattttttccataagccttatggtgaatatggagtcggcggtgccgataggcggataggcgccgccggggaaattttttttttttggattaatgaatttgttaacagatttcttccaaaaatacctaaattttgcgattttgggctatttttaaatatggcaacaaattttcagcaagtgccaagtgtatgtggaggagccccgtgacacatttgttgtgccgttgaaatcgcagcgtgccaatgaaaaggaaaatgccacgtttgaatgcgatgtgaacgacaaggacatcgatgtggaatggtttcatgacggtgccaagatcaagatggacgggcggcactttaaggtggggaggaggaggcaaatctcttttgctaatcaaagaatacattcatatttttgggttatgaatgatttattttcaaaaaataaggagttatttttttaaatttttgctattcattaaatcctaaaaatccctaattatggatatattccaaaatccaaattaaaaataggtcgaaattcttcaattcaaatgtctatcattgaaataaaaaatataatattagaaaatcacaaataaaacgagtttttattaattttataaaaattttttatttaaatttttttacattatttaaaaatttactttttttttgccaaatttaattctgttttttcctatctctgttttattgcgctgcttcttttacaggaagaacgggctggacgccgtcgtcgtctgctgatcaccaatgtactcattgaagaccacggcgagtacaaatgcaccaccaaagacgacaaaacaatggcccaactcatt

SEQ ID NO: 78907 - DNA, 1118 bp, Heterodera glycines
atgcccggctcaaagtacgagtgccagtcgcgcagcggtgtgcacacaatgaaaatctccaagatcgagatgaacgagggggacaagtacgagattgatgttgccggactgcgcggcgcatgccgcatcaccgtgttggaagcggagcgcaagccggtgatcaagtggaagccgcagaagtttgagtgcgaagcgggcaaggagaagcggatcaaagtgccgtttgaagtgaagggcacgcgccgaggcgacccgaagccgattttgttgcgaaacggaaagccggtggacttgaacaaaatgaaggaccttgttgaggcgagtttaaaaaactctgggcaaaatcgctattttgtaagaaaattggaccatttattttgaaattttaccaaaaaaaaatgtttgttaatttagcgtaaaattttttgaaaatttcggaatgattgacatgttctgagagtgttgataatcgatgccccggtgaaattttgaaaatttataccgtaaaattttgaattatttacaaatctaagagtcttgataagcgctggcgaggaaaattctgaaaatttttacgaaaacccaataattttttctgctatttttgaaatggtgaattattaagagttttattcttttcttgaaattttcttataaaaaaatttttaattttatttttacatttctatttaaaaaattgttacattgcgttatactgcttgaatttgttgtatgtttgttttgttttcaggtgataatcaacggcgatgtggcagagattgtgttcaagaatccgcagaagagtgaggcgggcaaatggtcactgcaattggagaacaccggcggagtgtcggcggcggcaccctttgaattggtggtcaaaggaaagccgaaaacgcccaaggggccgctggacacattggacgtaaagtcggacagttgcgtaagtagtttttgttaaaattttaagttaatttaattatgaacatcgattaatgagttaattaatttgcctaattaattgattgattgaacttgattaatttggatttcagtctactaattgataacttcaattacgtttaattgattgtaaatttgcctttgaatctaatata

SEQ ID NO: 78908 - DNA, 790 bp, Heterodera glycines
cccctccggcgtttaccgctggtggcattcaagaccaacggctccgtgtcggtgagacaatcaaatacgaagttgccatttctggcgagccgttgccggctgtcacatgggaggtcaacggaaagccattaaaggcgtggttttgttgaatttgttaaatttaatgtatattttaattttaattttttaatattttaaattatttaaaaaaatatatatttaattttgaatttatttaattaaaaaagtaaattaacttttttaaataacttcaatttgtttaattcaaaaatgtatatgttttctttaatattttgaactttttataatttaattatgtatatttaattatttttaatttttaaatattattttatttgagaaaatttatttttttcttcaacattttgaatttatttaattttaaaaaagtaaattaaaattttttaaataatttaaattagttaaattaattaaaaatgtattttaaattatttttttaatgttttgaatttcaaattaaaaaatgtatatttttttaatgtttaaaatttatttattattattttttttattaaggccggtggacgtgtgaaaatgaccacggagaagggcaaaactgtgctgaaaattgaagacgctcaacgcggcgattccggcaaattcacgatcaaattgaagaacaaaagtggcgagtgcgcatcaaccgcaaatgtgacggtggtcggacggcccgaaccgcccaagggaccgctggaagtcagcaacatcagcgcagatggagcggtgc

SEQ ID NO: 78909 - DNA, 1394 bp, Heterodera glycines
atggacaacatgttcagggtggtccaccagcagtttcctaacaaagcctccttccacgaactgcgagccctgtaatattttttaaattttttgaacttttcatttttctcctttttcagttaccccgatttgcagcgccgttttcagcccgagacaattgacaagcagcgcttcaccaacgagcagggcgagttggtggaaaaattcaaaaatgaccgtctgctgaacagctacgaactgctgttgtgccacaaatgtttcagctacgattgcattatgcacaatggtgggaaaaaagggacgcaatatcggtttggggcagacccttctaccttaaataaaaaaccaattttttcaagaatagtcataaatttttaaaaaattataattttttccattttctttttcccgtggcacactttgggatcaccggacataattcaaaatcaaaccaaaaatctcaaagtacttaatatgtcctttttcgtttccaacattctccaaaatgttttagccgcaacatcgaatggttatggcaactcaaaaaagttgcgcacaaaacgccaaagcagcagcggcgtaagccgtcacagcgggggcaaagagaactgctcgaagctgaggcggtcatgctcggccaactgctacctgctgagcaattcgagcggagcagcacaaccggcaatggcggccatgccacgggcggtgggaaaaagggcagcaacaaattgcagcaaaaagttggttttgtctaattatccccgtcgggattaatggcagtttgactacagaaaaatatttcccctttcatttctccgctcccatgaaaaaattatagaaattttaaatttttgaaaaaaaaacttgaaaacccgaaaagtatataaatttactaatttctagaatatttttggtttaacattactaggaatttttctttgttttcaaaaattagaatttctggcgagaggaaacgtagggcggaggggggggggggggtaatttgccggaaatgctgaataaattatcttaaataaatggactttttcagaattcaatagcttctcgtccacagcaacagcagccgagcatcgccatcggtggcacggcaccggcggacagtgccaaatggacaccccacgaagaggccattttcaatgtgttgcgcagcaccggggaggaggagttctgccgaattgccatgtgaggaaaattttttcaagagtttttcatccaacctaattttcttacacaattgtttttttgagaatgctcaacttgagcctgggcgagacggcgcgcaaaaggacctgccaagaagtgtacgaatacgcgtgccgggcggggccacagtcgacaaatggggagtcgtcgtcgcccgtcaaaaatgccaa

SEQ ID NO: 78910 - DNA, 330 bp, Heterodera glycines
atgccatcaaaaaagtgcacaaaatgtgcgattgccatcaatgacttgaacataaaagagtcgcaggaaatttcgtcttctgtcgattcggtgccgaaattgctaccgtttttctacggcactctgctggcacttttcatgacccaattgggcgcaattttattcaaccattcccatttgggcggactgtcaatgttcgacaccatttttttgctaatcgcacgtgctgacattgcccaagtgcacaaatggatgtttgttgtgagctttttgttgcgctttcttcttcagtcatctggagtgcatttccaaggacaattaattggctaa

SEQ ID NO: 78911 - DNA, 74 bp, Heterodera glycines
attgatcactcttcttgacccgtatttggctgtggggatgtgcatgtcattgtgtttcacagttctaccaattt

SEQ ID NO: 78912 - DNA, 477 bp, Heterodera glycines
atggacatagcatcctcatcttcgtcggcattggtcgacaacaaggctcttcttatggagcgaagttggaccgcttgtcggttgatcagatgaaccgagacgtctatgctgtcgaggaccgcctctctgagggctaacggagccttgtccagagcttctccaatttctctctttctctgttcagtccacccgatcaacgccttttgctcaatggcatattggcgattgttgacaaagcaatgtgcgcagttgaccggacgaaaaccgttttttggggggcggtggatcgacagaaggcggaggcacggctgggcgacgaggcgaaacgaacggaggacgatgaggagggagacggagttgactggcgcctggcggaacgaactggcgagggggacagcagacggcgacgggcgagcggccgatttggcggtgacggcgttgacgagcgcatgacgggacagaccggcgctggcgagg

SEQ ID NO: 78913 - DNA, 171 bp, Heterodera glycines
aaataattatttgcagggttggggaattgaactttagaagaaaaaaaaggatggaagacataaccaccaggccacgacgctcacactggctttacattctttgaaaatgatattgaaaaggcaaaaaggaaaagcttcatatctcggccagaagcttcatttagcaaaaat

SEQ ID NO: 78914 - DNA, 1750 bp, Heterodera glycines
atggacgtgcaaaggctgaaccgactgcttaaagtggtcgaccgcgcgtggactttgcccaaatttggctcctcggagcccatcgggtccaatttccaagtgaatgaatggaagggtcactttggaattccatacgaagcaaatgccttaagtacaagaagacatgtgccagcatttacaaggcgaggtgagtgagaggggggggggggagggacaaacggcatttttgaaacgaaggcacaacgcatgcgagcaggccgggtttggcattatgtgcttcaatttttggtgggttggggggggggcgaagtgtgtactgtttgaaaaagagggccaaattcagttatgagaaaggtgcgttgggaaggcaatgaatggcattcgattgttttttattgtgaaggcgaaaagttggcgttcaaatgcgaagatgcgagtgaaccgaatttttgcaaaaacaacggaaattatgacaatttcctgaacaaatacaaaaaggacgcgtacagagtgagaattcattttggaaaattcaaaaaaagcgaatgatcgaacccaaaaaggcaaagacgtacatccatcaacagctgacgaggtgagcccaatcggaaggaaacggcgaagaaacccaacacgaacagatgctattcatcagcaatttgtgagggcgcacttttgaacagcaaattactgcccaatacaaatgaaaggggacaaaaattgcagagaaaagtgagggattggcagagagaaagagtgagggagacacaacgcaaattcagcaggaaagacgacaaaggatgtttagagagacggcggaagatggcgcggaaatgggcgaagaaacaatcacaaaaagagtccctttctggcagagacttatggtgaggaagagaatggaagataagggacgaagggagaaagagggggacgaagaaagggcagagaaagagagggaagaggagatacggtggatggagaaaagatacggtggaagaagggaaacagaagtgaagagtacggaggaaaagagacagacagagaaagaggaggagatacggtgggcggataaacaatacggtgggagaggggaaacggaagtggaaagaacgagagagagcgctgattgggacgggcaaaggtgggaagggacaacgggcaaagttaatgcgaccacttttgagttcgttggaaagcacagccttctcacgcagtttgactcagttaacgccagaaatgcacgatcacttacaaatgaagcgaccatcgcttaatccccggactacggaacccaacgaagtgttgtggaggaatttccaaccgggaaaatggtttctctccgagtcctcactttcgattaaatattttgttaaggtttcaatccgtacattatatgaccaacacaggctgatcaaacagttcaccgaaagaatatcagaaattacttattccccttacatacgggtggaaacagaagaaccgagcaaaaaagcattaattaaaaatacaagtttatcgacttctgttcgttattattatttttttggaaatcatttttatcacacgcttctaaactaacaaacaaacaaaaagaaatcatcaaaatttagaattattgggggaaggggaaaattgaatttggatgcgattatttgtcagctaacggttgctaaatcccaaaaagtgacttttccgataaccaacaattgggccagaaacatcgaactcgaaataatcactgttatcataa

SEQ ID NO: 78915 - DNA, 661 bp, Heterodera glycines
gttgcaagtggcaagctgaagaaggacaaggatggaaattgggagttcgaatatgacacttcggacgaggaaaattcgtcggaccccgaaaatgcgaccattcagcaaagcgcaagtggggaaagaccaactgtctccagggcatcgagcgaaggcaaaggggaggaacaaatgccgccgcttcaaacactgaacttggtttacaaataggaagcattttgcaaggggccgaccttccgtttcctaaaggttttgcgggttcggaaccagcaaagggaactgaacgacatcaaattcgactactctccgaatgcggacagtgtggacgggtcaatttttaaaaatcaaaccgaataacggaatacgctccccctgacaagccgaatttaaatatttaagccaaatcttccagaattgctcacgaactcgtcaccgccgaactcatagatggccatgatctcgtcgtagtcgcggccaaccttcagaaactgatcgacttggcccagaaaaaggcggaaagaaggacgatcactttcgctctcaagtgaagcaatgcccaacgtctttttccttccaatttcgctttagttccggcgttgcatccaatgaaattcccgacgaacgttctttgaccggttttgctcagctttcactgttagat

SEQ ID NO: 78916 - DNA, 858 bp, Heterodera glycines
atgtcttcgaaaattccgtacgtttttcttacatcgtattggatctctttaatattggccggagttgccaagattaaaatttcccatggaattcataatttaatttgataatttaccccatcgatctacgccactaaaacttcataataaaactgaaattccacatttggctttccttttgcttagccactttctttgcttttccattccattcattcatttcccaaattcattttcattggtactttgtgtctcttctgttggtcggctgtggcaccattctttggttcttttgggacaacgtcaaaaaacgacgacgccccaacaaaaaagaaatgtaaaaaacaaaaattaaattaataaatcttttttttcagcttcatctctgccgactgttggctcgaagtgttcgctttacttccgccttctcagcttggcctcggaatcgctctgatcagtcgccgattttaccgccgcgtggacaaacatttcaaagcacgcaaatggatattggacaccgaattgcgaattcaagagaaagagctatggtttggcaggaagcaaatggaaattgtcaatgccaattggaagcgtttgccaatcccacaaaatctgttgcccaacaaagtcatcggatttaaacacattacgttcatgtaaaattgacaagtttcccattggtttgagataacttttgcttgttttagttacttcgaccacaatattctcacatttgtccgccgttttcaccgctttttcacttcaattacaacatctttgggcattatgagtgaaaatgttcgcatttttgagttcttcctgtccaccatttggccaatttttggtgactccattcaa

SEQ ID NO: 78917 - DNA, 667 bp, Heterodera glycines
atggaagaatattttggtcaggcaagttttcgaaagagaatgttggcacaaggccaccgactgcgagaaagtcttgcctgtgaaggcaacaaaaaccggattttggctgaaactgcattcggtttcggcagaaatgaaggaaattgtgaatttggggggccgtcagtgcattccaatttcggtgagaaaaggatcgaaagatccgggtttgaaggccgaacagagcaagagaaaaatttggtagaaaggctgaaagctgaattggtaagagttaaggccgaacgagacgaagccaatgcaaaaattgaaattttgcgagagaaattgtcggacagcgaaaaactctgtgttttcctaaaggctgaccacaaaaaagtgctggcgcaggcagagaaagttcggaccgaatcgaaggcgatagaaattgagctgaatgaggcaaaagaaaatttggaaatggcagaagaggaaaatggccatttttcaattctttctgtccaacagaatttgatggtgcaggagcaaggccgaaaaataatggatttgattgaagaagttgaagaattgaaggccaaaaagaacgccaaaaagaaggagaaactttccaaaagtcccgaacaccaaattactgaacccaaaaaattaatctccaaatcgccaccgaaaa

SEQ ID NO: 78918 - DNA, 157 bp, Heterodera glycines
atgccaagaaagcgcgtgccgcaattggacgagccggacttgtgagtgacgcgcgaggggggggggggggcaatttgtacactaattgattcagtgtctttttttaatttgccgatttttcaggcacgctatgcaaatgcgcggaacaaatgcatga

SEQ ID NO: 78919 - DNA, 601 bp, Heterodera glycines
cgaacgcgtcgcgcgacttccaatactgcttcaactgctgctactgctggccgtggtcgaagccgttcaagaaatacggcgggtcgtcgttccgcgagcaacaggagtagagcggcatcgagcaacagggacagagggacgcgtcgtcgttcgtcacgcgccaggaacgcgtcgcgcagaggccaggacagaagcgggacgcgtcgttcgtcttccaccaggaaagcgtctcgcagaggccagggcagaagagagacgcgtcgttcgccgtccgcgaggaaaccgccgcgcagacgtcagcaggacagaagcggaacgcgtcctccgtcttccaccagcaaagcgtcgcgcagacggcaggacacagggacgcggcgttcgtcatccgccagcaggaatgcgtcgcgcagacgtcaggacagaggcgggacgcgtagttcggcatccgtcaggaaagcgtcgcgtagacatcgtcggcggattgtgccgcgcaaatcgaagccgaagaagcggtccaagtcgaccaagcggcgtggacgtggacgcccgcggaggtcaaggcgtggctacagacgcccaaaagatccgcatacgcccatag

SEQ ID NO: 78920 - DNA, 374 bp, Heterodera glycines
cctttttgctgcaactcaccagtgccgagaacacccgccgccgactgctgtttttgtgtgtgccacttttttgcgttgtgttcgttcgctgccgagccgagacgactccgtcctgacgacgtccgcacaaatggcacggaccggcaccagcagggagagggagagcccgagatgtgtgctgatgcgacagtacgaaatgctgctgcaaaactcgaacgacaacagcggattccgtgcctggttcgacaataacaatgtgagagaagcgaccgaccgactgagtccccacccgtccctttcagtcccacaatcatttagtcttttcagctcttcaaatggcgcattctcatcgacggtccgccggaaacgcctta

SEQ ID NO: 78921 - DNA, 517 bp, Heterodera glycines
attttgttccgcaacgacccggcacaatacagggaggaagtgcgacggcgcgtggagagggcatcagcatcgacaccgcgagcgaggtcgtcatcaacaccaccgccggtagcgcaaccgccgggagaacagcagcaggggacgccgccacaaccgccggacggacaggggatgcaaccgccgggagaacagcagcaggggacgccgcaaccgccagcgacaccgccgcaagggcaagaagcgccgcagcagcaacaacaacaaacgggcgaatggtacctttgatgtgacgtgatgccctctgcgtgatgatattattatatacttatgtatgtgtatatgtattgtattgtatgcatgtgtctgtcgtccgaccatttcattaattaatggtctctctctctctctctgtgttcgtttgccctgcttttgttcgctgttgtacatattatgtgtattgtcattatccaccaattattgtatatatatgtgtgtacatatgatggtgtatcgagca

SEQ ID NO: 78922 - DNA, 1489 bp, Heterodera glycines
  unsure (1)..(1489): unsure at all n locations
acatcaaaaagaattttggacggcgaaacaaaattggcactaattaatgagtttcacaaaaggaaaagagaatgccaaaaaagggaaaagaaactcaagaaaaattataacaaatacaaagtaaaaattgagggagaaattgcgcgggatttgggaacaaatcgtaaaatgatttacaaatggaagaaggcattgggccaaaaatgtaaggaaatttaaagaaaacagcaagggtaaggggagggggtggggtgatcaggttcgacagttccaaaaatactttgattttatcagggtttttcgagtcatcgaacggcccagaaaatcgctttaatccctgtatatcaactgagtctgaaatctcgatttccagatccaattttcggtctcgagtcaaaagaaatattctgtccgaattagcaataatcagcagttttacacttctttagggaaatttggaaaagatgggttaattcgagagaccggcacgatcgatttttgattcggtctttttcgattttgttcgatctttttttagattttgtatcaaaaaaccaatcgaaagaaaagaaaaaccaaaaaaaccgagcgaaatatttttcgcggccaaagcgagaggggggggggcgtagcggaaaagagggaaattctgaaaaattctgctaattcacttccccggcggcgcctaacgaacggcaccgccggaaattaattcctttacaatgaattcaatttttgacaattaatttgtgtaaatttattatatttttaaatttgtttaggcatcccaaagccacaaaactcaaaaaagcataaactaaagataatcaaaaaatatgaaactgttagaaaggaatttgaagcaaaattcgatttaataatgccgaggaatgtgtcagaaaaagttgcgcataaaatcggcgtgaattataacacaatttacagatggaaaaaggaatttggtctatcgagtaaatgaattttacattttttaaataatttgtaaaattaattcctttttaagggaaaaggcgttttagagattccgaaaaattggaattagtgcgaaaattcgacgaaataaaaaggaaaaaccgaatgcttaacagtgacagagtcgcagaaacattggcagttacgaaagaatcaatacgaaaatggagaacagagtttggcatcgaagcaaagtgtaaaatttttaaaagcattttaaatcaatttaatttaattttgccagatttaaatttagggaattgcaattacaccgaagaggagaaaatgaaattaatatgcaaatttgacaaaataaaagggaaaaacccaaggctgaacagtggacgtattgcagaagaattgggcaccacgcaaaagtcaataagaaaatggagagcaaagttaggcacaaaatcataagtttgaagcgaagaggaggaaaagcaaaaaaaaaaacgcaattttanaggacagtcttttagaaatgaattttaaa

SEQ ID NO: 78923 - DNA, 530 bp, Heterodera glycines
atgcataaattcaacgagttactagagaaagaagagttgtgctttcattattcaaatcctccattatttacattgtattatttttcgatactaaaaaccgaaataacaaagtaaattaattagtttaaatgtgttcgttcagctgctgcctcatcgatgaagtgaatacaaattggatactaatgaattgttgaccgtacttttccgtcggaaatatttgtacgctattttaagcaaaaaataagccaaaatccatctgctgcttatgaaaggcgcaccatttaacccaactttgtctttcggctccatcattcttccatatttttatctaaattatgaaataattgggaaaaacaaataaaattctcagaaatataaaatataatttaacgattaatgaaaagaccttttttaaatttacaacttttacaatgaaaagcttagtgaatgaagcaaacgaatttaatgaggattgtccgtccttcctttctcaaccgtaaggagaaaacacttttttttctttaaaggta

SEQ ID NO: 78924 - DNA, 288 bp, Heterodera glycines
atggacgccgactcagttctgcagcccgtctttatcttcgcttttgctgccgttgagcttctgatcaatttggtttgtgttcccgtgtcggccatcaacttctttctcgtcgccaaaagttcggtgatccatccgaacctcaaacacattctcatctatcagagcggaagcattctcggggtaaactgtgcagaaaatgaacaaaaagagcgcaaagactgtgctaaactgggcaattaaaaccaaattaattaattaattaattaaatttgtaaagaaattaattaa

SEQ ID NO: 78925 - DNA, 1213 bp, Heterodera glycines
atggtttctattgttgataatccaattgaccacaaaaacattggtggaatgtcggaaaatttactttacgcactcgccgatgggtcgcgtgcagcgtccgatcgaacagttcctggacacgcgggtcggggtgagtgatcggtggcaatttggtcaagtcgaccgtcacattcggcttggcgcttaggtccaactttttcagcaggtcttttagaatctgtggcgacggatggtcattaattaattagtgattaattaattatttaaacggaacaggcaaatgtttccattcaattcaatggttgggaaagttagcaatttttgaaatcagaagccttgatcagccaaagtatttcatcagtttaaatgccaaatatttgcctttcaacgataatttctgatcacaggtcaaagagtgattagtcaatgcttcaccgattttctttttgccaaagtgatcaaaacccaactctgatcaatcgatgttttggcaatttgctcaatccaattgccccttgaaaatcatttcaaaagtttacttgctcctgccggattttcttcacttcagaaaatgtgccgcaagttgcgcactgatgggacgagcaaagaatggcgaggggcgagaaaagaagaaactgaagtgataaaatgggcaatttcaaatgaatgcaaggctttctcttttattgaattgtaattactttttaattttgattttactaaacggccaaaagaatttccaatttttttgaaaaaaataaaaaaataaaatttgtatttatatgtaacagaactgctcaatgaactttttggaatgagaacaatgacaaattttcttcaaaggaaatctactattaattaggtaattaattaattagccataattaaattatattaacagcaccagcactcggagcagaaacatttgttgttgttgtttcggtggttgtaacggtggtggcccgtgtttctttctttccaccggcaactaattacccctaattggtttgtgtttgtttacggcggccaaatgcgcaaagacagcgcattattagcatggaaatgcttcttcttgttcttcttctgtgtacaaattcacttaggtatctctctctctcttttggttcacaaattcctaacatcgttatacagtaccaatcgttcaaattgggcaaaaaacaaaatgccaaatttggaaaggaatgcgccaaaa

SEQ ID NO: 78926 - DNA, 561 bp, Heterodera glycines
atgagtggaccaatatcacgacagcataatttctcctcagtttcaaacggctgctctaaaaagcgaaaggatcgcccggctcacaagggctcggcactgcttagtgcagaagaaaattcgcagctatttgaagtgctcggccgtgacagaatttctctggtcgcgggtattgcccaactgctcgacgcgcctgcggagagcccgaatgtttggcgaaagactaacgttgggatagtctatctggtgaaggattatcgcgagaggaattatcagttgtgcatgtacgatattttcaagaaagaattgcagtggagtcagatactgtcagtttaattcttatgagttaatttttaaaatctgaatttagctccatttattgtatttcttatgtacttagttttttcagttacaaggattttgctgtgaattcttactcgaattgtcctcgtctgctcgtgtttgagtgtgacacctgtataaaggctctgaatttcacggattttaacgaggccgaagaatttaaagttgcaatggaaaaaaggagagaatccaatcaaaaaa

SEQ ID NO: 78927 - DNA, 110 bp, Heterodera glycines
cttttttgattggattctctccttttttccattgcaactttaaattcttcggcctcgttaaaatccgtgaaattcagagcctttatacaggtgtcacactcaaacacgag

SEQ ID NO: 78928 - DNA, 1689 bp, Heterodera glycines
atgacttgcagcacagaagagtcaaatgtcgcttggtggtcgattagtcagaaaagtgatttgttaagttttgcggatggattgatgacacattacacaagcatcgagcattcaaaggagattgacgtggagaggtggtagcagattggtgggggaagaagagagagaaaggaaaggagattggtgtgtgtgtggggagggagggggatgaaagtgggtggatgagtgatgattggaaattggtgagttgcgggaaagttccccactttgatcactatggagtcgggagacagaaaatacggctgttgggccatttctataccaaaaacgcgcaattttctcattatttctattttccacagattaatttattaaaattaaccgttaaataattcaacatttttaaattttttaataaattctttattctcctcacagctgatttgtgattgatcaaagctcccttacaaattagaagtgaaacaatgataatgataatgggatgaggttacgtaactaagaaaattatgtgccttgcgatagagagagagagagagagtcgatcgatttgtgagcccaaaaggatgaatggttgcccattcaataacctaatttttattgaatcatttaggttggtttaactgatatcattacaacaaacgaaaacaatactaatttgaacagcaaaattgcgaattttgaaaacaatatcctctcattaacattttttgtatctaaaacaaaatctgggtttgaatcgctgctgatcagtgatcacgactcgatcttgaattaaaataaaaaagtatacttcctctgctacataaaaatttgtaaatatggtttaaaaatattaggtttccaattacatatgaatgtatcctcccacaacgacaccacccctaaatagaattcatttcatttccctttccttgcctcatacgcttcgtagtcgatttttctttctttcatttctgccgcctttatctgtcccttccgcttcctgcttctcttcctcgcccttgtaattaaattccatcccctgcgctcgttttggccttccctcccacaaatgactgaagtgcctcccaacgcgcgtcgatggacactccattttggtggattggtggaagcggtcaatggcgcacacattgaccccagtggacgcactgatctactcaaagtgttggacagagccaaggcaaaaaaaaaacaaacaaacaacataaattgaccataacttgactaaattctgagcttaaaacaacggacaaaaaacctaaaagtccattggactcctaaagcgcaatagagccctaacaaataagttcagcgagacggcagtttgcaattggatggtggcgaaataacactgttggaatgcgattgcgattcagtgagagtgagttcagcgaaggtggacgaaagcagcaaacctttagcattcattccactccatcagctttcttctgtgaaattttgatgatgttttaatatatttactaaatttaatttatttaatttgaggttggctttgtccatgaaccaccacaaaacattttggcactgaaagttggtgacgtggatgagaacaagcccgatcagtttgatctgataattctttacacttcaactgaggcacgccaaacaaacaaaagatcggacgaattccttacagaacatttttaa

SEQ ID NO: 78929 - DNA, 177 bp, Heterodera glycines
atgggcccgaaacggacacaggcagaaagcgacttttgggaaggaatgtgtaaattggctgcgattcaaagcaaagcagaggaagccagtgatggaggaaagaaaaaagcgaaaagcaaggcaattagcagcgaactgcagcaaaaatggccaaaattggacaaaaaaatgccaaaa

SEQ ID NO: 78930 - DNA, 1593 bp, Heterodera glycines
tttagtggccgatgtgctatctgcggcaatgctctcagcgccattggtcgctccccatcatgaattgctcccacaccaatttctggaaaaacaatgcgctcgggagttggaaaaagctgccgaaatcgaggctcacgattgccggcgcatttgccggagggtggaggaattgtggctcggctctcattggtacgggttgctgcattggttgaactcgaattgcctgaaaaatgcactcgggaattgagaaaaagcaatcgaaagaaagacccaaaattaccggcacatttggtggagggtggacaatttgcggcaggtctctcagcggtatcggttttgcatcgattggaatcgaacaacctgacaaaccaagcgggcagaaatttgagaggacgcagcgagaatcgactctccgtaacattcgcaggggattcagggagggggtggggggggagggttgaggaaattaaaaaaaaatccgaaaaagtaaaacaaaaaatttctaacgaaaaaagtcttacaattagaaactcatttcaagacactctcatctaattagagtgcgacaaacatgataattaaaaatagtgtgtacatttattcttctaaatatttttttataaatttccaaatttaaattttccctaattattttgcctattttacatcttttcttaaagttctattggctggtcattgtgctggtgttcctcaacactttggtgctcacctctgaacaccatggccaggagcagtggttggaccatttccaaactggtgccaatctgttctttgtcgtgctgttcaccatggaaatgctgctcaaaatgtactcgttgggccttcttcaggtggcacttttatgcttttcaattgggcttttggcatttgttcaaaaggaacaaatgccaatcatcggcgcatgatttagccaaaaattgatgagctcatttcatcgacattcacagtcattttaaaagacacaacaactgtgttgactgctagggaccgagactgaaaaactgaaaagtcgagaatggatgattttgaaaaaaaagcactgggaaaaaaaatttggtccaaagagcaaaaaaaggtcttcggattttttctggctaggcttgggccgagactctcgagtagaaatacccaaaatcggatcggcaaataaatgattcttattacaaattgatcgggcttaaaagggtttaaaaaatcggagaattaattaaatctaaaaaccaattgctttttgggtaacttaaaaccattttaaatttgattaaaaatccaaaagataggtaagaactaagacttaatctaattagaaaagagtgcttaaatgcgaaggcatatcccgatgaatgagtgagtgagtgaatgattttgccgtgccgttgtttcagtacatgaacagccaattcaatcggttcgactgtttcattgtgatcagctccatcatcgagtttgtgctcgtctacttcgagttcatgaagccgctgggcatttctgtgctccgttccgcgcgtctgttgcgcattttcaaagtcaccaaagattggacggcactgaggtaaaaaaaaactgttgaag

SEQ ID NO: 78931 - DNA, 1227 bp, Heterodera glycines
atgccatccctggtgtggtggtctcaccgccgccgcccctccccccgccccactcgccgcgcctaccgtctgcgacttgaccatgcgacggcacccgcggcgacaccggcggttcatccgctgcaacagtcgccactgcgtcagcagcgcggacggtcgctgcgtctcgccgtcgctgtgctcgccgtcctcgtcaccgtcgccggcgcccgactcgccatgttcgtccgcgtgttcgtcgtcgcccaactgctcgatgtcctccgcctgcgtgatccagtccaggtagcccttgaggtcctcctccagctgctgcttctcgcgaaatttctgtatcaaattaagcttattgatcactttagtaacaaattcaatgcattgattgatcaaaatggcatggtttgatcgatcgaagaggatgaccaaaatgatcactttctttccgattgatcattgttcaaatccgactaatcaaaaattagtccataattcatttcgatcaccaaaaattgatcaattccattacaattgctcagaaatttgttttgaaaatgcctgaaaaagtccgcgcgcgttggccttctcccgctccttggagaactctccggacagaacacccaacaccaaattgagcacgaaaaaggagccgaggatgaccaaagtcacgaagtaaatccaaggccattcccggcccaccgcatcattaaccggaaaagggaaatggaaattaaaataataaataaatagaaaaaatagaaaaattaatttaaaaatataaaattatttatttttatttttaaagttcaaatttatttttaatcctctgtcaattattaattaattaaatatatttatttattttaagtataaaaaaataaaattacgtttttataataataataataatatttttttttataattttatttcatttacaaaaatggtttaaaatataaaattgaattattatttgtttttaggcatttttatggaataattaattatttagtattaatattaaattaattaagcctagcctaagattaacataaacctaacataagcctaggctttagcctaagcctaagattaatcgcttcttctctcacccaatacatcacttctgtccacccctccagcgaaacgcattggaacaccgtaagcattgcgaggccaatgttgtcaaagttggtgatgccattgttggggccctgcgcggaaattcaa

SEQ ID NO: 78932 - DNA, 103 bp, Heterodera glycines
atgttaattgattctcagatcaacaagcatataatgtctgaccagaaacaactgttttattcggccaaactattcccggcaatcagagtggacttcttgaaag

SEQ ID NO: 78933 - DNA, 1456 bp, Heterodera glycines
atgaacagacggtaaggaaaatttcgaactttcaaatttcaatttagtaattttacacagttttagttggatttgcaatgacattttgatggatttgttcccattctttaaccgtcctcaactcggcctcaaattggcacttctctcacctcgtttcaatttgctggtggacgcgcatttcgatggcaaaagcgaattgacaatttggagacaaatcagaattcacaaaatgggagcaaaaacacagctatccgtgcaagacacgaatagcaatgccgatgctgtgccatttccgttgcctgaccattcgctgcccaacaaaattcgctttaatcgtcttcgaattgagtaaatcaaaggattttcactgatatttatgtaaagcatttgcttttcaggtgtatcgatcattccgtcatcacattcctccgttccaatcagcaaatttttgacggaagaggcaccaatttgagtctgtggctccgtccggacgccaatgattaccagccaatttgggatgctttcgtccgtgaaatttggccgattttcgtgccaaacattcgccgcttgggcattccaaaaggcgatcagctggacaatttgcttcgccgtacttcgcccacaattctcactgatctcaatcagttgaattcaatccatctcgattatttgtttaccaatattggtgatcaaaatgggccaaatgcaactccaactgtttgccaagcattgtttgaatggttgtgcactccgattagcgatggaaagccaaaacaattgacttgctgtggttatccggcaggaaccactgaatggctcaacaatttcaaagaggtaaggccattttttcgaaaaacattttggattgattgcaatttgtttttccatttcaattgtttaggcatttctcggttccaccaattcttcggccagctacataattcggattgaactttacgaaccaacggaaattgggccatttgaattgacgaacaatgggatcggcgaaaagctgacattggagaaagaaggccaattgggaaaccaattgataatcaaacgatgccaaattggggagacgattcagtgggaggacgaaaattcgaacaatttgaacaatgtccacttttggatggacaatgccaagtgcattgggtgagtagcttttgcttttataatcaaatttaaatcacacttaattaaggccaatgtctccaccaaagccgggacaaaacaagaagcgtaagaaaaactgaacgaattattgggaaatgacaaatgattgatcattatatacggaaactgatctgctaattgcccctaacatttattttatttcttctttcgttcgaatacatttcatttgtttgggtttttatgcttttccatatgtatgcccaaaaaatacaacgataagattcatataagcattttttagcctaaaaatcaaaataaa

SEQ ID NO: 78934 - DNA, 81 bp, Heterodera glycines
gtgctttctatgtcgatttggaatgcgaacagaagtcgtatttctgatttggatgggcaggaattgcaggcggatgagtga

SEQ ID NO: 78935 - DNA, 1616 bp, Heterodera glycines
atgtcaaaacaaattgcaatggaatgtgctttcaatttgcttttgaagaaaactaccacattgccattggacgcgcgccaccaaaccgtgccgaccgttgcggtggcggacgacgacgacccggactacgcgagtgtgccggtgggcgagttcggactggcttttttgcgaggctgtggctggaaggacgagaagtcgtgcatcggcaagtcaaatccgcaggtggtaccactgcgcgtcatcgaaccaaggccaaaggtgaaaaaacgggagattatttattgcatttcttaaattagttgtagaataaattctctaaaattggcggttgtattttgagaatataaacattgccaataaatggttactaagttttgcttcatttccttgcttaacctaaatggtattcttcaaaaaacgttttattttacggggcatttccaatgcattttaattatattccgtttgattaagtggttggtcgtttgcttatagaaagttcaatgcctttcgcattttgcaaaattcaagtggtaattgcgtaatggcaggatccagcagtgttggacgcatttcccttgtccaagtacatcctagagttctgccgaaaaagaccagtggatgtttgagaggagagcaccgcaaaattcgttagtgccaatctttaggtttccactcacaaaccaatgaatttttactttttccttagtttttatcttaaattcggttactaatctgttgaattttttagggactcggacttggcgctgtccttccgacaatggcaccgccgacggccaacgcgctaaaggcggcagaaaacggtgacgaagaagcgacaacacttggcaaacactcctacgtcagatgcttatgtatgtggaacattgaacaatttttaaatgcaattgtcattccttggaaagggggtttgggttaacttatgaaaaatagtcaaatttgcccacttagattttcatatttattacctaacaaatatttcagccggtctgaacaaaggctcttatggccaagtgatgtcaatggacgaggagaatgccagcattttcgtcgagttggcatggccccccgccaacgttggcaaaacggtgcgtgtcagccaatgggcggtggaagtggtgagacggaaagagtatcgcgagtgcgtaaagggcggcagcggaggaggaggaacagcggagaacggacggaggctcgaaagggtccgagtctgatggaattggcagcaccaacccgtccaaataccctccataatcggccacaactttcgccatcacacggtcgacacgtcgtacgatttctctgtctcctctcggcacaaattttaatcgttcgatttgttatgctcctggtcaaaaggatattcgatgctgaattttatgttgccattcttttctaaagaaatataaaatcgaatatccttaacgacccaaagtgatcgattcatttcttttttaactgaaaggaggaaattgcacatatttcagcactttgataaagagtacctcctaatttggtccaatttaataataatgctttatcggagtgtatgaaaatctttaataactataaaaataattaaataggaatgtgta

SEQ ID NO: 78936 - DNA, 573 bp, Heterodera glycines
tgcttttgtgcccacttcttcccaacaaaaagtgccaccatttgtcggccaattggcgtcggaatcagcgcaactgttgcaatggcatttctgtggcccaacaacactttggcactgtacgcgttttggaaaacggttgaggtttgttttgcctgccaataaaaagtattgttctttattcattgtcctatttcagtttgctttttttcggttggccgatgccggcactttgcccgttttgccgtgggccgatgcccttctcttctccgtcctctcctcctatttgctcggccttgcggtgctggaaccacacgctttgaggcaaaattactacaaattcctttgctcagtaactgggaacaggtgaaacggaaatgaacacaattttgcaaaaccggagacccttaaccctcttttaattccagactccaactgcttaatcgaccaatgttcgataaattcctcggcaccagttcaagcgccgtgctttacagtgactaccgaccggagtttctgccttatttgcggaccatcaatccggcacaatatttgccacaaatgcaaatcgtctaa

SEQ ID NO: 78937 - DNA, 960 bp, Heterodera glycines
atggctgccaaaaagcgcttcaatccgtccgtgcgaaatgcgaagacatttcagaaaaagaagctaaaggttggccgcacattgcgacatgagaatggcaccgacacgcgcgtaagtgtgaaaaagattggcattttggagcagctgagagaaggcgacgagggcactccggcgaaggaagtcgaaactcggcacccgcaaaagggcatcgacgaattggtggcacagctgggccattacaacgaaaacatttgccgagatgcgatccatggtgagcatggaggggaaacatgcggaataaggtggcaaaatgcacaactttcggaaatttacatccgttttggatcccttgtcaaggtgttcgccttctgttcaaaaactcgcctgatcagttgaggaggcatttgcgcagaataatcccggccatcggttctgtaattattcgcgaggtgagagggaaaaaaaggggacgggtagggtagttcgaatttaaatgacaaacgaattttgaaacgaaaaaaaacattgctaataactcaaaaactatttggaaatttcagctaaaatcgaccgcaactcgcaatcagttgaagctgctgatcgaaatggtctgtgaagtgcccgaggaagtgatcagttcccatttcgtccttttttgtggcttcgttctcaccggtaaatggccatgcttttttctttttacacacaaaatgaataacggaaaacggcacaatttgaaagtgttttagcaaatccaaaattttcagggatttccgatgttcgttcgtctgttcgatcactgtgcttcgacattttatcacttttattgcgcaaatatgtacagttgtgtcggaaaaatcgcgaaatattcgatgcgtttttgcaactgatggaaggtcaacggaagccagaaaatcggtcggttcgttttttgtttggcacatttagaatccaattaaa

SEQ ID NO: 78938 - DNA, 604 bp, Heterodera glycines
atgagctttttggacaagctgagcaacggggcgattgtttggctgttggagctgaacaatccctcgtgcaggacgagcggggcggagcacacattggcttgtgccaatttctaccgtgatgtgattgcgtttgtgcccggtggctgtgtttgtgcaattttggtcgtcctatttttcatggacattcgtcggttgggccaacgctctgcacaacaacagcaacaaattggagcaggacgcggaggggaggaggaagaggcaggggacagcggagaagcggcggagaacagcagaagcagcggacgagtcagaattggtcccgagtttggtgggtggaatgctcggactttttacatagaaattgcccggctcattgcaatacgccgtcattttccaaagacaattgaataaaatctaattttcgtgccgagttggacagtgctgataaaacccactcctttccctatcaaaaatttagaatttcacgaaaatacaatgtgaaattttgattttagatttgtcacgcccggccccgcccgttcatacattgacacaaattggtgaggaggagccgcccaacccgaacatcattcacttgccttga

SEQ ID NO: 78939 - DNA, 532 bp, Heterodera glycines
ggtgtcccaaggaaggccaaggactttggccttcggcttatcaagctgatcctcctgagggatttgtttcatcacctcttttgagttagagatgaattccctcaggttgaagcatccttgttggaggatgtccttggaaaatttgtatttttccaaggcttcctgtaccgtctcgcactcgaggagtacattgtccacataaatggactccgaaatctccctggacagtggggagtcgaactgttgcaagtgtggcggagtgtcgccgccaaaatgaatggcgagctgacgaccccgaacgcaactcggcaaaatcgaaatattgccaagttgtcgggagtcagtccctttgacgtgtcctttagccagaggaacttcgtgacctcccggtcttccggctccaatgaaatttggagaaatgcggcttgaatgtccgcgagaagcggaaaggtcgggcaacggaacagaagaagcatgcctgccaaatctggcagaagcactgggcctcggaagaagcagctgttgaggcttg

SEQ ID NO: 78940 - DNA, 3637 bp, Heterodera glycines
atgtccaccgtggacaccagcaaagggagagccaacaaggttcccaagtgcaaaaagccgcacgcgtatctgatgacgcgacggctgctggctaagtcaagtcgcgacagccggaatataatcaaagttgcagtgctctttgacccgggaagccaaacaacgtacggagcggatccgcttatcgataagctccgcccgcacaaactcacctccgaagagatggaggtccacgggtttggaggaaaacgggagccgttacgcttccattcacccatttactccgtccttctccaaagggcggacggaaaatgggaggaaattgtactcaatcggacggagaaaatctccactcacttcagcatggtcgaatggagcgccgatgaatccgtcacgaatcatcacgaagtctgtgaagcaatgtgcttcacaaaggaggagccaatgatactcctcagcgcaagacacttctggcaattcttccaagggaagagagaagtgtctcccgggctgtttgtgatcaacacaacatttggcccgctggtaaatggcgagtccactattggaccgccaaactcaagtcaaaaggccctttcgatgatggccatccacagcacaaatgtggaacaaatgccaaccatcaatgaggttgagcatttcttcaacctcgaatcactgggaatccaggatgatcctgcccaggatgacgaccaaacagctatggagctgtttaacaaatcaatccgtcaagagacagacggaagttactctgtcaaatggccgtggaaggagtccaatccggacctctcttccaatttcaaaatggcccacagcaggctgtcatcggtgctaaccaagctccgacattctccagaaattctggagaagtacgatgccaccatccgcgatcaactgcaacagggcaccatcgagaaggcccaaagggctcctggacagcttgagcacttccgccctcaccatggagtgctcgccaaaaagctacgcgtcgtttatgacgcgagtgctcacacacgcggaacaccaagcctcaacagctgcttcttccgaggcccagtgcttctgccagatttggcaggcatgcttcttctgttccgttgcccgacctttccgcttctcgcggacattcaagccgcatttctccaaatttcattggagccggaagaccgggaggtcacgaagttcctctggctaaaggacacgtcaaagggactgactcccgacaacttggcaatatttcgattttgccgagttgcgttcggggtcgtcagctcgccattcattttggcggcgacactccgccacacttgcaacagttcgactccccactgtccagggagatttcggagtccatttatgtggacaatgtactcctcgagtgcgagacggtacaggaagccttggaaaaatacaaattttccaaggacatcctccaacaaggatgcttcaacctgagggaattcatctctaactcaaaagaggtgatgaaacaaatccctcaggaggatcagcttgataagccgaaggccaaagtccttggccttccttgggacaccgagaaagacgaaattgtcttcaaattcccaacaactgatccattgaggccagtcacacgaagactggtcctcagccatctagcatcgctcttcgaccctttgggggtccttggaccatgcaccaatggaaggacgaggaaatcagaattcctcgccgcgcaatgctcaatgacacacagtcaattgagctccatgcatttgtggacgcatcggtccacacattcgcgaccgcgatatacgtacgctacgctcaaaggcaattgcgtcgtccaattgccagccttaatctttggggcgtttcgcaaatcgctctatcatgggtaaaacccatgaaactcaaccacaatttgttgagcgaaggctgaaagaaatccgagaatgtctcggatgtactttccactttgtccgtactggggacaacccagcggacctcgcaacacgcggagcaactacttcggagctccgcaaccatcatctctggtggaaagggccaacttggctcacacaagagagccatctttggcccaacgaattctgtttcaaagtaacagagtctgaccaacaaaactcggagaatgttggcccgagtggtgcgtttctcgcatacactcactcaaagcagccaaatgagcaggtcttaattgacccctcacgcttcagctcatggaagcgtctaatgcgaacgacaatgttcgtattacgattcctcgccttaatgttcaaaaggggcgaagaaacaattgcttcactcgagaagcacagaaaggaaattcgccaaatttccaagtctggggaattcaaggcggaagacttcgcactcgcggagcgagtgctcatccgcctggaccagatggatgatgctgaagaattccaacactttaaaacagtgtttgaagacgacggaattctccgtctgaataccagactggagatgagtgagaagccatacagcttctctcatcccattcttcttgccaagcattcagctttggcaaagctgatcattttggatcggcaccaaaaaaggcatcaccttggagtggacaccactctgacagaattcctgagcgaattctggatgccaagcgcgcgtttaaatgttaagcgggctcttcgggattgtcttctctgtcgccgaatgaatgcacaacaatttgcattaccaaccatgccacccttgccgggtgagcgagtacgccgacacgcgccatttcagtcaattggaattgactttctcgggccaacgacaatttcgttggccggagaaaaaataaaggcatggatcctcatcataatatgcctcgcaacgcgcgctgtctaccttgaggcaacattggacctcacatcggaatcattcatcaatgttctccgtcgattcataagtcgacggggaaaacccgacatcatttggagcgacaacgctacgaccttcaaactcgctcagaaaaccctggagcttctcagtgctccggggccggatcaggaagtacaaaacttcctgacccataaccgaatccagtggcgattcattgcccaaataagtccttgagcaggaggcttttacgagcgcctcgtgaagctagtcaaggactgcttcaagcgaactttgggtcgaaggattctttccttcgaccaactcaacacattcgtggccgaagtggaggccatcttcaattacagaccgattaccgcggtctcagacgcagtggatggaccagttccactgcgtcccatcaatctcttacaaccagagattcatagcaattgggaaacaacaacggacccaattgattcagaggaaatgttttcctccacacacgaacgtttagcttcccgaatacaagcactccgggaagccaaagacattttctgggccaaatggcactctgagtatttaacattactcagagaaagagcccagtgggaccacaaaggtccacgactccaaaacttcggtgaaccgaagaaagggatggtggtcctaatctctcaggacctcgttcctcgcaatcaatggccaatgggacgaatcgttgaaacacacggacggcctggagccatccgaa

SEQ ID NO: 78941 - DNA, 75 bp, Heterodera glycines
atggcattcgacgatcagttttatgaaaaaacgataaacaaattggccgagacaaaagcgttctatctgatgcta

SEQ ID NO: 78942 - DNA, 902 bp, Heterodera glycines
gttgccgcgttgaagtcgcgttgcgaaacgcatctgatcaattgcgttgaaattccgctgatcgaccgtttccttctgattgaacgcttcggactcgacaatttgaaagtgatttaattttcaaatatttaattttttaatattttaaaatagtttttaaatgatttattaaattttattttcccatttttagaattattttttgcatttgaatgttgataaattccgtgcctttttcactgcgaacagtgaacagtttgtgccttttatcagtaaagaatttttgtacgctttgtccgtcagactttgtggatgaatttgttaaattatcggctttgatcatattgatttttttggcattttcattaattgtttatttttcaaacaaattgtttttcctctttttggttaaaattatttattttcaaatgggataatttggcgaatattttggcattttttataacaaacaaagtggtgaaaaaatgtcattttacgtaattttttttaatttggtaggctaattgggactattaattgccatcaaatgactcaaaacttgctaatgaatttgctatttctaataaacaaactattctgttttcaggtgaccgcgttgaagtcgcgttgcgaaacgcatctgatcaattgcgatgaaattccgctgatcgaccgtttccttctgattgatcgctacggactcgacaatttgaaagtgattactaattaatatttaaatttttaaaagattttaattaattttccgcttttagaattcttttttgcatttggatgtcaacaaattgcgtgccttttttgctgtgaaccatgaattgttttttcctgtaatcagcaaagaatttttgtacgctttatctgtacgagcgatggccgggctttga

SEQ ID NO: 78943 - DNA, 2269 bp, Heterodera glycines
gatttttatgcgcttgagtctgtcgcaccagtgggaagcggcctaaaatccgatttgaaagccaaagtgcgctatttattgcaatcttcttccgaatcggagcagcaagcttctctgttcaatttcaagcatattcgtccgggaaagtaagttaagagaaatttttgtgtaattttcaaaacctaagcgagcgttaaataaaagcatttttattgcttgtaggaaattttcaactttacgaattttataatttttttaaaaatttagctaataaattcttaaattgataaatttataaccaattaaaaaattttttaaaactaatcattgaaatgatttttggcaatttaaatattaatcttttgattcagttggggcctcttttacatgcacaatgatgcgacgacggatgccgcacatcgccgcttagacaaatcggcactgaacgtcacatattcggacataaacatcgaaatgcatgaccagggcggcatttatgcaatcattgtcagcggaacaatggaaaaggtgaaaatgagcctcagatattcccattttaaattttccttctggtaaaatcgaagaaacaaatttttgtacgaattgcttttgttgtgtccccggatttaaggctttaaaccaatttgaatcaccaatttatgggagaggaatttatttattaaaggaaaagcattaaaaaataaatagcaataaaaatcgggaatgggtttgggtcaatgacaatcacagggcgtattataatatttgggaaagaattgctccgagggggcagtggagaggatttatatacgggtacaattgcgagagaggtactttgggtagggtgaggaatcatgaggactaatcacaaagggaatgttggagaaatgaatgggatatgcaacagaggttaatgggatagaaatggcacaatcattgaaaatgagaggagctggattcgaagctcgcccagccctgcttgggatggaatgaacagacagaaattttttgattggattgtaaaaaaattgaaatttggatgctgcagatacagcagctttttcggcttttctcacggaatttctaataaaaacgtatagaaaagaccgaatggagaaactccatcctcttaaaaattcccaatagaaccctggtccatacatacgggatttgagcacggaacccggtcctacccctttttctaagcattttatgtttctttttttagtcatttagcggtttggattttgaatcattaccatgttaacacatagtctactgttaagcctcgaaaacgcgtttttcgtgccattccgcccaacacagtgagcattctttggcaaatccctcaaattgccatcatcacagcagcagagattctgttctcaatcccaggctacgaattcgcatattcccaagtgaataaatattttgaaatcatgctataaatatttaaaaaaatatttatttaattgatagaattaattttcacgttttatatttccaattttccaacagtccgcaccttcaatgaaaactctgctccaagcttgctggtttttgacggttgccattggcgatatgatcatcatttttgttacatttttccattttggtgacatggctgtccaatttgttgcatatgctggtgaataaaattttggaataaaataatgataattatttaaaagataatatattaaaaaaaatattaattcgaattttattttctcagttgctatgcttgtggtcatcttcatttttgcacttttggcaatgtataatttcttttctcttaaactattatattaaatatttcgccattttttcaaaattttcgactgtaggcttttgacagttatttttcataaaaactcaaaattcttaaaaatcaaataaacgctaaaatgcacactgtcattttgaatttttcatgaatattaaagatatatttgggaagcctccaattattgcaaaaataattgaataaatggctttaataaaaatttaatttcagtttttattacgaataccgcgtcaacacggacgaaagttccaccaatgcagataatgatgatgatgatgaggatgaatttgaagaggcggaagaattgcggaaaattgacgaaaaacggggcccactcgaagcaaaatttgaagacaaagcggcggatgatgagaaaagaaatgagcaaaatattataaaaacaaaagtcaaaacaactaatggaaaccgaaaaaatggagaaataaatgtcataattatgtt

SEQ ID NO: 78944 - DNA, 185 bp, Heterodera glycines
atgtcaccaaaatggaaaaatgtaacaaaaatgatgatcatatcgccaatggcaaccgtcaaaaaccagcaagcttggagcagagttttcattgaaggtgcggactgttggaaaattggaaatataaaacgtgaaaattaattctatcaattaaataaatatttttttaaatatttatagcatga

SEQ ID NO: 78945 - DNA, 431 bp, Heterodera glycines
atgataagtaaggatgccaaaaatatggatataaaatcgcaaaatatggccataaaatatggaccaaaaatcgcgaaatatggacataaaatggcaaaaatgtcaaaatatggacataaatttttcaaaattgagtgcaaaatttcttcaaatttattggttgaaattgcatatgagatacatttccaaattttttttgactcggtaaggcgctttgacaaagacggctttcgttttggcaattagtcggtcaacattcggaaattggtctcgaattttttcggcaattctgtgcaatcattttagaagaaaaaaaaaacatgaaagctaaaatttattaatttttttagcgcaaaatcaaccacaaaagcgaaattttcgcttttttgcttatttttgacataaatttattaattttttagaaaatttaa

SEQ ID NO: 78946 - DNA, 157 bp, Heterodera glycines
tgattgcacagaattgccgaaaaaattcgagaccaatttccgaatgttgaccgactaattgccaaaacgaaagccgtctttgtcaaagcgccttaccgagtcaaaaaaaatttggaaatgtatctcatatgcaatttcaaccaataaatttgaagaa

SEQ ID NO: 78947 - DNA, 452 bp, Heterodera glycines
atgctcaacaaaaaatgcgtcacatttgctctgtttctgctgttgtcagctgctgtccttttcgtttcgggagccaaaaaatctgcgagtaagtttcaaatggactaattaattattttaattgcaataaacaatatttactaaggggatattaggtttttttttagaacgctttttatttttaataaattttccaaaattatttttcataccatatttaactatttttgggatttttaattttttaatttaaataaattttgtaaaattttgtcctcagtttgaaatatgtgcgtggtttttattattttctatgcatattttataatacagtatttataaaaacaaagtctgtaaatatgatttctgaaatacaaggtgtgaaaaataagaaactatatagaaaagcttgtattgttgaattcaacttgttaaacggttattttttttaa

SEQ ID NO: 78948 - DNA, 838 bp, Heterodera glycines
atggtgagtttttcaatttctatgtactttattaagtaaacaataataatcaaacattttttatgattgcaaagcatttaaaaaatcataggcttgtttattttcattatgttttggaaaaggtcaattaaataaacaatttttttttgtaattttattaattgtataaatcttatgcaattttctataagcaatcgatagtgtaacaaatagagaagataagttctgatcaagcacacacctttcattatttccggtgaaatatgtgttcatattttaacaaaaagcagtcttgaatgtcgtcgaaatttgtggtaattccatggctatagccccgaccaattgcgctggaattttgccatgaggcttattttttgtgctggtttcgaatttacaggcgcccatgcaattggagcgcattaaattttttgtcgatttttcttcaatacccacattatacgataagcatttcctcgcacaccgctctatttgctctgttttaaacaacaaaattatcccaagcattcatacctactttcttaattgcactgggatcacatctaaacgactatgctaaaaacggggaactaaactgtattaatatttttaacaaattgcagcccttttcgcctaccctgttaagagaaatcttaatttcactaataatttctcaattttcttctataacagattaactcttctatggtgagtttttcaatttctatgtactttattaagtaaacaataataatcaaacattttttatgattgcaaagcatttaaaaaatcataggcttgtttattttcattatgttttggaaaaggtcaattaaataaa

SEQ ID NO: 78949 - DNA, 759 bp, Heterodera glycines
atggtggacgacattccggaccaggtcagctggaccaacctggacccggagcacgtggtcagccaagtgaccgccaccttcgacctgggcaccatgcgcaacttcttcatgcgagtacgtctcggatttttggaaatgtttttttcaaaaaaatgtcggctggtaaaaaatgcaaaaaagaaatgttttttctctttttttgaactttgaaatttaaaattttcctttcataaactgataaaaaaatcattcggacaggttcccctcgagaaaattttttaaaaatttaaaacttctggattaaaaagatttttcttgctttctgaaaaatgcctatagacattatttcattcattttccagtccggcatcggcaaaggctacttggaacggttgtgcatcgacccgcttgacccggcatgtccaccgacggcaccgaatcactacggcggcaccgtgttgtgcgatgcaattcggcattttgagcagcgaattgttggcgtcggacaaatgaccaaccggacaattgaggacattttggcgccgtacaaatccgtcgacggcacaaacaatgccgggaacaaacagaagaagcagaacacatcgccattcgacattttgcaagcattttgtgagtattgtttaagggtttatgtgtaaattcgatggaaaaagggcagagaatggagaagaggatgagagacagtaccataaaaggagcaaagagagagtaagagattgggaaaagagtgcgacaaaa

SEQ ID NO: 78950 - DNA, 378 bp, Heterodera glycines
atgtctgaaaagcgaaatggaaccagcatttgggccgaaatctcacaaaatttgccattttcgggacaaaaatggaaaaagattgcaacagtgagagattgtcgaagggtctcgagtctgtggccgttttcaaaaaattttaaaattttttagagaaattttaggacttaacatgcaaaaatctctattaaatctccagtactattaaattgttgtatgcaaattttatgctctaccgctgatgctggtcgacgcgagcggatggaccacacgtgcggactgttcaatgtaagtgtggccggcccgtcggttgaacgcgtggttgtacaacgaatcggtgaacgcacgggcccaggcactgatcacctatcaaataaa

SEQ ID NO: 78951 - DNA, 1296 bp, Heterodera glycines
gatgaccaacatcaacatcggcatgaccatggcacagcatcaaaatccgctgaggacgaaagtgccgccgatgagaccattcgggcggaggccttacaatccgtcattttggtcgcctcaccgacggaagtgttccgacggtttaaggcaatttttagcatttttttatgcgaagccatgaccgtttttattgtttaaatttcattttcatggcttaggactctgccaaatttgctgctggaaacgaaagcgacaacataacgcgatggtctccgctggtggccaaagaggtaataataataataataaattgggaaaaacaaaatacgacaaaagttaaactaaaccaatttgacggagtgcattatattttcctcccatacggaaaaatttcttttaaatggaaatttttaatacttttccaacatttttagaggtttttttaactgaaaacattttccaaaataaaatttaaaaatcatatttgtcatttttacgttttttaaattaaaaattgtgaattttgctgaaaattagccctccaaccttgtaatttttggtgattttcgattgaaaaagcgcattttccatgtctactcactcatttatttgtttatttgataggtgatcagtgcctgggcccgtgcgttcaccgattcgttgtacaaccacgcgttcaaccgacgggccggccacacttacattgaacagtccgcacgtgtggtccatccgctcgcgtcgaccagcatcagcggtagagcataaaatttgcatacaacaatttaatagtactggagatttaatagagatttttgcatgttaagtcctaaaatttctctaaaaaattttaaaattttttgaaaacggccacagactcgagacccttcgacaatctctcactgttgcaatctttttccatttttgtcccgaaaatggcaaattttgtgagatttcggcccaaatgctggttccatttcgcttttcagacatgttggccgagttctgcgacttcaattacgccatcattttggccggctacttgctgatgttgctgtacgcgctgtactcccagtgccgcttcgatggctgctgctcgctgggcgtcgagtcggctgttggtttggcgttggccggcgtgttcaccgtcaccatggccagcattgcgggccttgggctggccacatggtctcagtttatgccatttttgtatagatttttttaaaatttttaggcttggcatcaatttcaatgcggcgaccacccaaattgtgccattccttgcgcttggcataggta

SEQ ID NO: 78952 - DNA, 765 bp, Heterodera glycines
atgtttctgctgttgcacaactatccccaagtggtgggcaacgtggcacgcaatgagctgggctttctgatgcgcgagaccggtaggggctgggcaaaatctggcattttaattaaaaaataaaaaatatacatttttcagggatgtccatcctcaccacgtcgttcaacaacattttcgccttctgggctggcaccattctgccaattccggcactgcgctcattctgtggtcaggtgagtgcctttttgattgttttcttgacattttaaaaaaaattgtcatcaaataattgaattttgcactatggaggcccaatttgaaaatggctaatttttcgcgtttttttcccgcgtagccaaaaatttaggcttttctggttacgggcctgattcaatccatttattctgaaatttggaaattaattgctggacagaattttgtctacaaatttatttttgtttttttcaatttctcatttgtcagaccgccattctgttgaccaccaatttgttcggcattttcttcatttacccggcattcattgcgttggatttgaagcggcgcaaggcgggccgacgcgacttggagtttctgtgctattattgcctttgtgtggacgacgacgacgacgacaacgtcgacgcggaaacggcgcacaaaattcggcgttccgacgtaacgggaaaaaagattgggaaattgatggggcatcacccagatgtatctcaatccattaggatccagattgaagtagtacgctga

SEQ ID NO: 78953 - DNA, 1448 bp, Heterodera glycines
atggtaaaatggtggtccggtgctgttgtcactcacttttttttttctaaattttcttctccttattttaaattcttcaaaaatttgtatcttctactatagtttgacagaatgccaaatttaaaaaaaaaatgggaaaataaaattatacaataaaaaattcaatttgtcttttcagctcactcatcaattcttgtccactgggctccacgcgttgttcccctcgctcaacggcactcttcccactgcgaatggtgccgaccgtgccgggttggcactgctcgagcgtgacccgctgttgtgccgagcgtccggcggcttccgattgtttgtgcgcaaattcacggaccaacaattgctcaaatgtctgcggacgccggcactgaacacacttggccaatgggcaccgccaaacttgcgctacatccatctgctacgttcggcggtaaaaagggggacgggacgaaatctcgccgccggaatctcaaaaaaaaaaattctaacttagaaatttttgaaggaaaaaactttagaaaattttttttataagaaaattccaaaaaaaaaaaattctaacttagaaatttttgaaggaaaaaattttagaaaatttttttttttgaaatttctgcggcgagatttcggcggcgagattttggggtgcacccgtaaaaagtgccaaaattggccaacagttttaagcattcattaataaaaaaatgatagtggagaaatagcttaatatttattgcatgttttttttatacttcacccccccccccctctccaaaaaaaatttaataaatttactgcaaaaaggtaatcaattgtcggacccaattcttggacatttaatttaattaaacacagtaatttttgaaattttatatttgaacatccaattgaacatttgttaaacaaccgactcatttttaaaacatttttccatttttttaagtggaagaaactgactcaatttgaacgctttgattggcaggaactgtttgaacagtatgccaaggatgggcatgactcgacgctgggtaaagaaaaaaaacattttgccattttttctaatgccaaattaatttaaaaaaatttttgctcaaggcattgtggtggatcagaataaacaactgcttgaggcctcagccaacaaagaggacgagcagcgtttgtgtcagttccaatggctgtccacggtggattctgagcatttgccatgtccattgtgctcatttgggaaccaacgacgatatgccattggacaactcttggtaacgaaaaacggtggcatggatatgaaacacgaaatttgtaacacagaaatttgtaggcattcttttccgaaaaatggaatttatttattgataaaaagtttttgtttttttgtatttttatgccaggggttcgattctacgcataacaactaaaatacgtaaaatgca

SEQ ID NO: 78954 - DNA, 424 bp, Heterodera glycines
atggtttatggacaaatgtcttatattcctaacttttgcattttgttagtttaccatgccataaattttcgactcttaaaattgtataaaaaacaaaaatttaatttgaattctttttattctaaccctcctcgacgattgaaaaattacaaataaaactcaaactaacaattccgcaaaaaaaaaaatttctttaggcatactgtatctaccgtaaccctaaaaacgttgagagcctggggcattcattatccaatgaaaattttgattagaaaaaaatttcagaccaaaacagtggggcggtgtagaatttggctggacattcagggcactgcaacatgcattggttgttgatggcccaattccgatgctccatggcacagtgccgttccaattccatcggcgagttccaaccggagcgtaa

SEQ ID NO: 78955 - DNA, 263 bp, Heterodera glycines
aattgccgaaaaaattcgagaccaatttccgaatgttgaccgactaccgtatatgctctttttatagcccagtctctattaataccgcagtctccaattatcccctgtattctgaggaggttgaaaaataatcccccatgggctataattagagcatatacggtaattgccaaaacgaaagccgtctttgtcaaagcgccttaccgagtcaaaaaatttggaaatatatctcatatgcaatttcaaccaataaatttgaagaa

SEQ ID NO: 78956 - DNA, 104 bp, Heterodera glycines
aaaattttaattattttttccgtttgacgcacatccgaccaaactgatcaattattgtagaagatactagccgcaagaaacaaaaaaaattaaaaagttaagaa

SEQ ID NO: 78957 - DNA, 3864 bp, Heterodera glycines
accttccaatgctcccaaatcttaatgcgatttcgccgcatcacgccgtggtacagacattgattaattccacacccgtccgctgcttaatggacacttgcgccagtttgactgtcgcaccgcgatcagttgcagatgaacttaattgtcgcacattttcatccgatttggaggcaatgagtgcctcaggccatgtcattcgcctcaaggaatatgctcaggtgaatttgaacattgcagggtacacagtccggtcaataatttattttgtggatgattctgaatttactgtagcccgggattacagcgtaatttttggttgggatgtctttgaaaaattgcccccaataaaattcgatcatttaaacgggaaattttttgttggggacaactaatccaaattgtgctatcgttcgattcttttactgaacgatttgcgcgtgtcggcagagaaaaacacactcattcaggccgactcccaaatattggtcgatgcttcaatcgaatcatccccaaacccaaaaaattcattttgcattgatcgccctgacataagtcttattaagaagggactgtcagtcattaatagtgtctcgcctgcgggccagaaacaaataaaagtggcagtggtcaacccaaccatggaaccaaaatggatttggaaaggaacacatttggcctttgtcaatgaattgttgtgtgaccgaaatggacttttaagggaaaacagcacaaaagaaattcttacccttatttctgaacgaaaggaaatggaaattgaccccacatttgtagtcgacttttctagggccatggtcaaagacaaagatttggaaaagctgaaggcattaatcgaagaattttctgatgtttttagcaaattcaggtacgatcttggacttttcacagccgctgaacatcacatcacaaccacaactgaggaaccaatagcatctgcgccaagacgaatgccgtacaaatacaaagaggaattgaagaagcacattaatcagcttttagaagcaggagtcatggttgagtctgacaccccatgggtaactccaattgtcattgtacagaagaaggacggtggaattcgtccttgtttagactttcgcaaactcaacgaagttacggtgcccgacaagtaccctctcccacgccttgacagcatcatggaaagggttggaaattgccaattttacagctctcttgacttggccagtggctattttcaaattaaattgagtgaagaaacgtcaaggaaatgtggaattataactgaagacaaagtgtaccaaatgattacgatgccatttgggctgaaaaatgcaactgcagcattttcgagggccatggctatcgttttgtctggattggaggatacttcattggcctacgttgatgatgtgctcattttcacaaaaagtccgaacttttcagagcacttaacggcggtaaggaaagttttggagcgttttcggctttataatctgaaacttagcccgaagaaatgcatttttgcctcaaatgagatgaattttcttggatttgttttaacagctgaaggttttaagccaagcttaagtcgaatcgaaattctcaaagaaatgcctgtgcctttaaatgttaaggaagtaaagatagtgctaggacaggcaggcttttacagacggcacattgagaactttgcaatggtcgtagagccattgctgaagcttacgaggcaaggcaataaattcgaatggggcagggaacagcataacgctttcgacaagataaaagaattacttactcaagccccgagtctaatttttccagattacgacaaagcatttcacattttcactgatgcatcatcgactggacaaggaggagttttaatgcaaaagaatgacgtgactggcacattttctgccatttcctattgcagcaggaccctctctgctgctgagaggaagtggccggcagttcaaattgaaatgagtgccattatttatgctttaagggaattcagaccattcatcttcatgtcggacattgaacttcacacagatcacaaacccctcgcgtttttgctaaaaaaatccgaaaccaatcagcaattggcacggtggctcattgaattgcaaaactaccaagttaagattgtccacgtggcaggaaaagccaacactttggctgatgcactttctcgtgccgctgaggacaagcccttgtcggaaatatacaatgtggatgaactcgaggacattatcgaatttccggtctgtctcgctttggcagcacattccagggtggtcgcggacccatttttgcatactttgaccatccgacacgaggatggaaacacttacgaagttaatttgttgaaagaacaagcagctgatcctgaagccgcggcctacatttcgtttgtcagggatggggaatttccagctgatttggatgagaaagaaaaagaattatttgctgtaggcactgccaattacaaattaatttcgggaattctttattttgaggacaagggactccctccgaggatatatgtcccaatttcgttacgtggactcatttttgaatcatttcactcgtctcttttgggtggtggtcatttgaattacaggaaaacaattgccaagtgcaaaaaatatttttggcccaaaatgtactctgacgtttaacttgggtcaaattgtgtgtcacctgccaattgagacacaatccaacacccgcgtaccgggaagagatgctcatggtgccagccaacacactttttgccaaagttgggctggacttggccggcccctttccagtcacccaaaaagggaacaaacacattttaaatatcgtttgttggttcaccaaatacgtgatttctgtcccggtccccgacacaaaagcacaaacaattgcccacgcctttctcactaattgttacttaaaatacggcggttgtgttgaattgatcaccgataatgcctctgccttcacctccgaatttttcagagaattttgctccatgctttacattgacaaaaagtatgcctgtcctcattggagtcaaggcaatgcgtcaattgaacgcacttttcggacatttcacaacatcttggccaaatacatttcgaagactcagcccgacttcgatgaatttttggatgctgccaatttttgctacaacacgtcagtgcatgcttcaacgggtgagactccattttttcttatgtttgggcgtgacccaattttctgtgttgatcagatcattgatccgaaagttcgtgatccgatagccatttcggaccgtaatgaatttaaacagaagctggtcgttgccataagacacgcgtggcacgctgcagctgatgaatatgcaaaagcccagcgaaaaatgaaggaacaatatgacagaaaggcaaggccacaacaaatcacaattggtgatcgagtgctgatcagaaactacgacggacgggtcggcacatccaaaaaattccaattaccgtggcgaggaatttttcgggtcatcaaaattgagggcatttatgttactttgatcagttgcacttcgccaaattcgatcccaaaaagacttcacttaaatcaaatcaaaaagtgcttcgaaattttgggccccccgtgcactacgccaatgcaaccaattgaagagcaaaagtgccttgaaaatacaccaagcgtggaggaagtcagttcggaaaggtctgaaattaggaatgaaatggaccccgagtcccgaaaagatgagaacttagaccaaatccaagcccgagggccggaaaaaagaccagaaattgaagccgaggcggagaaaatcaataaaaaaacggatatggaaccaagaaa

SEQ ID NO: 78958 - DNA, 872 bp, Heterodera glycines
  unsure (1)..(872): unsure at all n locations
atgccgcgcctgttttgtcggctggcgatgaatccaacggaaagtcaatcgaaagggtaagcgaattggaaactcaaatgaaaacaatgccataaataatactaaacctgttcagcacatctcagcgccatcctccggccaacagcaaatcgtattggacaacccaaaggcaaattcaagaaaagtgcgggaatcgattggcactaacactgcggggaatgcaacggcagaagtgggtagtctcgtaaatgggacggcggacgaagcgatgagcacgacaaccgattcgtaaggggggcagtcccgtggcatgaatgtgcggttacctttgaggttaagttggtttcactgcctatgtcgtattaaagaaattgtaaaataaaaaattcaacgcccaatgacagcatttcaaccgaagccctcggttgtttctggcttattctcctcatcttcttcatagtccttgacttacactgcaaggcaaaagcaacactacaacaaaaaattaagaaaacaaaatgagggtntatatgtaaaatttacagaattcgtgcacaaaaaaaacaaattncttagggtcagattttcgtagttgcacacgcataaaactttagttctaggtttcgcaagaatactaaacagcggaaatacgaggtgcggaccatcttgtccacgacaacatacaggaaggatggacaattgcgacggatcttctatgtgcattggctgggtaaattaatttgtttacaattttacacattttttctaattaaatttattcaggctagagccggaagaaattgctgaaaaactcagaacgaaccttgagtatatttcttgtaagtttttatggggaaattagttatataata

SEQ ID NO: 78959 - DNA, 236 bp, Heterodera glycines; identical to SEQ ID NO: 56319

SEQ ID NO: 78960 - DNA, 1706 bp, Heterodera glycines
cttgcaacaaaatatttttttccaattgtaaacacaaatttttttttaggattttcaagtgacattcactggtcattcattgggtggtgcgttggcctcactcgcagcaatgcgaacagtgcttgaaggaatgcggaggtaaaaaaataaattttaaattttaaaattttttcacttttatttttaggagtgatcaaatcaaattgtacacatttggtcagcccagggtgggcaatgtcgaatttgcattcaaacatgatgaactcatccccgagaggtgtggttttttgtgttcaatttcaccaattagcttcataaattttccataaatttgtattattttttgaaatggtttttttagtactaaaatatggtgccgtaaaacagtatttatatgaacattgaaacaaaacttctttacagagtgctgaaaaaatttacggaatttttgtattttgggtttttgtattcgattttcaattaaaaactcgatgatttaatggatcacttacgaatgaccagagaaaccaaaaaaaaacacagcgaaaaatggaccattggggtcactttttcaattggttaaaagatttttcaaaaattacttttaaaaccaaataaaaaattatcaaccggtttataatggtcagaaatgttcattgaaaagactggtgaagtaaaatcagcgaaaaattttgaaaattaatattcccaaaatataaaaattctgtgtctttttccgcaccattagttgccaaaaatttgtcaataaaattattggttcattatttgggtttttgtcagtttccgtgttgttttccgcatggacattgtggcacatatgcctccatgtgccaaaaatcagcattacgagggtgtggacgaaaaagatgacagcaaaccgtgtgatccatctgcttctaatggcattgcatatcatcatggaacagaaatttggtaataccaaaataccgccaaattgtaattaattatttgttatttgctattgaccggatatatattaatttaaggtatcgaataattttttaaattcaattatgatttaataaattgatgtttttatattcctttaattttaagaaaacaaattaattcgtttgtttatattcgaaattttaaaaaatttaaataacactgtaaaacatcataacttactgtaaggtacccgtacggaatggaccctggcgatccgtattttgaatgtgttggctcaccacgggacgaagacttccactgcagcgattcgatgtcctttgaaatgtccaaatactccatttacatttcggaccatcgtcattattttggacacaaagtgtgtatatgcagatttaaaaattaaaagcatttaaaagctttttataattaaaatatttatctttttttagacttttaaatgtcacaaaaattattttaactttatattaaaaaccaattttattgattcggtttttatgaaatatttatgaattagacaaataatttaaaatctgttgggatgcgctaaatgtctaaatatccatattttattatttattttttaggttcctgcctggggcaaacttggatgcccgtcaaactcgcgcgggttggaagcattgcacagtgagccaacagatgaagccaacagtgccgagggcgggggcatttttcaaaaattgtctcaaaagttcagatcgatcggcagaata

SEQ ID NO: 78961 - DNA, 893 bp, Heterodera glycines
atgttccaatttttcattttttccacccttttttgccttgtttgtgtggcttatgccgtcccagctgaaaatgtaggttcaattgtttggaagagcaattaaatatttaattatgtggttaatttgcttcaaggaggagcgtttctgccactcgatggcagacaattcggtctacaaatgtgtccactgcaatgatcctaaacaagagaaaatttgtaagtttggctaattttaccaattaaaaatttaatcggagaaaaaataattctgaaaaattctcctaattataacgattttatgccaaataatctttaatatctgaaccaaaaagggatttttatgactttagtaggacactgataaaaattgtggtcacaaaatttagcatgattatcactaatttaaatgattatttggcacattaagctgctatatgtgagcgatgacacaggctgcgtgttctaattaatatttcattttaaaataattcaaattctctaagaaaaaaattttaggcgtcaatctgcgcacgcttttcgaaacggtttcggtgagtgccaaatcagagacgcgtctgactttgacgacggaaagtgacaaaacggagactctgccgccatgcatcgaatttgttcaaactgaaaccaatgcccaattgaatcatcgctctacgattaaggcaaagacggaggccaacaaagtcgacggtgcagatggtgaacatgtgcaaattgctgtaatcgtaagtttgagattattagttaaatgatcatattcgggttactgtatttccttccctaatacagtaattaaataaacagaaggaaaccagcaaagtcgacaacaattccgctgctgctaataatgacaaacagctgccagttgctgtggtg

SEQ ID NO: 78962 - DNA, 960 bp, Heterodera glycines
atgccaactgttcgcgaaatacttaagagtctgcaaaagcgagtaaaaaaagcctcgcattgctacaaatgaagacagcgtactgaatgttgagaggacagacgcagaacaacaaattgaaggcacttcaaccaggaacaatttggacgtcgcttcgagtgatgacgaagaaaattgtgagcccgttcaattcaaacgtggagaaacaatcctgggagctctttgtctttggtatcaaggtgttaatagtttttttttatttgtatttctttattttcaggctttcgatttatcaaaaacagaaaagatggtagctggttcaggtgcgaacagcgcaattgtccagcgacagccaaattagaagacaacgatttgatgacaggcattttgggcgcaaaaggacatcaccatggttgcgcaccatcgcgttatgatgcagagacgaaacgaaatcagatgaagcgcctgatcaaggaggagccaaaaacgaaaccatgtcaaattcggactgacatcgacgatgaagtcttcgaattgctcggcagcaatgaagcgctcgaccaaatggcgaacaggtagacaaaattcagagaaaataatgacgcaatatttagaacaaagaacaaattcgttggtggtgtcaaccgtgccgatccactgaacatacaaattccgcctggtcttttgataaagaatgatgagtccgtcctcatttatgacagccgtgaagtgaggactggacaatctgatgttgtcctgattttcagtcatagcaaggcaagcctacctatacttatgtccttttttaaacaaaacatccaggtgtcctttattaattcaaagtgttttttatttttacaaatcagatcagttctttctttggcactcattccgccagtttacgttcggcacgctttttcaattattgtcaacgcggcaccccttggagttcaaggatga

SEQ ID NO: 78963 - DNA, 2269 bp, Heterodera glycines
atgtcatgtagccgtcctgaaagcatccaacaaaacgaatatgtaatagaaactgagcaattttcgagccaattttcacacatgggaatgatatccaataaaaaagacactggaaaaattagtcgaaatcaaatgacagaggaacaacgacaaattatcatggcaaaaaacgcaatcgccgcaaaaacatatagaaaaaaagtaaaaaacgtagattttttgcttttgcaagcgtctgaacaaaacacttataatgttgaattgtatgaacttagtgaatttaaagtaaagtgtaagcattgtccggctatacatttttcagaagaagaaagtaagacaagcggtgccaatgaattttttgattgttgcaattatggcaaactatgtattttagaagaactaatccaggagtatccaatagaactaagaatattatttcagcctgagcttgacaaaaataattatacaaagattggagaaatgcaccaagattttctaaaaaatataaggatgttgaattcttctttttgctgcgcttctttaggttgtatgaaatttaaattcccggataaaaatattccaatttttaaaatacaaggcggtatatatcactcatataacacatttgctcaaccagataataacgagttaccaatgaatggtcagttatattttatagatactgatcaagcaatggattatcgaataaatgcgttaaataaaaaagtggtaggagatgataaaattattgcattaatagcatatattgaatcttatctacgccaaaattatgtttattcacaagcatacgaaatgatgaaggatgtatatgaaaatgtattaaaagaagccaaaaatgatgctattcctgaacttacgatggtgtttgatgttagaaaagatgttgatttgagacgttataacattccaaggtcaaatgaagtttgtgctattatttggcgtgatgcaaatgacgatataccagcagctaatgttgtagtgcatacaaaaggcaataaaaaactagaaacaatctttcctttaagtccattggttgagccaatgtgttacccaatcttttacccaaataattaccaaggatggaatcatactttaaaaaactctgaaaacaaaaaaatatcgttgtgttattttactaaatataaattattttttcgtgaaaatgggaagtttttgcctcatcattatagtggtaaattatttcaacaatggattgtcgaccaagcagcaagggttgaatgggataggttaaattatattaagcaacatcaaaaagaaatatgcaaagaaacatataacgcaatagataaatttttatttgcaaaagcaactgaagatggtgttcatgttaaaaagaaaattattctgccttcgtcgtttactggtggaccaagaaatatgtatgagagtttcagatcggatattgttgcaagagtgttttatttaaaaataacccaatttttaaaagaaataattgatggtcaaatatttggaagagtttcggggttttgttattcaattgagtttcaaaagaggggtcttccacaccttcatatgttattaactttagatggtttaaataaatggaaagaaacagatgacattgataaatttatatctgctgaaattccagacaaatgccatgatgaaattttatatgagttggttacaacattaatgacccatggtccgtgtgggcaagattttcctaatgctgtttgctggtgtcagaaaaaaaataaatgtaataaaaaattccctaaaaattatcgtgaaaaaactgaaataaatgaaaatggttatcctttgtataaacgaccaaacaatggaaaaacattcttaaaaaaggattggaaaacagggaaaagtatgtctatgacgaatcgtgatatagttccctataaccggtatttacttaaaagattccaagcacatataaatgtagaaaaagtggccgacattaaagctgtaaaatatatttacaaatatatttttaaaggttatgacgcagcaaccgtacgttgtgtaacgagtgggaacgaaaatgtaaaagaattagtttatgatgaagctggctcttttcttgatgcacgttatctgagcccagtcgaagcctgctggaaaatttttaaatttcctttgcaagggaaatctcattcggttcaaagattacctgtgcacttagaaaacgaacaaattatattttttgatgaaaatgatgaggaggaaactattatagagaaaagtg

SEQ ID NO: 78964 - DNA, 844 bp, Heterodera glycines
atgagtcggctattggacaatgcaaaatctggcgccgtttttgtatcgttcggatcattcacaaatgcccaattaatgccctccaaaatgaaaatggcctttctaaacgcaatggaacagttctctgaggtcgaattcatttggaaattcgaattaacagaagaggacacaaaagtgtttgccaaatatcgaaatgttcacacaatgaaatggaccgaccaaaaagcaattttatgtcagtgcattaatgattaattagttgtaaatatttttacattactttttttaaaagtgcatccaaatacgcgtgccttcgtcacccattgcgggctgaacagtgtgacggagtctgtgcgtgccggggtgccggttttggccattcctttattcggggaccaacttcacaacgcaattttggccgagcaaaagggcgtcggcataaaattggacgtaaacgctttgaggggggaggcggcggacgaagtgttcttcgcctcacttgacaaggtcaattcggaacccttaaatgttttcagcaggtaaatttcagattctccgtaatccgtccttccgtcggaatgcgcaaattttaaagcgcaaattccaactgacgccctttgagcccaaagacaaattggtccgatgggtcgaatttgccgcccaatttggggaattgaacgagctgaacttgccctgggatgaccagctcggcctcctcgccttttactccgtcgatgttcctctcttcgctgtttcattcgtattttttgcttggattgcgtttaaaatgacaactcttttggtcaaatgtttgttgtcaaaaagaaaagaaaaaaatacataa

SEQ ID NO: 78965 - DNA, 1411 bp, Heterodera glycines
atggtatttattaaattttaaatatatatttaaatataaatgattaccaatggtgccgctggaagaaggctgcgaagatgagcgtttggcattcggtccattggcattggcggtttgaaattggcaaaatgtatcattgtcagaatttgactgacaaaaaagttccgcggtttctgatattccaacagaattgtcgctgctgatcagcatttgattcctcttgataatttagttttgctaaaggttttttttttaatttaaattaaattttctttttccatttcaaaattatattatttttgctttactttaaatttgccattttgcctccactgtttctacgaattagcaaatataggggaaaaaggcgttcgaatgaacagagaacacgtggaaaaggagaggggagggatcattatgattttgagttttttaaaagtgattgattgctgacaaaacaaacaatgatgaatgatattggataaaccaaccatcattctctttttggcttggcttttcccacttgtccgtccgtccgttccgtttcgatccgttcgttcgttcgttaattaattggttgctgccttaggcgatgtttggtggcaaccaaaggaaggcggaagtaaaagattcgtattttcttgtaaatattgccctgtccacggggaaaggtgcaaatgaaatgccaatgcccaccgcctcccacttttttttcttcttgaatttgcatttttgtatcaatcagaaaacttcgacgattgaatttacaaaatttgccatatttagcattaatcattaattaaatcatttgattgtctctttggctttgtaattttctgctgatgcgcaaatagtccttattatttcttttgttaatctaattttttaattcgcaattgtcgctttttcaatgtgaataagaaggttcagcagaataaattcaaaattataaattaattcgaaattccttaattaattaaaagacaaaaacaaactccgaacaaaaaaaaaagaaaaataaacgaacatgaaaagataagaagaaattaagtgaatgacggacgaaaaaaaagtgaaatcgaagagccgattaacaatcaaacagaacaatcatcactcggatgggtttgacattatcacaaaaattgtacgctgttcaatgttagttaataattttttaattttgaatcatctcttaataaaaaaatggtaaattaatccgctttagctgattattacatctcatccgatggatttcttttcattgctaatattaaaattggcatttctttcacttttcggcgcattcgctgaagtgccaaaaaaacggctgaaaagtgttggtgtattcgccgactttgacatggagtcacatgcaattcatgggcacaattgcggacactttggctga

SEQ ID NO: 78966 - DNA, 258 bp, Heterodera glycines
atgcttctcttctgtaagccttttctttcctcgtctgtctctgtactgtctcgtccctctctttttctcagcctctcttctcctcgtgctcctttccgctcttctctcacttctctgctgtgtccaattgtgccgtcgctcaaaatcctccacccattgcaccgatgtgcacgaacttatggctatcgcagcggaggcgggagggccggtggtgtcggatggacgcggcggacattgcggtggcaatcggatcagcgg

SEQ ID NO: 78967 - DNA, 101 bp, Heterodera glycines
aaattctatccgtcaaatcggcttttggaattttaatgagtaaatcaggaaccgtaaatgacattctatgcttctcttgttggatacacgggaagaaataa

SEQ ID NO: 78968 - DNA, 1335 bp, Heterodera glycines
atgacattctatgcttctcttgttggatacacgggaagaaataatagttagtccttttgttgaatttttagaaattttatccgtcaaatcggcttctggaattttaatgagtaaatcaggaaccgtaaatgaaattctctgcttctcttgttggatacacgggaagaaataattgttagtccttttgttgaatttttagaaattctatccgtcatatcggcttttggaattttaatgagtaaatcagtaaccgtaaatgacattctatgcttctcttgttggatacacgggaagaaataatagttagtccttttgttgaatttttagaaattctatccgtcaaatcggcttttggaatttttatgagtaaatcagtaaccgtaaatgacattctatgcttctcttgttggatacacgggaagaaataatagttagtccttttgttgaattttttgaaattcaatccgtcatatcggcttttggaattttaatgagtaaatcaggaaccgtaaatgacattctatgcttctcttgttggatacacgggaagaaataatagttagtccttttgttgaatttttagaaattttatccgtcaaatcggcttttggaattttaatgagtaaatcagtagcgggtacgtgaaccgtcggctatttagctggtaaaaagcgcttcgcgctttgggagcttcgctacctaggctgtgaagcgattcaaattgatcgaattggttggagagattttttgaatttttaaaaaaattattagaggtttttagtccacattgaggctcaagacgggcgcttcgcgcccgttttttaaatttgttgaactcatacgggcgtttcgcgcccgttttttagcttgttaggcgcttcgcgcccgtttttcaatttttgttggccttggacaggcgcttcgcgcccgttttttaaatctgttgaacttatacgggcgcttagcgcccgttttttagctggccttggacgggcgcttcgcgcccgtttttcaaattttgttggccttggacgggcgcttcgcgcccgtttttaaactttgttgggctttgacggccgcttcgcggccgttattaaattttagaacagatacaaaagtgattagaagaggtacaacattggtcagaagaggtacaacggtgattagaagaggtacaactgtgatcagaagaggtacaacagtgatcagaagaggcaaaacaaatgtgttaataattttttaaaaattaaaaaatggtagttattaattaaaaacaacgttggaaatttattcatttaatttgaaattaaatgaatttttttacaaattcaaaaa

SEQ ID NO: 78969 - DNA, 1001 bp, Heterodera glycines
atggaagaatttgtcggcatttaccaattcaattctcatccgaatctcagcggtgtgcccgggctttatccattgaaatttccaagccacgcgcggatttccgattggaacaagccgaatgtgaacagagggacattggcgatggaaattaagaaattgtcagaatttgctcgagagaaagaggggactagccgattcagtgatgctgtgccaataaaaggatttcagtggaaaatatgggcacagataaggacgaaaaaggacagcactgagaaatggctgggctttattcttaagtgcgatgcttcaaaagaaggtgggatcaaaataaaatttacagatcccattgcgaggtatttcacatagaagttgtgtttttctgattaaatcgtattttctatacaaaagcaggcacagaacaaacaatacagggccgaatgcaagaatacgacaaaatttagtaatatattttttggaattcagatgaaaattggaattgcatttgttcggcaacatttcgaattgtttcgcaaatgcgaggcactgaagatttaattggaaagtgcaatgaccacttttttaacattaaaataggcatctgcggtttccacggtttcatcacttttgaagtgagcggcaaatttggaatgccttttaaatggtttttgttaattaagcaattaatggacccaagcagaggattgtatgacaaaaatgaggacaaagtgacattgaccattgatattgctgtggaagatcaaaaatcgaagaaattcgattcggacccaaacaaaccaaacggaaaaattgtaatggaaattggaaaattgtcggaatttgcgcgagagatttttctcagcgaacggagcagcgaacccgtgataattaagggtttaccatggaaaatattgacattgataaatatgaagaaagacagcacagaaaaaagtttgggctttttccttcgatgcactgccccaagggaagggtgggataattaa

SEQ ID NO: 78970 - DNA, 1120 bp, Heterodera glycines
  unsure (1)..(1120): unsure at all n locations
atgcagcgatttctntgggctgtatgggcaagtctaaatacggcggaaggcaccactgaaaaatgtttggtcttttgccttttgtgcggtgctcaaacaaaaggtgggcataaaataccatgaaaatagaaaacctttaaatattttgcaaaatctgaattttaatttttttaaaattattgttgaaaaattaagtgccctcggggtttaatttagaaataccataatctaattgttattaagatgaaaatgggagctgcaaagttacggcaacccttcgaatagtctcaaaaaaaggcgaagcggaggatttcaccggcaaattaaatgatcaaatttttgacaataaattggtcattttttctatcggtcatattactttgacggtgagtgaaataattaactgtttttaattgtttaacataaaataattaagcaattaatggaccaaaacagaggattttatgacaaagacgaggacaaggtgactgtgaccgtggaaatcactgtggaagaggagaaaaaagggacgaagcgtaaattgccggatgagtaaaagcatcaaaatcaatttatttgtttaataaggcatttttcttgcaattattcctccttttgtatttaattacttttcaaaaaccgcttgtttttgtaattttaattggtactttccttccccttacgatattcatctcaaaaattggctttttctagaacaatttgtttgtttaacttcataaattcaccacccaagcaaatgataaggccatggacaaaaaaatgttattttaaaagacaaaaaaatgagacatttgaattaataatttttctcagtttcctaggccataactttttttttcttaatttggcattacatatattcttggtatcaaaccaaagcttaatgtctcaataatttacaatgagaaaacacaaattcaactttttatctattgccttgagatcagaatttaattatacaaaactctatagaatttaatcttccgattgatacccaataatgagaaattgacgaagaaaaaaagctatggcctaagaaactgagaacggttcactgatcggacgcataaactaaagtagagcccaatttttgccagta

SEQ ID NO: 78971 - DNA, 592 bp, Heterodera glycines
atgcggcggcgtgcgcaaaaaagagaagtaattagcattaggacgacggcactcggaagagaacgttggcataaaagaaagctacgaagaggaaaatgtgataaaggctcatttggattagcaaaacatttttggaatttggctaaaattggtgtgaaaatgactgatttttgaaaaagggattaaaggcataaaaatgcacaaaagcgatggtggcatggcactaaaattactggaataaaactgatcaatgcatttagcaactttaaattgaggatagcagccgcattttttaggaattttgagataatccggtcaaaaaattaaatgtaaaagtggcaaattcgattacacaaacaaaacaattattttcctaataataattgttaaggtttcgaggaagagatttaaatattccgtgtaatttaataaaaattgcacatttaacagaagaatgtccaactccgaaatgtcctcctaaccgaactctgccgattggaacactgagaaagtacacattatgtattaattataccttataaaaggatttcccccattatacagtgcaaccagtaattttgcaaacaataaa

SEQ ID NO: 78972 - DNA, 624 bp, Heterodera glycines
atgcagaatttttttctctatcgatatgtaaaatttggtgtggatttaacaagtaggaaaaaagttaaacaggatgaagtaaatgttgttctttacattattaagaatgaagagatagtacgtaaaagtgagagaaataaagataaaaagtaaatgtgacagaacgccaattttttcccataattatccataaaaaagatttattgccgcttttttttcttttttaccgtccatgtgcggctttaactcgacgagaaatgtacgaaaaacacattttttgttcgaaaattttgtgttttaacgcacttattcgaacttagaaatgcttattttgtatatttaattatttgcaactgtatgtagtcaataaataaaattgttttccttaatttaaattattttcatataaaaaacagcaatttaaaaaattatacccctaaatttggaattttttcgagcttattttcgcacttatttcgcgatttttcgcacttatttaaggccttattttggactttttcgcgcttaaaaatccgttccctactaatcataatctcttatatccttttcagttttttttattgacaaaaacttaacgaataaaacgctaatctaaaaaataaa

SEQ ID NO: 78973 - DNA, 1035 bp, Heterodera glycines
atgggtaattattggaagaatctattaataaatctggcaaaatttgatgtccctgtcccaattttggtctctcacaaatcatttccaaaaaaatcttttcgaattaattttgttccattcttttcctggataatttttgttcctttttgctttattttttttttcttccgcattttctttattccttttcttcccatttttctccagaaatttcatcaaatgccttttaaatttcatcaaatgccttttaaatttcatcaaatgcctttttttgtagttctttcatttctgatttaattcgactaattagagcatttaatattaaaattaaacagaataaaagtaataaattcatttttcaaagtattctcgaaatgtatttttttaataatatcgaaaacgattaaattttacttatccaaatctataataaattcttaattcttttttaattgtgaataaatggaaaatgaaattgaatttttttaacaaataaaacaaatttacttggttttctgctttaagaatctttaaattattctttttttaaaatttatttcgaaattgcagatggaaagccaaatttggagaccgaattttatttaaaaaacaattggattttctcatgaaaacattgcttgcaaatttccagaaaatttcatttagtgacaaattttacttgaattactttgttgtaattagcgtacaattttttgtttcttctaaatttttaatcaatttaaaaataggaattaaattttatgaaaattaggttaaaaaatgagctttatctcttaaaattcacattgtttatctttaaaaaaatgattagttttaacaaaagccacacgtcacgggacattgaatctgcatacgattcgagtacaatgtgcaataatttttttcatgtttttctgcgcagctcatcgaaccggagtatgaaatccaatctttgcaacctgtaaaagaaagaattaaattatttttataattacttttcgatattttataatttaatcgctataagcccaaaca

SEQ ID NO: 78974 - DNA, 580 bp, Heterodera glycines
atgggaaaaatttcgttaaaattatttttggtcaatttttttgcagttatttacgtggctgttgaagcaatgtattattgtactcgtaagtctaagaaattttaatttaattattgaaatattcaaaatatggacaaattgaccagattttacggtgaaaaaaaaattcagtccaaattaccaatgttttaaaacaataaatttgtcaaaacttcaaaaaattcaaaggtggaaaaaatgaaaaattgctggatttcttttccagtaattttccaccaaaaatgcaacaacattaagccattaatatatttaaaaatattatatatgttttttagactttgtctatgagtcgagacagaatctttgccctccgacggatccgccgctcacttattacgcttcggtgcacttgtgctgcaaggaggactcggaatttggcatggcattaatttacaggacgttcgcaacggaaccgccaacaacttttccgcaggggtgccggggtaagaaatttgaaaaattaaatcaaattaaaaaaattataaatttaaattaattttaagaaaattaaaaaaataaa

SEQ ID NO: 78975 - DNA, 570 bp, Heterodera glycines
atggcacttgtggaaacgcacgaaaaacatgttgttttttttgtggttgttaaggtatttttcaagtcattagtagggaataagtttttgcttattttttctgcggctttaactcgatgagaaatgcacgaaaaacacatttttagctcggaaattcttgttttaacgcacttattcgaccttaggcttattttggcgtttcgtgcttaaaaatgcatattttagaggttcgcccttaaaataagtttttgcacttatttagcgttttatgcttattttcgttcttatttcgcaatttttaaaaatttttcctgtaaaattctcaaattttttaacaaaaatacaatgaaaaataaaaaatttttttgacgcgatcacattttttggcgacttggttaaaaattttcaaaaattcttccactaaatttgtttttttttatctcggcaaaaatttttgtaatttattttctttcttgaccaaatactgggttttcaaattttattaattttagaaaaatgtattcaaaatttcgaatatttaattatttgcaattgtaatcaattaataaa

SEQ ID NO: 78976 - DNA, 449 bp, Heterodera glycines
atgcactcgcttctgctgcttgtcaatgtcacggtttacatgataattttacttcatttcatgcccaatgaaaatgggttggccaatgccattccggtataatttttaatccgattttaaattcattaaaatacataactgtattgtgaataaaaaataaggcgactttgaacggaggcgacgcgttgctgttgagaaagaagcgcgaagacgaagatggagcaggtgaaggtgaagaggggggtggagatgatgccgagggtgcccaagaagacgccgaaggtggtgaggatgaagaaaaagcagacgaggatggagccgaagatgaagcaaaagagaacgaagacggagatgataaggaggacaaagatgaagacggcaaagacggcgaggaaggtgaggagtgccaaatcggggacaattggaccggagagcacagcactgactag

SEQ ID NO: 78977 - DNA, 722 bp, Heterodera glycines
aattgtaatagtcaaaccaaaattaaatttattcatgttcttcgtgaaccttgctgcaatcttaattttcctgcaattttatttggtgaaaattttagtttaatttgttttaaacataatttttgcaccttcgataatctattttttttaattttgaaaaatcaaacatttaaacaaaaataagaataaaaaatgatttttatttaaagaaagaaaaatatggcattcttgacatagccctaaaattctctgttagcctgcaaataaaagatttttgtcaagtatcacaaaacaataattttctatattaaatcaaacgcaattttttactttgcaggctaataagaacattcagggctaaaatgccaaaaatgcattttttttctttacccacaaaaaagtgatgtgacaatttctgcccaaaaaaagaattttgtgacaataaaaaaagaactataatttctttcgatgatttgtcacccactttataggatttgaccgaagcgggcatcgaatgccaaccaaacggagtctgtagagacgtttctggctcaactcctgcgagtaccgtatgctcaaaaaaatgctacagttgcacttacaaaaactgttgcaacaaagtgtacacgagccagtacgccaaatgctcaattaaggggtggcgtaaaaaaggatacattggcaatgtgccagtcgaaattggtgcaacgaagaaacaaacg

SEQ ID NO: 78978 - DNA, 632 bp, Heterodera glycines
atggataagccgcgacagcggctggcggaggcgaacaccaccgcaactgacgacgcggcccattgctccgccaactgcgacgaacggcatgacgaccacccgctgctgctgtcattcggggaggatgaggaggagggcacagcgaccagcgccgcagcggacaacggcagggacaacatgaacaaccacaacggtggcgagcaggtcggcggcactgccgcgaatggcgtcggtggcaacgagtgtggcgattcactgggcgtttccgccggcggcagcggcggcgggggtgccgatgacgccaactttttcttgtgctcgccgctcatctactcggagccggcactgcccagcgcattcgccaatggcggcgccggcgccggtgggccaacaattggcgcctcgtgggcctactcggaaatcgcactacctcaggtcttacaatttagtttagtttgggtgatgatttagtaattacccaactaattagccccccgttaattagctaaaaattagccgttttttgatccgtaaaatacattctattttgtacacttgtaaatttttcaaaatgtgaaaaaatcctgttaaattattatagattttgcccttaaatagccaattccaaggaa

SEQ ID NO: 78979 - DNA, 1449 bp, Heterodera glycines
atggactcggcatcagatgctattcgtcagttacaacgagcaatgcgcgaacagcagcagatgatctttttgctgagaagccagatcatcgatcagagagcagtgttgcttcagaatatgacgcggattgaatcaacggaggggtacttagccaacgtaagtttaattttcaaacaaagtattttaaaataattaatttcgtttattttgataaaatagtgatttgattatttcagtctcgcgggaaccagagattcagcccgagatactctcccatggcgggagtggagctttcgctgctcggccgtcgacttgaggaacgagaacgccgacaacagtctcgtttgggtaggcgatatttttaaattaagataataaatggtttaaagtgcaagtggagaataataatggtgcgggtccaagtgatggcagtgttcgtgccagaccgaatgaaaatcttaaaccctgaattttatttaattaaatttcgattttttttttgcagagcagctgactccgctaagttcacgttcgggaagcaatgggactctgcaaaaccgtactaatggtgtgctaattttgaaaaaaaatgaaaaagaaaaaaaaatttttttagtgagcaatgtggctgggccaagtacggcgagtgatggtgacgatgaacgtgaaaacggtgagatgaacccttaataattttacccaaataaatgcattttgacaggccccgttctaagcgctgtcatcgaaggccacatgaaccgttcgcggatgcgtctcattcgcgacgagatggttcatcgtgctgttcagcagcaacttgaacaccagcaccatctgttgcttcagcaagcgcagcagcagcagcaacgataagagcgagaaagacagcaacactttgatcagcaaatggaggaagcagagcttcttcacgaacaactgcaggcagcagagcaggaaaacgacgagaacatcgaaccacagccccctcagcagcagccgcaacctcaaccgctgattcgtcatcagcagctgcagttcgaacgtaatgttcgactgcagctgcgtgagtcgcaacgatttgaaaggggaggtgcctcgtcagtgctcgtcccgccagcccagctctattgggagaccgaatgcatcatctgcaccagcaaccgcgcacacttctacagccgtaattgcggacacatctacctgtgctcgacatgtgcggtgaacgcggtgatccacaaggtcgcgacttgtatgctctgtcgtgcgcgaattgaggggatttatccatttgtccgctgatggatgtatttgataattcttggacccctttgtcattgtccatcctatcattaccatattatcacaatttttgtaaacgattcattgattgccacttggccttagcaattctcaatcattatttaaactcagccaaaaaaaatcaataaa

SEQ ID NO: 78980 - DNA, 1569 bp, Heterodera glycines
atccgtctcccgtccatcccttgccaaattttgttcgttttttctgcgtttatggcgcgacttcgctgtcagttcagtccccagtcttaccccgacccgaggttcgtctcctgcggttttggctggcccattgagtggcaattcagaattgaccctttgtcatgccgtcttctgctgccttcccaagtctgtgacccttccgaaattttaacgcccgacgagcggcgcattctcaacgaaaagattgtcagggtacgccgggctttgggaccaatcgttttttgggagggaatgccaacgaatgtttagctgcaacagataacggcaaacatcaaaaacacttctcctgcctgtgccgacacaaccaaaagcaccaatctgttcattatggtcgcgttggtcgaccgtttgagcaatgcgttgccttttgagtgggtgcccttcggcgctttctttgcttattaacattagcatgtgaaattttgaattttaaaacagtggcagcagcgaccattcggcgaacattgagaaattcaccaaccaactccgctcaaaataccaacattttcaggtcagtgatgtcataaagtaaatcaaaaaattgtccaccacaattctcccgcctcacagcacaggacatttccctgtgcgatccgttggtgctcattgtgaacgcccacggggaccgacaagtgttcactgtggccggtccgtccataattatgatttaacacaccattttaaattgaacaaaaggcccagggatgagaggccttattttgaagggcgggatttcattggacatttcccgagagaatttcaggccgagatgccaaactgagcagagaagtgcttcaggcggcattccaacgaaatgtcggccatttccgtggcggaaattacgcattgggcctggagggcatggcggaatacactgtgtcggcctacggagccgcacacattgtgcaggtgccgagttttccgggcgagccgaagtgagcgtgggaaccacaaaaactagccaagcgattaattaattgcccatcaaagcacgaagaaagggacgaaaaacaacgaaagtttctccaatggtccgtcgaccgtttcttacggaatgggacaatttgttgcgcacggagtgcggcagcagcaaaggccaacaacagagaagaaatttcacatcgaaagcattcccgaggaggacagactctggacacgcattttggcaaaggcaatggcacagtgcggcggagaggagcagggcaaaatggtcaaatacgcacagacagtggtggaaggtggacaaagacgaattggacaagcggaaaatgccatcctttagatgccatggatatttccctgaaactgatcagtgacccgcactataacagaattgaggaggattctcaaagcatggaaaatggtctaaatgcccgggaaaaggcgtggcaaagcataaaaggacatttggagcaaatctatgcgaaatacggcggccaaatgcaacaaatgaacgcagccgaacaatgccccggcccgaagagaggcgaaaagacgctgaagatctta

SEQ ID NO: 78981 - DNA, 405 bp, Heterodera glycines
atggcgacgggtcttctgttgaagcggcggcagctgctgcagcggctgcaggttttgttttgtggtatattccccattcccaaggtgctctcacccaagactagcaataagtcccgggactgtctccgtttatcttttcgttgttttctcatatttccctcgctccgttcagctgcagccgctgctgcgaattcgcagcaaaattcgtacagcaccaaaaaggatggacaagtgatcggaccccaattggacgcactgctcagccaacagcagactaacgaagtgaactcagctgaaccatcgaatcagcagaaacaaaatgctacggggaatgaagagggaggcgggacgaggaaacgcaaccgcgaggaggcggggttggagcaggacggtagcgaaaactga

SEQ ID NO: 78982 - DNA, 741 bp, Heterodera glycines
atggcattggcacaaaacgcgcaaatcacaacagaggaaaattgcgaaaagttgcacggcaaaaacggcgtcggggaaacggcaacggaagaggagacgatggacgaatgcgcatttgtgacggagccgttgattgaggccggtcaagaccttgccaccagcgtacagtgcacccgggacggaagtccgctgagttcgcggtcgatggatgccgtcgtaagtcgaaggaaagaaaccgcggacattacattcatttataaacaccagcagaatggcgaagaatggccctcggtgcgttcgacctctttcaactctcaacggtccagcggcgccggttcgcccgcgagtccgtccgatttgcccgactcgccgtcccaatgcgtcgcccacaaacccttccaattggaagcgatggcggtgacggattattacggaattgcattctatccaaactcttcttttcttcagttgctgatcaaaaaagcattggaagaagaggacgaggccaaagatgggaaggatgacagtgggacggaagaagaacaaatttgggggaaagggtcacaaattgacaccgacgaaaacggaggaaagggcggacggagtgacattgagcaaagtcaaaagcgagcgaaaatgggaagcgaaagcaatgggcaaatcaaagaagaagacaaatcggagaaatcagcgagcgaaggcactttggctgaggaaaaggcaaatgctaacggaaggtag

SEQ ID NO: 78983 - DNA, 639 bp, Heterodera glycines
gttgttttgtttgatcagtggcacagcagcagcgaattggccgaacaacaggtcgattctctgagaaatgcggtggctaaactggagacttgtgacgctgatgctgttgcccgattgtctgcctcggtcgcgcgtttcgaaactggaaactttgcaaaattgaaggagtcaggtcagaggatcattcgtccactgagtcttgaacggaagcgaaagattgaagtgaaggtaagcggaaattgatagcgttatgtgaggagtatgtgttttgttgcataaattgacgttcctcagtttagctgcatttaggaaaatcgtaaatctgttttcaacctgggttttccattttagcaaagagcattaagtcttaatttaagactgtatttaaaaaaaagaaatttcaatcatatgaaccgctgtgagtctcaggtggccgcgatcgaacgagagctgggctttaacaaatcctcaattcaacatcactccaaaaactctttgcaaatcattgacaaagaagttcttggggtgagggaatggatcgaagaaagagacaaagatgcagatctcgttggcactttgttgaaacacggtgagaagaagcatattgacgagattgacgcactcatggcgcgttccaag

SEQ ID NO: 78984 - DNA, 1401 bp, Heterodera glycines
aacccggccaattccaccagaggaattaagaatgcgaaaattgtggtgggagggaccgaattggctatcccaaatacctgaaaattggcccgacgaacagacggtcattttacctcctgcagaaagtgtcgcacccgaaccaattgtgtgtgctgccgtcattccaccccctattgtttttgaatttgatcgcttcggctcatgggagaagcttattagaacggcctcttttgttgtaaaattcctgtccaaattagggaaaaagagacaactgttcaccaaaatagagggagaaggaatttttgagtacgtaaaccaaaaatttatcaaaaattggctgtttaaaataatccaaaggggaatgaaccccccgacccaaacttatcttgacaaaaatggagtgatcaggttgaactctcgattatccaacattgacgacaaagattttgcccatccgattgtgatccccacaaattcgcctgtactcagcctattgatccgccattctcatattatgttaaaacatgctggtgtagatgctactttaacagatttcctttgaaaattttggtgcaaaaaagcaagacgaactgtccgtaaagttattactgagtgcaatacttgtaagaaggatcgggcagtaaaattcggtcttcctccgatgccaccccttccaaaatcacgcactcatccctctcttgcttttgaaaatgttgggattgactttttaggcccaactctttataaagcggtcaattcggggccaaataaagcatggattcttttaatcacatgtttggcatgccgagccgtacatttagaattggttaattccctatctgccgaccactttttattggcatttagacgttttgttgcccgtagaggactgcctaaaggtatcttatccgataatgggtctcaattcgtgctttctaaaaatgtccttgacaaatgcacagaattctgcattaaatggacactcattccagcgtttagcccatggtcagggggcgtttatgaacgcctcaatgcattgatcaaaaattgcttccggcgtattttgggacgcagaattttgaattgggaggaaattgttaccttcctgaccgaagtggaagcctcactaaattcgagacctatcacctttgtgtctgatgaaattgatggtcccatccctttacggccaatcgattttttatcccctaaagtaaacctgagttttgaagaacctgagatttcggaagaaatttatcggccatctcaggcagaaaaattagccgctcgttggtgggccacagcaaaatcaattcggcaattctggaaaaaatggtcccaagaatatttgcttatgctcggacagcgaaatcaaacgaatcataagggggccacggatcactg

SEQ ID NO: 78985 - DNA, 504 bp, Heterodera glycines
  unsure (1)..(504): unsure at all n locations
atgagcaactttatatttgtcgcctttttaactgcagcgttttttagctcaggtaaaattcaaaaataaaaatcagaatttttgtaaattttaggcctcgctctaccggctccttatgatgctgaatcggtggtatcttctgaattaaatgttccactactttcagctgacggtaaataattgttaaagaaaaataaataattttataaataaagtttttaaaattaaaacaataatttaatttaattattttgtatagcaaatgttcaagcagcaattacaattgaaaatgttgagatacaaattccatcaattccagcaccaattgaacaacaaactgctgctcgtaataagatggaaaataattatttattttttattcaaataaaattattttttatttaatttatagacattactcatccgactgaaactggcaatgagccttctattggtgcgcaacatatacctttttctataatgaaccganaatttanaaattan

SEQ ID NO: 78986 - DNA, 585 bp, Heterodera glycines
atggacgcggaccaactgaagcaaattctcgatgcagttttggcaaaatccgaaaagcggattcaacaaatgatgaatgcgcagcaaaatgttggaccttctgagagcctaagccatgcaaatttggcgagctcaatcgatggacgaatttcaaaatttcattacgactctgagtcgggaaataccttcgagcaatggttcaaaaggtttggaattctgatagaagaggacggaaaggatttgccggagctagcgaaagttaggcttttgcttggaaaactctctgacgaagagtacaacaagtacagggacagcattagcccaacgcaaccggacacagtcaattggaaagagtccattgacaaattgaagggtttgttttccgaaacccggtcattatttgtccgccggtatgaatgtttccggattcgtcagcagccaaatcaagacgtgtcgacgctaattgctcatatcaatgcatcatgcgagaatgctaatatgtcattgacaaaggagcagctaaaatgcatgattttggtgatcgcattgagcgatgatcaacatgacatgagacaaaaatgttga

SEQ ID NO: 78987 - DNA, 622 bp, Heterodera glycines
atgtttctgtggcgcccttctcaaaacaaccaacgctacgccttcacgcctttgttggacaattcggaagacgaaaatgaagacgaagttgaagaggacgaactgttcacgaaaagcggaggacaaaggccggcgatattcgacgcagtgcaaaaaaggggggcgggggaagcgaaaaatgaaggcgaaaaagcgacggcggaaggagcgaacggagccgtgggggacgacagattggcagtgagaaggggggggggacacatccgggggtactaattttaagttaaccgccgcgtcgtttcccgccttcccaaattgaaattttttttttttttaggaaaaagttaaaaaaaatctttggagaaaatttctctcaagaaatcttgaaaaaacctctgagaaggttagaaacccaaaaaaatttcggagtgcggcgaaattaaattacggcctgaaaatccgagggggttggggattcgcgaaggcatctcaaatccattcttctcgtcaggaggatctgaaatggatcgaaacgaatattcccacgtctttggctgaggcattgattgacgacgaagaggaaaaggaacagagggaattggaaatgtccaaaatgttgtga

SEQ ID NO: 78988 - DNA, 447 bp, Heterodera glycines
atgtttcgggtagctctatttccgttgacctgcactttaactcaacatgtgggatgccagggcttaatcattgacaaaatgggatatttaagatcgaagccttggcatttttgcggatgctctaacacaacaaaaactgcgataaagatggttgtattaacgaatttagctacatatgaaaaggaaaacaatttccgtgaatataactagtaattctgagaaaatattcaaaattttttaaaattctagcaaatcttggtgtgatacaattcgaagtattgattggacgcataaaagtcgattggacgcacaaactgtacttgagccaaaaaagtacttaatcatcgaaataattgaaggatatcgacaaaaataataaatttaaaattttgaaaattggaaatctatcgaaattttgaaaatttcttttaattttctttaatcgga

SEQ ID NO: 78989 - DNA, 127 bp, Heterodera glycines
gacccacgggttggcaccgtgttgcgcgcacatgaaaaagcgggtgccattgttgcggcaatttgtgccgctcccattgcatttgtggcacaccaaattggcgttgggggcgtactcacttcatacc

SEQ ID NO: 78990 - DNA, 136 bp, Heterodera glycines
atgtgttttttcgtgaaaaaaggttaaaacctaaaaatccgggctctttttattatgtatattttaccatttcaaaatgatttgtttatttacagggcaaaaattttatacaaatgtccaaaaatggaaattctga

SEQ ID NO: 78991 - DNA, 1210 bp, Heterodera glycines
ggcaaattgctggcccaaaaaggacgacaaaatgctgctgccgcagaaattgaaacaataccagcaaggagttgttgttgttcaacctctgctgctgctggtggcgccaaaattcaaaattccgctgaaccgaagctgcccccgccggcggctaaattgttcgaattggcacactttgagcaagaaataaggcaaattgcgacaaaatggaatttgaactttagcgaaaaacggtaattaatagagaaaaaaaaattaattaattaattgggaggtaatgttctaactgtctgtcctctgccttttccacactctttcgctgtctctctcactttctctcttcattttatggagaaaccaccattctctcattggtcctctaactgtctatttttttttatttttctaactcatttctctctctacacttgcggtcggccaaattatactctcgtcgattctctatgtcctcttattttccacattctttcgctgtctctcttatgctctcgtcaattacactaactgtctgtccttttctttttcacactctcttgtcgtctctccttttttactctcttcatttgtcaccctctcattaatatgacagtatcggtattcctaccatatttagtggttcctatttgtttcttccaccgaaggacaccaaggcgttcaaggacggcgttctgttgtcgctcactgaccgtggcgatcacattcgtgtgagttttcttatttttccaaattttaagaaattttcaaaaattcgcccattttttaaattgagagggaatgcttggttttgccagaaatttcatttttttgattgaaatttccataatttttcatacagatggatgagttccactctgcacgttcacaggtggataaaattcagcgttggccaaaagagcgtggccatgcgactgtcatgcgtctggccagtgatcagtgtgccaagatgtttgccaactcttcctgatcgtgtgccatggattattattgttgatgaaatgattaagcgacgaaattttgatcaaaatccaaataacattttagtgttacttttttccttgtttttgattttttttttcctttacgtatcacttttttttttaataattgaacctttttttgtcgttgataaacatttggcaataatactgttctttttctcccccacccccatttttcgaaaaaaaaacaa

SEQ ID NO: 78992 - DNA, 1383 bp, Heterodera glycines
atgttaatgttaaacggccgcgcatcattcgtttcggcatttatatttcaacagttggtcatttttgttgttgttggtgccgatccatttttcgttgtgtctacagatgacagctcagagcaggacgatatggcaaaggcattggcattaagcaaccgcttcttttggcgtaatatgatggcaaagtggggctgccaatacggcatcaaaatccaaccaaaccaaatccgagcaaaatccgttgacgaattgaaacggatttgtgaaagttggaaaatcaaagcgttggcagccgacgcatatgtcaaaagttgggaatgtatggtgaaaaagcaacaacagcaacatgtcaggaatggaggagcatcaagttcaacgagttcagcaccagcaacaatttctacagcaatcattcatgaccaaatgagagaggagggttggttaattggatttaaaatggttaagatattaaattattagaatacataacatagatccaattgttcaaatctgtttgatcactgagagaaataaatacagaaaacagtgctccgtttatcgacatccagttctcgatttctagggatttttgggtgtagaagttttcgattttcaatgattagaggcttgagatggcttcaatatttttctgggctcacgtttcggtcgccaaaattaaaatccggcgcgctagttcaaaaatagtgcaaaatttcacaaaaggcaatatttaaaaaattttgtaatatattcattattttgattacagaaaaaatctattcggcagacaaaaagacatttaaatgaaaaatttcaactagtgcgtaaattctgagtcctttgtttttaatatttctgctgaaaattttaacatcaaccttttaaagatgtcgaattctttcgctttgactgtttgtgtgtaaagccacgcttccaagtgcagctgggcgagctgcagctgagttcagcaatggaactggtcaaagcagcttatcgtattttgttcggatggagtgaagctgagggaccaattgttggggttagagaatctccgataaaaaaatgaatatcaactagggccatccccgaagtcctctatggcaaatttcttggcactttcggcctcatcccggaacccgattctcgtcattatcaccccgaactccctgctatttggtatgactccagaccctgatccctgacatttccataccgaaaacagaatttttgacataaaaataatttttccgattttgaatatttaatcaattttgtgcaaaatctgtatagtaaatcaacttctccgattttaattatcatttcctttaaaactttcaaatttccagaaaatacaccaaaaaccttgttttcagccaaaataaa

SEQ ID NO: 78993 - DNA, 407 bp, Heterodera glycines
atggatttgcgcactgtcgctcaaattagaaagctgaaaagtattttcaaaattgccaaaaattacgtatcttcatcgaatttcagtaatcggaattctgacgagcctaaaaatgtcgacaatcgaaaatcggaatcacgagcccagaaatgacagaaaccggctttccaaaataggcaatccaaatcaacattccgtctattccctgctggtctacagtttgatgaatagggatccaatttttaggctctaaacccaccaaaataggtaggctttaggctctaaaagcagcctcaaatttgggggtgtaaaatgataaaatttattcaaaaaagtaaaaaaattctaccaaaatcagtattgagataaataatttttaaaaccaaaacccatgtcaagaaaataaa

SEQ ID NO: 78994 - DNA, 1531 bp, Heterodera glycines
atgggcaaatacgacacgatgggactgaaacagctggacaagaagctgacggaatgcatgaacgagttgaagaagtacgaaaacgtcaacaaaaaggcgctggaccaattcatgtgggttttgttttttatattttctttgcgagttaattcgcaaaatgtccaatttaggcgtgcttccactcaaaaagaggagctcaccaaacgagtggaggagctgcaaaacaatgaaaaggtgtgaaggcattcgtttaaggggggcgggactcattttgtatgaagcactgaaattctactaccattttttgaaacattattaatcaaatttttcggttgttcaccgtttccttcccgttagtcccccacccggaatttttttttattaaaaatctaaaataaatattttttaaactaggatttataaacttttgcaagtaaattattaagtatttagaaaactaaaaaaacatttttgatataggacttattttgatgtgagcattatttgaacatgacttttagacgatccaagacttactttccgtactggaaaaccgacgttttgaaacccttcaattgacttttaaacaagtggcaaagaatttcgaggacgtcttcaaaaaattgattccgcaagggacggccaatttggtgatgcaaaaggtggacccgtccatggtttgtcgagcaactctttcattccctctgattttgattgagttcaggacacttcttcccaatccgacgcttcgagtcaaccaagaaaatcacagcccaaacacgtattggagacatttgtcgggactagcattaaggttaataggaaaaattattgaatttgaatctatcgttactatttttattgtctgtccgtaggtttctttcacgggaacgcaagaagtgcgtgagatttccgcgttgtcgggtggtcagaagacactcgttgccttggcgcttattttcgccattcaaaaatgtgacccggcccctttctatttgttcgatgagatcgatgcggcattagaccaagagcaccgacgtgccgtcgccggtaaatttatgggataaaattcaattgttcttcattttaaaagtagttcaattgaatttttgactgattgtgagataaatattgtgtatccaattagtcaacaataccagtttgttttggctataatcttttaatgggtctagtagtaagtcgcactgtttcaatgtaaatttattagtcgaaaggactcatgaaatgaaatctgctaaaataatgttttagaaatgatccacgaactgtccgaaattgctcaattcatcacaactaccttccgtgccgaactgttggaacatgccgagaaattttacggtgtccgttttagggacaaaatgtcgtacattgatgacataagtcaacaacaagcgcaagactttgtgcaggatgatcagacacactcctgagaattatgacaccttttacattatgtcttaacaagttgatcgatctcactttttacattttatctcgcgcatataaaata

SEQ ID NO: 78995 - DNA, 408 bp, Heterodera glycines
atgaaaggacataaagaaacactgattagtgaatattcaaaccaaaaatacgaagcacatcttggcattatgcattatatgagaaagaattggcaatgcgacaaaatagcagatgaatttgaagaatatgaacggacagaatgccaaaacttccgaaattattgggacattttatatgaatatttgagcagagaatacgtcggaattccaacaatgatgccaaaatttgtatttaaaatgcaaattgaaattgaaggaccaataacttatgcgctgaattgtttggccagaatttggcatttttattttacattatggagtaaaatttatgaatataaatttaacaaacttttcaatcattggtttgaaccaaaatgattgaatgagaagcgattgaattatggaaga

SEQ ID NO: 78996 - DNA, 795 bp, Heterodera glycines
atgaagccaaaaattgtgctcccaaatgaattgctttttgaggcaatttgcttcgtcccattccacaaaaaatggtccaccattcgtgtgtgtgttgtatttgatcactttctgcttaagcgaatggcacagttcctgatcagttacaaaaacacggtaaggattgatcgaaataaatttatagtgccaatgttatgtggtcaattagcgcggcattcccataaaaacatgaaaaaaaacaaatcaaaatgtatcaaaataaaatactttaaaaaattttctttgactatagtaatacgaaaaatggaaagtcgcccgctgggactcgaacacacgggccttcaaaaccgtggatatactcgaactgactgagacacgggaaaactaatctaaatattcgcccatatctttatccccaagcttataggcttaaccctataatttttattgcttttttaaggctttgaattgtctggatgaaatactggtgatatgtaaattgctaatgcagttggacggcactttcttcatccgccacccgaaaagcattgacacaaaaactcctataaaatttctagaaaccagaagagaaatttttggtgaagaaaaaacaattaactattattataattgaaaattaatgtaaaataaaatgctttttcaatggaatattaaaatattttaggattactttgtgccgttgatcgtctcaaatctccgccaaatattcgagcgattgttggtcttgcgccaccttcgaatgttggcaatgtgccattattcgacggttttacg

SEQ ID NO: 78997 - DNA, 56 bp, Heterodera glycines
tcagatactcggcatctgtgcacatgtgatgaatggttttggtggtggtgctgcgg

SEQ ID NO: 78998 - DNA, 859 bp, Heterodera glycines
cctaccaccacctccggcattgactggcctcctaacggtgaacaaaccgaaggtgttagaaaaattgttggagggacaagttcttgggcctgaatcggctgtcatcgaaaatggtaaaattaggagaaaataaaatgtgtcagggtcgtatgagtcccaaaacatagttagtcccaaaacatagtctcagccgtgtcatttgggaaaaagtcaattaacttttttttttaaacatgagtctttaaggaaaatgaaaactgtcaaattaaaaaaaaaagaattcaattaattaatatttattctatttttctaaaattagggaaaaactgaaaaatgttggttttttacagaaaaaaaataaatttctcaaaatattttgtttttttaaattattggcacttttccaaatggtgccccccccccccaaaaaaaagaagcaaaggaaggctttttttgcaaaattttttatcataaaagtcgttaaaatttcttcaagaggttttctgggtgctgattacgaatctgacatcaattttaaccaatccccaactcgaacaaaagtcgaaaaattcttataaatttcgttgttaatcaaattattatgtcagatttgtcaacagctagttcgggaccgggaccaaaacacgtacaactgagtacctaagtcccggttttgaccagttttgacagggaccgggaaattcccggtttttcccggttttcccagccaaaaagtcccggtttttcaactcgaaaagtcccggtcccggttttgcccaaaattcccggtcccgacctaccctaccgaaaactcctaagaacaagctttctcgaattttgcaagcccacattgttttta

SEQ ID NO: 78999 - DNA, 787 bp, Heterodera glycines
atgatcattattaatttctctgttattttatttgttttaatttcacccattttgccatcggcatttatttcaatatgcgtacgaccgaacactttgagttatgtgggacgactgatgtgtaaaagcaataacattatgcacgagattaacaaaaaaacggctgaaaaagaagatgcagtaactggtagatattcatgcatttccttatgggtggattttcgaaaatgtgatcagaatgaaacgaacgcaatgatcaaaatcaccaaaactgacaccaatgaaacggttggtactgcaaatggatgtgatttatgtaatttatcaatcaaggtcgggttgggataatccatcttgatttggaattttttgaatatccaggatttaactgtatgagcaaccaaaatttttgtgtatatcaatgcatttttagaaaatattcgaggtccaaaaaacggatctttctttttccgacttaccgattgtgctccccttcggcgatcaaccttcaaccgacaaaacattcaattttaaaagtaaaattccatggatcaacgaaggagatactcttggtattaaaattggatgcgatgttggtcttgaagattatgaacactatgcaattggaagcgcaatttatccggagaagatcaatggacagcttgccagtattcatatcaccgtcaaactgtacggtgatatgattaaggttgtgcatttatgtggcatgtttggagatatcaataacaaaattgaaatcgctattattcaaaatgggaaatggaggtaa

SEQ ID NO: 79000 - DNA, 1022 bp, Heterodera glycines
gtcgtcacccttatgaaccgttcgactggcgaagcacagaaagcagcttctgacattttggcccgcttcaaagaaagcgcagattcttggacaaaagttgacacaattttggaattcaggttaattttcttatttttattataccattcattattataatggtttggtctccattaatacttttagttcccaccaacaaaattattacaaaaagcttcaaatcgttcattttgataaaagcaagctgtaaatacttcgttaaacaaaggaaaatctaaaccttttagtatatttaaagcggatttttgcatttaaagtaaagaaaagagttcgaactcgtttagaaatttactcttttgtccgtactgtcatttttaatttttgtgccattaagccctaacttttattttgtttttttttcagtgacttgctcgagacgaaatactttggtttgcaaattttggagcatctgatccaaacacgatggaaggctttgccaagggatcaatgcgaagggatcaaaggttacattgtcaacatgattttggacatcagtgcggaccccgaaaaaagtgaacgaatgaaactgttgcttcagaaacttaacctcgtcttggtgcaggtcgttattttgcgctttttcgcagttcggcactaatttccttcagatcgtgaaacatgagtggccacgtctttggccaactttcatcagtgacattgttgggtccagtcgaaatggacagtctctgtgcatgaacaacatggccattcttcgtctgctcagcgaagaagtctttgactttgggaccggccttacctcgtcgagggctatacagttgaagcagcaattttgtgggcagtttgaagaagtgtaccgactttgttatgagattttggtgcgcctttttcacacccttaattttgtcttaatttttgtttaggagaattctgacaatgctcagctcgtatatgctactctgtacacattgcatggttttttggattggatccctgttggatat

SEQ ID NO: 79001 - DNA, 711 bp, Heterodera glycines
atgccatttttgcagagcaaaatactcagagaacattatcggaccgaccccgacccgagcccggtcgtgaagcagcggttggcgcaagagaggtgtcttacggagaagcagggtaatcagttaatggatggtaatcagtgccgggtaattagataattaataaattcgtggtaatttagatagttaaccaatgcggggtaattcgttaattaacgagtacggggtaattaattactaacgcaggagcgctcgctattttctctctatctctcccccccccgctctcctctttttctctctagcgcaggggctctcactatttttctctctccactttttctctcttcaacaaatcatcgtttgaatcaaatttaaaaaaaattagttaacaagtggttcaaaaagcgacggttgatggacaaattgcaacaacaacaaatgtctgagttgtcgccgctttgtccggtcacgaacagcagcagtggcggattgtctcgccccgatgatcatccggtagacaatcgactgactaattgtttagaaattattaattaactaaatttaagtgctcttccgccaaagtgccacctgactgttgaatttgagaaaaaggacgaacttttgggaccgaaagaaaagaaatggaaagaaaaggacgaacggagcaaagaaaaggaggcgaagagaagagaaaggctcggaacaatttga

SEQ ID NO: 79002 - DNA, 1524 bp, Heterodera glycines
atgaatttgtggatgttaattttaatgtttggccctattcattcagttcgaattcgaaaacattgggtaaaagggcaactaaatgatgaagtaaacagaaaagactttgaacataatgtaaccgatcattcttgcgcaaatgccaatcattctgctgatcagattgcgaattttgtcctttctgatcaatcaaaaaattgtggtaaagacagaaatgtttttgatcaatcacaacaaagtgatgaacccaatgatagagatgaaaaagccaatcactctgttgatagtttggagagtgatcaatgtcttagcaataaatccaaaagtgagaggaaatgtaaatttgctgatcaccaaaaactcagaattaccaatcaatacaatcattttatcagtgcctatttgcgaaaaggaaatcattcgaaaaatgaatggggaaactttttgaagaaattggccaatgttcttggcgtaaaagggcgtacaataataaaatggaaaaaacaattgggcattgatgtggagaagaagcacacggacgaggagagaatggcaaaattggaaatatattacaaaataaagaggcaaaatccgaaaatggcacttatggacgttgcggaggaattgggcatttccatgggcacattaattaattggaaaagcgaatttaaagacattggccaaagtgtcaatcaaagcgaagaaagcataaaacagcaacggaagagcagcaaaaaagggtaattatgtttaattaattgagttaggtatgttcaaatattttggtgcaaaaattcataaatatttaatctctataaattttgttaaaaatttatttataaaacattaatatttaacagaaatgcttttttgagcttctttcgcgaaatcattcaatttataaccctaggtaattaaagcttaatacaaggacatttctgactaacgttttttgttaaaattcccaaattttttagtcaggcttcgatttcaccgactaaatcgttctcctctaacgatgctttttgggcgtggaaaaagtcggcaaagaaaagaaccgttagaattgtattgtgaataggatggaaaaagtcggaagaccgagtgacgattcaccgactgtaattagttgccgcaatcagttctattgtatttcccagtttgtttccctagcgtttttcaatgtaaagtataaaaaagaacaatgccttgaaattcgggaatgaaattaaaagtcatttggtgtcatgcgctgcaaatcggaccttcttaggggtgtatttttcgtttttattgcatttttcataacaaattttggcaaaacgccaaaatagttgaaattattatttttttttaaattttgtaaaaaaaactagaaaatagttgctaataactcgaaaagtagcttaacaacagccgaaaaaacatgtttttcgtgcgtgcattccaagctatgggaagctcaggaaaaaaatagtgaaaaaactataaattggagccctagttattattgataggaattga

SEQ ID NO: 79003 - DNA, 721 bp, Heterodera glycines
  unsure (1)..(721): unsure at all n locations
atggcaccactttttatttttctgttcgttttgttggcagtcgaaaaaagcatcggcccattatcaccaaattgcagtaattcatttactaattaatacctattntaatataattaattatttttcatcagttcatttgccgcccatttcttccgttggaagtgccaatgtttcacacaaaatgtttctgttccacaaggcccaaagctaaaaatatcagcaggacaccaattattagcaaatggccaatttagtaaaatcgattaataatttgtttttatttcaccgatttttgctttttttagaattgccaaaaacggaaagccaacggaaagtttctgtaaattctgcgcagcaaattgtttctgacgagcgaaaagtttcttcttctgagctcgaaaaagtgccgggggcttttctcgaattttctttgcccgttgaaaagcaccaaaattcgcttggccaatatttggcggaactttcaaattattatcattctgcgcgactccacgttccgccgagtacaattgcgagggttttgctacggatgaaaaatgaaatgaattttcattgtatcaaaacttcggccactgaactaccgtacccccaaccttggaaaactttcgtgtcgaaaaagaatcgaacgattccaacggaatgggcggaaacattcgcatcactttcattgacgagtgccaaatttgtagtcaaagtgaattga

SEQ ID NO: 79004 - DNA, 99 bp, Heterodera glycines
atgactactaatacaactgacagcaactggaattcttcatttgttctaatgaagatggacgacaacgaccaatccgagcgcgattgcgttgagattaaa

SEQ ID NO: 79005 - DNA, 400 bp, Heterodera glycines
ggtgtaagcctttgcttctccacgttgactctaagcgcaatctcaattgaccgttttcggcttattgtgacgccacttcgacaatcaattcagaagcgttgtgcatgccgtattgtggcacttaacactgccatttcactgatcatatcgtatgataattaaaaaaaaagtacggtatttttaatttatttattttttcttagacttccgatgctgttcacacaaaaattggacacctatcatcgtttttgtggccaattttgcagcgaatattggggcagcgaactcggcgcaatggcccgaagtgcatacggtaatatattcggcggatttttgtacttaccgtaactcagcagacaaaacattaaaatctttactattaatttcaaatgtcgctaaa

SEQ ID NO: 79006 - DNA, 572 bp, Heterodera glycines
ggaactacgttaaaacttcgtggtttgctcacaaagcaaacatctcaaaatcaagacgtttcttttgtctttacaaatgagtcacggattggttttgttgaaaaaaagaaaccggaaaaactggcattgaaattgagtgatttcactcgcagattatgtgaatgtaactagataaaatagaaatttagtattaaaaatgtttttataggcaatttgcgactcagtgtttcaagaaaacaggctccaatcaatttgtcaaaaaaacaagacggaacaatggtcattgaccaagaaaataaagctcaactcatttttccgaacagtgtcaaactcaaaattggacaggaaattgctttgaaaatgacaaacgttgaagtaaacgaaggtaaattttaaatagtgaaatttttgggtgaaaatagctacctaatttcataaatacatagatttttaatttttaagttggtgtagtcacactcattgtttatgatgaaaataccattgaagtgcacgaagaaaagacaattaacagtcatttgaataaccttgaatacccaacaattggaaaataa

SEQ ID NO: 79007 - DNA, 1290 bp, Heterodera glycines
atgagtacacgtgaagaaattcaagcagtttgtgtgcagtccttaaaacagttgaaaatcggtgtgggtgaagaggagttgcagaatgggaaggacttttacaaattgtaaaaattaaattttcaaaaaaattttttgaaactttgaaattttagttttttcaccaactatccaaccccttcgcgtgtattttaagggagcagaaaaatacgaagcggaggatgtgcaaaagtcggaacgttttgaaagtaaaaaataagttaaataaagaaataatattcatttgttaaaattgcataattaatttactattaatttttcaaatttaataattaaaattaaaaaattgaaattattttaaaaattgcggaatctaaaaatattaacaaatcttaatatataaattaattatatttaaatatttcaaaattacataatctaaacaatattaaataaaaaatattttataaaaatatttgcagaatctaaaaatattaactaataatatttatcttaataatagtaaatttaattatatttaattatttcaaaattacataatctaaacaatattaataaaatatttacatttataatgtttaacaaaaatattgtacttctattttgcagaacaaggacaacgtattcttgttgccatgcatttgattgccaatgtctacagcaatgaggcaattaatttattcttgacataataataaatttttccatttttataaattaattatttcatttttttggttcggctctattagtgtgagcgccctcaaattttacgtttcacaattttacagatgcttttcaatgcgtatgtgcgcgagaccgtgaatcgtcatcgccagttcaaaatggagccatcattatggaaggcaagttggcccaaaaatttgtaattattaatttattaaatgacataattatggtttcattcctatcactttaatatgacaattagtgaaaaaactgggggcaatttgtgaaaaaagccattaactttaattatttttgtctcacagatatgagtcccttaatatgctcttattgtctttgtttaaagaatatcaaagtcaattaatttgtttttctagtcacaccctaattttaaattaaattttgccaaaaattttttaggcattttggacagtttggaccggctttctggaaacaaaagttgatctgacggaacaggccaagtcggcctggatgtcattgggtgaggattttgccaaggaagcgcttgcacatttgaaacgccttggcatcccgcattga

SEQ ID NO: 79008 - DNA, 323 bp, Heterodera glycines
atggcaacaaatttgaccgttactggcaccgttattgtcgatttgatcagcaccgggctgatcaatgccggcttcaagcagtttaccttcgtttgcaagctgatcaccgcccttctgatcacgcgtctgttgctgctcgcccgcttccgtcccgccgttctacgcgtgccggaactgtcccgcgcattgcgcacctttttgtgctttcacttggccggtgccattgtcacaatgccgtacaatgcttatgtgccaattgcgtattatacgtcattagagaatgaagatgtttgaatttttttcagaaaaattcttgattttca

SEQ ID NO: 79009 - DNA, 52 bp, Heterodera glycines
gtcccggtcccggtcaaaaaagttggtcccggtcccgacttttctggtcccg

SEQ ID NO: 79010 - DNA, 259 bp, Heterodera glycines
atgctgcgtgctagcgggaccgaacccgcatttgataatgtgatctgtggctgcgctgcgactgcgctatttgcatgccgccaggaactattataaatgttataaaacatatattatatttaaatcatttttataaaaaaaaaatcaaatcaatttttaagaacaaaatctcaagggaaaccagcagaaaaaatgcatattaatataaaaaataataatttaatttttaataataattttgcaaatacttaaaaagcaa

SEQ ID NO: 79011 - DNA, 524 bp, Heterodera glycines
atggattcttcttccaacacccaatcaccggccgttgctctgaccgacacaaacaccgccggtgccatcgccgtcgaaatggtctccgatgaatacgctgcaatgcctgttagtccgtgattcgtacacaacacaacaccaaacttatttctgttttttttcaaatcaaaccaaaatttcattcttggtatctttcgtttaccttcttcatatatatggttcttctctctgttatacatcaaacaaaattcataaaaaatttgtttgattgctgcttacaagggctggttccatattccggttccatatttcgaccatttagcacaaaattccggaactttacattttcataattttggcttaaaagttgaaaatgccaaattttcaaaatatcaaaaacacactaaattcataattccagcggtgttttaacggctccgccggaccttccacagttcaaaaaatttggaaaaaccccagcaaataaacacgaaatcttgacacctaaaagtttgcaaaataaa

SEQ ID NO: 79012 - DNA, 404 bp, Heterodera glycines
atggctctgttagcactttatccgtttcttcattgcgccgcttttgacagcggagagacgagcgcagaaatggcggaggaaatgaaccgaatgagcgcgggaaaagccgaattcggtgggggggggcaacagagaagaagcaaaagggccaaatagcggcgatcaaattgttcaatgcttcgaatttcggttcagttagcttcgaggaagtgatcgccttggagcgtccagcagcaggtgacaacggtttcggcacttctgcttcggttcctccgtctttggcttcgaccattcatagcggtttcatcgtcctttgttttcgcctattggacggtcaaaccgatagcaattcgcaattggagaacacttggcttagttggactggagcaaatgaaatatacaaa

SEQ ID NO: 79013 - DNA, 1387 bp, Heterodera glycines
atggatgggaaagtaaagaacaaacgagaagcgtcaaaacggcagaacaaaggagaagcgtcaaaacggcacccaacggatgatcccaataagccaaaagatccattttttggacaaacattgaaaaggcactccttccgtgtcccaaataaaacaactcatattccttttattttcttcaaattaatttttgatagtttatttctttccaattttaagttaattaaagttacatttaccaaatactttttgtaagtacttgtcacagatataagacaatatgaccgaattccaatgcaaatttaaaattaccgatatgatataatagtgaccgggaattaatgggaatgaaagacagtcaaattgtacaataatgagctgggttttgagtgagtgacaacgtaaggcgtacatatgaacaaatacaataaatcctcacaattatatggtcaagtaactggtcaacgaaattaagagagttgaacattcagaagaggagggatagtcgggcttcatttaatgtgagttttcccaaaatttttatgttattaaattgtgccttaaattttttggagtttttaagaccagtgaattggaccagtaagaagcgcctaacaagaactatcagaatcaaagtgttaatttctcaagaattcttcactgggacgaaatctctacgcttcagaattatttcgctctctgaccaaatagcttaaattgtggttcaatttctccagaatttcgtcttcatggcgcaaatactcacattctttcaactgaaaatcttttttttttttttagaaaatgaaggctttaaattttctctcccctccataaccaataaatagggaacgggacattcccatcggaatctatggaattgtttgtatcaacttgccagtctttgctcaatatcaaagaggtgttcatcccacgctttcgggaccattctccgttgacagtcggccaatcgcaaagcgtactccaaattgcttccgcttggtcctctgcttcgaataatctaaaagccaagggaatgaaaggccaataagcagggatgggaaggatggtacttgtttgacaatttcgtcgatgctcgtgggaactgagtgataaatgttgtcgcccgcttccgagatgtacacgcacagttcaaaggggtcagacccattgtccgggtaaaactggacacattttagctgaatttaaggtaatactggagaatctgggctccacccaaaaaaaaaatttttcttgtaaaaaaatgaacccggggttttcggtgcttctgatcacgaatatgatatcaaaatttgcaaaataattgactttatcatttattttgaaaatcatagattttagaaattttgaccaacatggcagggta

SEQ ID NO: 79014 - DNA, 510 bp, Heterodera glycines
ttttacccggacaatgggtctgacccctttgaactgtgcgtgtacatctcggaagcgggcgacaacatttatcactcagttcccacgagcatcgacgaaattgtcaaacaagtaccatccttcccatccctgcttattggcctttcattcccttggcttttagattattcgaagcagaggaccaagcggaagcaatttggagtacgctttgcgattggccgactgtcaacggagaatggtcccgaaagcgtgggatgaacacctctttgatattgagcaaagactggcaagttgatacaaacaattccatagattccgatgggaatgtcccgttccctatttattggttatggaggggagagaaaatttaaagccttcattttctaaaaaaaaaaaaaagattttcagttgaaagaatgtgagtatttgcgccatgaagacgaaattctggagaaattgaaccacaatttaagctatttggtcagagagcgaaataattctgaagcgtag

SEQ ID NO: 79015 - DNA, 531 bp, Heterodera glycines
atgaaaggcaccatcagttatcccttggttcttctgtgtctggtgtttttggcattatttgccttcagttgcaacactaccaatgatggaaaagacaaacagaaggacaaggagaagagtaaaacgaacgatgagcgaagaatgttggttgaacaattaatgcaaatcgaagcttacctacaattcccggcacaacagcaatggacggtatttaatttggcaaggaaatacggcatcatggacaaagaagcattaattaacctagtggaagaacaatggaaaaattacaaattagaatgggatgtagaaagaaacaatttaattcaacaacaactgatacaatcgtttggtccaccaaagccagcagaagaaggttttaagacaaatatttataataaattagttttaaatgttaaaggtatgccaatcagcagtgcattgcaacaatggcaaagtcaaactggacaacaaaactcattaaatcaactcacaccgacaaccggtaaatttgtcaattttggtgtgatttaa

SEQ ID NO: 79016 - DNA, 1199 bp, Heterodera glycines
atggatcccggaactggcttctgtgttatctatgaaaagcacaaactgccaaattgcgtgtgccccgttttgcgtcgtcgctttgattttgtcacattccgaaggatttgcattttggcgggttgtgactacttgcagggcggccttcaaggcgttggattgaagacagccgaagaagtgttcacaaaggcatccagtcatgccactctaccgagtgtttgtcgttcatttcggtttcatttccttaatatttgcttttcaggtcctcgttcgtctgcaattgtacacaaataaacgactcaaagtaaaagtggacgctgattttgtggacgcctttgttcgcgcggagaacacctttttataccaaattgtcttcgatcctttgtatgttatcccttttccattatatttagaattctttttaattcgtagaaagcgagaacagagaccattgaatgcctatcctgagacaggggaagaaaaggttttttgtctattttattggtaatgtaaaaaattattattattaattcattcaattgcttttttcaataataaataaatttaggaaaatttgttggacaatgaaaagaagtatcattatgcgggagaagtaaggtgatttggtcagttaaattcgtcgtttttcggtcgtttctccacggaatgcccttcgccttgccttgggaaatgacgacctttccaagtcgtcgcttgaggatgaatttgttttgcccagtgaaattcccgtgtcgtcaatttggaacagcaattacaaaaaagtgttggaaacggaaaaggaccaactagaaaaagagttggacaacaaattcggggcttttcgggtacgattttaattatttaaatttttacaaaaaatttttagccaaaaaaatcactcgtgaaaagatcggctgacaatgagtcaatctctactcattgtcatgacgaacgcaaaagaacgaacaaaggggaaattgatacgatttttacgaaaagacgtcgtttctctgagattcaaatcgtaagtgatcgtttttagtaagagttgaatacctttacatgagatttggtttttaagggaagtgcagcaccgcggaatggagcatatacaaattggacagcaagggattggatgcgaatttatggccaacttacgcaaaaggaaggggaagaagaggaaaacagctcctccagaa

SEQ ID NO: 79017 - DNA, 684 bp, Heterodera glycines
atgggacaaaacggtggtcagaacgacaatggagaagcgatgcctcacaatcagcaaaacactgtcgagcagtttgaagcgctgctccgtcgtgttgacaagcagtacgtttgggcaaaaatggcgaatttgacgggtatttacgaacttattgttagttcattaaaaaatctttaggtcacaaaaaggaagggtttttcttaatttttgatattttcggcttttcacacgaggaaatttttttatttaagacttgctgatgtgcagaacaatttggacgaatggaatttggagagaggcgaaacgggggactcgggccgagattggtccataattgaagacgaagagcagcaaaaggaatgcgaggaggagagagaaagaaatgactgtccgcgctaatcgaatgacagcgaaacaccactgacaattgacccatcactttcacttttcacccataataaatccgaaattgtgatgatttaataagccttgctggataacgatctacttcacttttaccctgtcagtgcaaaacctgaaaattttcagatttaatttcctaaaaatttttgcgcgctgacatttttaatacttaaatccatctaatcataatttaagccagcttgtaatttgctttctattcagattgaattttataaatttgtacacgcttttgtattgaca

SEQ ID NO: 79018 - DNA, 491 bp, Heterodera glycines
atgccacgcgaagagaataaggacattgaggaggaaaggttggggtttttttggtatttccaaattcatttgacgtcatttttcaggcgcgcgaaaacggcctacgatttgatgcgcatcagactgaagagactggagaagaacattgtccgttgctttgctgcgcaatggccttagttttttctgtttcaggacaaacccgtgccgataccgaccaggcgagaagagcccaagccgaggcctccgccggaatttgtgcggaatgtcgtcgggtcatcagcagcagcaggcagtgccgagttccacatttgtgcgtgtttaaacaaatttataattgatattcaattaatctaatttcaatgtgcagttcgcaacaacaaacgacgggaattggaacggttggaatacatcgaaaaaatggcagtaaaagatgaaaaggacaaagaatttgaggagaggagaaaggcacggagagatgaggaggagaaaaa

SEQ ID NO: 79019 - DNA, 1197 bp, Heterodera glycines
atgcctgcaccaaacgacattccatctctccgatcattccttggtatggtaaatcattaccaacaatacgtcaaaaacatgcggttcatccgaaaaccgctcgacgatttgcttaaaaaggaaattgattggagttggagtgaaggatgcgaaaatgcatttcgaaaaattaaggaaattttggcatcagatttgctgctaacacattatgatccaaaaatggagatcattgttgcagctgacgcttccgaattgggcatcggagcggtcatttatcacaaatttcaggacggaaacatcaaagcaattgcccacgcatcaaaatcactcgcccctgcagaaaaaaattattcacagatcgaaaaagagggcttggcattgatttttgccgtacaaaaattccataaaatgatttatggacggcatttcacattgcagactgaccataagccccttgtcagcatttttggcagcaaaaagggaattaggcagtgcagtgccaatcgtcttcttcgctggtcattaatccttttggcctacgattttaccatcgaatacataaacaccaaggattttggccaggcagatgcgctctcgcgcctcatcgccaaaggaaatgagcccgaagacgagaaaatcatcgccatgatcaatgcggaaacagattttgagacgaatttcgacaacacaatttcaaaattgccattaaaattttcggacctaatcgctgcttctgagcgcgatgaaaacatttttcaagtccaaaaatttgtcaaaaatggctggccaaatgaaaaggccatggacaaagaaaatcaaattgtccgtgatttatgtcgaagaaaggaagaactttcaaccgaaaagggatgccttatgtatggagaaagagtggtgatcccgaaagtcttccagtcaaagattctgaaattgctgcacaaaggacatcccggcatgaaaaggatgaagcagctggcacgccaatacgttttctggccaaaaatcgatcaggacattgaagattttgtccatgaatgtgtgccatgtcaggctgctgcaaaagcgccgattaagacaaatttacaatcatggccaaaaacaacaggcccttggcaacgcgtgcatatggattttgccggtccgtttttcgggaagcatttcctaattgttgtcgactctttttcgaaataccccgag

SEQ ID NO: 79020 - DNA, 810 bp, Heterodera glycines
atgatgttcaatcaaacaataaaagaggttgacaatttggacatcttaaacacggaaaaagatgtgttcgactccgcagatcaaaatgatgccgacgatggacagtttccaccggtcgaagaatggtaaaaacaaattaagcaattgaaaatatttttttcggtctgatgattaattaagagcaattaaaaattgacagttatccgacccttaatgaattgcattgtgttgaataataatacatcgattcaatttttaatatatttttattacacgttaaaaaatactttaaaggctgaacttatgtagttgatgaaaacaaaagattgtggggtttctcgtgatttttcctttgtaaatttcatgtgatggaaaatccacaagatttaaattgtccataacttctttttttagtgatgatgatgatcccgatttgtttgccgtccgtgccgtccccgacatcgatgacccgcccagtcccccggacagcgacgaaatttcggccggcattcgaacggcgccgattcgtcaagctggagaaaggcgaataaaacaattaacaatcaaatataataataataagaaaaaagagaaactattagcttttatttactgattttgccaaatttagaattgacacttctgccgaacaaacagaaaattacggaccgaatttttggagaacggaggcggcacaacgcgttgttgctgaacaagaaaaaatacacaagcaaattcagcaaaaacgtcgcgcactagcttcaaatccaagtactaaaaaacgtgaaaatcattaagagagcaattaaa

SEQ ID NO: 79021 - DNA, 1344 bp, Heterodera glycines
  unsure (1)..(1344): unsure at all n locations
atggcaagcaaagtcattgacgaagaaaccaatgaagagaaatatgttctaaagcaggtaagctaaagcgaatgattaaaatcaatcaattagtcaatgccaatcaaaaaaatgcaattagccgacactaaaatatcctttttcaattttgcaaagcatntaattattgccaggttgaacaaatcacggcgctatgggcggccacggcacttctccgcgtattacggcactccaccggcgaatgctgtccattgccggcgtcgactcgtcactgtcggtggtgccggagaatcaaactggcaaaatgtttgcgacggcattgtacaaagcatggtaagagcatgagaaaaagaggccaaaccgtacaaaaacatttggaagactcggataacaagaaaaaaaaacgaatgaatatcatactgtaagttatttaggctcactaaatgggtaatatatgaactaaaatgtgccaataaatgggtaaatgcaatttatttaatttattttttccttcatcgaggatttgaaaaatccccctccacatatgaatatttttattttttagtaagtcctatccccgattttttctgacgaatgatgttggaacaaatacacattaaaaaatttaaatcaatcctttagtcttataattaaatttctgtcgttcgtgtgccatttatagtcattaaattcatcgcaccctttggcacttttttgatcatcgaaattctattgtataattttgcccattttcagggaggcattcggcaacactgaggcggtgattcttttcctgcacaatccgtaccgcgactatttgctgatcgaagcgcgcgaggtgcagcacgatttggagaagattgcagacggaaaagtccaatgctttttcctcacattgaagcaggccaaagagcggtcggtttgtttaaatgaatttaattaattgaaattattaaattaatttaattaattaatttaattacataattactaaaatgattgcatttattcaaattaagattgactttccccgacgactcagactcagcaattctggacaacaaatacgttgtggctgttgcgctgagtcgatacactgcttacgccacatccgatgaaatagtcaccgcgcgtgcgcttcgccgttcaaatgccattgtaaaaaagaaaaatatttttatttaataattattttaaatataaagggatcataatccgatcgatgcctaaaaaaatttcccaaattctgtcctcttcatttttttctctgatattttccaaattattagagtattggaagatttggtgattccgagagactccgccggggggggggggtaatta

SEQ ID NO: 79022 - DNA, 362 bp, Heterodera glycines
atgcttttcctctcctctgaaggtccccttccgccatgcgacgtgcttttcacgctgcacaagggcactctgttcgcactgctcgacggcaccgtgtcgccgctgtgcgcctatttggagggccgtgtccaaattgaggggccagtggcggacgcggcactgctcaaacacttggcatacgcaattggaggagtatcagcaacacaaccaccacaagcagcagaggaaggaatgatggggatggaacatgcgcaagaaggagaaaaggggggaggaggacagattttggatatttaatttgtatatatggaatgacggatgtggacataaaatgccaaatttggtaaagcgaattagaagaa

SEQ ID NO: 79023 - DNA, 195 bp, Heterodera glycines
atgcttccaataactctcccaaacagatcaacgtgtcgccgattgggcgcagctgttcccagtcggaacgtgatcaattcgtgcagtttgaacgcacgacgcccattcgcgcccaatttgtcgaggcattgcgccaacgattcccaattgaacagtacggactggtcttctcaatcggaggacagatcagcattg

SEQ ID NO: 79024 - DNA, 1319 bp, Heterodera glycines
atcggttcggggggactgcaccgaaaacaaaaaaatcgatttttcaagtgtccgtttggggtactcaaacaattatggggagcaaaaatccaacgcagaattaaagtacaggctatagggaagctattcccgaaggattcggtctccccataaatctgggcgcatcggttcagggggactgccccgaaaaacccaaaaaaaaattttttggataaaaattatttaaataaactgactagataatatttaaaataggttatttctcttcctttcagtatccctgcaaagtttgctgcgcttctgatcagtttctgaaaaaaagttaagcctaacatcggttcagggggactgccccgaaaacccaaaaaaaaattttttggataaaaattatttaaaaaaactgactagataatatttaaaataggttatttctcttcctttcagtatccctgcaaagtttggggcgcttctgataagtttctgaaaaaaaagttaagcctaaactttttgccctgtttaaaaaggaattaaaaatttttaaaaattttattcatctccctttttgatagaaaaagcatcagagtgcctaaactaacatgtaaataaaatttggtgcgtttcagaaccctttctgtaaaaatacttatgaattaattttgcaaaaaaataaataattaatgaaaaactcagaatttctaaaaattttgaaaaccaattatgggccagattttttcaggttaagttagtccttttacagaggagtacgcctgtaaaatttggtgagtttatattgattttagagtgcgctagattcaatgaaactttttaaaatttaagcctaaactttttggcatgcttaaaaaggaattaaaaatttttaaagtatttattcatctccctttttgataatataagagtcagagtgccttattcaacttgtaaataaattttggtgcgtttctgagcagtttctgaaaaaaagatatgaattaattttgcaaaaataaataaataatgaaccctcctccttaataattttcctgcgcccaaggtactcactcggccgcttcgcggcctcgtggggggccttcgccccgcacgcatgattccaattttccaagcaccccaccgaaagtagaacgaaataaccaaaatataaggaaaatatttttaaaagatgttattcatctcccttttgatagaaaaagcatcagagagccttatttaacttttaattaacatttggtgcgtttcagagcacgttctaaaaaatatttatgaattaattttgcaaaataataaataattaatgaaaaagt

SEQ ID NO: 79025 - DNA, 7338 bp, Heterodera glycines
atgaaagccgacgaacaactcaaatcagtggtcaatgaagccaaatcaatcttcaaagcagccggcatgataatccgagaattttacggcaccgacattgaagggctcaaacaattgccagccgaagacttggccaaagaattggaagagacaaaagttcttggaatcgcttggaagccgaaacacaatcgtatcgcattcaaattgccaattttcgagggaacaatcaccaagcgcacaattctatcacacattgccaaagtgtacgacccgcttggattgatgtcaccagcattgttgtcagccaaacttttccttcaagaagtgcaaaatgccaatagcaaatgggacgaaacattgtcgagccatctcgtcaaaacgtggctcaaaatcgtagaaacttggtcgcacagtggcacaccaatcaatgtcgaatttccgcgattcattccgtccacaacgaaggacgaatttcattgcttttgcgacgctagcaactatggcttgggaattgccatttatcagaaagcagacacgacatacgcaaaatccgaatgcaacttgatcttcgccaagagcctggtcaagccgctaaaattggtcgcccacgattcaacaattcccaaactggaactgcaagcactcacgctcggagttaaagcagtcaacttcattcaacagcaactcaatttcgatgacaagcaagtcattctttggaccgacagccaatgttcggtcgaacgcctcaaagacggcagaaaatccgatcgattcgtgaccaatcgactcaacaaaataagggctgcaaattttcaagttcgacacgtcagaacagactcaaacccggcagacttagcctcaagagggatcgaccctcgcagcattcaagcatcgcttctttggagatttggaccgatttggttgtccaaatctgatcaatggcctgagtcaaatgtcatttatcaacccggcgaagaaatcaaagcttacgaagaagtgccgatcgttgaaatcagctgcgcagttcaagaaaagcagaaattcaagccaacaattcaatttgaacgattttcgaattggaaccgactcagagccacagcagcatacgctaatcgattcatcctgcgactgctgagagcaaaaagaaggaacaaacagcttcctcaaaacattcaaatcaatggaccattgaaagcacacgaactgcaacttgccgaagaatggatattgacagaaactcaatcaacttatccgccaaccgaagatcaaattcgagatcttcggctcttcaaagttggaagactgtggagatgcggaggaagacttgacaacgcagaaagtctcagtttcgacaacaagcaccccattttcctgccacccgacggctggatcaccaaactgatcattcgacattatgatcaacaacacaagcattgcggcccgagaattcttctgtctcaaattcgagagaaattctggattccgcgcggcagaaagacaattcaacaagttctgaattcgccacgtcatggatgtctcaaatgtcgaaaagaaagagcaaaaccatactcatacccagaggcacctgatctaccagctcaacgcgtcaatcaagcccgaccattcaactcaacgggcatcgattatttcggacctttgaaagtcaaaaggggtgccgaagtcgtcaaaatttacgtcgcgctcttcacttgcttagtgatcagagcaattcatttggaaattgcggaagactactccgccgaagcattcatcaggacgttccgacgatttgtctcgagacgtggaacgccaacactcatcatgactgatcaaggatcaaatttcgtcgctggatcaaaaatcatcaaagagcattggaccgacacgcttcttcccgaacatgtgcaaactcgactcgcgcatcaaggaatcacatggaagttcaacacagctcatgctccgtggaaaggaggcacttgggaacgacttgtcggcattacgaagaattcacttcgtcgaacaattggccgaaatcttttgggatttgacgaaatgcaaactttgatctgtgaaatcgaagcaatcgtcaacaaccgacctctcacgtttgaatcggatcaagaaccgtatcaatcgcttcgtccgatcaactttctcattccatacgaacaaatcgtgatcaactttccgctcttggatgaaaacttcaacgatccggacttcgaaccgcgcacaagcaaccgtaatcaactcgtcacgatgctccgaaaaaccagcacgctgctggaccgattctggcacacatggaaaacagactacctgttttcgctccgtgaaacagacagaagcaacgcaacaaaccgatttcttcaccccaaagaaggggatgtagtcattgttggagacgatgaccaaccgcggtcattgtggagtttggcacgagtcattcagctccacaaagggcgagataaccaaatccgctctgccttactgtccattaatggacaacatcgatcccgggctataaatcagctttattgcctggaaattcccgacagttcagaaacagaagcaccagcacacaccgaagtgatcgctccaatcatggcatcggaatcgatcgaagtcatctcattggcgagcagtgacgaccaaatgtccgacgactatcacattccgaagaagaaaaatgtgatcaaacgaaaacaacgctttattactggtcacaacgtcggcttacgagaagtcgagcaacgacccacggacaacgatcccgtcgaaggattgttgtactccaagcgaccggacaacaaaaccaaattcttcaaggacggaaacttgaagatgcttttggaatcaatcactctgttcaagcgcatcgaaggcaaaaagatggcagaaaaactgttggaactttacggaaaagttccgatgatcgaatgggacaaacgcttggccaaatacgaagcaaaactgaggaaaatggatgaagcaagggacaaaaaggataaagagagagaaaaccaaagaagagaaaaacgaaaattggatgaagaagaggaaccggaaaaacggaagaaaatttcagtcgaaactgacccattggaagaaactgacccgaaaaaggaacggcaacttcaagatgaaaatagaatccgctggtctgcgcaaaggaaagcagcagtggatgaactccgtcaacgcatcaaattgaggaagaaacaatggtcaagggaagaaattgagaaggaaatgaaggaaagcgaaaaagaggatcaaacacaactgcgcgaactggccaaaaacggaagcaaagaagcaacacaattattggaaacagccccatcactccgccaacagtcaaatgttcaagtgactgcgacaattcaacgaaaagctgaggattatccacaaaatggagaaaaagttttgaagttctgccagcggatgtaccaagacaatttgatgtcagcgtggagaagaaaccgagttcaaaaggaattgactcaacttttggaagatggccgcttcaaactccgtcatgtgaacggacaacaagcaattctgcatcgaattacagaaggcaaaaaggacctttgcggtgaatttctcatcggaagaatttgttcatggcattatttggacgaaatcgaattcgaagacacaaaagagccaccgccggctcaacgagactcaactccggaaatcacggtcgtcgaaaccaaaaacgaccaggacaggcagcaagacgaaccgcaattcgttaccattcgagccggacgtacgccgccaccattatttatccctcaacgttcaaaatcgccatcgcctcaattcatagtacaccgtgccgctcacacaccgccgccagcacatcgcgattcaacacaaacacaactcgtggaagagtaccatttggccaaaagcaaacccaacacgtttgtggatttcaacatcttcactgaatgcgatgaaactcatctcacctgcgcaaaaaatgcgacttatggtcaaatcgcggacaaacacaatcgagagaaaatcgaagaatttgtcaattgccgtgcacgcactttgtttgaagcaataatgctccattggcttaattgcaacatcaatcggccaaataacgaagtttgggccatgcacgaactgcacactcaacaattcgacactttggaagaatcggcaaaatttttccatcaacaacaaatcgtcatgcgtaaaagagacatcggcaaagacaaacacttcaaagaagcgatcgaaatttggcgcaactcatgcgacctgttcaatgaaaactttcaacatgtgaacaagcaactcaaattcagcccaacacattcgcctgaaatgcaaaaaacggattatgccaaatggatcgaacggatcaaccaacgtacaaacgaaataagctcaaaagagagatcaagaatgcaatttcccgacttcatctacttcaacgttcgaacaattttgattggagacaacaccgcagaagctctccaatctcatttcccaaaatcccgctggtacactcattttgccgatcaaccgcttcgacttacactaggcccacaagtcaagcacgccatctttgcgtatcaatcaactgatgaggacatgatccgacaaatcactccgttgctttatcagcacaagaacactgacatcgaaacaacgctgatcctacgaaaggacaacaacaacgattggctctacaacaaaaaggaattcattggcttgactaaacgacttgaggccggattcttcgttttcaatgcacgaatcggcgaagctaaagaattggccgatcggatgaaagagacaatggaggagtcaatgcaactcaacaccgagcctacaacttcaaatttagccgggaacaaaaagccataccgaaaaggattcacagttgggcaacgaatgctcaactcgctcatgctcttcagcctttttatgctcatcgcattacaaggagcaagcgcacaaccaatccgtcaaaaacgatttggcggagttggagtttggcatggaagccacgcaatcagccaactttggggcaataacgccaccagggaacgattttcgacattttctccctcagtgcaacgctacataagtcgtgtgttcgctctcaacgcaacagcaactcttccaacagtcccaacctcatcaaccgcacacacaactccaatttcaacaactccgcccccattcacaaccacaaaaccacccgcaataactatcaaaccccccatttccacaaccacacgccaatggaaaacgaccaagcttcgaacaactcaaacattgcccccaacaagcaccgaaactccgatcacccgaaccaatcgccccaaaatccaacccccattattcttcgctcaacgacaatcccaatggaagggagacccgatcaacgccaaaggaatggacatcttctggtgtacggatcgtggcagcacaatttgtgaactgaagggacctgaaaactcacccttttgtcgcccaccgccagtgttgaccgccaaatggaccgcacttaccatcacgctgtacacaaaaatccatcgacccgaaaccgtacaatcaggatggaattgtgcagtgagacgaatcagtgaggtgtattacaccaacctgataggagataagttcgtggacgtcaacaaaacatttctgcccgtgtccaaaacaatgtgccgacaaatggcacttcatcaaatttgccctatggcaaaaacagaaatgacacaaaccagcaaaaacacatggacaaccaacgacgaactcagtgtcaactttcctggtccaatcgaaggactcttcaaaggaagtcaaaccagcgaaacgacaaactgttttgtccaaccagcaacattgttcgtcaaacgccacaatttgcaacttttgtcgccagttcatcatgtagaacattgcgactactcatcaggattttgccaattgcccgacaacaccacaatcatgtggaaaccagattgccccgccgaaggatgctacacctgcgacttcgagaaagccgaacaaatccgaggcgaatttaccaaaactcgaggacaaacctcagcaatttggatatcggaagatcgtcaaaaagctttgaccttcaccgactcaacggcaataatggcatgcgatggcaaatcgattgttctttcggagcagaattttggaattcgaaaggaacaatacgacgcattgatggacaacgatcattcaagaacaaagcgcttcgtagaaccggaacaactcgcctctcagttgtcagcagctcaaattgcaaccaacatggcactttcgcaactctacatgaaagaatgccaacgcaacttccgtgttgcgaatccgacattgcaggcccgaaaactgctcaaccgcgagaatttgcaagctcgatggatcggagaaacaaccatcgaagttttcccatgcgtcaacatcactctgaccgacatcagctaccgagcaacaaaaagttgctacaaattcattccggtcaccgttcatctgccaaatgccacaatggatgcatttctcgaccccgaaatgcgcatcctttcgctcgtcactcacatagcaagctgcacgcatttccgctaccaccatctgcaacttaaaaagaaccctagcatttggctgcggatcgacgtcaatttcggcatcgccaaacgactacctcagtctgctgtccatgagctctacgaatcgattcaaaatcaaactaacaacgatttcgaactcaatccattgatcttccatcaatggcaactcagcaacgacaccgacaacgccattttcccgcacatcgacgaattcgcggatttgacggatttcaaatcaaaactcgagcagcatcaaactgcgagagccgaagcattgggcgcaattcccggaggactggaaggatggacaattcggaaggtcaaggagtggctcaacgaactcatcaattggtggatgcgactcgcatgcgcatacgctacatttctccttctacgggatgtgatactcccgtgcatcttcgcctatctgatcaaccccgtccgtgtcacattcatgagcctcgtaggattccgaccacgccggcaaccacttccgcaacggcgatgcttcgacgaagtcgtaccaatgcgccaactgccccgggcacccaaacggccatcaattcgtctacgtgccgaccgcccatcctcgccgatcgctttggacttcgactcaagatcggcaacttaccgatcacgcgcatcaagcttgacaatcgacacgccattcgggaagtcgcaaccgttcaaattggcagacgatgattga

SEQ ID NO: 79026 - DNA, 3717 bp, Heterodera glycines
atggcctctccaatccaacaaaaattgggagccgcactcaaagtgatcagccatgtccgaaccgctgctgcactgacaatcgcaactgatccaaccgcaagcaactttgaaaatgcactcaatttcgaagcgcaacttgagaaagttcaaaaagaagcaaaaacattggaaatctttttggatgacattcgcgaatcgctttcttcgtggactgatcttctccgcaaattgccagcaacagaacgagaaacaggcgaaaccgaattcaacgcctacaacaaaaaggagaagatcacagacaaagtcgatgatgcatcaagcaaactccgggatcttcgtgatttgaatggcacgttgtcaattcatgcaaaactcttccgcaacaaatacgacatggaagaacgagcaactcaagctgcacaagcacaagcagcacccgcaactcaaggcagaacgattccgccatcacgcccatcatcatttttccaaattcaacccgtgcaactcgagagattcagcggcagcaaacggcaatggccggaattttacgaatcattcaaatctgcaaccggatcacattcattgagcaaggccgaaaagttcaacatcttacgcaatttgttgactggcgaagcacgtgaactcgtcgctggctttcgtcttgaagacgcaaactatgatgtggtactccaattactgaaagacacctatggagcgcatgacgaacacatcagatcgctgcatttcgaattggccaacctccgaacatgcaaaacattgcgcgacacaaaagagtttttgctgcaactcgaacgacttacgcgggaattgctcaacgcaggagcagacatcgaaggaccgccaacatatctcatgcttgaaaagaagctgacgccgccatttctgcgcacaatcctcaacaaaaagggagaagatcccgatcattggaacacatcgaagttccgcaacattctcaacgaagcagtccgcaaagagactcaaattcaagaagtcatgaccgaatatggtcaccatcagcagcaacgaccaacaaaaccatttattgccggaccgagattccgggatcgcgcaccgttcaatcaatttcgagaacgatcattcattgcgtccgccgtggacgaaaatcaaaggcgattcagcaataaacaattggcgcccaaaatcgcacacaatggaccaaaaccaactcaattcgcacaacgcacgcaacacaacccggccaaacccaatcaattcaacaggccgtcacaaccgcaaacaagtggcaacagtcaatcaaatgcaaatccaccaaggccatgtgtattttgcaacggcaaccattggaattccgattgccgaaaattcagcacaattcaacaacgagttgaaattgtcaaatcaaaaggcttatgcttcaaatgccttttcgcacatcgtacatttgactgtccaaaaccgagaaaatgtttcaaatgcggacaacttcatccaacagcactttgccgcaacattaatgcgcagaaccaaatcgcagcggcaacaatcatgccacatttgtcaataccaagcccgcaaccaatcgaaaatgctgcaatccaaacccaaccaatgtgcaacgccgtcaatgcaactgacactcgcgccttactcatgacaacgacggcaaccattttcaatccggcacaaccgcacctcagcatgatcgcctcaattttcatcgaccctggcagtcatcgatcatttgtgtccaatcatacggcacaacggcttgatcttccgatcgtcaacaccgaagaatgccttttgaccagctttggtgagcgcatgccaaagaaatacatcagtgacatggtcaaattgggatttctgtgcatcaatggagaaagactcatcttcaacctcaatgcacttcaattcttggtgaatgaaatgccaatgatccaattgtccgaattggatcgcgatcaactcaagcaacgaaagcttacgccaccacacgagatgaagcagcccgacattttgcttggcatcgatgtctggcacgaattgcaagtccaattcatcgaacgattgccgagcggatttacactttgccgatcaaaaatgggcaaaatactaagcggaacgggacgaatggaaatggggcaagcatcaaatgtcacattcgtcctcgcagtccaagacaaccaaatggcccaagcatcgacaactcaatcaatcgaaatcgaagacaacatcttcacatccgaggatgatctgaaacgagacgatcaactcaacagcttttttggtctccatttgattggaatggatgactcctcaacgccgatcgatcgagatgaagttatggtcaacttcaaaaagaatctcacgttcatcaacaatcgttaccaaattgctctgccttggaacgacaaagtcggaactcttcctaccaattatcatcaagcaaaagcccgactgatcggactgatcaacaaacttcgttcactcaatctgatcaacgaatatcaggccattctcgacgatcaactccaaaaatccgtcatcgaactcgtcgaaatgcccgatcaatcaattggcccggttcattacctaccacaccgagccgtcattcgagccgacaaagcaacaacaaagttgcgaattgttatggatgcttccgccaaaccaaaaagcaatccatccgccccatcgctcaacgaatgcctctacactggtccgctactactcaaggacctgactggcatccttttacgcttccgccgaatggaacgcgtgcttttggccgatatcgaaaaagccttcttgcaacttggcgtccgcgagcaggaccgagacacaactcggttcctttggctgtcaaatccgaaagaggccgaattaaaccctctaaaacgagaagacattttggtctttcgttatagtcgtgtaagcttcggattgaccgtttcgccttttctgcttaatgccacgatccgtgaacacctttcacttttcgacaacgacttggcaaaacgcattgacgagaatctttacgtcgataatattctaatcgaaatgaaagccgacgaacaactcaaatcagtggtcaatgaagccaaatcaatcttcaaagcagccggcatgataatccgagaattttacggcaccgacattgaagggctcaaacaattgccagccgaagacttggccaaagaattggaagagacaaaagttcttggaatcgcttggaagccgaaacacaatcgtatcgcattcaaattgccaattttcgagggaacaatcaccaagcgcacaattctatcacacattgccaaagtgtacgacccgcttggattgatgtcaccagcattgttgtcagccaaacttttccttcaagaagtgcaaaatgccaatagcaaatgggacgaaccattgtcgagccatctcgtcaaaacgtggctcaaaatcgtagaaacttggtcgcacagtggcacaccaatcaatgtcgaatttccgcgattcattccgtccacaacgaaggacgaatttcattgcttttgcgacgctagcaactatggcttgggaattgccatttatcagaaagcagacacgacatacgcaaaatccgaatgcaacttgatcttcgccaagagcctggtcaagccgctaaaattggtcgcccacgattcaacaattcccaaactggaactgcaagcactcacgctatga

SEQ ID NO: 79027 - DNA, 507 bp, Heterodera glycines
atgaatcgcggaaattcgacattgattggtgtgccactgtgcgaccaagtttctacgattttgagccacgttttgacgagatggctcgacaatgtttcgtcccatttgctattggcattttgcacttcttgaaggaaaagtttggctgacaacaatgctggtgacatcaatccaagcgggtcgtacactttggcaatgtgtgatagaattgtgcgcttggtgattgttccctcgaaaattggcaatttgaatgcgatacgattgtgtttcggcttccaagcgattccaagaacttttgtctcttccaattctttggccaagtcttcggctggcaattgtttgagcccttcaatgtcggtgccgtaaaattctcggattatcatgccggctgctttgaagattgatttggcttcattgaccactgatttgagttgttcgtcggctttcatttcgattagaatattatcgacgtaaagattctcgtcaatgcgttttgccaagtcgttg

SEQ ID NO: 79028 - DNA, 93 bp, Heterodera glycines
gtttttattcgcttttgaatttgggcacattttgcctatcgaccactcgccgaccccgaccccacaaacaaactttggactagcgtgttcgaa

SEQ ID NO: 79029 - DNA, 831 bp, Heterodera glycines
cctcatgaaactcggaattggttatgttttgtcgaaaatatccttacataatactcataaaaaatacaaataaatcaacccacctattctatgaccacattctgaaaaaaatcccagaaatacgaggaaagatatgcttggtcacaataaaataaaaaatggctagtatgtaaaaatttgcggtcacaaataaaataaaaaatggctaatatgtaaaattggcgtccagaaatttttagactaatccgaagcaaagcacgaatgaattaaagaggcgaaagaattcacagtatcgtttctaatagggaaatattgacaggatattcggctaaaaacgggtttgatcatttttagcgcatttttaggtatacatttgagacaattgggcaggacaagaaaagaatgaagttgatgcctcatgaaactcggaattggttatgttttgtcgaaaatatccttacataatactcataaaaaatacaaataattcaaaccacctattctatgaccacattctgaaaaaaatcccagaaatacgaggaaagatatgcttggtcacaataaaataaaaaatggctagtatgtaaaaatttgcggtcacaaataaaataaaaaatggctaatatgtaaaattggcgtccagaaatttttagactaatccgaagcaaagcacgaatgaattaaagaggcgaaagaattgacagtatcgtttctaatagggaaatattgacaggatattcggctaaaaacgggtttgatcatttttagcgcatttttaggtatacatttgagacaattgggcaggacaagaaaagaatgaagttgatgcct

SEQ ID NO: 79030 - DNA, 653 bp, Heterodera glycines
gtaagctttcgttgcttgagttgatcgcgatccaattcggacaattggatcattggcatttcattcaccaagaattgaagtgcattgaggttgaagatgagtctttctccattgatgcacagaaatcccaatttgaccatgtcactgatgtatttctttggcatgcgctcaccaaagctggtcaaaaggcattcttcggtgttgacgatcggaagatcaagccgttgtgccgtatgattggacacaaatgatcgatgactgccagggtcgatgaaaattgaggcgatcatgctgaggtgcggttgtgccggattgaaaatggttgccgtcgttgtcatgagtaaggcgcgagtgtcagttgcattgacggcgttgcacattggttgggtttggattgcagcattttcgattggttgcgggcttggtattgacaaatgtggcatgattgttgccgctgcgatttggttctgcgcattaatgttgcggcaaagtgctgttggatgaagttgtccgcatttgaaacattttctcggttttggacagtcaaatgtacgatgtgcgaaaaggcatttgaagcataagccttttgatttgacaatttcaactcgttgttgaattgtgctgaattttcggcaatcggaattccaatggtt

SEQ ID NO: 79031 - DNA, 638 bp, Heterodera glycines
atgaatcgcggaaattcgacattgattggtgtgccactgtgcgaccaagtttctacgattttgagccacgttttgacgagatggctcgacaatggttcgtcccatttgctattggcattttgcacttcttgaaggaaaagtttggctgacaacaatgctggtgacatcaatccaagcgggtcgtacactttggcaatgtgtgatagaattgtgcgcttggtgattgttccctcgaaaattggcaatttgaatgcgatacgattgtgtttcggcttccaagcgattccaagaacttttgtctcttccaattctttggccaagtcttcggctggcaattgtttgagcccttcaatgtcggtgccgtaaaattctcggattatcatgccggctgctttgaagattgatttggcttcattgaccactgatttgagttgttcgtcggctttcatttcgattagaatattatcgacgtaaagattctcgtcaatgcgttttgccaagtcgttgtcgaaaagtgaaaggtgttcacggatcgtggcattaagcagaaaaggcgaaacggtcaatccgaagcttacacgactataacgaaagaccaaaatgtcttctcgttttagagggtttaattcggcctcttt

SEQ ID NO: 79032 - DNA, 920 bp, Heterodera glycines
atggcggcggcttctggttgtactgctgctgcttctgctgctggtagtagtggtagaggaaatgattgtgctgataatgatggtgatgatgctgaggaaaagcccgtgaaaagctggtgataattgttggcaaaatttggatcttcacatgacgaggaggaggaggaagaggaatcggaagaggaagaaaagttggggcagtaaagagtcaactcatcatcatcattaaaatcatcattaacaaagtccattggcggatggattgagagggatgaagcagcaaaatgtagaacaaaagcaggcaataagcaaaaatttaaatttcttaatttgattttttgctgtgtaaattttggggagtaaatttttgaaaattgaaattttggtcccatttttttaatttttgaatgacgtattttcctattttatagcgaatggttttcataattttattggttcgctacaaaatatattcggaggaaatttttaatttttgaaattttgtccaatttttctatttttccccatttcccctattttcaaatgtttcttttttgttgtgattttggggagtaaaattaattaaatttgacatttgtttaggctgattttttttccatttatagcgacaattttcaaattttgtggcgaaggaaaaaatggagaagtgggagaaggtcacctcggcgattgatcagggttactgtatttgataggtcacgagcgcctgcacagatcgagcaggtgagaggtggtggagggtggacaccaatcaaaaaaaaaaaatatgaaacccgaaatattaatccgaaatacggaaattgtagcgaaaaatcaggatattaacacccaaaaaaatgttatttctttaaatattttttgattaaaaaattattcaaatatgattagtagggaataaa

SEQ ID NO: 79033 - DNA, 598 bp, Heterodera glycines
atgccagaaaaagctgccccgattgaaccaccaccaccatcaccacagcttgcctgcgctgctcatgcaacagtgccggaggcgagctttgctgctgcatttgatgctgttgctgctgttgcatcacaaattgttggcattgtgcgtcgcgggcggaggatggcattacgcatgtttcggcacaaccgccgccggcaccgccactgccgctgctgctaatgctctcgttgctcgtgttgttgttgctaattggtgttgttgtggagcaggacaacagagaggacgactggaactgcagttgttgctgttggtgttgctcaataacaccttcctgaaaatgatgggggccaatttagttaattaattttattttttacgatttttaatatattaagaaatcaattagtgaaaaaacgtaattgggagcaaattgccactctctcctcgctcatttgccgaaattttttttaatttttcaaaaaacataaagaaaaaaagaccaagaaaagtataaaaatttaaaatgatttttaatttctacgaatcttttaattttttttaacttgaatttcttagaatttttccaaaaaatattaaa

SEQ ID NO: 79034 - DNA, 959 bp, Heterodera glycines
atggaagtcgccaagtcgaagcagttcggtgtactaccaccaccaacgccgccaatggcactgcccactgagccgggcgtgtgcacggcaccgcccgtggcaccggatgatgccacactgctgaccggtgttgtggtgggcgtcaactgttgctgatcaatggccaagtgatgattctattggttgtaattggagtgataatataggtggaatttgccaaaaaaaatgtgccaaaaaaagacaaaatcggaaccgcccaaatttggtgccaacgtttcggcacagaaagattttaattgttttattattaattgatgccatgcgctaataagggatggcttcgcgtctttgaagaatgttccagtgggcaaaatgtgccgcatttttacacggtgggaaaaatgtgccatttttacacggtggggaagatagtgccatttttactcaccgctgggacaaaataatgccattgccattttaaatggcacatttttactcgccagtggtgccaaatttttgccatttccccccatcgttatatgtaccatttcttactgtactctctctctctacctgttgatgatgctgatgttggttgttgtggcggttgtgctggtgctccctggcaattccgccaccgtttgggtgctgctgctgttgttggcacttaatgcgggcatttttgcgccgtttcagctgctcatcactcagaatccactcctttttcatgccgacttcaaagcatttgcggagacgacatttttgacaaaaactttaaaaatttatttttttaaattaattttttaaatatagaaaaaacaaaaaaacacaccgccggctgagcgcggtgatctcgcactcatttgagtacgggcatttgaactcctttgggcgcaacgcgttccggcggaagaatgccttgcacgactcgcagctataaaaaaatattggaaattaaa

SEQ ID NO: 79035 - DNA, 360 bp, Heterodera glycines
atgtcccggtcaccgcccgccgactcgtcgccgtcttcgcgcagtacgcccaccagcggtggtggcacaatgccattgccatcgttcaccccggctgctgtcatcaatgaccatcactatccagccacggctaacagtaccactgcatttggcaatcacacagccggcacgggcggctccgttgtgcaaacctcgtccattgcttcatccccagagcaacccggtgccacaaccgccgccacaaccccaaccaccgtaaatgccgtgccgtccatagtgttcaaggacttgcgcgctttccaactcaattcgttggagctccgtgacgtggaaacagtgaaagcggctttttcattgtaa

SEQ ID NO: 79036 - DNA, 82 bp, Heterodera glycines
atggaggaagaattgcgcaagagtgctgccaacaacatggcgggaccttgcaagaacatcgcggaactgatgctgctccttg

SEQ ID NO: 79037 - DNA, 375 bp, Heterodera glycines
atgaaaaatgaggaagaaaagaaaaaacatgaattgaaacacaattcggctgaaacaaaaacaaagcaaaaaacaaaaatggaaaagaacagaaaagaaattgagaaaatgggagcaaaattgaacaatttacagagtaattaataataaataaataattttaaataaatgcattattttaaatatatttcattttaattttttttaggacatgcaattcaactaaaaatattggaatttctattgacaagcgatgaattgttccgaataaatcatcgttttgatgaaagggtgacaaagcgaaatactttacaacattcataatagcttatgacattttggaattatgggcaaaaagttaatttaaaactttta

SEQ ID NO: 79038 - DNA, 908 bp, Heterodera glycines
atgtacccacgcggtttgatcgaccccgaatacaaatgcaaacattttgaggactctgaaaggggtgggtttagtaacttttaattaagcaaatatttttcttgataggattttcgacaactgtgacgcacattgagctggaggccgccctccgctctgggtacaaggtgatgcacgtgtgccgtgcctacatttggcggcttgtgtgcgattggagcaatgggctgttccactcgtacctgctcaaatttctcaaaatgaaatttgaaggtaaattttgaaatagtaataaattaattaatcaacaaaattttaagcaagcgggtacccagccaagtgcaccgaggcgggcatcagcgaggaggagtcggcacggagaaagcaggaacacatcgacaaggccaaagaaaaggcccaagtccaccttgaggcggaccggatcaagcacaaccccgggctccgctacctgtccaagctgtgtttgaattcgctgtggggccggttcgcacttcggtaaaactttttagaaaaatatataaaaaattttaaaaaaatcaatagaaatcggctcaccaaaaccgaaatcgtcgagtgccatgcggagctggccaaactgctgaacgactcgaagattgaggtcagcagcatcgataagctgacggaaaagttttggatggtctgctacaaggccaaggatgagcattggtggaacacagcacgagcaacgtaagaaaaaattttaaatttttaaaatttatttgccgttctcaggtggccattgccctatggaccacctctgctgcgcgaatccatctgctggaatcgttgaaaaaggtgtatggccctgctccgggtgttgagcggtacgacacacgcattctctacatggtaaaaaatttggaaataaa

SEQ ID NO: 79039 - DNA, 2030 bp, Heterodera glycines
  unsure (1)..(2030): unsure at all n locations
atgccatttcatcaacaaacgcaacacacagcaaaatgcaaatggaaatgccacaactgcctgcgtgttgggtctgcctttcgaggaaactgcgtccaaggcaatgacaacttttttgagacctgcttggggtgcaataaagtaaagttatttgagtttcatttcaaagaatttttttgtttagacatttaaaagtcgtgattgctatgaacaccatgccaaatgcacaaactgccgggtcaaacgtgacaacgaagaggaaattgtgggaaaatcaatctgcatgagctcgaaaaaaatgtgttgactgtggtgtgatttaccgaatggcggtaggccttgtattttaagattcgtaaaataaaataataaatatcacaggatcaagacaagaaaaaggggcatgtttgcggtcaaaaattctgcaaaatttgtctcggcttccatgacccgcgagactgctacataccataccggcctaaagtcaagaaggagaagcgcttcgtcttctttgactttgagtgcactacggatttcaagcccgacccgcaactcatgcggtttaagcaccaggtattttgttttttcaactttagcaaattatgaaaaattcaaaggtcaacttctgctttgcccatgtcacatgcacccgctgcattgagaagggcgtttgggatcaggaattggaaaaggcctgcgcgctttgtggccgattccgaacttatgcctggtccccgttcgaattctggcacacggacgtggaatgccgcaaggtcgtcgaagacccactggcagccttcaccaagtggttgctgaacttcgaaacggaagtcctcggcatggagcccggagcaaagaagcgcagaaagaggaaaaacattgacaacaccgacggggaggccatggaagcagatgaggaagaggatgccgtggatgaggacgccgagaataattggatgttgggttatgaggaagcgggggaaaagccggagtcggtgacgacttacgcatatgcacatgccggtaaattcaattatttaaaaaaaatttttgaaatataaaataaacaaaattaaaggctctcggtatgatcacgtgctgatatacggggaaatgctgcgcatgggtgtccgccctgaactcatccgccaaggcaaccatctcctggaaatgaaggcgcgcaaaacaggagtctacacacccaccgtgtttcgggacaggtaaaaattcaaactgaataatttttattttgtcctttcagctacaagctgatcccgatcaaattggcaaattttgtcaagacgtttggcctggaaattgagggcgtggaaaacaagaaatattttccacacaaattcaataaggtaagaggaatttataaaaaaaaaaaaataaataaaaattaatacaatcttaggcggaaaattatggcactgtgctggacaccctgccaccaattgagaactattacccaggtggactcttcccggcagagcgcgcaaagtttgagcagtggtacgacgagaaccgggaaactggttttgagctgagtgaggtcatcgcggattactgcaagacgggtaaaaaaaaaattataaaaaaaaaaaaaaaaaaaagaaagaaagaaaatttttaataataataattttgaagatgttcaaatcctggcacatggtatggtaaaaatgcggcagctgttcttgtccgagacacggcatgacatcacggattcggttaccatcccatccggctgcatgaagtattgggtacagctggcgcaccactacaaagagagcgtcgccattatcccacacttgggatacgagaagcgcggcaagcagagcacaattgcccggaaatatttgaaggtgcctaaaaatgattataaatttacattttgccatttctcagtggcgtgccgaagaagagttgcgagagaatggccgagtcctgcgccatgtcgaaangccctggaggggagttcaaagtcggcaactacagctttggacggggatgatggagcgccctga

SEQ ID NO: 79040 - DNA, 1365 bp, Heterodera glycines
gagaagtggaagcgagcgcaaggcaaaacggacaacatcagaacagacaccaccacagacacagccatcaccagcagaagaagttgagccgaaggcacagcaaagaattgctgcagcaggagcggtgttcgtcctcgtcaagtgtgatcagcaccagcacaaacagttccgttgtttcgtttgaaccgaaaggcaacgacgaccggcgggagcactttctcccggccgacaaattcgctctctgttttcaggtggcacttttgacaaaaatcttattttttgtttttatgttatccaaactgattaataatgctaacactttcagaaagcactgctcgtcggcagaaaattggacgacaaaatccgttcctcaagcaattccatggacaaaaagtcggagaatggcgccatggaacagacgttggagttccgtccgcagcacaacagcagcgtaagggcggcaaattggatgaatattcattggcttaacgggggactgtcatttcctgcagaattgtgacggcggcggaagggcactttctgccggcacggcaaagggcggagagggcggggggccgaggagcaaatcgccggggggacacctcatcaacaaaatatcgaactttgcacggggcaagtacaggaacagtctgagcgaacggcagagcaacgcggtgggggcggaggagaaagtgcgcaaagtgagtgagccgagggaataattggcaaagccatggaaaaacaaacgaatcgaatgagggagaagtgttgcaggacatcggcagggagctgatgaggtgcaaggagatgggcgagactcggttggacctcaattcatccgaagttcgttcggattcgatttggtcccttcgatttggcccattctttgccctttcagttggccaccattccctcgtccatccaaactttgactcaactgaccgaactcttcgtttacaaagtcttttccttctctccctttttttaaatttatttttacgtggattttagaacaaattgactaatttaccctccgaattgggccatttggtcaatttgcgtatcctcggcctaagcgaagttcgattgctttttttttattttgccattttccctttttttgccagaataatctgtccacccttcccgaaagcctttcttcgttgaaaaaactcgaaactttggaccttcggcacaacaaaatcagcgaggcatttccatttgcgtcacttttattttattttccatttttaggaaattcctcccgtcgtttttcagatggaatctcttgaaacgtaaaagctttgttcccttttccttttctattttttgtcccttttcagcttatggctgcggtacaataaa

SEQ ID NO: 79041 - DNA, 928 bp, Heterodera glycines
tcctctcatcctctaactttctaaatttctctcccaatttcaaacgtaaaaattattgtaataaattcactaattgtaccaaacattattttggtaatcaaattaaaccagtaataatgttagtttgtcgtctacgaacctcaatttttcatttggtcaaattttcccctccctcccccccctgactcaggtgcctatcattttggttggaaacaagaaagacttgcgcaatgaccagcagaccattcgcgacctttcacggaacaaacaggaaccggtgaagtcggagcagggaaaggcaattgcagaacaaattggttggtaattgcttttacatataaacaaatgtttttaaaaacgttattttttaatttctgagctcgaattcaacagtaatcggtggtttcaatggtgtacgaatttggccttagtttttgtcggttccgaaccacagaataaacagttcaaattttcgagattcgttttcatgggacagaaaaatttgaagtatgtgaaaactaaaagcatgtataacagcatcaaatggctgttttctacagatttccattttttgtgcgggaagtgagtgaaatgggtgacggatttgtgttccgcggtctcgagactcaataaaacttatgatcttttgtgacaaaattttgaaataaaaaagttggattctatcgcatttttttaccatttcccaaatcgctaatcataagtttgttattttaaggtgcatatgcttatttggagtgcagtgcgaagaccaaggaggtgtgtttgtttttctgtttgttggtcttcgtcggattaccaaaacaaaaaataattcggctgattttagggaatccgagaagtatttgagaaggcaactcaggcagcacttcagcagaagaaaaagaagaagaagggctgcaacgtgctt

SEQ ID NO: 79042 - DNA, 351 bp, Heterodera glycines
atggcaaagaatgggggaaagggagaggaaaagcagccaaacgacaagctaatcgctcaaaaacacattcttgaattgtaagttttaagtttaattataattcagagcggaaataaattttaaaattaaaaatgattttaaaattctaaatatcctttcatttttgagaatttcaataaattaattacttttaattatattatgttaaatgcaattgaaaatgggaaattaccaaacaatggaattaatgggcaaagaatgcgtcgctttttgatgtcatcagcaatcattcgtccctttatatggtaaataatccataaaaacaaagctccttttctcaaatttgctgca

SEQ ID NO: 79043 - DNA, 685 bp, Heterodera glycines
atgcgattgtcgcaggtcggcacaaagcccaaaacggagttcggtcttgaaatccgtagtgtttttcatattgttccatgtcacaaagtcggacgaaggattgtttttggggaaatagggctaagtaaagagaaacggggagccgattatcaatacgatgaaaagcatcatccccaaattaaggcgctgagtggcgccgattgccggaatctgagaaagccaaatgggcacagaagtcggaggaggacaaagaacgcttcgcacacggcaaaaaaagggggggggaagaaaatgaaagaatggcatttttgacatttgcagagaaagccgagaaaagccaatcgcagcagaaggaagaggaggaatgagaagaataaaggaaaagtggggaaaaggatgaagcagcataaaagtgaaaagaaaaagctaatgaaggacgggtggattgatcacatttgatcattttggattaatcacacaaattgccattattgcttttgttgaagcaaaacataattagctcgtaaagttggattaataaatcgttatttattagttttaattaattttgattatattttcatatacagcgctgatcattatggacgagatcattatcaaactcctaataatgaaaaatggtaaaaatgccgaaacaatggcaaaaagaatggcgaaaaattga

SEQ ID NO: 79044 - DNA, 317 bp, Heterodera glycines
atgcgaaagaaatatgccacgaaaaaagtgatcagagctgacataatgccaaaaatgatcggagagcctctaaagtttatgcactttgatcaacgacgccgtccaaacagacttaagagactccaaaagtcgccactgccaatggagagcaaatcggtgccaccgccagcgcctcgggcgccgaccagccattggcgacgatgccgcaccaacgcactctcgactgcagaaggcaatgtcgagaagttgagggaaagcatggcgaatgtaagcagcaaaagtgtggcacagaatggacgacaaaaagcattttaaaa

SEQ ID NO: 79045 - DNA, 1490 bp, Heterodera glycines
atgtgccgtccttcgttcccttcaatgtttgcttttctgctgctcgttgctgctgccattgctctgatcattttgccttccgcttcttgtgcccctctcgacaatgcccaaggcgtcgttcccgacgctgcccccggcatcggttctgccagtgccgtcggcatcgctccgcgacatcggaggcaatggctgtcggccgcccgcggtgccggcggagactccggcagtttttggagtctgttcggcaaaagatgaaaagccgtgaaagtgccgtgccaatcgagacaaaaaactggtctttcaatgcccagaaacaacgagattaatacaaaatcattctctttttgtatattttacgggataactaaatttccaaaaaatgtctaaaaatctctgcttttcagtttaattggaattttaaatttattacaactttttcaacatttttgtcatattgacaaatattcagaataaattttacaaaatgtgctttacattttttataatcagtttttataaccataaatattagttttggttgatcaaaacaaaaattctttctttttcatctgaattcattttcacttcattacgcagcattaatgagcaaatgcacagtcataatcacttaaatgaataattattatcatcatcagatttcaattagtaatttaatgatatttaaaattataaattattcgtaccgaaaatggctgaaatagcgaaggcgaagtcgcacattttcacagtttcagtagagtccggcacagaattagggtcaggggactaaaaagaaaatatttataattagaaaaacggatgggtttgtatttaatctcaatttaatgaaaaaaattttaaataaaattttcaaaaattatttagttcaaatttagtaaaaaattttgcattattttgccagtgttaaaaagaaattctagtttcaatgccactaaatacggcgttcttttttgtgccgtcgtatgaaacggcaacagtttcggcactggtaatgacacgggattcggtctcggcacttagagtggttgtcgcttcaggtgacttataagggaaatttaagtttactaatgcctccgtaaagaaccaaaatttgagaatttgctaaatgtataaagagcatctacaaaataatgaatggtgctatttgatagcccataaaaaacgctacaaaattacaaaataaaattttttaattcactttcaattttgattggttttcaacattttaaattgtatatagtgagtgcccgtacactatgaccatgactgtatatggattttattttttagagaataataaacactgactgattcaataattatgtattataattaccaacaaaaataattcgctttaacagtacataataactgttattttggtcaatttccaaaaaaaagacccaagtaaaaaaaaacaatttgcagaatttgtagtaaaagtggataagaaattaattgctatatga

SEQ ID NO: 79046 - DNA, 435 bp, Heterodera glycines
  unsure (1)..(435): unsure at all n locations
gggcaggnccaccaaaccccaaaacgtttgggggacattgactggatgacagtaaaatgaataacaaataaatacaaccaaaaaaatcctattaggcctctattagaggaaaaggcgaaaattaattattaattgaacgcttttgaacagagtcctgctgaagcaacgccagtgcgagaacaaattccactcagaggtaataatataagaatgggattttttaagtcaaaacaattttcaaaaattaaacgcctaaaaaacatcttccattaaaaaaaggtaaacttaatgctcaatggcctccgcccgaaaaagaataccgcgtcgaagtgttgttgccggagggggtcaaacagtgatccgctgctaaaagtgatcggaaaatagcacagatttataaaaaataaaatatggaataaacactcgaaactttga

SEQ ID NO: 79047 - DNA, 506 bp, Heterodera glycines
atgccgacggcactggcagaaccgatgccgggggcagcgtcgggaacgacgccttgggcattgtcgagaggggcacaagaagcggaaggcaaaatgatcagagcaatggcagcagcaacgagcagcagaaaagcaaacattgaagggaacgaaggacggcacattttgttgattgggagaagagatatattattatggatatttgatgctaaaattctaataaaataatcattaaaatggacaacatttaattggtttactaatgagcaaaaccaaacaaaattgccaatttgttagcatttgcaaataatcaatttaaattatttaagcttaatggtaaaaagaaaatggcaaattgctgttattagttggacaagacaattgactaattatttaaatgttgcgaaaactgttgctgattgaggcaattcactttgcttaaatacaaacagagtttggtcactggttgttatgcaacctttacgccatgaagtaaacaaggggca

SEQ ID NO: 79048 - DNA, 179 bp, Heterodera glycines
ttcggctcgccatatccgatcaaatagccccttttgccacaatgggcatcgctctcgtccatgcatttgtacgccttgcaaccggaacagtcctcgtcaccacgcgtggcaatggaactgttattgttaaccaaaattggactgtccgagatggaaaagggaagaaattggaggagtaa

SEQ ID NO: 79049 - DNA, 724 bp, Heterodera glycines
atggagaagaacccactgcctgagggatgcactgcacggccacttgatcaacggaccatgaccacctggacggttaccatccgaggccgggccggcacaccgtacgaaaacggcaacttccaactgagcatgtcatttccgagggactacccgttcaaagcgccgcaagtcacgttcaccacgcgcatcttccacccgaacatcgacacacggggcaaagtgtgtctggacattctgcaaacgcactgggcaccgacgctgaccatcgaaaaaggtggcgtggatttggtggatggatttgatcaccttttaaatggattgatcactttaatgctcttaacttttttcaggggcattaagatccgctatttttgtgtttgattagcaaattcaaaagatttcattgcgtttcatcagagttagcgaaaaagcgaatttttggaatttatggtcttaatcgggcatgaatttgatggcgttggttttgtgtggtatttgtgcagtttgagtgatcaattttttcacatacaatttttggctgcagaaatcgttaatttgtttctctgtctttacagttgtgatctccatcatcgttctgctgaatgacccgaacccggacaactcgcctctcaatgcggaagctgccaatttgtaccggaatgaccgtgcggagttcaacagacgcgcccgtgagatgacgctcgcctatgcacggatgagatga

SEQ ID NO: 79050 - DNA, 175 bp, Heterodera glycines
aaggttcgatggtgcctttttctcttcgacttttgcatgccgaagcgtcctcattttcaccattgccttactcgtcgatggttcgtgtacacaaacttattgagaataccgtaaaagctatcgaaattgctcgtcggaattttgcggccactgattctgaacttggcatttggca

SEQ ID NO: 79051 - DNA, 1452 bp, Heterodera glycines
atggacgaaattttgcaaggaattgaaggagtggcagtgtatctcgacgatatactgatcacagcaccaacacaggcagaacatctttgccgaattacgcaggtgcttgagcggctcaaggcaaatggattgagagttaaacgggacaaatgcgaatttatgcgtgaaagcatagaatatttgggacaccgagtggacaaaaacggagtccatgcttcagaggaaaagctggaagcaattcgcaaaatgccaccgccccaaaatttaaaggagcttcaatcctttttgggtatggttaattattatggcaaattcgtgcccgctatggctaccgtttccgagccattaaaccaattgcggagaatggaagaaaagtggcattggggaagtgagcagcagaaagcatttcaaaggattaaagaaattttgtcatcaaccgaagtgctcgttcattatgatcccagccagccattatacttggcaacggatgcgtctgattatggcgttggtgccgttcttttccataaaagtcaacaaaatggaaaggaaggcgtcatcgcctatgcatcacggacattgaatgcggcggagcgaaactattcgcaaattgaaaaagaaggccgcggaattatttttggagtcgaaaagtttaaacaatttttgtatggccgaaaattcgtgttacagacggatcacgaaccgttgaaaaagatttttgggccaaaaagtgaaatacccgtggtggcggcgagaaggctgcaccggtggtcactcattttaatgaacttcgactttgacatcgaatattgtccaacaaaagaatttggaaatgccgatggtctatcgcgacttccatgtccggagatagcaaaaattgatttggacagtgcagaagtgagagccgtacaattggaaaacatcgactcgctgcctgtcaccgcaaaatcgattgccagtgaaacagcaaaagaccaaattttgaagaaggtcaaagaactcattgaaagaggatggccgaaaaaggtcgaaagtgatcagctgaagccattcgagccgaacaaaaacagtttggaattggtaaatggatgcatcatgttgggaaaccgaacagttattccgagaaaatttcacggaaaaatgttagaacttttgcatgccacccattctggaattgttcggatgaaagcgttggctcgacagaaaatttggtggccaggaattgacaaggacatcgaaatggaacgaaagaggtgcaaaaattgccaatctgatgcacccgaggagaggaaggttccattgcatccgtgggaaacgcctgacagagtttggcagcgacttcacatggatttttgtggtcctttcatgggacacatgtggctgatcatcgtcgacgccaaatcaaaatggcctgaagtgatcaaaatgaagaacatcacggccaatgcaacatag

SEQ ID NO: 79052 - DNA, 1130 bp, Heterodera glycines
atggacgaagcgattaatgagttggcatacaattacataaaagtatgttttgaattcagttgggttaaatcaaaaattatattttaaataaaaccaaaaaaatatttattaaaaaatgtaattgaatcgttttaataagagattagtgtattttagggccaggaacaggacaaggacctgttaggatttccaatattctggtcctacttcaagtttcctcgctctagtctatttgtaacttaaataattgaagaaatttttgtatctttttatgtttctgttcccgtgacgagtatttgtgctccaattggaagctttttgggctcacatttccacagacaggtaaaaaaacaataataaataaatatttagcctattattttttattaaacaattaagtataagtctaaatttaaatgtctatttcatttagacacttgctgctttggtctacatcatggagattattgcatacattggctttctttttacggctacccgacatttgaggacttgacatttgaggacccgacatttgaggacccgacttttgaggacccgacatttgaggatttgacatttgaggacccgacttttgcggatattcccgacatttgaggacccgatttttgaggacccgacatttgaggatatacacaatttcaaaaaaaaatgaatgaaaatcattataaaaaagagaaaaacctttcccaagggccaacgggtgcaatgtatcaaaaagcattaaggacaaccgaataatttaaatatttgacagcacaaataatgatttcaaatttaattttggagattaacagcctttttctttcttaatgatttacaagtcatcctaatattcaatttgctcagactaacagcaattgaacacgatataaattataccagctgggaagctcctgtcaatctttgatcattttggatcgcatttaacacaaaaagtttgtaaattaaaatgtatttaaagatatatgaacttttttgcctttccccacaaaaaaatgccattcattagtgatgtgaaaatctttcactccaaaagggtgaaagcgaaatcaaaccctgctggaaactggaagtctttataaattgaaaatttttgaaaaaataaa

SEQ ID NO: 79053 - DNA, 1154 bp, Heterodera glycines
atgggagagcaaaaattccattttttgaaaatgcttttcgcatttggcgcattgctaagtgccgaaattgagcaacaatcgtccatcagggaaagaagcttcccacgcatatttttgaaggcatacgaatgcgtagcggacaaaaaattcgtcggaaatgaaaaaaagtaaataattttaatatttttaattagagtgccacgggaccgggacctggtagcggacaactgagtacaactgagtaccaaggtcccggttttgaccgggactagtcccggttttttcccggttttcccagccaaaaattcccgggttttcaacccgaaaaggtcccggtcccgggtttgcccaaaattcccggtcccgtggcactctatttttaatctcccaaatgttgccttttcttaaataagtcgactaaaaaaataattttgaatattttttatgtatttatttaagttttctaccttttgcaattgtatcaaaaatggaggggcaaactgagcaattgaatattgagaaggttttgttggtaattcaaaatgaagaagatttgacggatcgtagtcttcaaatcggctgtaaatttttgaaatgtttgtaatgaaaacgatagaaaaccaaaaaataatgactaggaaattgcatataaacgatataccattggataaagcagggtcgacttctattgtgaatttttaattttagcggtgcattttgcctgcttcaaaagttacagggcctcaaaaatcgaaattttgtgcttgagggctcattttcaactttcgtgtatattttttgcagccctgtttattaatgtaagattcgaatctattgaccaaaaatattgtcaataagtaaaataatgaaaatttttcaattctactatacattaaaaaagttaaactaagttaattcaatatttgtaattaattaattaactaattaacagctcgattatatgggctatgaagactattgaaaaaatgacaaaagtttatgatacacaatttagaaaaaagaagactacacgaaatttaaatggggatttgttatataaatattttaatggcattttacctgaaaaattctggccctgattcaatatttggaattattgtagattccaatcaaggcattttgccttaatgcta

SEQ ID NO: 79054 - DNA, 1556 bp, Heterodera glycines
atgcctgagtgtctgatgatccaatttccttgtacaaatcggctgactagcgacgccattgtgccgacgagtgccgctgatgccaatgccgatcatgggattgctgttggatgggaagggagggggggaggtcccttctgccctctcaaaaaatgcttctgatgtaaatttataaaataattattaatttaattaattaaattaagatatacagtatataatattttttaattttcagggcacttttgacgcaatttcacttaccgaaaatcgacaaaaattcatggaaaactattgtcttaatattggcaaaatgtttttcgttcaaaaaggtgtcagaaattttttgaatattttatcgctttattttagaagcatctcagctgctgcattatttccttatcatttcttgcaattttacgatgtgaattcatttttattaatatttaaatttgctaaggagttaaaaaaaattttttaatacgttttaaatagagaaacaaacaaatcatagcccaagtgtttttataggcctacaaaattcaaagaatttcgtaaagttcaaaaaagtaatgacagaagaactcaaaacaagggcttcgaacattattgatgataactttttcgaaccttaaagaaattttttgtgaataggcaaatataaaaaacttaggattatcaaatgatgtcaagaattaaaaatttggttgcttttatgaaaaattataggcaaatttttttgttttgctggtttttgagtaacatcgtaacaccactgtttctaagacattttgttttaaaagaatttctgttctattttttatccagatttgctcccctgcatttttaaatttttccagccatccccgatattttatctgggaatttcctcaacgacttttctctcccagagagcgggtgaccaaacgtagaataacaaaataacacaaattaaaaaatgttttgtcctgacccatacgaattcactggttcggtctctagtaaaattaatttcagtgatgagttaattgcacattttgtcaaaatgccatcagaagaagcatccggtgagggaacctttcaatttgtttctccgttgcctaacgcgccagaagcattcaaatttggcggtagcattggcaccacgacaaatggggcggtcttcagatggatccggaatgatcaatgatcgcttcaatttgcatcatttatcctatttgttattattccacagttgggcacatttcttaccataaattatctttatttgtgtttcgatgacgaaattttagtgggaaactatgaaaaattgaaattgtagtcaataattttttcacataattaaggaagtattgaatttatttttgtgttaaccttaatgtgaaagccttgttttggagacgctttcacagtttttggcaggcttaactgaagttgggccttaaaaatatttgcttggatttgtgaatttgggacaaattctatgctcgatttaaaactcttgcaaaaaataatgaatagcaagcagcttaatcaaaagataattgtaaaataaa

SEQ ID NO: 79055 - DNA, 1303 bp, Heterodera glycines
atggcaccactttttattttgctgttcgttttgctggcagttgaagaaagcgtcggcccattgtcaccaaattgcagtaatttgattgcttttaaactatttaaatataattaattgcttttcatcagtgcatttgccgcccatttattccgttggaagtgccaatgtttcgcaacaaaatgtttctgttccacaaagcccgaagctaaaaatatcagcagggcaccaattattagcaaatggccaatttggtaaaatccattaattattatttttatttcaccgattttgctttttttagcattgccaaaaaaatcggaaagccaacggaaagtttctgttatttctgcgcagcaaattgtttctgacgagcaaaacgtttcatcttctgaggtcgacaaagtgccgggggattttctcgaattttctctgcccattgaaaagcaccaaaattcgcttggccaatatttggcggaactttcaaattattatcattctgcgcaactccatgttccgccgagtacaattgcgagggttttgttacggatgcaaaatgaaatgaattttcatcgtctcaaaacttcggccacccaactaccgtaccccctaaccctggaaaactttcgttccgaaaaagaagcggattccaacggaatgggcggagacattcgcatcactttcattgatcagtgccaaatttgcagccaaaacgaattgacaatgagcaaattgatcacaatgagcccacagcaaatttcggtgccaaagatttcaattttatttttaaaaattatttcaaaggaaatgagactaaactccgaccaatcggacatcgcttggtttttgggaagtgtcattcatttgttggctttccaaacgtatccgcttgaggaatggcacattcgggacaaaatattggccaaccaatgccaattgggtggcactttcaaaatgccgcaggttttattttatgttttattttattattttgaatattcatttcagacttctgaatcgttttgcatgtttctgctccaaaacagcgtcaacaaaatgctattttctgctgaaaagctccaaattcgcactgattttcctcgtggtttcgagaaacagtacgccattcttggccaaataatgagggtattaatttattaattaattaattaattcaaaaactaaaattcttccggttttcatttatttttagaatgctctccacgtcgattccgaaaagagaacttttgacggaaatggacaattgctgaaattggctgccaacttaatctcccattaattaaca

SEQ ID NO: 79056 - DNA, 1801 bp, Heterodera glycines
atggtaagaaatttctggacataataaaattatggcccaggaaattttatgccgctgtaaattgcctggacctgggggtcgtcagtggacaatccgtccgcattcaatcgtcattaaactgatttattcatcacttttataaaatttcacaaattattagtttgcttttttaaaatttaaattcattttcacattatttacaaaattttgtgttatgaaaataaatttttctgacggattgtccactgacagattgtccgggagtcgacctgggatccgctcaggtaaatcccgaatatttaaacccggaaatttcaatttcttgacttaccttggaaattttagcgctctcgtggcttcatttctcttgtcggtctcgactattcaacaaatgcaattgaattggccaagaagcaggcttcctcatgcaatgaccatcagtcaatgcccatcgaatttggggttggtctcaacaaaattcaaaatcaagtctttctatttttggcattttatatagggagcttggttggtcgattcctaaaaagtgcaaaaatgggcattcttaaaaaagtgcaaaaatcaatcatttgattttttatgtgatttataaacaattaactgctaaattaattaaaatttacatcactgagaaaaattttctaattaaatattaaatttgaggtaggattatttttaattcatatttagcaaatcaaaaaagaaaaattccaaaattaacgattaataaaatgacaactgataaagcgataatttagcttaagggcaaataaaaattaaaaaagaatacaagaaagttacgaaaaattataaaaacaactaattttgcgtatacttgaaaaaaggcacattatttaaaagccaagtcatttcgtatcagcaaaaaaaagaagtaatttgacttaaattcacagccctactggtaaaaaatgaaggattcctaatgatttccattctaatatattaatttaacttatatttgttagggttgatatataattaataaaaaatcatacaaaaagatcaaaagtttggttttagtttttttaggaaacgacatagcaccttgggaagtagcatagaccgaaaaaagaaaaaaatgaaatttaaactttaaaattcgaaactttccaaataaaagaaaataaagttgttaaaaatatttgaatattattttttgattttatttttcctccaaaggttgttgatttggcttctgatcagttggacaataaattttgccataaattcgacattctcatcgataaagtctcatttttatttgcataatttacagtatataatattttttaattttcagggcacttttgacgcaatttcacttaccgaaaatcgacaaaaattcatggaaaactattgtcttaatattggcaaaatgtttttcgttcaaaaaggtgtcagaaattttttgaatattttatcgctttattttagaagcatctcagctgctgcattatttccttatcatttcttgcaattttacgatgtgaattcattttttattaatatttaaatttgctaaggagttaaaaaaaaattttaatacgttttaaatagagaaacaaacaaatcatagcccaagtgtttttataggcctacaaaattcaaagaatttcgtaaagttcaaaaaagtaatgacagaagaactcaaaacaagggcttcgaacattattgatgataactttttcgaaccttaaagaaattttttgtgaataggcaaatataaaaaacttaggattatcaaatgatgtcaagaattaaa

SEQ ID NO: 79057 - DNA, 500 bp, Heterodera glycines
atgataaatttcgccatttttttaatctatccatttatccgtctgaatttgtttgctcaagttttggcatgcacatcggaattgcgaccaagaaaatgccgttgcacagctgtgtgggatgccatgagggcagttatgcatacgatgacaatggcaaattcttgggcagcggtgcattgttggatggcacgagcggacggattggatgtaattaaggcgaattatgggcataattaaacactaattgttgttggtctaattaacgaatgttatatcgagttaactgaaactcgcacaatatcgtttttaaaatgtttttttttaccaaaaattttcttccataaaatctagttttttcccataaaaatcgactcaaaattcctcgaaaatttatctcttggccaaaattaaaattgcacaatagccacactggcttaaaatccagcaaaaacctggcacgaatttccaaaaccgagcaaatgctggattttccacgcaaa

SEQ ID NO: 79058 - DNA, 939 bp, Heterodera glycines
atggataaaagaaatgatgtagaaaatattaaaataattcattttagtgaaggcaaacgtattggaaagaatttctacatttggcagtgttcttgttgtggacaacattttccttatgttgcgtgccgcatttgtcatgaagtgaaggtaattgcaaccgtagtttgaaattttcaaaatgcttaactttattttttgtaaaatatgtgatgaaatattaaaataataataattaatatatttcaccacatttagacactgaaaatcccaacaatcggccagaattcgcaaacgagacggtaagacttaaaatggataataaaatgtacttagtatctaaataaataaatgaaaaaagagaaccatcaggaaaacccatagattagaatagatatcaatgaaagtgaacccaaaaataaaaaataaataaatatttttttatttccctgctttagaaagataattaaattttcaatgagattttttaaagtttcagaaaaacaaaacaatgaattaaaatgacaaaattaaataaattgttgttaaatataaataaattgttgttaaatattgtttcttactttaataattaaataaaaagcaacaaaaaaaagattgcctaaaatcgtttaatttattaattttttgcagaagaagctcagcgaggatgagtgcaaaattttggcaaaaaaaaaagacttgcccgtgcggtcgtatcaaatgcgtccaaatgccaaagaacaaggtagggatgatatttgagactggaattttgcagaaaaatttatggattcaccggattggattagcgacattcaaaccccagtttctagccttgaatgccgatattggtcgaatggtcctgatccagagtggcattttagagtcgggaacccacccatgatttgggttttttaagaaatttaaagttcaaataaa

SEQ ID NO: 79059 - DNA, 645 bp, Heterodera glycines
atgtctttatttaggaaccgaaatttaatttttttaatggcaccgcccgccgagaaaaagaaaaagcattcctccgcctaccaccgccaaatttcttcaccagcaattggtgaacatgaacaacaatcgatgggttcacttatcacatcacttggaaaacggcgaagtgttcgagtgacaaataaaatgaataaacgaattttgaagaaaatgtgagaatttcttgggttataaattagtgaattctcaatcgctctatattccgcattttagctggatttgtactgacgtttggatggacattcttccattttttggtcgtcctgaacttggcctcaaattggcacttctctcaccacgtttcaatgttttagtgaacaaacatttcgacggcaaaagcgaattggcaattttgagacgaatcgaaattcgcaagggcggtggactaaagccgaaactatccgtatttatcagctatgacaaatctatgcgatttccattgcccgaccgtccgctgcccaacaaaattcgctttaatcgtcttctgatttcgtaatttgattcaaagcattgttaacagataaaatcatcccattttaaggtactttgaattattccgtcctcaaattcctccgctcaaataaa

SEQ ID NO: 79060 - DNA, 1469 bp, Heterodera glycines
atgggaaaaagaaaattattacctaaaatccacggcaaaaagggagtgaaagagcgtgagaagaagcgggaggagagaaaagcgcagacggccaaggcgatacaagcccgcctggccaaaaaaagtgagtttttcaccaattttaactcaaaaaagcattttttttaatttcagccgcttcacagtcgaatcccaatgccgaaatgccacagcaggacgaagcagggccgtcaacatctgctgcatccgccgaagaagcgatggaaccgcctccatcgactccaggaccagtgccaacgccagaaatggacgaggaaattttggaatttggcttttcactgccgtcgacatctgtcacaccaatcggcgatttggtgccgttttcgacaacaccaactgcgccaatggacaccggagagacgaccccgccaccgctggccattgacgagcgatcagagcgcatcgaacaactggagaagcagctcaaggaccgggacgacaccatcaaatttctgcgcgagcaggtccgtaaccgagaagcgctgatcagtgatctgcgtcgccagctggacgaacacatggcaccaccgatggcaccaccaacgaccagcaaaagtgagtgaaattcctttttcattttcataaaattgatcttttttcaattttagcgcctccaaacagaggaagaccgaagaaaaggctggaagaactgcagcgcagcgccaggcgcgacatcgtcgacgcaattgtgggcgtcatcgatcgtgatcgctcgcgttccgcgagccgcgcatcgctggatcggatccatcgggatatccggcacaaattcgcgcactacacgccaaagaagggccaggagcggaaggagtggatggaagctgaggatgggctcctgctgcttgcccagcttgggacacagatggcttacaaacggatgaaggcgactctgaggctgatcaacaggcgctttgacaccttcccaccattgataaaggtacagtttttcagaattttttcatccgacctattttttttgggtgatcaaaatcaaacgaagaatttgctcagctttaaaatatgatgtcatttcaacgccaggcgggcctggatatgtttgctctgacattgccggggcactgcgtttcagattgtccacggcaaaggacaatctgatcagcctgatccctgcccgtggtctgccactgaaggtcagtggcgatcacgggcagggattcacaaaaattaccatttcattggcccatgcattgcgcccaaattccccttccaacaattttgttgcggctgtttttcccgcaaaagattcacgaacgaatttgaagaatttctgcagatcgttttgggaacaaattgagcacctcaatgaaattgacgggcgcaaagtgaaatggtgaaaataaattttgttttttgattttttgaaaattttccaggtttcttggcggtga

SEQ ID NO: 79061 - DNA, 877 bp, Heterodera glycines
atggcttttccaagtgctaatcgtcgagagggtggtggaccctttccgcaacttcatggacctgtgctcggtggccaacatcagtgtgctggcaatgacaaatccgctggtgagtgagtgacaccgtccaacaattgacagagttggccaaaaatttcattagaattttgttccaaaaacagaagaattatgcgcctgatgatttcgccactttaatcactgtccttttcgttaagcgcggcttttacatccacggtcgttctgtgcatggctttgccgacactgacatgctccagatgaatgtctttcttcaacgagaaagggtgagaaagcggaggaggaagggaatggcactggaatgaaaatcccttggcatggcattggaatagaaatcccttttcttcttttgccaggacaatttgtgtgccatgcgcggcttggagatgggctccgaccttcaaacattcgtcgttaatgtgccgcgttcatttcgcgaacgaattgaccaaattatggcgaccgctgtcgcaaatggcaaaatttgtgagtcaattagaaatctgattaatattttgatggacattccaaagaattttcatgccatcaaaatgcccaatgttcagctgctgctgtccgacaaggcgccgatgcgatggacaaaacgactgtgcgcatgcagcaggtcgcaacggcttacagcgagctaaacgagtgcctgaaggactttgtgaatcgggtgtacccgcagtgcgactatgtggtcaccagcccacggctgatcgaggctttgctcggcttggaactcagcgacacaagcacagttggcactttccggaggtaaactgtgaaagttttcgacccgaaatctcggaataaa

SEQ ID NO: 79062 - DNA, 597 bp, Heterodera glycines
atgcacagaacgaccgtggatgtaaaagccgcgcttaacgaaaaggacagtgattaaagtggcgaaatcatcaggcgcataattcttctgtttttggaacaaaattctaatgaaatttttggccaactctgtcaattgttggacggtgtcactcactcaccagcggatttgtcattgccagcacactgatgttggccaccgagcacaggtccatgaagttgcggaaagggtccaccaccctctcgacgattagcacttggaaaagccattggcccatcgcaatggcaacgtaaaaggaaaagtcaaccgcgaaacgactcatcctcgtctccacgatttcgggcggttggtcaactgcaagcggaaatttaacggcgccggaaaatgcgtcagtgtaaaatgcttcagtgaaaattttattgtcataaaacaagtttcttggttttcgagtttcaaaaatcagattttggggtcgaaaaccagaacattttgcgaaactgcttcaaaacagttgtttttacattctatttaatcaaaaacgtattaaatattatattttcagctcccattatggatttgaatagtattgaggagtaa

SEQ ID NO: 79063 - DNA, 442 bp, Heterodera glycines
atggctcttgttcgatttgaagaagcgaaatccaaccgtggcaaaattctcctttctcgtcttgggttcgaatatgcttatgagagcgactctcgaatcgagcaaggctgggaatactggaaatgcccaaaacgtcccccttactgtcctgggcgagattgtgttcaaatggcgtggcacgtcgatgcaaatggaagtcgttacaagatgggtcgcatgtcagccgaccacaaccatgccgcagtttttggccaactcaatgtaagccaaaaaagcaaaccatctatttttggtatagataagacaggcaaatgagcaaattcgccaagaggctcgaagtgattttccgacaaccagtcgaaacattgtccgaaatgttcgggctgaacttccggtcgatgtgcgtgtaaacgcaccaagcgccgtaaacatgcgaaataaa

SEQ ID NO: 79064 - DNA, 156 bp, Heterodera glycines
gctggtttggcaattctttctggcattgttggcatcggtggtacaattaagactggcgagaaggcttgggcttttggcgctgctttaatgttggccaatattccatacacttttctatgcatttttccagtcaacaaacgtttgctggctaccaac

SEQ ID NO: 79065 - DNA, 290 bp, Heterodera glycines
atggcactgagagaaggcgggtcttgttcttcagcagcggcaatgggtttcttagcgcttgggagggatcggctcgtgcaagactcgaagtgctttactggcacagtgaaatcagacggccgaattgtgaaaattgatgaattaaaaacaaaagtcgaagcggccattgctgctggtaaagcaatgatagtccttcccgctggaaacgtcagtgattttttggcactcgaacctgaaatcagagacggaataacgagacggagtgtcaatgaagtccgagatttgttgcg

SEQ ID NO: 79066 - DNA, 937 bp, Heterodera glycines
atgccattaaaaattgacaatgccaaaagaatgcagcaaattgttcctaaagtcaaatcatcagagaatgtgacaggatatttggaaaacaaaaatgaagaaaaacagcaaagaatttcattcaaaaattattttaatgaaatcaacgcttattttaactattatggtaaaaaagcggataattaaaaaaaataaaaattataattttcagggtaattaataaatttaatatttaaattaatttagtgcctaaacatataattggactaattgctcttaaactgatcaatgcaattcaatggcacttggaactgaacaatggtcaattgacacatgtgttgacacctgatcatttggtggctatccgtgttggtgatcaatttagcaagtcggaactgctcggaaatgttcaccttgaaatcgatgccgaaattcaacgcgtggaagacccacggcagagggcacttcccagcgctgatcaaaccaaaatcatttggctaaaagacttttcttatatgagtccacagcaaataaaggtgattcattctaatcacttttttaatattatagctttagaatttttatcatttattaatcaattaattagcaatttttaaaatttaaaatttgtctatttttatattgaaaagctattaatatagtttatcatattatatttagagataaatgtttaaaatgtttatttagcacaatattattacgtcgggagaaagtgatattatttggtcatttggaatcactttatatgaaatgatcagtggtgaaacgcccatatggcatacaaataagcaatatttttattgaataattttattaaaattaaaaatgcatcttaaacatttttcacaatttttgtagtgccatcaaaccaaaacaacaatggcattggattccgttgaatgacgaaaaaggcgaa

SEQ ID NO: 79067 - DNA, 690 bp, Heterodera glycines
atgggattgcacgttcgccgatcaaaaatgtctcttccgaaaattgcggtaatttttagtatttcataataagttagcaaattactatttattaaattcggttgcaggaaatcgatcaaatgaaagaagcgtgcgatcgtctgttaatgcgccgagaagaatttcacgtaaatttgcttaaatcttaataatatcaaaataatcatattttaatagactgcataacatttaggtgagcgacatcggtcattgagacgaaatgcgcggtcgcccactaaaaggacgagctttaatggattttccggtatttgatttcctcttacaaaattaacactatttcatttattattcattttaaatctcaaaatttccatttttcagaggataaacgataccaaaaagtgaaacaattgggcgatcaccgagtcgtgtcccggatggcgattctcgtatgattaattttattattggtatattaataaaaatagagaaatatttacgtaacatccaattagtttttcatataccaaaatttctgaaaaatacaatccactgaaaacaaaaaaaacaattttatatttaattattgtcactttgaccattttatatttacagataaaagatcaaagggtcgccgacaaaatgatgtgtatccgtccagaggcgtgtttgaccattatcgtaataaag

SEQ ID NO: 79068 - DNA, 1036 bp, Heterodera glycines
atggtaaggcataaaattaatacttagataaatttgatttaaggaaaattgataactcatctcccacccatagaagattattatcccgactcattaaaaaaaaatgaatttattaagtttaaaaaatggtatgacgaaaattataatacgtcttttttgttaggtaaaaaatttaaaaaaaattttcgtcattaaaatttttagaggaccaattagaaatatactgtggccaagacaccgaaattttaatgaatgcggttttaagtatgagaagaatttttttagaaatcacaaaagatgctgatacacctcaaggatatgacgttataaaggtattaaaaatggtttatttaaaaaaaaattttttaggaggcatcgactctagcgggcgtagcgatgcgaatatttagggcaaaatttttaaaagaaaaacatttagcaataataccggaaggaggttttgaaaaaacagacacacaaagttcaatcgcgattaaatattttgagtggtttatgtacaaaaatggggttaaaggccgacacgccggaaatggcggtgaaataaagattggaggtaaaaaagcatgaaaattcagaattaaatatgttttaggttttaaattagattttatatgtggaaaaaagaaagtcattatcgaatttcaggtccctagaaaaaagtttttttttattttttaaattcttacagggttgtgcatttcacggtttgtttttaattattaaaaaggtgattataaatttaggctgcccaaaatgttataagtcaaatcatttatgtcctaatgaaaattatgcagaacaaaattttttgaagactcagagtagaatgaataaactaaaacatgtggcaaaaaaatatggattaaatgttgaagaaatatgggtatgttaaatttttatcatataaatcctattattttaaaggaatgtgatttaaaatcaatgttaaatcgaaaaaatgacacaaattataatagcgaaatgaaaaacttttttgatgaattatacgacaaag

SEQ ID NO: 79069 - DNA, 522 bp, Heterodera glycines
atggatctttcatttaattccgagaaaactcctccaaagcgtgccaaacgttcaccaattcaacgattaaaagctggagaaacgatgatgtgcgtataaaaatataattaattaataaaataaaaataatatggttaagtgatataaaattggttttgattatggccgattctgtgcggattgttggagaaaaaagcaaagtttggacgattattggtagcgatggagatgattacatcaacggtggaacgtctaatcccgtcgttgctgccaaaactgattcgaaaaactcttttgaagtatgctgatctgcgtgctttctcttcggcagttgtggcggtggcggtggagggggcaagtggtacactggtgtcggggtctgcgtacaagcattggagcgaaaaccatggtcaacgttaaaaacacggcctttgtttcgaatcttacaattttaaaatttgtttcttgaattttaaaagcccaaaaaaatgatgatgatgcaggtcagaaggaaatgggtaa

SEQ ID NO: 79070 - DNA, 328 bp, Heterodera glycines
atggctcgccgcggacctcttctaccgatttacaagcggcgtaacgttcgccgacaaattcaaattaatcaggtataataaagttttaacgaaatttaatcatgtttatttttttaagattttcgttttgggcggacaccaaaacagctattgcctatggggttgcgccctcgcttctcctttcatggctcctttggtaacgaattgttttaatttttaaaatttgaaaatgaaactatttcagagttaaatctcgagagaatcgatggacgatgggcaaggagagagagcaattaaccgagaagaggcgtaagacaaataatttaaa

SEQ ID NO: 79071 - DNA, 728 bp, Heterodera glycines
  unsure (1)..(728): unsure at all n locations
atgacggatctgctgcttcagatcaacaacaacaatacnaatgacaaaggcagcgtgagcgggctgatcgttgtcttcttcctcttcattctgatcactcaggtgaaactttttgtttattaatttttaaattttattaaaataaatttcattttttgtaaatcagttttgtattttctgtctcctcttcgtccgtggccaggcccgcactcgtcatcctcatcggcgtcagcgcacccaccaggaattgccgccggagggtgccggccgtcctctcaccgtgttctgcccggtgcctcgggtaatccccccacccctccctcacttcctccacttatttgttaataataaacaaattttcagagccccgctgtgccacatggggacgagtgcgcagcgcgccgctcgcgccgcgtcggattggagaaggtaaaaaacgggagaggagggaaggaagcaaattctccacttatttgttaataatattaaaaaattttcagagccccactttgccacatggggacgagtgcgcaatgcgccgctcgcaacgcgtcggattggaaaaggtaaaaaatgggagaggagtgaaggaaaaattatgcatttatctctcaaaataggtctcgacttcgggccagctggagaccatcgacgaggcggttgaagtggtgagagtgaataggaatgtttcattcatttcaaatttttacaaatttcagaccgaatga

SEQ ID NO: 79072 - DNA, 924 bp, Heterodera glycines
atggtaattgattttcaagattcaaagtttgtgcaaattaaacgttgcattaattactagtaattttgggtttttaatttcaggattcggagtcggaagagaaacagtttttgaaacagataaaggaattcgtgactacgaaaaataagaaagattcatccaataatgccaaagccgaccaaatgagcgattgttcaaagaatgccgtcaaattggagctcaaagaatggaagcgcgggtttctgctgggtaaaccgagtgaaaatgcttaattagttgttaatgatgcaatttcttctgccagtccctccatcgtcagccaatgaaattggcacagattcaatcgaatgcctacggaaagagcgaaaaccgactgaaaatttgaccatttgtgaggtcaaagaacgaaatggcaaagtcggaaagggaaatgctttagtgggagaagtaatcgaaaggaaggcattggaaaatgtgaaagagcggctgagggggcagagggacacgaagaagccgaaagtggtggaggcaccgcgaatcaacccggagcaagtccgacagacattttgatgaaccaatccgggaatgaaacactcaattgcctaatgacatattcgaattgtcgttcttttttttgcgagataaattattaatttataattaaaagctgataaactacaagggggaattagcaatctcgggcatcttttcaccaccccactttatatcagtgtacaaccagcttttatgcagaaaagcttgacaaaataaggccacttaagaagtgaagcttatttcgaaaggcaaattgacataatttcagcggtcggaaatccaaatctattaatgtactaaaattgaaaattaagtacatctataaatggtatatttttagatgtatttttctctttattaaacaataaa

SEQ ID NO: 79073 - DNA, 1767 bp, Heterodera glycines
ttttggtcggcgctttgttcggctcattgctccgtcggctttcgttccaatcgcagtcccaaagtgcgctcgccgccggagtgtccggcgaagctttacaaaacattcgaacggtcaaagtgttcgccatggaagaggcagaaacggagtcagtcgaacgaatgaatgcaaaatgcagatcaaaggaatattttgcgctttctttatcagactctatcgtaaagaggtgcaaacggcgtgttccctcggcgaacggctcggcgttggcatcggtctcttccaggctttgagcaatttcttcctcaatggtccgtctaatcaccgatatgtccgttgttaaatagttttttccattgttgaggaattgtattgggtgttttatatggcgggggacaactcgtggctgatcagcaactctccgcgggcgatttgatgtcctttatggccactgctcagataatccaacgttcggtgtcccaattttcgttaattttcggaaatggaataaaggtgatgccatttgtttggtctttctttgtttgtgactccttccttccatctctctgttaggcttggacttcttgcgcccgaattctccaattcttgcgcattgacccgaattgccataatcacttgaacggtaatgaacaaatcccaaggcattcgctgatcggtgacattcatctgcacaacatttgtttttcttacccaactcgtcctgaaaaggccgtgctcaacggaatcgatttgcatttcgccggtggacagacaacggccatttgtggcccgtcgggtgcaggtgggcgccgtctgatcgaatttaaacgcaattaaatactattcccacaaattaaattcacattaagggaaaagtacaattgccgcattggtcgagcgtttatatgagccacagaatggcaaagtctgaaaggatggtaattggtgttgccgaatttcgctgctttggtttaggttactttggacggtcgggacatccgctcgttggaccccctttggttacgccaaaaagcgatcggagtgatctctcaagagcccattctcttttcgacgtccattagagagaacattcgttacggaagaccaaacgcaaccgaagaagaagtgaaagggacggactactaaaggaaaaacaaatgcatttaaagattcgatctgccgccgaattggcaaatgccgccgaatttatcgaaaactttgccaatggttacgacactttggtgggcgagaggggcgcgactttgagtgggggacagaagcaaaggtgcttgaaataaatgcaaaaagaattgccccgaaacacgaaaaggatcgcaattgctcgtgctctgatcaaagaccctccgattttgattttggacgaggcaacctcagcattggacgccgaaagcgaaagcgccgttcgttgtgccctttgggtgcacttttcgcttctccattcgcttaaggttcaactcgcattgggccgcgtaatgcgcgaccgaacggtgattatcatcgcacaccgactgagcaccattcgaaacgccgaccaaatttacgtcctgaaaaatggacaaatggttgaggtcggtcaaacgccgccggagagaatttgcaaatcgtttggttggagtgagcaaaaagcattccaattttaagaaaggcacgcatgaccaattggtgaggaacagacgcggtgtttaccattccttagtcggcgaacaacggcaaaaatctccgggagaagatgaaccgacaaaggcagga

SEQ ID NO: 79074 - DNA, 1005 bp, Heterodera glycines
atgcagtcaatgtttctcggtggcgacggtgaattggtcgttaatccaaactttgcttcattgaacattgttggcacttgtactgacattggttggttttattgaattttttaaaataaaattaaataataatttatttgttttgttttttttcagagaaatctttcttccgtctcacagctgcgcctgatccgagtcagattaggccacaagatgtgctgaaggtggcgctggagaatgtcaaggagaagtacaaacaaaacaacggttatcgttatgtgagtgatttcatagtttgatgatcccgcatatgtttacaaaaaaaattcaagaaaacgaggcacaaaatgaaaaaacactgcattcctgtttttctgcccggcgcagaaaatttgcaaataacactgccccccccccaccccttcccgaaatttttcttgctacagcggcctgtagttagctgaaaattttttcttttattttcaggcttctgatcagctgaaaagcattcgtcaagatctgatgatacagaacatacgcaacaatttcactgtttcggtgtacgagacgaatgcacgggttgcgctcgaaaaccgagaccgcgagtgagtaaatttaattgcatctattttttagggaaaaaaaacggatgcggggctggaatcccgattttaaaaacttggggcctcgaaacgtcatccattccaacaaatcctcttttttcagagagttcaatcaatgccagaatcagctgaaacagttgtacaaacaggtgtcttccgggtgcccaaatcggtgggagttcaccagctaccgactactctattacatttacatgcgagaaacacttggttgatattttatatttattttgtttttaaattgaaattttgtctgttttaagatgttgcatatttgctggacgaacttgtgcccgaggcaattgccgacgaatgtatgggttttgcactgatggtaattaatatctggatttaacattgaaaa

SEQ ID NO: 79075 - DNA, 1205 bp, Heterodera glycines
atgcggacgatcgtctacttcaaactgttgcaaattgtgctcagtttggccttcgtgtggcaacttctttcacttcaccaattctgcggcacatttgtctgtccgaaggtgtgctgctgctttttgttgtttttgccaattttcattttcaatttttttgtttaacgctgtttccatgcttttcaggccttcctccatgacatctctgttggccactgcaaacgctttacgctgatcggaaaggactcaaagacgggcgaattcggcgctgtgttggacgagcggaaatggcacaaccaactgttcatgagcagcaccaacggtctcccaatcaaagaacagcagcagcaattcatggacgaattggccgccaaattgccgtgccctggacgccactgtattccgattacgacggtgagcaaaatgccatcagaaatatcgaaataaaatgccattttgttttttcagccttcgttttttttctggactgagaagaacagaaatctcctcgacactgttgtggactccttttccggccaactgttgctcgcattgtgctcgcttctcaccattggcattggcttcgcccggatgttacgccctgcggcagaatatgaagtgagttcaatgcgtgaacacagacagcacatcagcccgacaaaaacgcgaacaaattgcttttcagttgaaatccggtggaattttgaccaaattgtgatcagttttgcttttgtcgggttacgagttgcaaaaatttgcttgttttccattgagtcggttactaattttgtttttcatttttaagtgcttcgactattgcatggccctctattctgtcttttgctggtgttgctctgcttgggcctcatcgtgtttgctgctctattggacaccttattggtcttgcatgaacttccgtgcggatgacacaaatgtgccgttggtcacttttgtgagttttgccgcccatttgattctgcattttccaattctggatttttcaggtgttcgacatcgtcatggtgtgttcgttcgtcttcgagatgttcttcaacaattcgctggtgaaaaaacggcccgagaatgcttcagtcgctgccgctaatcgcaaattgcgcaacgatgtcgccacggaatgtgccaatgtcgccattcatcgccagcagcagcagaagaacggaagtgccatcatcatgcaaacttaa

SEQ ID NO: 79076 - DNA, 873 bp, Heterodera glycines
atgcgatgtacacaaacaaaaaatgaccaagctgatgaagcaattcaaaaaaggagcaaagtgccaaaaggtaatttatggtgccacggaattttctaaattttaattttttcaattgtaatgtttttaaaacatatttttgtgaattttgaatttttacccactttgtcttaactgttataaaaatgacagaaaaattgaaaacgattccaaacacagcagtaattccaagcatagcatctccatgacattgaattatatattataattacagaacggaaaaaaggcagcaaaaaaaccctcaaatatgcatgaaaaaaaaccccaaaataattaactaaatagtgacaaaaaatggcaaaatagtggcaaaatagtggcgaaaaagttctaaatttaggggtgtaattttttaaatagctattttttaatttgaaaataatttaaaattaaggcaaacaattttattcactgattgcagttacaaaacattttcttaaatattgagcaagaaaaaaatttgggggaagaatttttgagaaaattttccaattcttagggggcgtatttttgaaaatttttaggtcgattcttaggggtgtattttttgaattttttaggtcgatttttggggtatattttccatttttattgcattttttgggaaattttccaaaaatgccaaaatagtggcaaaataagtgaagaagcgccaaaatagtggcaaaaaactattttagtggccaacttccgaaatagtttttttagtggcaaagctccaaaaatagtgattcatagtgatgaatagtggcgttaaaacgaagaatttccgagctaaaaatgtgtttttcgtgcatttctcgtctaaataaa

SEQ ID NO: 79077 - DNA, 2193 bp, Heterodera glycines
atggacagtggtcataataatcagcgacattacaacttccgccaccgtgtgacagtgaattatatggagcaggagtcaggttcatcacaatggtctcaaaatatgggaaatataagaaattatggacaataattaaatgaaaacactcatctgattgtgcaaccaaacaatgcgcacggaaatttttcccagcccctcgaaaatcagcctttctcggcccccgcacaaaatcagtcaattcctcaaaactcgaaccatggacagcagctcgcaatccctctgaaccctgtcataaattttttcgatggaaacgagcaaaacattggaaacccccgtttggagtcaactgcagtttcacctcatatttcatatcaagaaaggggcaactattttgtgaactttcccgagggtatgcaaaatcgggatcttgttaagaaccgattcaataataaccgccaaaatcccgctcaaaattttcaaaatcctcccgtgtttgtgaattcgcagctgaaccggaacaatgaacggccaaatcggtttcaaaatccaaacgagtttccggttcgggactcaaatcgccgatccatccacaattcgccaattaccaaaacgagcaatactcggctcgagatgctcggatgtatcggcaagagacaaattcgaattttgtgaccccattaaacctgcaattctccgaaaatgaaaaccgacacaattatacccaatttcaaaatccaagaaatttccaacaaaatcccgaaatggtttatgcacagataaatccccccgtttaccaaactcaagcatttccagcccaaaccattcccatcccggacattattatggaattacacaaagtcacactttccaaccaatacgcaaacacaatgagagaaatccctacccttaatggaacggaagggagtgacaaagtccaggatttttttttaactgttgaaatgtgtgttggagagtggcgccacgaaaagaagttggaaatgttgaaaactaagctgaaaggaaaagctctgagggcacttaacatggcactgagtaaatttggaaataccgcgccattcgagacgataaaaacggaaataatgtcgacattgagggagacggattacaaggaagcaagtgcttttcaggaacttacacagacggggaaacgaaaggagggcgaaagtgttatgaaatttggtgaaagaattcaaaggctggtaaattgtgcccatgttggtttaagtgaggcacaaagagacgaaatttccaaaaaaattttcgttcttaatatcaatgacacgaacatggcaaaatttttggagtgtcagtcaaaaccgtcccaaacatacgacgaacttttaatggtcgctaatcgtcttagtttggttgaagagaagactgaggaacgttcggttcaaatccgaaattcacaaaatccattccacttgccaaacgcgaaccaaatctcataccaaaacgaacaaagtcgttattttggtcaaagaaatttccaaaattcttaccagcctcagccaaaatattttggaagaaccgggcggccaccgagtcattcttacggaaacaattttggaggacgaaattttccagtgaatcagaattttaaccggtaccctaacaatcagcaaaacagaaattttggtagcgaaagggcacagagtaacaaaccgagacaagaagtaaattttcaaggccaagggtctcaaaattccataatacctgcaagtaatgcaaatgccgtcccgttaaacgcccaaaaacaaaattttcgtcccggatatggttcgaacgcaattattgttacagaaaatactgaggacaattcgccagtgatttctgtcggtcattttggacaaaaagagccaaccgattatgaaaaattctttaacgctctttccactcattcttccgaatttccgccaaaaaacccggctcttgttaaaacgtcaaaatgtttggatatcacactgagtgttgtggacaaaaaggccaaaggcttaatggatttgggtgctgagactgatatagtaaaccctgaatttttgtaccgaatttcagtggaaaaaggaattaatctcgcagattggggtttctgtcccaattctggccttaccaaattacctttttccgtcgcatcatttactggtggaaaaattgcatttattggagtga

SEQ ID NO: 79078 - DNA, 2221 bp, Heterodera glycines
  unsure (1)..(2221): unsure at all n locations
atgtgcaattatcaatggtccaaggccaagggcgagatgcttggaccacttgagaatgcaccttttattggccctgcttttgattttgtagtcagcgttggactaccacaaatcccacacagtgataatccggatgataaagacaaagttgccgggtcaatgtgcaaaatagactatggctgtgattggggaaaatgccatccaagcgctggcaaaacggcaagcacttgctgtgcagatggctttgtgttcatctgctgcaaggatgtaagtggagataaataaggacacgagtggataaaagcacctcaaaaattcttcataatttttgtctttagactgtaagcaatcaaaatattattttcaaaattatttcatgtaaattcataaattaggacgacgacatcacagagaattgtcaaagaatattttcatggattttgaaagtaataaaaattttaatgtgttcattcaaaaatttagcctccggaggtatgtgcaaaaaatggagttggtttggtgggtgaaacttaatataacaatgccaatgttgtcagccggaaccggcacaacttacacaaatggaggagtgcaaaaaagcagccaaagctaagtgtagctgtggatggttcgcttgtgtgcgcaaacgagggaatggtgcaaccccatgctgtgcagaaaacacggaattcacgtgttgtaaaaatgtaaaataaaaaataattaataataataataatatgagagattttcaacataaaagggaaattataaaatccataaattcagaattcttttttgaattttgttaattgtaattttttagatcactattgaatcattggtttggattattttatttaaaatttttctgcgatttttgcaaatatagccgcaaatcgtgcacgacaacgagtgcaatatggcaaacaaaagttgcaaaccatgcggttggggcgagtgcgtcccggcgcaaggccgttcgccaagcccatgttgcgcccagcactacgcttttaaatgttgcgaaaaagtaaagtggatcttgaatctgtacttttcttgtgcccgggccctcataaaatgttatggccctttctccagcaatcaattagatttttcaagagtaattttgcggtgctataaagaaatgccattggagattaaaaggctgagattttgtctatgatttttatcatattcgaaaaagatttcttttaaatctaagagccataggaaatggttaagcaaaattacctaagcagtgtttggccaaaatgttaatcagctgtcaatttgaaatttagtctttcaatttctcatctacttatatatttgtcaattgtgcaaagaaagtttcgtaaaaattatttttttagcctccaccggtacgtcgacagtatgacacatttggcatatatgtactgtaatcacatttaataaaggtgaaaccagcgcaactcatccaaatcgatgactgcgaaaaagccgcgaaaagttgcgactgtggctggtacagctgcatcccgcacccgggccaaccgtcaacgccatgttgtgctgagcactacaatttcacgtgctgcgtgaaggtaaggcgacagtctttggcatttgtatagtgtttcagctgaacaatggtcactcagaaagnacacttaaaattggaattggacaagggcatttgattatagactcagacagttggccacattaatcgctacaatttttcaacacaaaaaatgaatgnaaggagtttagattaattaatccatcagcatttgtggattaattaaacaatattttaaatatccatttaaaatttatttttccattttaaattattaacatttttaaatttatttaattgaatttgtactacggtaacatagataagatgaggaagaccacgtacctatgagagtagtaatttgctataagctttaggttgtgaacctgacgagttttggtgttatttgtttttaaattttaattatttttaggctccaccggtatgtcgacagtttcacagtgtgccaattactgtaatcgcacttttgtcggtttattgaagatcaaacccccacaaattattcaaatggatgagtgcgaaaaggcagcgaaaaattgtagctgtggttggtacaattgcatcccgaaaccaggccaatcgtcaactccatgctgtgctgagcattatcagtttagctgctgtaccgat

SEQ ID NO: 79079 - DNA, 592 bp, Heterodera glycines
atggcaaaattggcgctttatttgcccaagttcaaggatttgggctggcaatggctacgcttccgaatggaaggtctgtcatcacttttggtcgactgtctgtggaggccgtgcccggtcatttttagagctttctatgtttaaattcgaatagcaattccattgaaaacgccaattaatcgaaaatcgtttactgtctgtccgggcataattaattataaggggaacggatgaagcagacatttgggatcatttgtcaattttcagccacgcctcaacttgatgaaagaggacaacgagcgacagaagaagagaaggcattttgcacacacacattagcctccttccgtgatctcctcctcaacaatgttaatgataaaagcggagcgaaggatagaaaatgaatttaaaattatttacatttttatgaaaagatcattctgctgaaggagtgatctgctgatcatcttggtgtaattgtcttatttgataagccaacacttaggacccagtagttattagttagagtttcttaccctatattgaacataataagatttggaatgggaaaggtgaaaaataatttattaaa

SEQ ID NO: 79080 - DNA, 559 bp, Heterodera glycines
atggcaataaaattggaaggattccaaggggtaaagcacacgaagggctatggtgagtggggtgggcatatccaaaaagccgaacagcttgtaaatccttgattgagcattttgtgaatcggccaaattctaatgctgctgctcatccccaattgttaaatgcacttttccattttgccataaatggaaacaaaaaaatggacaaaaaatgtgaattgatccttttagtaaatcattgacatttcaatgcttgtaaatataataattttttctaatgcgatagataatatttatatttacatattttagtcgtagagctctgattttatggcgaaaaaacggagtctctaaaaaagttttttgaaaattaattgttatattaaaaagaagattttttaattttttaaaacttattaataagttttctcaatttttaattttaaaaattatcttatgtgtggaataatactaagttcaaatgaattaaaaaacacattaagacgccataaaaacacgagaaaacgagacgagatgagacagaatttctaggattttttca

SEQ ID NO: 79081 - DNA, 906 bp, Heterodera glycines
atgctaaacaacacggtgattgaggtcatcaaccgagtgtgcaaagagatggcaatctatcagcacaaagacctcctcttcgggggtaaaacggtcatattcagtggcgactttaaacagtcgctgccggttgtgcctcatgagggtttaactgcgcaagttacttcttgcttccaaacgtccccgttgtttggtcagttcacaaatatgatattgacaatcaaccagagattgggacaaggacaacaagattatttggaaatgtgccgccaaatcggcctcggaaaaaccggagaattcttctggattcctccgcaattcctcgtcaagagcagggaagagctaatagactttgtctatccaaacttccaacaacttctcggtaatgacaaggagctgctcaaccgattgatcctcgcgccgcacatcgacacgtgcgacgagataaacgctattatgatggcgaatgtgccaggtcaagaacgcgaatatttgtctacggacaaacctcttgacgagcgccctctggatatcgatgaaatcgagtctgaagtggctgcgctgaacagacgcaccgactcgggaatgcccccgcacagtctccaacttaaagttggaagcgtagttgttctccttatcaacaaaagtgatagggaaggactgataaatggcactcgcatcgttattgaagagcttggtgacgatcgcttggtcggtcgcgtgatcaacagcaacgctgttggaagccaagtaaggttattccttgaacgaacccgtaatgtttacgaggacaaaacgccaggcggcgtgaaatacgagcgtttgcagtttccaataaagcctgcattcgccatgaccattctaaaaggtcaagcaaacaatcagcacggttggaatagatcttga

SEQ ID NO: 79082 - DNA, 1136 bp, Heterodera glycines
atggccaacaatttggtgatcctgatcatgatgttcaaccatcacattaacactgatctgagcgcggaggacaaatcggctgcggtcaaacatcacgccacctacacggaactgctcaaaaggtgggagagagatcgataactgtgtgcataatgtgtgagcagagagaaaaacaaaaatgccggatgaacgagagagtgtgtagggaagacgttagacacaaagagagggtgttagagtggatgtcttagaattttttgtaataatacttatacaggtatttggagtccatctacgggccggaggaggcacgccaaatctacgaaactgtcccaaaagcatttgttatgctgaacattgtgagtttgagaggggggaaaaacagggtggcacaattttaagttttctaaaatatttttttaaaagaaatctctcaaaaaaaaccgaactatgaaatagaatgaaattttctcaaatcaaactgcatttagaaatatgacgtggaaaattgctgattttcaagcattttcttgaaaattagaacaacccaagcttcagagacttttataaaattcaattacaaagccgaaattttcgcgacaaatttttcgcttcaaaaacattataaaaattcaaaaattttgtccataaatttttagaaaaatcaaattttcgatctttaaaataaaattttttttcaaaattatctcttctacaggtcaccgagaaggcgaaggagctgttccgcgcccgggtgcccaccgaggacgagaaaatgcttaagcacattaagctggccgccgaaatatttccgaccgcggcggacgagaagaaggaaaaggaggaaaagcagcagcagaatcaacaacaaatgaagttggaggagggcaaagacggcggcgacgcagatcaaagggaagtggcggcggaggacggcgccattggcacagtaaaagggccaagaagcagcgaaaaagatcaaaaagccatgccgccggcgacggcaacagtggtctcgctcaagcaggagcagcatgaggatgaggaaatggatcaacaacaaacgctgtaacttcaactgcagagcagcgcggcggaggcgacggcccctgtggggccgacacggggaaattaaa

SEQ ID NO: 79083 - DNA, 887 bp, Heterodera glycines
atgctgcgccgtatggtcaaggtggtcaagaagttgcccgccttcaatgaactaagccagagcggccgttttgcactaatgaaagacgctatcattgacatgctcaccgtcagagggtgagtgacgcgggtcattattattttagtttggcgcccatttttgggcgccgatccgtctggacgcgccaaggattttggtcgccgagttcttttgcgcgcctaccaattttgggcgccaatacttttgtccttagggcttggacgccgtcccgtttgggacgccaattacttggcgcgccttaactcattttcgcgccaaccagtttgggcgccgtaaaatttggggcgccacagttaggttggcaccgatcagtttggacgctgtcaaatttggggcgccaaccgtttcggcgcacccaaacttatttggacgccattttattttggagcgttctaaatcatttgggcgccaattagtttgggcgccatccaattggagcgccaatcagtttggtcgccgttccgttcggggcgccaaccatttgggcgccaatcaattttggcgcgccctataattcgtttgggtgtcattagtttcttacacataaagcttttaaaattttattagatttttgcccatttttcagcgccgtgagcgttgacgtggaaaacgaatgttggaaacgaccgttgatcagcaactgcgaaattcggctcaacttcaacattcttgaccagatgctgaacggcagcatgcaaacccggcgcgtgaccggcttctacaaacagttgcatcaaacactgatgaaggaccaggtcagtcagcaatcgatgatcttgatcagcagtaatcagactatttagagcacactattttggcaaaataaa

SEQ ID NO: 79084 - DNA, 227 bp, Heterodera glycines
atgcgagcgaatggagaatgcggcgtttatgttgtggaatatgcaagagcaattttggatgtaaatatttttaaatgtgaaaaaaattttatggttctcattttaaggcactatctcggaattggaacgctgaatttgattttagtcatataaactctgataacattagctcaataagacggcattggatgaaaatcattcgggaacgaactgcacttgagaaatga

SEQ ID NO: 79085 - DNA, 797 bp, Heterodera glycines
actttgcgctttcgaatgatacccaaaagataggatttgttcgaacatgaacaaagttattgtgtaaaaacccgggattgtcaatcgattggactcataaaagtcaaattggactcataaaagtcgattggactcatataagtcgaatggactcataaagtgcattagagccaaaatatttcccagcctaatgggtttgaaccataaccacaaaaacacaaatttaaccaacgggaccacttttcgctttaacattggaaactgactggcaatggggagggggcagagaagtggcgatagagtgtaggaaaaaaggagaacagattgttagaggaccgacgacagagatcgtttgcctccctccgttaatgggtcggtccaatgccaaattattttaaaaccgatttttttttccataattccgtcttccccgccttagggcacaccggacggatgaacgagcagagcagtcgttcccatgccattttcacggtgaccgtcgaatgtgcggagacagtaaaagccgctgacggacgccaactgctcacttagggaaaattgcacttggcggttggtgattggaatttacaattattgctgtaacttttatggaaattccaaaaatttcagcgacattttcaaattggtttcattcccttagggtagtgaacgccaatccaaaataaatgccactggcgaccgactaaaggaggcgtcgaagatcaatttgtccctctcgacgcttggcaatgtgatcagtgcgttggcggacgcgaaagtccgcacattccgtaccg

SEQ ID NO: 79086 - DNA, 1458 bp, Heterodera glycines
atgcgagcagaagccgaacggaagcacacgattggtgcagcagaagcagtgaagggaggaaaagtgatcagtgatgggagagacgaagcaaagcattgattggcagaggaaaagccatcacagcaaatcaaagactgttccacacactttttaataccctgttaattactcactaattaatgtccattttgaccctggaaaaattagtaaatgcattggttgcttcagtaacttggttaattatttttttagcaatttaattaactataaaatttttggattaatttaatactaataattacttaataattgggttgcgtgataaacttgatatcagataatttattctccgttctcaggagtgagacatgacaatctgaatttaataattaattccgttttgtctcaatttgattcaaactacaaattcactaattagctgaaccgattagaggatcaactttttgggaagagaaacggacggagaaagggaggcgaaaatcgaaattatttattgacagtccgtcgatggattcgttgggtgggcggcttcttcttttttttctttgtttttctatttgggcttttcttttttttcgtttgcccttttggccttccaatcggctcttcttttgatcagtgtgaccaaatcaaaagcaaataaatggaaggaaacagtggaaccgaatcggcgccagggctaatttattgcgcgacacatttgggatgacgcgacttagggtggtggtggatcgcccattaactaataattggcgaggcctataaataaaaggacaattccattccgccgtgttcattatccattaaaaacattcaattaattcttttttgccatttctttagtacatattaattcgattcgttcctaacttattttaaattccgtttgattccgtttttaattcccttccctccggcagttctttctgttgcaatttgtccaaaatgagccctcttccgctgctgctgcttctcatttccccgcttttcttctgtccttccgttttttctgatgacattctccgctttgaccccgcggcaccgccggccaaaatgccctcaaaatcgtcactaattaacttgtctaaaaaggaccaagttacacttgacgaaatactcattagtctcagacaaaaatcgccaattgagcaaacgcacgacatgaaagcattcgcacaactgtcgaaggcggacttatgaaagtgagcggtgatgggaaaaaggctaaacgaaacgcaaggcaattaatttcagttgaaaatcgacgccattttggaggagtatgccaaggcggtggagaagttcaagttggaaatggcacccaaattggaggccatgagtttgaaggaggcgcggtcgtgcggtgatcatgtggtgctgatcatcaccgacccgaaactgagcccagcggagaaagtggcgagagtgaacgacgcg

SEQ ID NO: 79087 - DNA, 1828 bp, Heterodera glycines
atgaccgacgagcacttccgcgggtcccggcagtactaccagcgcgagtacgccaactgcatgaccatctgcagagaagttggaaagccggaccttttgatcactctgacgatggatcccgaatgtgatgaactggaagagatgctgccaactgacccagatggccaccgccagcagtggtacgaccgtccggatgtgatttgtcgtctctttgtcgacaaattcaaagagctgcgtcatgaccttaccgtcaaggaggtcatggggcccgtccgtggctggttctactcattggagcatcagaaacggtaaactgagtcctttggttttgaatatttatgagtcatttttagtggcctcccgcatgtccatttcgcactgattttggactgggacagaatccgaagtggcggcaccatcaacacgccagaagactatatcgagcagtacatctctgcagaaatcccggacaacccctcgggccgctcatccgaagtgttgctcaagcgagagctttacaaaacactgaggatgaagcacatccacacgtgctcagctcgaagatgtttggttgacggaaagtgcctcaaacgttttccggttagtcaatattttacttcacttttatggttgtcaagcatatcaatttagaagccattctcgtacgacaatgtctacaacgaacacgcttacccgcggttacaagaaccttgtccaaaattgtgcaaggactggcgaggttcgctgtcgcaaagaagactgcaagccatcgaatgcgctgccggatggacttcttcattctgaacgcatcatcgatggtcttcatccagaggtcttcgtcagtgaggagaccacgtgctcccgcagcttcaacaaaggtagggaacacgttgccgttgacggtgcgcaatgactcccatccctttgggtcaagcacaaccaacagaagcagtcgaattgcctgtaatagaaaaaatgatcaaattggtaatgtgcttggcgttctaccccccccccccgaaaactgggctttttggaaaaaaaatatttttttgaaacctccccggcataattttttttttatttaaataacgcgtaagggaacataaaataatgccaccaattccatttaaaaaaaacccgaaaattcccccctaagaattggctttttgagttggccccccccccccccccgaaacgaaggtcctggctacgcccttgtttcacaagccatttttgatgttaagctttttttgccttaatgcgaggaaaaagtgaattgaaaatgcacgaagaagtcgccgatcaatggaggaaagaactttcgaacatcggatttgacgaatctaagcagaaaattactgcggaggacttccaactgtaacccttaaagattttgatttcaaactctatttttcaaaagcccactgatcaaaaattggtgggggagtggatagtaaccgtcaaatgttctattaatagcggttttagcaatgcttatataggaaaggttcaaaatgcctttgtcttgtgaaactcttattcatatggtctgtttttaggttcgtctgttctgctctgaaccctgtttgctcaattgtcggaagtgtcgttgcgcaagaggcaatcaaggtaaagaggataattcgttttgtctcatcaattccgtcattttcagtctttgtcgcagaacgacgaaccgttgaaaaatgcgttcttttattcagcacttgaaagttgcggaacagttgttgacatggccgtgtgatgtccgtgaaaattttgtttaaaaaattgtttttgtttgctttactaccaccagcaagga

SEQ ID NO: 79088 - DNA, 1406 bp, Heterodera glycines
atgtgttgggtcattgacattgcactgagtctccaggttggcccaactttttggctttattttcaattattgtttgcctttgtcaaaggacgagtcaatgcccatccacgaattgtacacgcaaatcagaaatcgcataaccgtggcttcgggaatggaggatttggaccggaatggacaggagtttgagccactttttcgtaaaatgtgtgcctcccgcactgaccaggcccgtttcccccatggtcaaatcacgaaaaccataatattcgttagttgttcagctcctggtcgcgcatgtgaaggcgtttgcgccttgcacctccaatttggacccgtacttgcgcaaaacgattcgcgagcagcgcggcggtgaaccgatcattgacctttccgtgtcgcaggaggacgacgacgtagcacagcagcaggatccatttggaccactgaaagagaccatcggcccagaggcggaatttgtgtttcaggacccgatggtgtgggcatcggtgcggaaagctttggccaaaatgtccgtcgctgaaattgtggcactcatacgacacttgggcattgttaaggtcggcacattagcaacgtttcgcttaattattcattcgaaaattccttttaatgcaaattgtttaacaaattaaggagagggaggcgcagctcgtcaatgctttttatgagaacaatttgaatgggctcgtccttcacatttgcgatctcaacgaactgaagcaaatattgaaagtgattgatttctaaatatgccaatttgttttgttcattcgttgtccattttgaggtgccattgggcgattggactctcgtcaaattgttgattgaatctctccgcaaatggaaacccttctccacacagtccctttgctctccgcccgacaccaacagcaactcggtcgccgaccccgtcgttgttgtccaacctcaacaacaaaaacaccttgtacaacaccatgacaatggtgaatttggtcaacagaatgaacaacgcatggcactgttgcggcgcattgaagaggagggaaatgggcagacgatgatgaacaatggcgagacggaggaggagaagcggagaaagtcgacaaaaagtggcgaaaaggaagagaaagagcgaagagaaacggaggaggagatgaacagcgtggcatctgtggcgggctcttctgagcagcgatcgcttctgaggtcgtccacatccccaccgaaggactaatcacagacgaatggaaaacgaaacgaaatgatcatcaatcacaccactttttcattctttctagtcatacaacatatcagggattgtcgcaatctatgcttcatttaaattaaatctcaagcgcatttttgcatttcattaaaaaattggtaaatttgtgtaaaaa

SEQ ID NO: 79089 - DNA, 693 bp, Heterodera glycines
atgggcaacaaagaaagtcagtttggcacaagatacgcagttgatggccgagacagccaaactctcgacccgagtctgatcagatcattcacagagattcgggacagtgacactgactttgcattggacaaattccaagtatttttttcttatgtgtatgtatatattaaagtatattcaagcaaaattcagattgtcaggatactttccaatcttcgccaatatcgccttctgtcgggtctctacgaaaaagcaattcgtctaaatggaaatgacaagttcgcttggcttcagttttcgctttcactttccgccgatcgacacttccttcgcgtctcaaagattttgcaacaatttatttctatggaagaggaagaagaaacgaatcaaaaaggaggtgctgacgaagacgcaatcgttgcttacatgcatttggcacgcattcaactcgaacattttggcgactgtaatttgggtacgtttgttgagttaagcattaagcagcattggagaaaatgtgtttatggcggttcaccaaaaaaataaattgttttcgctatatggaaagtggccgattttggattttatcaaaaagtaaaaacaaaagggggggtactagttgggtttgtatcctagttttggatcaaattttttcaaaatttttttttttatcgcaattgctttaaataacaa

SEQ ID NO: 79090 - DNA, 1768 bp, Heterodera glycines
atgccgtccaaatttgaacaaatcgctcaaacaattcttcgaaaacttttgcgccagttcatggaagaacaaaactggtttttggcggagatttcaatttgtcaagaaatgccaaacattgttcgaattgtggatttgcttgtcccattgtcaattcctccaactcctccaattccggacaatttggtccgcgtgaaaagcgtggatgttgagtaagtgataaaataccttaaaatttatccgactttctttcttgcctaatttagcagcctcagtgacaacgtgttgacacttcttcaacactttcgcctcctcttttccacgtcgcccatcaatctgtacattgaagcaataaaaaagaaagtgcttcgcgattttgcccaaaaaatttggccatcaatccgtgaccatatttatgccctcattttgccggatggattgaagcgaatttgtcattttttgcctacttttctcgtcaatcgctgtccatcaaattatgtcgtgtcgattggcgccgcttttcctgatttttcggccgacggttccacaagtgcgtcggcggatggcatcgttctggcccaatggcttttatcaagcgatagagagtgcccgaaggtgctcaaatacgacgccaaacaagttgaagtggcaaaaatatacacgaaaattatgcgattggtcgaggtgtggtgattatggtggtgcaactgtaggggagaaatttggacaccaaatttcctaaacaattcgtaatttctgcaaaaactattattcggatttggtttttaatttttaatcaaaaatttggattttaattcttttttaaattttttttttaatttttaggcatttttggaatcagatgtttgctcaaacttcataatctccatttatcatttcgcgtccaatgaagaagtgtctccatatcgtttcgacaaccatgcgaccggagaacgactgtcgttttcgatggaacttcatgtgaagggtgcgcgaattctaattgtccgttccccaatcaaacgcaatgaacaaaaatgggcacactacgaagcggaggcaaagaattggcacttcgaccaccaatggaatttattttcctgtattttaagcgatgtgatggacgatgaaaggtgatcaagtcacattaatttatataagaggaaggaacaattggtgatggatggaccaaaagttaaaaaaatcaacttgtttgcttccttgctatcattgatagccgtgaaattggggggggggggatagatatttggggttaggtgctaatgaaatcaatggcttgtcagaactttgtcttcggggcgtgggggaggggtggggtctacctctctctcaccccggttcggagtcacgtcggccggaccatttcggtgccgccaatttgaaataccgtaacttatagtatatttaattatttctcgccgatatttttacaaaaatttttgtgtggtatgtgtaagatggtgtcatttggtccatcctgaaaaaattaagttttaacgaactccccgtaattaatttttttttacaaaattcagtgatgatgaggaagatggtgacgaattggaagaggaggagcaggaaggaggtgacaaatcggaagggtccgacatggacatcgatgaattgtccgagggaatggaaatgtaattttctcaatttgcaattatttgatcctgttttttgaagatgaagacgtatattgtggaacaaccttttcatgtaacattgtcaacaaatttttattaaa

SEQ ID NO: 79091 - DNA, 1859 bp, Heterodera glycines
tcagatcactgacccaacgccgctgaatgaacgtgctgagattatggtggtccaagagttggccgacgagacggacgtgttcatggagtttggccacctgagccaggcgacccgtcgcaaaattgaggaattccgtcgacgacgcaaagaggcggaggagtacaacgaacagtcaccgatcaaaccaccgaaggcacgccgagcgtcgaaggcggaggaggaaatgagcacagatgaaaaaatgctgagggaaaaagcacccgcaaaggaggcaaaatcattgaatgctggaaaatattagaaaaagccatttttaattaggtaattaaaatgtttaagccagctaaactgacggaggcggagacggagaaaaacgcattccatgacccattggaacggctgaaacagctcgaaaaccgactgcaaagcggcggcaaaaggacgagcccaatgccaacagaagtagggaaaagcccgaaaataaaattggaaataataaaaaaaataatttaaatttaaatgcaaaggacaaaaaggcggaggaaaagcaaaaggaaggcgcagaaaaagaagaagcaaacaaagcggagaaggaaaataatgaaaagcagcagcaaaaggagaagccggccaaacggaagacatcgctgaaaaggcaagagacaacggagaaaagagagaaggaacagcagagaccagcagagaaaaggtcgggggcggaagaggaaaagcatggagaaaaagcaatttcaattgtacatttagcgtcaaaatagacacaacaccaacggcacaaaaggaacaaaaaagcgcagtgccaaaaccacaaacggtgacaatggctgctgctgttgccgcgggatcgacgacggtgccgacgagcgcagcaacagcagctccgaccccggcaactacgattattggcccagcgatggacccgcagcgatactggcgactggagacggactcgctgaacgcgttgatgaaccaggcgagtgcgaggcaaccgattgttggaagagatattagcatttcatccatgacattagtaatagagcataagcggactaaaaatgtgtgaaaatcgggaaattgggattgggttttttcaaaaatattagcagcggatcaattctcatgctaaacccgatcagaacggtcggagattagccatcgttcaggtgcttgagcaaatggagcgtggtccggtgagcatcaatctgatcgctcgcataaaggcccacccgttctatgacgagcggcccgaggtcaaagagctgttggagtcgatcatcgcagcacagccggacgaagtgcagaagcaaacgtcgaagctgatccagcaacaatcgaaggtcaaagagcgatcaatcaatcaattagtaattaatacattaatcactgctaatgaattaatgtcaataaaaatgcctgaggattgaaaataattgggggggggggagactggatgaatttgatcaatttattcaatctttcagcaaatgtgtaacaaagcattgaccgaaacgccgacccgaaaaatgtctcagcgcgaatttcccgttgtggactcaaaaaaacggcagggcgaaaaggtggagcgggccgcaaccagcaaagcaaccgtagccgggaacagcagcaataccgtaattgtgccaccattggaaacagtgccgccaaaagtaacaccggcggagcagagaaaggcacagttcagaagacgcaaggaggaacggagatggcacagcgttgaggcaaagagcttacaattaggacattgggataattatcgagagttttgagagcggcaacaaagatttttcaaaattcataaattaccaatgaaagttaattaa

SEQ ID NO: 79092 - DNA, 683 bp, Heterodera glycines
atgacagagcgggatatgcccgagccaaattcgccacttcctcgcaaaagagtcggcttcaaagagccgcacacggggcttgtgaaaaatgatttcttcgggtattggtacttacaatattggtgagtctaaattgtcaaactcaaatctaccgattttctttaagccttgtgaccggtctttacatgttggagccgtgggagaggaaaatgttcaatgttttcgtcacgggtttcattgccgttttatgcagtgccttttatgccttgtggaatgcgttgattaattaatttaattttttaaaaacgtaaatttatttatactgccaattttatttatttaataaagagtcaaaagcaattttatttggttactttacaagttctcttcaacccctttaaattgaaatagtctgtgttagaatggtcaaattgttttcattctgaaatggaatttacggtcccatattgaatagtgatttaggtattctgattatttatttccaaaatgtttctgaaactttttcacaatgggatattgtagttcagtagtaaaagtcatggaaatctttcaaaatgctcttggacaaacagcacgcgaaacaaattccgatgatttgcagggcgccaagaagggcgctggcacagccaaccaccgtcgcattggtcacaatccaatgctga

SEQ ID NO: 79093 - DNA, 851 bp, Heterodera glycines
atggtcgagggcggaatcactttggtcaaatacctcctcttcttcgccaacttcgtcctttgggtgattaatccgaccgaattcgtttattcgctttctctacagactctcggcttggcctttctaatcgccggtgtcgtacttcaactcaagtacacgggccttttggacattcttggcgatgaacggctcgccacccccgtgcttctgttggccatcggctgtctgtgcactttgctcggttttgtcggctattgcggcgccatccgcgagaattactgcttaacggtcagcttcgctgttctgctcgcacttctgctgctggccgagactgccattgccattctcgtctatgctcttcacgagccactcaatgaagcacttataagccaattgacccaagtaaatggggccacggtttgaccattggcaatggatgacaaacaaacatttcacgtctttgttttagggaatggaacgctataaccgctcaaagggagtttctgtggcttggaaccaagtccaagtagggaaaccaaccgactgattcaataaccaattgaaaaatcattcagcgacaattgcactgctgtggcgtaaataatgccaccgattggaaaatctacgcacccgactcgtgctgcgtgcattttcatgacggatgtgccaaaatggcccaaccgctgctttatggggtgggctgtgtgcaggcagttcagcattggattgtgaccaatgcgacggtggttggctgtgccagcgcccttcttggcgccctgcaaatcatcggaatttgtttcgcgtgctgtttgtccaagagcattttgaaagatttccatgacttttactac

SEQ ID NO: 79094 - DNA, 414 bp, Heterodera glycines
atggcagtgctaatagattcaatgatggataatttaaaaaataaaggtaaattttacaaaaaatatattaaaaaatgtaaaatcataaattaaaaaacagaaaacgctgatttggtcgccccgttgtttccaatcacttttgtcatcttgggtggggaattgcttgttgaacgtgaaaacttagagatcgactacattttcaactttttgagcggctcagtgacagacgacatctaaaagaaatttgttttgagggcactgatggagaaatgaaaagcatccatagagaagagaaaaatttatcattattattgatgtatgccctagtcaaagaaaaaaaattagaagtttatctttgtgattaagtaacgatcattggttctttattttggcgattttccaaatttagcgtaa

SEQ ID NO: 79095 - DNA, 895 bp, Heterodera glycines
atgtatggctgcatgaaaaatgacaagccatgccaaaagaatgtaaatgtgatgaagaaggttggttataagttgtgtgcacaaaaaatcccttttcgattaatggctaaaattaattcatatttaaaataaacaaaaaaaaattttcataaaaaattcaaatataaataaaaaaataatgctaaaagtttatattgaagagaaaaatgcttatgcaaattttaaaaagcaccaaagattcttagaaaaaaaaactacagcaaaattaatagaaaaaagaatttaaaaactaaaaaggaaacacctttaatcctaaagtattacattaatactattaattgaaggaaaacatttgcaaaagaaaaataaatcaaaccctactgtagaaatgtgaaaatgaatggtgctgagtagttatataaaaaccatcaaatggaaattttcaaaaaaattgcccataacttttgtcaaaatcaaccaaattagacattcttggtatcattggatagccccaacatttctctacaagttatcaaaattcaaaaaatttggtcaagtttgagcaaagttatgggcaaaagtacgcaatgtaccaagtttgcacacatttttggccataaatttttttaaactcaataaaattttttgaaattttgtaggctaatagaggacacgtagggctatccaataatagcaagcttattaattttgttggttctgagaaagttttgatcagaattttttatgatcaaaatatccgcaatccgtaattgagcccagccctggcgctagcgctttctcagcaattccaaagagggcgctagcgctctcagcaaattcaatttggaaaatacattcaaatataatcgaatcaaatttaatttattttaataaa

SEQ ID NO: 79096 - DNA, 3214 bp, Heterodera glycines
  unsure (1)..(3214): unsure at all n locations
atgtttttctttggtctattttttctccttttcgtttctccgttttcggaagcaaatctttggacagaaacagcgcgaatgagcgatttgcagcaggtcattttgtgccagtttcggtcagccttgaaaagcatttggatggcatttgttcagtggcggttgctctgctcgcgttaccaagttgcgcaggcgtacatggaggacgtaaatgcacgcgttactgtgttcgccccggtcaacgacgtgtttctgtataaccctgacctgcgagcaatggaccaaaaagaagtgctttcacatatcggtaaaaaatcaaaacaaacatttggaaaggccaggccgactgcctttgctagtgagcaaagtggtcagcccaccttttcatacactgatcaatgccaaatccatcaatcttggcgaatgccccctttcagtggacacccaagtggtggagatcagttctggtcggaagtgggagaagcaaacgctgatccgaagcacgatcaacagcgggtacatctacgtcacccagttcgagaatggcccggccaattttgttgngcattgngcgggccgtcccttatcgacggttcatctccattttaagtcgtatttcgcaaacgctggcgcaatttgcaaccacgtgaccaaccaagtggggcatcatcaccggcgagcagtacttgtacaaaacgtgcactccgatgggccatcgtccataccccggcacggcactttcttttgttcgcgacgacgaaaatgccttttttgttgaccgacactatgacaacagggatttgacgtcagccatgcccagaaagcactcatccccggaaacattttagggaattgcgtgacattttggacagagtgccggacatcgccttggtcatttacggaagctccgcttggaatggcttccacacatattttctgcccaacaacaaagcattcgcaaaggtcgccgtgcatattgataaactgttggcatttttattttacatcggttaaatcattgcttaggtgatcgatcgaaatcgggttgaccgtgaggttttgttggcccatgtcagcggaatgaacagagtatcaacccaaggcattccttttgttaatcccccgttttcaggtgcttttcacttacccttggctttacgacggcggtgtccacttttacccttcaattcggtgccttttgtcatttcgttgtccctttttatcgcttcgcttttgtctctgctgtttcagtttctcctcgaatatcatagaagataattacaagttgaagctgtgcttgcgcaacatcaccgaccatcggacgggcaaatgggatttgtacgccgtgtccaccgtatacgaagtgagcggggagagagagagagggaaatggcaaaatgccaatgaacgtttttttgaatggattgagtgccatcttttcttatggtattgcttttgagcgttatggccaatttcggcggggcgctgtttgggccaaattgctggtgcccaatattccggtgcagaacggggtggtccatgtggtggacaacgtgctgggcattgtgaccaacacaattgaccaagtccgtccgtttcgttcgattcttccgatcactcgtcttttctgactgatcattttgtgatcagatgctaatggacaattaccgctgcaccactttgatgcgttatatgaacacaatcggacaagtgactccttcccttcccattctctccccatccgctgccaattgacagattgtgcgcaattatttctccgccaccggcggtttggtcacttttttcgccccgtggaacgaagcgtttgagcgaattcccgagccaatcgaacggcgccttttgcgcgacagaatttggctggaacaggcgagtcggactgatcaaccaatgaatgaatgaatgcactcatcacagatcattctgtttattcaaaagcacagattctcaaacttcacattgtcccggcgaaggaattgacaactgaagaaataaccaatgaaacggttgtggccacggtggacaacatgcgccatttgtattttgtgaggggcgaatggccaaaaaacaacgtcacttattacgtgatcggcggaggggtcagaacggcaattcaaatggtcggcacttggcagtttgctatgttttgtcggttcattcgcatttatttgtctgtttccatccgtaccttaggaggacgtgacagccgttaatggaattgtccattacatcgaccgcgtgttgggcgtgccgtatcaggtggacggagcacgggcggaatgccatgatgcccaaattattacagaggattaatcactcccctttttagtcactttgggaaattttgcgtaacgaaagtcgagcgcagcgatcatttgaaatgttgggcaatttgcaagtgattaaacagcaaaaaatgaaatcagaaatcaaacatgaccaaattgcagcttaaatacagcttggacccgtggcaagtgctgacgcccgaacaaaacttcactttctttgtgcccatcgatgaagcgtgggacaaggcattgccaagcgaaggcaaatgagcgaagaaccaaaacgaggacattttgacaggtcgcaccatcgctaaagaacagaatgatggacggaaaccattggcaagcgttgcaatacgtttacaaagtgagtgggaggatggcaaaagcaaaacaaaacgactgacggttcagcgccacgtgctgcaaggacaggcgctgatgtacacggaccttcgggagcggacttatgttatgatgaacgacgagaaagtgatcatccgaaggcggggacgatgtgagttgatcaggaaaaggaaagaaaagtgaagggccatcgaccgaatgaatgcctttcgcattcattggcatccactcgcagacttcgagttgtactggccccggggcaatcgcgtcgcgcgtgtgctggagggcggagagctcgccggcatcaacgggttcatgcacctcgtggacggggttagccccttttgcctttgccgttggcttttgctgactttcgccgtccgtttttctcaggtgctcatttatgagcctgatttgcgtgccgccgctttggtcggcgcttcgatcactgacaacaaccacactttgcttctttgcattgctttttccctatggacgcatcgctggaggcgaaggtaaaactgacaacagcgaaacgc

SEQ ID NO: 79097 - DNA, 150 bp, Heterodera glycines
ccttaattttaacttattacatagagaaaacggcaattttaataaatttcacctctacatttgaaactttttcgcccctatttcgcgaattttttgcccctatttaggtccctaaattggaatttttcgcccctaaaaatccccacccta

SEQ ID NO: 79098 - DNA, 1469 bp, Heterodera glycines
atgatttatgtaatttttaaaaaaataataaaaatttacgaaaaattgtgaccaaaaaagctcgaaaaatttagactaacaattttaccctaacttttttgaaattcattaaaagtttttaaaaatttaactgaataataaagaaatctctgggctatcttttcatatcctgtgcagtttgattaattgaatgtttaaacaatttttatgtttaaacgaccttacattttttggatgaccataaaaatatataacctattaattccttcataacttttttcagaaacatccaattttaatttaatttatataattagatagcccaaagattaatggattttaaaaagttagggtcaaaattgttgagtctaaatttttgattaagctaagttatgctttattattaagcaaataaaaataataaattaaatattacaaacattgaacatacttttgtcacttcgtcctagcaccaagtcaattgacggaaaaactggcctaataataaagttgatttttttttgtaaaatttttaggttattgaacgattaaacgaaatcgtcaaagatcctcataacttcgcagaattgaccgaaaatgaccttttggtgaatgcgctagtcacttttagttttcccaaattgcgtcacattttcaaaaaatacgaagaaaaatatggggaaaaaattgaagagcaggtggacaacgcttacatcaaagaattcaaacatttatcaaaaaaccgaataaagaatctacttaaactggaccttcatgtcgagcaacatttttgggtaattattttttgtgttaaattttttgatagatgcattatgtatttgtttagcaatttttcaaaattttattcctttcgctttttagctttttctcaaaaacttttttgtttgttctgaattcggaaaaattttcacattgcaaaaaatccttgagtctgagccggacgaaataattaaatttagcaaacattgaacgcaatcttaacggatattcaatatggtcgcccatatttttttgcacaattattgaaagaaaagcttgacaaattgcgaggaaacgaaaagtgggcctcagcggacgcgctgaaagacgtgacgcgaattttgctcactcgcgcacccatcgatttggccgacattgaccaggaatttcagggattgagtggcagcttgaccataagaatttcgatttcggcttacatcgagcaaattctcggattcgaaaaagagaaaaagcaaaaaaagggaaatgtttttcgaagcttttccatacgttcaaaatcgcacgaagacattggcaccgccgttagtagcgaatccaatacggcagcagcaaaaggaaagccatcgcagaaaattgaaactttgaaggcattcaaagaaattgtcgattgggcaacggagcagcgaaggctgagtttggcgagaaatggcaacagcggggtactgtga

SEQ ID NO: 79099 - DNA, 669 bp, Heterodera glycines
atggccgggaccgggatcgggacttggaaaatgaaccgggacgggatcccgggaccgggactcccgtttttccgggactcccggtcccggtggtttgtccaaaaaagccgggaccgggagtcccggcaaaatcccggtcccgtccgggctctaattatcatatttaaaattgtaatttaatgcatattttttttgctgtatgttaaattttagatttttcatcaatgaaaaattactaattcttataattatttatgcgtttttcattttatagtgttttttaaggaaaacctcactgtttccgtttctaatctgtaacgagccaaaattgtaagtcggataactaagttctatatagcttatcagtaacagtaaataacaattttcgtgggattttttaataagttaagtattatgcactttagtaattttttcatttttagttcagtgcaagggatcatttctcgcttgcgtgtctatgtttttcgtgttcttgtgctgacaaatgagcatgtatgaaaaaataacctctttattttttgcaaaactttttaatttcatacttcattttataattataattatttttggtttggcctttatatgcaacaagattttaacgatatggttgcatattacactgcagcaattatttgtttgagcttttga

SEQ ID NO: 79100 - DNA, 664 bp, Heterodera glycines
caccgaaaagtttttggaattttgctgtcgcttttttgggcggttactcggcatttcgactagccaattccctctggtattactcgcaatcgtactcgacggatcaccaccaattttacgacagtctcccgtgcgctctctcttacaaagtaccaaattattattaataattcgttttttgattgtttgacttttccccccaggtgcctttctattgtgcccttctgttcgagctgttcggctcctttttcctccgttttctcctccaccgtttccccctctcttcccggcatttcttcgctccgccgacaatcgccgctttcctttccttcggtgcctttccttctcttttttcctccctttttattcattttccttttcagcactcactttcatcggtgttcctggccttaatcccgtggtcacttcctcgaggcttcaaggtttagtaaacaaaaaacgtttcattaaattgtcgtcatttttgcacattttgtcaggttgtcccggcttggacttgcaatggttcattgtgcgttctttccgtcctcaacgcttttgacgtttcattttgcattttcagatgacttattggtgttgtccggtggtcggttggcttttggcctcaaaattggacaaaacgccgacaaaacagaagaaaaaa

SEQ ID NO: 79101 - DNA, 1242 bp, Heterodera glycines
tcaactgaggaggaaagaattgcaaatgtccattttgaccttgaagtggtcaattcggattttattcgaccgatgcgaatgaactttcgccggagggggcgcgacttatactggtgcgaaaaacggcttagatcatgcgtttttagagggagaagtttttaaatgaatgaagtgcttgcccatttctagggacatggcgcttgggcacgacagtgtcggtaagccgttcgtcccattagtgtttcttccgttcgtttctgttttcattgccttttgtcccaattagccgcactcattttccacaccgaaaggaagcagttgctgttcgtcaagcagttcagaccacgtaaatttaattgctagatgccctcttttgacctttccccttattactttagctgttttcgttaacgtcgtccggtcactgcccgaaaacaaaaacaaatctctcgccgaagtccgctgggagaattatccgattgaaaatggatgcaccgtcgaattgtgcgccggacttatggacgaaccgggcaaaacgccgttagagcatatgaaaaaggaaatactggaagaatgcggttatcgagtggacgagtcgaacatccgcccgattcggcgttatgtgacgggcatttcgctgtcgggcgcaattcaacatttgttttacgttgagttggacgagtcgatgtgggaaccgaaggctggcggagggaatgagcacgagggcgaattcatccaaaatgttttcatggacatcggagaagccgaagcacttttggagaaggaaaatttggtgggaagtttttcaataaaaatatttatgagccaacaaaacacattttattatttgaatggattaaggtttcaccgtcttcgttccttttcgccatcagttggtgggtgctcaatgagaaggaacgtttgctcaaaaatgtgaaatgaaaagcgagcgaccaattccttttgtttttgcgggccatttttgtgcgatatttccaattaccttttttcgtcaaattatccaaccaaacggttcattatttatttaaaaatttgttttcaataaactcaaaaattaaaaagtaattttaaagtttgaaaggccttaactttcttttcaaatcttcagaattttatatgaaaaaatcgggtaaaaaataggattttggaaaaacaaaacaaagtgattaatccgctggagagggtgagtcatccatccgttttgtctctctttctctctct

SEQ ID NO: 79102 - DNA, 831 bp, Heterodera glycines
atgaattaccctactgatttttcttggcttcccgtcaacaattgtgtttgtcctgtgaaggacaatttatgttatcactttcccggctacaaaaagccggttatttgtgcccataaactggtgcaaaacattaccgcattcctttcaactccccctcacattcctaatggtattttttctgtttgtttatgatttaatttttcaaacaattttccagaatcggcacctgcgtctctttcctcgggctccgtgttgatgctgcttactgtgctccaaattttcatcattttgcttacggtgagtaaaaattgtttatcattaaatttaaaaatattttaatttctttaaggtggctttatgctgctgtttgatcgtttttgccgcgcgaggccgaacttatgcggtgaatggtcgccgccgttccattcgacgccgcgctgccgctgcgactttgagcgccttccaggcgcgcacttcgggtgggaattttaaaattgttataataaaaatattcattatattcggggaagggatgaatttcaaattaaaaaaaaattcttccattttcagcgcttggtcttggcaccgctggtccattggcgattccaaaccgccccgcagggtgcacttctcatcgtgtgccgggtagtgtggcatttcacatttattttttttgttttaattttcattcattatttaggctgaatggtgtcagctggtcaacgaaagaatgatgtgtgaagaaaaggcggataaaatttaaaaaaaaggaagatcgaataatatttttcttttttttattctcttcattttttccaaataacaatttaa

SEQ ID NO: 79103 - DNA, 5440 bp, Heterodera glycines
tctcggaaccgatgggggaaaaccaaaagaagacatctcaaacaccagccgttgaaaagcagcaacaaccaccaccacaacaacaacaacaagaccaacaatcatcccctgtacaagagaagcccgtcacggcacccgctgtggaacagaacactgttgaagtgaagacggaagaagaaaagaaagatgatcttggtgacattgacaaaacactcgacgatttttttgcgagccttaaagccgcaaccaccagtatgtaaacgaaaacatatttaaatccttggaatttatttgagcaccatttcacttgatcacaataaaaaatgttaaattcacaagcgttttcaaataaagatatttgttttaaattgccctttgggttaattatttcggggccctcatcctctggtaaaacccaatttctactaaaatttattgccgagtcctccgagttaatctcacccagcccggtctccattctttattgctttggtgaaatgaactcagcggtgcccgtacttcaaaaagcgggggttgacgtttatgcgggagtcccgtcagaagaattgatcaaacgtttgcccaagcctcttttgttgatactgaatgacctcatgctctccatggacgagcgatacctgtcagatttgttcaccaaaaaatcccaccaccatcaatttgcggtagtttttgtcactcaaaatttgtttgagaaaaagctcaaagtggcgcgcctatcctcccagtacctggtactgatgcgagcacccaactctctgttgtccatcagaaatattggagtccaacttttcccgcgccagctcgacttctttctggatgcgtatcgccaagcgaccgaccgtccctacggctatttgctgatcgacatgcatgcatcgtcggacccatcgttgcgtctgcgcacaaacatatttaaggaagagcaggaggaagacgaaggcattgttgtgttcattcccaaaaatggaggaccttagtcaacaacagcaacagataaaaataggacagctaataaaagacaactcggactggctgtgtgctttggcgaggaccaaatcctctaaaaagtgtaggaagattttacgtcacgcgaacagcgatcagctattagcgctagtggaaatttgtctgaatctcgtcgcttcacgtttccgattgactacacgacagaaaaaaagattgatgccctatgttgagactgtgcgaaggatgagcagagcgagaagtgaacgcggcgcgagacgtgtgcttgttcagaaaggatcgggatttggggggttgtttgctgccctcctaacacccgtgttaattgaagtagcgaaatcgtttgtgaccaaaaacgcataaataccccacaatttgttgttcacgctcacatttttgcaaaatggctaataaatttttgcttgttccacaagaaatttaccgagggctaacctcagcgtcggatacgggagtcattaatttggatgcggtaaggcatgacctggagcgtgccaggcgtgaacggactaatccgacaacaaaaaatgtccggtacaatcaacagcttaggcgttatctgcaaatgagaagggagcttgccgatagacctaccaaagttgagttaaccaagggcttgagtgttttgctcaagcgagatgggggtgttgatgatgacgacggcgaagtcgtcaacactcagccacggcctcccgctccaccaccaccaccaccaccaccaccatctcctccacctcatcaataccaccgtcaccatcccagccctcccgatcagcaatcttcctcgtctgacgatagtcatccgcctcgcccccctcgtccaccacgtcctcagagaacaaagaaaaaccatcaatcttctataaaacatggtcggttgaaccaatggaagcaaaggcgtcgtgacttgcaacaacaaccggtagtacgtgatctactcgctgaggcagcagctgctcctttacctgaaagtgacgatgacgatgaacaaatgctggaaggtgggtatctgctgccaacaccatcacaaaattatggagacatgccaatattgcctgactatgcagatgaaattgaggaaatggacaccgcccaacaaagacttgcaagcagaagaaagattaaaggagaggagggaatagataaaaacaaaaaatacaaaatttactattctcctccaccatctcccacactaccacccgtgtacaaacgaccagaccatccccctcctccgcctcgttctatacccaaagttgaactgaaaagggatccacaaccaacaaagttgaaaaaatccgcctcgccaccgcctccaccattgcctccacatcgcgcaaagagagaaccaaaaatagagctcgcccctcctccacctcctcgcaatgtctccaaaagggaaccgaaaattgaactagctcctcctcctcctcctcctcgtcacttcgccaaaaaggaaccaaaatttgaagttgacccacgaccatccacatcgaagcaagccgggtacttcccgcccccgaaaatcaaaaccgagccaaaacatgagttacaacctacaaagaggccagtgccataccgtatcccgaagaaagagccaaaaattgaagaaaagccattacagcagcagcaacaacaacctcctcctcctccagctgttgtcgtcgaagaaatgccctatattcctccgcctaggagggggaccaaacgcacctacccccagaatgatgatgatgaggtgcacataagaaaacgagtgaggcaaccgagaagggtaagagtacagtactcgcccgagccagggccatcaacatctgcacaaagtgaagaagaacgacaacaacaacgtcaactgtttgctattccgtcaaatcaactgaccatgacacagagaatagaacgattatatctcaaatgtaaccattatgccgatcgtatgggtgttcgggtgaatacaattaacaccgccaacggcaagccgttggcgcatagcaatttacgaatggccatcaagtatataatagaccgaagagcgggccgtcccaccattaaaccaccgggagcagacctattggagcagcggcttaggcgggatccaattttgtattcatggacggctccaccaaagagaccatcacagagcaaaaccacccggacggcacgggcaatcaagaaggagtttcgcccgaaaaaatggagctgatcaacaccactcttgacaaaatgtacaatgacccatcctccccagcggcgtttgcaggtgttacagcactgtggaaagaagcgcggaaaaagattaagcatttacgaaaagaagaagtgcagagatatttggagggacatcgcacctatacattgatgcgcccccgcagggtgcggtttccaagagcaaaaactatagctgctggattcatgaccgatgtccaggtggatttggctgattttcaagccctttctcgtcataatggaggccaccggtatctgctcgtggcggttgatgtcctgtcaaaacgtttgtttgtcgtcccactgaaaaataagagagccgaggagatgctggaggcattcaaggagcttattgagcaaatgcccatggccccccatcgaatattctccgacaaaggcactgaattcaaaaacaaactggtcaaagaattctttgaggagcacgagattgcgaagcacgagcccgtgcattcatcagtgaaagcctcagttgctgagcgagccatcagaaatgttaagcagcgactatacagatattttgcagaaaagcagactctcaactgggtggatactgtacagcaaattgttgatggaattaacagtgcaccgtctcgtgttcacgggatgcgaccaattgatgtcaattttcggaatgctcaaaaggtgtggaaacgaatgtatggacaacaattacttaaaatttcacaaaggcgagcaccacgtttccgtaaaaatgaatttgtgcgcatgagcagagagaaggggcagttcgagaaggggtacctgcccaattacggcgatgaaattcttgaggttgaccaagtgttgaaggcagtgcgtccaattcggtacaaacttcgtgatgatcgcggcgaaaagttcaggggcactttttatgagcaggagttggcacgcgtacgtaaggatgatgagacaagctaccgaatagagaaggtcttcaggaagagaagaaaacccgatggttcagttgagatacttgtaaaattcataggctatcccgagagggaatggatcgatgaatctcagcttgtataaaagcattcagtttgttcattattttttacatttggataaatctttttctaatgacatcaaatagcttctttgtgtttttgccaagtaatgtatcggattaccccgacaatcaaccgaacaaatatagggtacgtcttccaaaacctctacattttagtgggtcgtgggtttgtgggttgcatagcatcagctatccctactcatggcactctacaattggtaccttggatgaccaatggattgacattcatttcaccaatctccattccgttgatgaggaccgacagcgtgtcatcagagtacctgtcccacaggcgtcgcacaaaaaagttgagcaactcagggattttttacaagcaacattgaagagtcaagaaaaagtcagacttaagccgcttgcgcatgaagaagggtacttcgataaaccggtagtgctcggctcgcctccacacgccaagcgcctcaagagatcaacaattgatgatctctcttcactgccctctccccccgagatatgatgagacagatgagcaacaatcacagcagcagcagcctcagtctccccccagattcgatgagacagagaaagaggataaaaaagtcaaagaaacaacccctccttctgccgctaagcaaccgataccgccggctccaacacttgctcctccttcacatcctccaactgaagcgccaaaggcaccaaaacaggcagctccaaaatctgctacagtacctccccaaaagccaagtgtgacacctgctacaaccaaaacttccccggctcccgctcccattccacccattaagcaagctccatcggccccgaagccttctccgtccaaaacagcggctgtgccgaagccaactccaacacccactccagcatctaaatcaactattccgactcctgcttcatcgaccaaggcgcagaatatccctaaaataccaccacctctggcagctaaaccaaaggagccaaatgtcgcaaagaagtccactgtaccaactaccgtatctacaacatctatttctaaattaacttctcagatcgaatcatcaccaacaacaccgaaaccaccgccgcctcctattaagcctattcctacttcaattccggcaccatcaccgcccccaaaga

SEQ ID NO: 79104 - DNA, 448 bp, Heterodera glycines
atgtcctccccaagcaaattctctccgacaaaaagctcccccgtcaaaaaggagaacaatgttggaaaagctgaatttgttgttccttccttgaaagcgcccacccgtaagcagccgtcaaaaaatgtgggaatgaatggtggtgaggagcagcagccgtcaatgaaaaagcgaaaagtcgaggaccgagacctgtggaaactcgccaaaggaaaatacatgctgggcttctacctctgcgttggtgaataactatttattttttgttgttaaatatttataaatctcagatgattggaacaaattgtacaacaacaagcagagggtgttgcgcaaggatgatggccgtttcgctgtcaattttgaactgtgcgaagaatgcgctctggccaatgttcgcgcaaccgacattttggcgccgccgaaagcaaagaagcgcatcgaataa

SEQ ID NO: 79105 - DNA, 1058 bp, Heterodera glycines
atgatctcctacatgatcaacgaggccggctttctgattgtcaaccgcgagattgtcgctgcggacattgacgacttcgagttcacgcctcggcccgaattccggggcgaattccgcgtgttcaacgagcccaacgagtgcgcgctgctcacccgcttctttgaccatttgctgcgcgtgcggccgcacattatggccacgtacaacggcgacttctttgactggtgagcgtttgtggtggattcattcatcatccccatggggggggggggggtgtttttttcattcgctccctaatttttcaattagaaaaaaaacaattattggatccatgtttcattgtgatgcaccactgcgtttccctcatccaccacgaaaattattattttttccttttcaaatagaaattttaaaaattttcaaagaagaaacttttgcaaaaaaaatttggtaatttgtcgtgtcgtaaaattttaaaaatagcagaattaaaaaaatatatttcatataaaaaattattttatttttttaaatttataaattgtgttgtggagcggcttcgaacctacacccattattgtttttaaaaatctaagtttggtgtcacattttcttgaattggaaaactttttatcggttttggatttggcgccggtgtcgcattttcagggagccccattcagcagagagctcccaattgtttttttttcgaaattccaaatttttggacagatagagagtataataaaacagttcctatttgggcgtttattgaaaaacgaaaatcccaacaaattttcaaatgtaaaaaaatatgaaaatccctgcaaattttcaaggccctttgtggagacgcgtgccgccgccgtgctgccgcccgcctcgcagcggatgagcgcccacctgggctttggccgggacgcgcaggacgagtacaaacaccccaactgcgtgcacatggacgtgttccgctgggtgcaacgggacagttatttgccgatgggctcccagtcgttgaaggctgcaacgcgggagaagttgcgatacgagccggtgga

SEQ ID NO: 79106 - DNA, 856 bp, Heterodera glycines
acatttcttcttcttcttcttcaccacactccaaccaacgaaccgcttcagtgcgcaacgcaacgcaatggccacttacctattcatcgctgctgctgccttcggagcaggaattgtaatgctgcgctttcttcattttttcaatttgcatttcataacatttttgtccttttcagtactgttggaaggcgtacctcggcccgatgctcgaccaaccgaagagcgacgacgaggagaagcccaagccggaaggaggcgaagaagcgacgaccgccggcgacaaggaggagaagaaggctggcagcaagggcgacaagcacaagaagaaggacaagaagggcgaaggcgcagcagcagcagcaccagcggcggacaaaaaggaggagaagcgcaaagacaaacaccgatcgaaggaggcggggaagagcgacgacagcaaagcgggcaagaaggacaagcacgggaagaaggacaagaagggcaagaagaaggacaccgccgatgcatccaccgtggacgaagcgctgggagaacagagcacagcggagacgagccaagcagaggaatagccaggccctgctgcgtgcaaatgacagtgttcgacgacgacgtctcgcgacaccaacacacccgtcccttgctttcgaccattcccttcccatccgattgctgtgttttgtctgttccaatgcttcttaaatgttccccttgtgaacagtgatccttccttatgtggcctgaatatgtatatattgtatacccattaatatattgtgcttcgcttgttcgatatttgtgaaatctcattcatattcatcgtcattgtatttatatgcacatttgatatattaataaa

SEQ ID NO: 79107 - DNA, 1689 bp, Heterodera glycines
atgcctgctgaaacagccaattctaattcgaacgttaattcttctgaaacagcaaataataacgcaatttcaactcatatgcttcgcgagaaaaacagcgacgaggcaatggtaagggaaattgtctaattggacaaatgctattctcccacccctcttctgatttaaaggaagttgaccagcaaatcgtgactgatactgccgacattttgcagtctgtgctcgaattcgcttttggcgtttcaatcgacgacaacaatggcattgcacaggaattctcctcatctcccgaattgcttttacaactgcaggattctgtgcgcacaattcttccgtctttaaattccgacgactctttggctttgtaatgaatgatccattcgtttatctgctttcatttggtgttttgtttcagtggtcaaaatgaattccaaccggactttgaccgcttcttcgccttccctgaggcttatttggaagttgccgtcgagtttctcactttgctcgtcaggtatttgcttggattttattttcgactttttactttttccatttagcaagtccaaaatgagtcggattttcctaaagaacttgtccgactttccgaagcaagttcttcatttgcttctcaacttggagagcataaagaaccctttcattggttcaaaggtaaaacccccgcttcccttttctgaacattttgctctgttcctctgattttttcaggtcgtcgatttgcttttcatgctgtgccctttggttaaccatgatgcatccgtcttttaccgtcaaattgtcagtgattctcttgctgttgaaggactgttcccatccctcgtcaaattttattcggccgttgaaacaactggtccgattttcttttttcttctcctttatgctcccaaaaccttaggttcacacactgaatttttcgacaagtttaacatcagaaggaacattcaagtcattttcaaatgcatgtggagtgatttgtcgcatcgcgacagaatggtccaatacgccgggtgttttttctgttttgtttatttttttaaatttcccattcagtgaattttctccgaattttgttcgtttcatcaacatggtgctcaacgacacaacttttctcctcgacgaatcgcttgacaaattgaaaatgatccaagacattgaatccgttatgagcaatgagaccgaatgggacaaactcagtcaggaggagcagcagctgaagacggaccaactcagagactcgaagggacaagtcaaaatgtggatccaactcggcactgacaccatggaactattcgttacgctgaccagcgacgcgccgcaaatatttcgcaacgaagcgcttggggaaagagttgcggcgatgctcaaccacaacctcgtccaggtgggcttgagggggagggaagggaaaagccaaaaaaaaagaaagaaagcccaaacaatgcacggcttttatagttgtgtggaccgaaatgtgcgcaactgaaagtgcacgacgcaataaatcgcttcgaatgggacccgcgcacattgacacagcaaattgtgaaggtctacatcaatttgggctcggaaatgttcgccaagcaaattgcgcaggatgaggtgacctatttcagacttatttatttgccgggacgcaatcccccaaaaaaggaaaagatgaatttttaa

SEQ ID NO: 79108 - DNA, 880 bp, Heterodera glycines
atggcgctcttcctttatgtctctctctttctctcttcgctggatttcgcgcttcgtttactcttcctttatctctcgggctccggttctctcgctcgtctctttcctatctctctgtctgggtctctctctctcggctcactctctcctctctttcctatgtctctttttctctggtctctccatttctctcttcctttatctctctctctttctctcttctctgtctgactttatctctcttccctctctccttctctctaaaaatattttctttaaaattttaaaatttcagttcttgtctgccaaatcaattatgggctccttttactttcctatcggacgaactttcccaatggacctgagcagtcatttttacattacccatcctttgtctatcttccatattcagtatacagaaaaaccccagtcttatggacatcctgaaaacccgaaatttacccaaaaaatgggaaaattcagacaaaattccacgaacctaaaactttcagaaaaaaagatagactcctacattcgcaattttacagaattcttgcaattttcgggttttcagggtcacaatgaaggagtgatcggaccaaattgggtttacaatttttgtatgactttttaatcttatccatttactgagtgtactgtatggcttttcatcatactgtaaattggattatcattctgggtttaaaataatcaattaacaattaattactagggctcgaaattgtatgattaacataattttttgcgcatatgctatgaagaaaggggctcaaaaatggcatttctgcgttaaaattttttgatttcgtgaaggtttttagtccataaaaatccatttttgggggtttttgggaataaa

SEQ ID NO: 79109 - DNA, 1509 bp, Heterodera glycines
atgctagaactcaaaactattgttaaagcatataaaaacgatgagaaaaaaaaggatgccgtccgtcgcatttacactggtaaaaaaaaaacaaaaaattcattttttttttgggtttttctgagcccatatccaggacttaaaaacctcacaaaaaaaaaaaattattttcagttattgtaaattatggcgaacatttgtcatccgtgccaccaggggcccgtcaatttgaagagctcaatgccaatattgaggacgaaaattttgtaagttgaaagaagaatgcttgaataatatcagatcattttcaaaaataataaaaagtatttaaaaaattaattggattaatcaattaattttatgttctttgagcgagccatttttcaaatttgtcgtcagggaggggcaatgaatgctttaataatcattgagagtaaaatcttaaaggaattccattgattttaaagcaatttttttttgacaaataaaaattgaaaaattattgacttataaggggacctaaagataacttctgcaaatttttgaaaacaacaatctatcgggcggctaatttaatgttatacagtaattggaatttttggcattaaaaaattggatgaaatttttaacatttttttaaattatcattattttaatttattattatttgaggtcgagactgtgctttttgagtgccaagcactcgtcagtcgttactctgattgtggtttcgcggatgaggatgatgcggatttgaatagcttactgcattgtaagtcaccactattattctcaagtttttttttttaattttcaattttttgaccaggtcttacaacgttggtctattatcatgacagggactgaatgtttacttgtatgatggatggctcgaattcatgttcctatgacattaagccagggctcgcaaatgtcctttttctaagatttgtcctttttggaggggccggatcttggcctttttctattttcttattttcaggcttcccctaacaaaaaatcgcgccgcaaaaaaaaacacttttattgaatttttatttggaataattttcctaaatgctaatttttgacaccaaataatgatttttttttaattggccaaatgccgcttttgaaaaatttcagttggtagccatgtttttaattgtatctacaatgtaaaaagccgtttttaaaaaaatcttattttggggtcaaaatcatagttttaacctcgtttgtccttattttgaagaaaaaaaaacttgcgagccctgcattaagcagatgcattcatgtctttatgtaaaagataagacaaatgttttttatttaaaaaaattttttaatccgataaattcttttttatttttctttgaaaaacttgaatttttttttaattgcgattttcaattagttacatatttttacaaaacttgatactctttttttcaataatgatcagaaccgcacaaaaattgatttggaaattccacgtcaaagaataaa

SEQ ID NO: 79110 - DNA, 226 bp, Heterodera glycines
ttttaaaatttcgaaaattttgaaaatttttcgagctaggcctaaaaaacggttttcgggtttttgaattttaggattttttaacgatttttcccagagaaacggagaccacttccaaaacatagtttttcgagctctatcgactggtatttttttcggaaaaatttcgattttttcccggaaatagaaaaaatttttggcctgagcgggacatttgagtccctgg

SEQ ID NO: 79111 - DNA, 1085 bp, Heterodera glycines
atgtcggaggccgggtaccccgatcgggtaagattaaaattttattttaacgaaaagaatctcaaggcatcccagccagggctgcacgcaattggatttgcagttacggaaatccgtaagtacggcgattttctcagttactgaaattcgtaatccgtaattacgggggtccaaaaaccccgtaatttcccgtaatccgtaatccgtaattttcaaaagtcaatttttgtcagaattttagaaaattttttcaaagtaaattaataaaaatccaaaacaaattttcgggatgcattttctttattttatatttcaattttacaaagaaattataattttatgtctgaaaaaattcattctttttgaatttttagggttcattttggaaaagtttttgaaagtctgataatataattgtatttatgtataaagttatttcaacattgataagaaccactagccagaaaaaatttcaggggggagagaacccaaagaatttttttggcctaaatttttttgtgttatttaaaaaatttcagagccggagagcaaaaacaggaattgtagccgtttttagccaaaaaggctaattaattttttcaaaagtgacaatttttcctggtaaaatttataatttttgatttccccgttcggcttctcactgcgctattttttatataaggtagcaattatgttaaaatttcaactcgatcgtttcacggtaaagaaaaagttacgaaaaaggagcaaaaaaagaagtaaatcaaaagaaaatatttttccttttttaaattttcctggtttatctcttgatgttttagatttttttaagttatttttttgttatttttattaattaatttatacactagcctagatagtgaaggtgctgctgtccaacccaaactaatggtcgagagaacgaggaaaagagggaaatagaattggggaaaggatgaaagagccaaagacccgggcccagggtggttggcctccccaaaatcagtcccaggaatgcgcattcgattggtgactcaatgagtggaggaaaagacaagagggagcagtactttattggccatgaa

SEQ ID NO: 79112 - DNA, 1106 bp, Heterodera glycines
atgctaatcgcaccgcctcctgtaaaaatactctattgttattccgagatgaacgattctgtgatcgggttaatgaaacaaggaattgagacacataatggggtaccgacccaaacgttggttcaaagtatgcccaaacccttacttttaatcctggacgacctgatgttgagtgtaaataacgattttttggatttattgttcacccgaggcttccataactgggatgtaagtgtgatttttgtaaaacaaagtctctacggacgcaatattcgtaccgcaagagccaacagccattatttggttttaacccggaatccttctggtcaacttcaggtcagaacggtgggttctcaattgtttccgaagaggctaaactattttatggaggcatacaacgatgcaaccagcgaaccattcagctatttggttatatatgcatcctaatgcgcccgagtctgaacgtttaacaactaaaatcttcccggatgaacagcgtgaggtgtaactaccaattgaataaagaaagggtataaaaggttgagaaaatctgtaattttcactacaaatgtatgaattcagtccatatataagtgaaaacgcagaattttaaaaaaaaatcgcctccacgaaatcggaaaaaaagaaaaacatccttctgcgagacacaacagccgaacaaatattaggacttgttgaaatttgtgcaaacatattaaaattcaatttcagcctaagcagaagccaaaggaaacgcttggccgaatacgcggactattatcgtgcaattgcacgctcgcgtagcgaaaagactgcgagaaaaatgctacaacagggaagtggtatagcattaggggcaatattagtgcctattcttggcgcactagctcaacacctggtcgaaaaaattacagcctaaaaggcgggagctaccaatgaaatatacaaaaaagatggtaccagagagcgagtatttggccctcattaatctacttaaagggagcagcggcgtatttcctcctctaaccgacgcgttacagggcgagaaaacgttgcttgatgtacagattcaaaagaatttggctgatccaaaaaataacgctgaa

SEQ ID NO: 79113 - DNA, 1213 bp, Heterodera glycines
  unsure (1)..(1213): unsure at all n locations
atgaaacgtcgtcgcagtgatccgttgcattcgcttggccggacgagggaattgtcgccacttccgttggacgaattttgtcgacgtccgcgcgaattcgaacggaaaaaggcgaattcaaagacaccaatgctcgggcggaaaattatgagcggacaattgcttaacggagcagcggaaaggcgggcgcggacgaaggacaaagggtcggtcggtcatttgcgttcgtttccgttgcgacggcacttttccccgccggcgtctgtcagcgttttctgttcggcttttgcagtgcgcatctctttcgtcaaacggatgaatcgcatttggctgatgctctgtgcggctccgagacgcccctccgcgtccacgtctacgacccgtactgtccggtgcacggctcgcggaggcgaatgccgcgacatggcgaacgcgtgccgaagcgattggtggacatgcactcatttttggcctcagtggacacgacggatgaagacgtggacgaaaagttgaacccgtacctgggcaggtgctttttgccaaactcattctggctgatttcacaatttcagtcaagcaattttggcgaaacaatttcggaaagagcgcagggccatcctccgcgagacggaggggcccaaactgaaggcgatgaagtggaggatccgcactgatctgttggtctgaaatagcacaccttcttatgcgcctttaatcgctcattttatgtcctctctttggcatttctcttccttttcaccggcttcaacggcctgcaaactcttcagacggccgtcaacggcgacatgggtgccgactcactttggtcagtccgccgtgcctcggcggcactttctgttccgctttcagtgtgctttacctctctttggccgtttcctctctatttgtgccgccgtttgtgctcaatcggctcggctgcaagcgtactttggtgctgagcattggcattcacgtgctttacttcgctgccaatttcatcccccggtcttcgccttcccatttatcttccatttggtcaaaatgtcctcccttcccctttcagttattactcgttgatccccacttccatcatcgctggaatggctgcaagttgcatttgngcatcaaaatgtgtgtacatcaccgaaagtgccataaaatacgccaagctgaacgtggagtccaccggagtggtcatcccanggcattttcc

SEQ ID NO: 79114 - DNA, 535 bp, Heterodera glycines
atgcgcgccttttggcgtttagcattggtgcagaaacggctgtccgattatttcaatgcgatttgcgaattcaacgggaaaaagtaagttttggatgggaatgatgcgtttcaaaggccgtgaggaatgtcaaagcaaaatgaacgaacaaagatcactttctttgattttagccacaataaaccatccgccaaagacaaacatttgtaaaaccttaatttattctcaaatgacatttattgcttgaataattagggaccattaaattttgggcatttcggtccggtatggagaattggagaagttgtctgatcaattctgctttactctgaacaaattccgcatttttagccctttttacgaacattgggccttcatgcgctgcgacagttgttgtgcttttttggccggctctcttttggctttgaatgctttcgatttcgatttgtccattgaaaatgaccatttggaagtataatctttctttttccgtctcaattactgctaatgacactttttttcatttgaggagcaa

SEQ ID NO: 79115 - DNA, 1580 bp, Heterodera glycines
atgaaaaagttcacggaggatctctacgagaaattgaaaacagctgagagtcgggtgagacggcttaaaagcgacatttgtcagctcaacgaattacacgaaaaggtggtcaaacttgttctggctcataataaagattatcatttggcacaattcctatcattttttatttattttgtttaaactttttgggtacaaatcctttggacaatttaatggactgaagagggcatttttacccacttttagtgctaatacaaacatcaaaaatgggaattggaaaattattgatcataaccaccagagccaaaaacaacaaaaccaattttatagattttcttaggtgctctaaaccgataaaataaaaataaaagtgcgcaaagcgtttaattaatttttgctccgttttcgcgtgctcctttttgagtacagtctgttaataaattatagcgccaagatttttttttgctactccacctacttcccatggaccaatcggtctgaaatttttaccacacataccctcccataaatattaagaacacacaaaaaatctaaaagtgtaaaaaaaaatttatgaattttttccgaaatttgccccaaaatttgctgttaataaattatagcgccaaaacttcgaagacatataaattttttattagggtaagaaaaaatctgaaaaaattcatttccatataactttttgtgctgatcaaaaaattcaattgtaccaacgtgatcagatcactccttcatggtgatctgaaaacactaaaatagcttgaaaccttgaaattttcagaaaaaaattcctagggggttggagaaattttttcgtgaaaggcgaatacgacggatagaaagagcacaaattttcctaaaaaaaggcttcatatgatattagatcgattcgacctctgcttttagaattagctcaaagagctttagaacgttaccaaatttatgaggataaaaacattaaaaaaaataaaagtgtaaaactttttcattttcgagttttgaatcggttcaaaaaggtgtttggacgctttgctgcagaccttgttttcaatcattttcagcatctcagaaaacctacaaaagttgttttgggtgattttggctctgctgtgacaatatttattgggaatttgcctacaaaaggcacaattacagtacccaacctcttactgtctaattaaataaacttaattaattaatttttgctttgttaggaagtgaaggcgctgaatgcttctctttgtgcgcttcaacaaaacgaaggggaagccatggaagagaaagcgcatgagaaacgactgaaagaggagttggtggagaagacgaagcagtacatggaagtaggggagaagagaaaatggaaaggactattggccataggtgatgagtgcagtgaaaaggaagcagcaggaagtgagcgaagaacgcgaacagaacgccacactgaggagacgcgtcgcggagcaagaggcacgcgcagagacaatggccaagacggagaaagtcaggcagagaaagagggaaaggcaccgaccgatcgatcaattgctaattgttaa

SEQ ID NO: 79116 - DNA, 2862 bp, Heterodera glycines
atgatgcaagccgaggcgcagcagctgttcccgccggcactcgccttcaccgcatccaatgagcaaattgagaaaattgagccgactaaccgtggcggtcagcataattataattaattaatgcacaattagcttttttgcgaatctcttgtttcttcttatcctagaatttttctgagaatttcataaaaaaatatctgaaaaagaaattttccagaaaaaaccgaaaatttcattttttttatagtttgaatgtgaaaatcttagctttaagtaaatttgtttgatagttatatatttgtaaaattaatttagaaaatttgaatatattttttttgccaattgtcatttaagaatgctttgtgtctatgtaatttggcaaccaaattataattattttaattaattctatatttatgaacccctaaatctccttcagttttggacttttcgttggctgcccgtggccaaccgttgccccgccgttacaccgtcccatgccaatttccaaaattctgggctgtcgtcatcgtccaatgcgctgtttccaaggaccaatgcaggtgagaaaacgattagtttgaatatacgtcgatgatttactgtatttggtcagatgtaagagatactgtaactttttttgagcggattaaacaaagcgatcaatcatcaactgtattctcgagtgcataacttttcttaaaagaaaaacttaagtgttcttggtatcattcggtagtttatagttagttctctaactgggtgtgcagttttgaaaaaattaagccttaaaaacatgatgaccaaaaaatttcataaaccagttttacatttctttataatatttttaaaaacatttttaaaaaagattaagttttaaatattgttaagtcttttcgaaaataagttttaaaatattaaatagtttttaaaaaattgtatatgtattctattatgttaaaaacatttacataagctatctaattgtgccaaaatataaaattttagcgtacttttaagtaaaattttgaatttatttttcccattttctgaccactttcgaaattattgaaaagataaatcacttaagaatgttctgcgaaagtttggtccggtgtgccaggtcgcgcggtgttcaaatggaattgccacagcggggcattgaccattttgatgacacgtcactgtgagttaagggtcaattcacggtcacagtttagggggcaaattccgttaatgattcacgcggaaattcaagtttcacgggctcaattccggtcgattcacatggcatttcacggtcactattcattgggaaaattcacgtcatatttcacgggatcatttcacggtcattattcatgggggcaattcacgtcacatttcacggtcactattcatgggggcaattcacgtcacatttcacggtcactattcatggggaaaattcacgtcatatttcacgggattatttcacgtcacatttcacggtcactattcatgggggcaattcacgtcacatttcacggtcactattcatgggggcaattcacgtcacatttcacggtcactattcatggggaaaattcacgtcatatttcacgggattatttcacgtcacatttcacggtcactattcatgggggcaattcacgtcacatttcacggtcactattcatggggaaaattcacgtcatatttcacgggatcatttcacggtcattattcatgggggcaattcacgtcacatttcacggtcactattcatgggggcaattcacgtcacatttcacggtcactattcatggggaaaattcacgtcatatttcacgggattatttcacgtcacattttatggggtcatttcacggtcacttttctcgggatcaattacggtcacgattcacggatttgctcagtcactgacaagactaaatttcttgtcgcctttatttaaaaaatgggcttttctaattgaatatgtgtttaataattttttaaacgcaaattaatagcatctttttccagtgagttcgtccgtgagcaattcggattttactcgaagcatcgtgtccgttttgttcttttcgttgcgcccggaaaggatgcgtcccatgccggtgatgtccaccatacgttcaaattgcaagaaattgaacatggtaagtgtttttctcttccttcttgtagtgatatgttcaagactcaaattcccgaaaatttaactcaaacaatagaggaagaaaatttcaattttgcgcgatgaaatttgaaattctttgcgggacggggatcccatggtcctcacaatttccattgaatgcgggattgcggactgggactccgtcccgcgccgggctcagaatgagtctataaaaacatgagactattctcgactcaatagaccgagagtcgtgaacattaccaccttcctacttcagttttctctctccctgctatctttttcactcttattcccctccattctctctctttttctctgccgtaattcatgtatcttcttttcctctctctcactctctctctctctttctctctctctctctttctctctatctctctctctctcacactctctcctactccattctttgactccccccattttcttctaaggaattgtgacccagcatgtttccccaaaaatcgtggacaaggccactggcccccggggtgccattatggttctggacaacatcatgctgaaaatgaatctgaaactgggcggcgctaattacgacatttgcacggcgcaggcattcaaacaggctaacggaatacgacacgacattgtgtaagtagtcattgatcagtcaggtgctaaacgattgcgttcctaca

SEQ ID NO: 79117 - DNA, 1039 bp, Heterodera glycines
cagcaaaacacttttttgactccaaaattctccattttgctgccgacgtttgttgcttattttctgtcatttttcatgatttttccgtattttcaggtacaacgaagctgaaaaccttcccatttgtctctggctgataatcaagtagaaaaaacaataaatttctaataatgatccccatttaaacattttataaatttttagatatttaaaggggctgagttatgaagtgattatcatcgatgacaacagtccagacggaacacaggtggtaaaaccaaattttattgtgtaatccgtttttattgataggaagtcgcaaaaagtttgcagaaagaatttggagcgggaagaattaaattgttgacgagggaaggcaaactcggattgggaagtgcctatgtttttgggtttgttttgactagctttttatgtgcccgaaagactcctccgatttgaggcttaaacaagcacagggcgaatttgtcattttgatggacgccgatttgtcccaccatccgaggcatattccggagatggtcactcttcaggagaagcatggctatgacattgtcacgggaacgcgttatgcgatgggcggcggagtgtccgggtgggactttagacggaaaatgatcagccgaggagccaactttttggcacaagtaaattccctggaaactttgagaatggaattcgttttataatttgtttttcagttccttcttcagccgggcgtctccgacttgactggttcgttccgtctctatcgaaagtccgttttgtcaaaactcgtcgtcgaatcagtgtcaaagggatacgtttttcaggtcttacaattaatccctcccttaattagttcttaattgtttcacatttcgttcagatggaaatgatgtttcgggcaaaaaagggcggcttttctatcggtgaggtgccaattgaatttgtcgaccgtttttacggggaatcaaagttgggaggacaagaaatcgttcagtatttgcatggattaatttatttatttgttgctgtttca

SEQ ID NO: 79118 - DNA, 519 bp, Heterodera glycines
atgcaattgagcaaaatttgtccactttggtccgctgccaaaaattgcaaatttgccaaggagacaaactcgcgctgcttcaatccattcagaatttatgtgcatttgtggagggaagggctgctgacgacgaaccaacacggaaagactgtgccaactcattatggtcggccggcacctctgttttatttttaaaaaataacaaaacaacccctaaaggtattcaaaattggccctgctcatttccgcagtcgaactttggtcatcacgagtcaaaagcgagcacattcagccgatatttcatgtaataattcagcaaaatattaacaaaacttacactatttacttttatagcaaatgaaaatcgattgttacagaaaaatcagcgaatttttgttggattcattggaaagggaagttttcggacattcaaaagaggtccaattgcaaaatattgtactcaaattgagtgcatttaattaatttagtgcgataatttgtccgttttggtcgcattaa

SEQ ID NO: 79119 - DNA, 849 bp, Heterodera glycines
tgaaattcgaaataaagaaagtcaatttccgagtgttccttctcggcggacaaagaagcgaacggaagaaatggatccattgttttgacgtaagagacggggaaaagagaaaaaaggaagtaataattgtttaacgaacagaatgtccatgcaattttatttgttgttgccatcagcgaattcgatcagaaattatacgaagacgacagaacggtagaaaagaaaccattcattgtcaattattacaataaaattgcaaaacgattctgccacatttcagaatcggatgatcgaaagtatgcgactgttccgatcggtgtgcaattcgcggtggttctatgaaacggccatcatcctttttctgaacaaaactgatctgttcatggagaaaataaaaaaaacatccatcggttgtctgttcaaaagttattgcggtaaatcaaagccaaattgaaatggcaattataaaaaaaaccctaaaggatcggactcttacgatgaccaaatccaatacatcgaagaaaagttcaaatcgctgaacacaaatccaaacaaagtgatttacatacacgaaacatgcgcaacagacacaaatcaggtcaaaatcaacagcaaaaacatcaaacaaaggaagaaaataatggaaaaagggggggggggggattagagagagagagaaaggggagagacagtgagaggagagagagaaagagggagagagaataaaatgtaatagattaattaagtgtattcttaagagaatctcaattcagttttcagattcaattaatcctggaaaatgttatcgacttgctgatacagaaaattctgcatgtgtacggtctttac

SEQ ID NO: 79120 - DNA, 266 bp, Heterodera glycines
gcgaaaatgctccacgcgtacacccaacggaaggaggacctgaagtacttcaaggagaacgacgtcatggccaaactgcgcccgaaaaactttgccagggatttgtcaatgggcgacttcaattacttcccctgggggtattccttcggagcgcactgatttctgcggagtacagaaaacgaaggtggacaacgcatttgcgatgccaagcacagattaggacaatgtttgttgaaatgtaccattgctattatattttgtgggaa

SEQ ID NO: 79121 - DNA, 455 bp, Heterodera glycines
atggtcattatgtttagcatcaatggtattttatgggtcagtttataaaatttagtattagcactgatgctaaacatatgacaatgactgtatgactttttttcattaaaaatctatatgcctttaatatgttatttattatctgtcaatattcatgacttccgaaaaaataaattttcatggattttcagagaacaaagaattaaatgataggaattttaataataaaattatgaaagtacataattacatactaattcaaaaaccaaataacaaaaaagcaagggcaattaaacatgattactgattattaatattaaattaaaacaattttaattgccaaatttataacaagtttaaaaaataagtaaaatatattagaattttactttaatatttagacctataaaaattttattttaaatcataaattaagaatttgtaattatatttaa

SEQ ID NO: 79122 - DNA, 1638 bp, Heterodera glycines
atgctgcaaaccaaaaccgaacaacttcccgtcactgcagacgagatcgcagaggcgacaccgaaagatgagattttaaagaaaattttggcattcacccaatcgaattggccaaagaaaagcagcgacccggacatcgcaccgtattttccgaaaagggaaaacattttggaaattgagggctgtttgctcttccaaaatcgcgttgtcatcccccaatcgcttcgcaaccgaatgctgaagtccctgcacatggcacatcccggaattgtgcgcatgaaagcactcgcccgccaacacgtctattggccgggcatggactcggaaattgaacggattgtccgtcagtgtgaagaatgccaaaaggcgcaaaaagcaccgatcaaggcaccgctcgccccttggactccaaccgacaaggtgttccaacgggtacacatcgattttgcgggaccatgccaagacggacatgtctacttcattttggtggactcattctccaaatggcctgaggtttaccaaatgaactcaatgacggccgcggcaaccgttttcacaatccgatcaatcatccaccgactcggcattccagacgaaatagtttcggataacggaactcaatttcgttcttccgaatttgcgtcactctgtaaggagttcggaattaagcacacttttacgccgccattccatccccaatgcaacggacaagtcgaacgtttcgtcgacactttcaaaagggcgatgatgaagtgcaaaggcgacaagaacagcctcgaaaaagtgctgctctcctacagatcaacgccaaattctgccatcgacggatattcgcctgatcagttgttccttggacggaaactccgcaccaaattggcacttgtccacccaaaaggacaaattgatcagtcggaaaaatttgaaaaaggtaagttcaaacagcatcaaaaggactactctgccaaaatggcacagcaattcgatcggaatcatggcacaaaagctattgagttcctcccaacggatcccgtcctgctcttgaattatcgtcttggaaaaagccattggcttccgggcacgattgtggaaaggctcaacaattcgcctacataccgtgtctacgttccaacactcggctgaattgtccatcggcatgccaaccagcttcagcgccgattggattttgaggacaattcaaattgggaaccccccattcaggaacaaatggtcaatgagccaaatcaaaggacaccgccacgccaaaacgcagcagccaatcaacggaccacacctgttgatgatcaggctcagcaaaaggctaaaagcccaatcggcgtccgacgttcacaacgcgtgccgaagccgatcaagcgattctcgccaggttgaaactgaggatgtttcaatctcgagaagggaggtgttggagaagagcaaagtacattttctcatggtcacttatcgattgacatttgtccattccctcctccgttcctcccacatcacatttgttatttaaaggcgtggactcttcccccctcgttcacttcttctcctgtcttcacttttattattttattcattctccatccatccattcgccattttattattttattgttatttgactcttcgtaa

SEQ ID NO: 79123 - DNA, 1522 bp, Heterodera glycines
atgccatccgattttaaaagtgccgttgtacgtcgtcagctgtcagtccaaagcaattccatttcacgagaggcatcaaatttgaaatcatttgacgaactttgtactgaggtacatacacaattcaacttttttgaattattatgccccagggcataaaaaatattgatgttgtggtgaggcgggctcgaacctccgccaccccctcttcccactttcttgcaaaacccactgacaaatgagctacagctttctgaattttgtggccaaaattaaatgtttaagtagaattgagcgggaccgggacctgaacacggacaactgagtaccgaagtcccgattttgaccgggactagtcccggtgttttcccgggttttcaacccgaataggtccccggttccgggtttgcccaaaattcccggtcccgctcaactctatgtttaagtaaagtaaaagtcaccttattttcttaatttttaggcggatttgcagcgcgtacgcaaagcttacgaagagaaactcaaaaaattcgaggaactcaaaaaaaccgctgcggatttggaagcgctcgatcaaaaatttgtttgtctaaaaaagaaaaaaatttgtggttttcagggtcgcagaacccatggctgacaatccatttcgaatcctgaaatcgaacaaaaattcaaaacccaaaaaacaagtctcgaaatttttttttaaatttttcttttttacgaaaatggggctaccatcgacaatatcaccgggttttctagtaaaaataaattcgtgtaccttattttttcaattttttagttggaattgcaacgcaatcgcaaatttggcgaagcggaaatcaaaagattcgaggaactcaaaaaaatcgctgcggatttggaagcgctcgaccaaaaacttgttctttggaaatatgccagtggttccttggtattcaaatttttaaataaaattctcttttctatggtaatttgtggcgctgattaacgagtatgaccttaatttttcagaataccgaacccctgatccgaacttgaacaaaattcgaaactaaaaattcaaggactttagcctaggcttacgcttaggcccaagcttaggcttcacggttttgttgcgtattttgaatttttgacgaaaaattaaatttcaaatttttgctagaatccctggtcatgggttcgtaataggctgaaatatgtgtgttaaaatcggattctccgaccttgaaaatttggaggccaaattgaaaggatgtataagagataatatgcatttttttctttattttttaggcggatttgcagcgcagtcgcaaagctgacgagcaggaacaaaaaatgaaaaggcgcgatcgaatcttttttatttatgtgtgttgctgtttcattatcgtttggtccattattgcctattatttatactgtattgcaacttcgattttccgtgctcagactccataaaatgcttataaatcatggacggtaaaaaagaaaaaaaagcggcaataaa

SEQ ID NO: 79124 - DNA, 625 bp, Heterodera glycines
atgctcttctcccgggtactgctcggcctcgctgttggctgtgcttctgccacagtgcctgtgttcctagccgagctggcgccatctgagaagcgtggccagatggtaactcggaatgagctgatgtgtgtgacgggacagcttatcgcctttctcagcaacgcaattcttggcaatgtttgggctgacaatttgcacatttggcgctggatgctcgttttggcaattgttccagcatttgtgcttcttttcggcacttgggcctttgttccggaaagcccacgatggcttatggcttcgaacctgcataatgaagcatttgaagtgctgaaaagcatcagaaccaacgaagaacaggcgaaagcagagcttgaagaggtgcagcaacttatagacgaggaccgcaaactgcaccaaaacgagacaattagtcaaataatttcagagaggtgcctcctctaattgccatctgagattccttttaaccctcgaagatgggcccgccaatgcctttttattggccttggcaccgcactgtgccaacaagtcactggggtcaatgcaattatgttctacgggacggaaattctgcagaagagtggcatgtccaacaaagctgcgctga

SEQ ID NO: 79125 - DNA, 1791 bp, Heterodera glycines
ttccttctcacttcccttttccaaaatgggtttgtttctttgacataaattttaatgtttttacttatcataattgcatcattttatacaaatgatccgacccaacattgttcttctgatcactgacgatcaggacattgaattgggttccatggcatttatgccgaagacattacgcctcctccagcaacgcgggacggagtttcggaacgcttttgtgtcgacgccaatttgttgtccaagcagaagcaccattctcaccggtctctacgcgcacaatcataaagtgatgaccaacaacggaaattgtgcaggcgaagaatggaggcaattagggggggggggggagagaatgacattggcaataaaattgagcagtccaatgctaaggtctgacttcgaaaaggacactttcgcggtgtacttggaaagaaccggcttcttgacgggctttttcggcaagtatttgaacaattacgacggaagttgggtgcctcccgggtggacgaaatgggccgcgttggtgcgcaacagtcgatattacaattactcgcttaacaaaaacggacacaatgaatggcacggaaatcgttacgaaaatgtcggtccggcgattctgcggaatgaaagagacgtttaggactacttgaccaacttggtggccaacctttcgctgcaattcatcgacgagtctgttttgctgaacccccacgggcagccattcctcgtcgtcctcagtttccccgctccccatgggccagaagacccagcaccgcaatttgccgaccttttcgaaggggtggaaacgcatcggtagggacgaaaagaaaccacagctaattgagcacaaaggactgattcgtggaactacgcgcccaacccggacaaacaatggctgctgaaaaggacggggaaaatggagccgattcacgtggcattcaccgaccaaaagcaccggcgaaggctgcaaacgctgcaaagtgttgacgatgccgtgaacagagtgccgctgggcattacaaggtcagggctaatgaccttcatttagctcgtccaacaccttcgcttccttaaccgactccacaacacttttattttgtacaccagcgaccatggctatcatttaggccaatttggacttgtcaagggcaaatccatgccgtacgaatttgacattcgcgtgccattacttatgcggggaccaggaataccacgcgggaaaatgtgtaaaatttgacgggaatttactgtaacacattttaatgttttgtagaattcgatccgttgtatccaacattgacattgctcccacaattttggacattgcggggctaaataatgccaaattggatggacgatcaatgctggaattagacgaaatcaatggcataaataggagaaaaaaaatggcatggcgtgaaacggtgcttattgaaagagggtaaaccaaaaaggagggggggggtaattggaaattttggaatttgcatttagtaaaatgccaaagttaaaacgaatcggagagagactgaagcaacagaaagaagggttgagcagaaagaagctgattcagagggaatgcgacaagtcaaagaggggcagcagcagaagcagcggaaagagttgtggcaaaagcaaaagggtcagaaaaaggagtcgctggcaatgtgccaaagacgcacacggaaaatggcacattattcgctgtcctctctcagaagaagaagacaaattatgtgaatgtgaagaggagagaaagagaggaaagagagagaaggacgcaagggatga

SEQ ID NO: 79126 - DNA, 1074 bp, Heterodera glycines
atggctatctcttttttggaacaaatttctagcgaacaaatgctcgcgagcaagagccgcggagcggtaagcaactgccagttaatttttcagagaatttccaaagttctcggttatgccagaaaaatggctatctcttttttggaacaaatttctagcgaacaaatgctcgcgagcaagagccgcggagcggtaagcaactgccagttaatttttcagagaatttccaaagttctcggttatgccagaaaaatggctatctcttttttggaacaaatttctagcgaacaaatgctcgcgagcaagagccgcggagcggtaagcaactgccagttaatttttcagagaatttccaaagttctcggttatgccagaaaaatggctatctcttttttggaacaaatttctagcgaacaaatgctcgcgagcaagagccgcggagcggtaagcaactgccagttaatttttcagagaatttccaaagttctcggttatgccagaaaaatggctatctcttttttggaacaaatttctagcgaacaaatgctcgcgagcaagagccgcggagcggtaagcaactgccagttaatttttcagagaatttccaaagttctcggttatgccagaaaaatggctatctcttttttggaacaaatttctagcgaacaaatgctcgcgagcaagagccgcggagcggtaagcaactgccagttaatttttcagagaatttccaaagttctcggttatgccagaaaaatggctatctcttttttggaacaaatttctagcgaacaaatgctcgcgagcaagagccgcggagcggtaagcaactgccagttaatttttcagagaatttccaaagttctcggttatgccagaaaaatggctatctcttttttggaacaaatttctagcgaacaaatgctcgcgagcaagagccgcggagcggtaagcaactgccagttaatttttcagagaatttccaaagttctcggttatgccagaaaaatggctatctcttttttggaacaaatttctagcgaacaaatgctcgcgagcaagagccgcggagcg

SEQ ID NO: 79127 - DNA, 713 bp, Heterodera glycines
atgaaatcccgaacccgatcaatcccgaacattttggaaaatcgctcgggacggatcccgaggtcgggatcccgatcctgtccggtctctagtgtgcacctagacgatctaacaaatatgtatgtaagtgcaattacgcactaattagaagaattaagaaacgcaagtaacagggaaaatggataagttaaatgcaacgaaaaatattatttaataatcgtttaaagatttttggtagtttttaatcacatagtcgaattattagttcattctgtataaatctcgacaatgcaagtgaattagcaaattatgtacaatacggttaattacaatatacatatacaatcgaaattaaatacataatatatattacatatatacaacacatgttcatatcacagaactatcacagttaattgggcatagcaccgcatcagaacagatttaactggcgcttcagaaagaaattaatgacgtactccacgctcaagaattgttcgtccaagtccactcttcgcccctccacatggcgtccttgggtcagtgaatattcgagcagcgtcggcaattgtcgcaggcccaacgtctcgtcagttttgaagatggatttcggctctttcttcgtcgtgtcccacctgtgcattgttttggaatgtcagattcaaaagtgcgccaaataacataaacgatggtaatacttattttgaaataaa

SEQ ID NO: 79128 - DNA, 683 bp, Heterodera glycines
atgcacaggtgggacacgacgaagaaagagccgaaatccatcttcaaaactgacgagacgttgggcctgcgacaattgccgacgctgctcgaatattcactgacccaaggacgccatgtggaggggcgaagagtggacttggacgaacaattcttgagcgtggagtacgtcattaatttctttctgaagcgccagttaaatctgttctgatgcggtgctatgcccaattaactgtgatagttctgtgatatgaacatgtgttgtatatatgtaatatatattatgtatttaatttcgattgtatatgtatattgtaattaaccgtattgtacataatttgctaattcacttgcattgtcgagatttatacagaatgaactaataattcgactatgtgattaaaaactaccaaaaatctttaaacgattattaaataatatttttcgttgcatttaacttatccattttccctgttacttgcgtttcttaattcttctaattagtgcgtaattgcacttacatacatatttgttagatcgtctaggtgcacactagagaccggacaggatcgggatcccgacctcgggatccgtcccgagcgattttccaaaatgttcgggattgatcgggttcgggatttcatcgggatccctcccgaccatttaccaatcccgcgggattga

SEQ ID NO: 79129 - DNA, 1051 bp, Heterodera glycines
atgtgcacaattggtgatccggcacatctgccagagactaattcaatgtcgaatatattagctttactaacatattgtgctgaattcacatgttatgcattgatttggctggtcaatcatttccgtaatggacaccacggacaatcatttgctggttgagaaaattaattaatcaatttttaattcctttcttaattgattaatttagaattggaaaaaaacaaacgtttattgatttcactgagtgttattatgtcaatcggtctcatctgcttcattggagtaataatattattattttaattatgattatgtttgctaatgaaaaaccctaatttaataatcagaatttttgtcgaagaccaattttggtactcaattatcttttcgagcagaaattaaggggttactttggtcactaattcattcgctgttactgtctattacagttcccatttaagaatactgtattcttttatggcataatgccattgctcagcttcaactttttaacaattgaacactttgtttggcccattagtaatggtctcggtttgatggcattttccagcagtactcccgtgctttttctgtgcaggtggtttctaattcattaattaatgaaaagaaaaattaataacttttcttattttagcaaagaatatcgaaaagcattttgcaaatatgtttgcagaacagaacatggatcaaatgttgttgtgccattgcataatatccgttcttctcagattcatgcttgaactttgttttcatattttgcatattcattcagactcgaatgatgtcatttcatttaatctttttatcagtgatcatattccacttttaaccctatgaaaattgtattgaaaccagggctggccgtgatcacggaaatcacggggtttttggggtgccgtgatctcggatcacgggtcacggattttttcaaattttccgtgattttgatccgtgattggcattttatatagggaattttattgagacgaaaataggaaagtggtgtgaagaaatttttgagaaaaataaa

SEQ ID NO: 79130 - DNA, 1460 bp, Heterodera glycines
gatgggtcggcaattgctgtcctccgttcccccgaccgctttttgggtggcgacgctctttgggaattgcgcgacggtgtgccgcccacgccgttcgcttcccccattgaactcggcttcaccgttttcaagcagctgtgtctgtcgcctgatcagagggcgctttactgtctggccagtggtccccggagggcttcttctctgatcagattggacctgtccactgattgtcccacagtctgtgaccaccaaacgattaatcggcgcaacaaattgactgatcattttctttttctgtgctcaggtcgccgtcatccgtgaagcgcgtgcgcactccgaactctctcagctgcccctctccgtcccaacactgatcactttcaccgccgatggccattccctggaggggtatttctacgctcctcacagtcacacgcattgtgcgcccgagggcaaactcccgccggtggttcttttcgtccacggcggaccgaccgcatgcacaaaaaacgacttgaacatgaaaatgtgggtgattgcaatatttgggacttttggcaatccatcggaaggaattcgactcatttagacaatacttcacttcacgaggcttcgcagcatttgacattaactacagaggtgatcagaagaagaagaaaaataaaataaattgatgaaccaattttgggtgcctgagggcatgcaaaatccattagcattgttttggcaaattaattaatcacgctttcccaggctctgccggttttggccgtgagtttcgcgattctctgctcggccaatggggcgtcgccgaccgcgacgatttgatcggcggggcaaagtgcgtgtgcttcgtgccttgcttttcacatcctttgctttggttcatagatttctcatctcctccggcctggtcgacccgtcccgtgtgtttatcatgggcagttccgccggtggcttcaccgtgctcagtgttttggcccactcggatgttttcgccgccggcgtttccctttacggagtgtccgacttgggacagcttgccatggtgccagcaatccaaacaaaatgtcatgaaagtgtttcattttccccattaaggcgtcgcacaaatttgaacgagacaacacaatgcgactgatcgcccaactgcccgacggcatccaaacgtaccgcgaccgttcgcccattcacaactgcaatcgcatcaacaaacccgtcgcctttttgcacggcaccgaggacaaagtggtgccgaaggagcagagcgaagtgatgcacgaaatgctgagagccaaagggacgccgacgctgctcaaattgttcccgggggaggggcacggattcaaaaaggcggacacaattgcgcaatcattgcaaatcgctcactctttcttctgccagacaatggtctcttgagcacttagcaattcgtttttttcgtttttctaatttccatt

SEQ ID NO: 79131 - DNA, 3675 bp, Heterodera glycines
  unsure (1)..(3675): unsure at all n locations
aggaaagaggggcgtggaaaagctgaaagaccaaatggtactacaacgcattggacggcacgtgcaatcgcttccattacggaggtgcggggaaatatcaatgaaaaaaatttgataaatttaaaataatacccatttttgccaggtgcaaatttaagtcccaagagaaaacttttgaaaattgaaaaaatatttaaagaaatctacaaggggtacggtaacttgatcggatcaagttttgctgttttttgcttgtatccaaatccccaatcccaaagaatttgtctatctgtgatcagcccaagacaacaattctgatcacattcggtggatcaaacaatggcttaattctttcattgtttaggctgtgatggcaatgcgaatcgctttgacaccgaaaaacagtgcaagaacatatgttggaactacaaaggtgagtgagcatttcgtgctaatcattatttcaaattttaaaattaaataaaacgtttcttaaatccgtattgtggatcacataggattggtctaagtgatcgaaagctttgatcagaaaattttgttacaaattcctgcatttaatctgagtgaaatgtctgttccaaagaatagtgaaatcaactcagtaatgggctgataaatgcatgatggagaccaatgctttctgatcagcagattttagcatggacagtgaaagcaaattcgctgtcaatgctctgatcagataaatgggtgatcaatgcttcctgatctgattttaacatagaaacatgaaaccaaaactgatgaacgctgtcaattctgtgacccgatcaaaattcacacaaaacgtgtggcttaaactgatcagcctgatcattccggcactgcgattgactgatcaaaaaaatgataaaatttgttatcgttagacccgtgcgttctgcccaaagtcagcggtccatgtgagggccattcgcgtcgctttttcttcgacctgcacaccaaccaatgcctgctgtttgagtacggcggttgtctcgggtgagcattgtgcaaataattgccagattttcacaaaatatttttttcaaattattaaataaatccatttaaagatcattaataactactgttatgaaaaatttttgggtccgatacggcggcgccgaaatgtccctaagttgtaccaaaaaaaaaatatgacccattttttcagcaacagcaacaatttccacacgatggaggactgccaggcgcggtgccgtccgaccaggcccatgccaattggtgcgtgatgcgatacgccaaaaaaaacacagatattttgaatgacggacgacacactttgcctcaaaaaatttttgggcatttttaattttaaaatttccttttttttttaatttttgccatttttttttgctaccattatatggaaaaaaaacattcgcaaaaacattctgccatattgttattcccatctattttttttctctattcatgttgcgcctttccaattaaaaattatttttttcgtttcgaaataaaatttttcaaaatttatttgccaatttttggatttgccgttttttgctgtctaaaaatttttccaaaaaaagtactaaaaataactaaccctttggcctttgttttaattttttggtgtgtttttaacaaaaaccttnaactgcaactgatcaaatgcgataagctaacttcaagaaattaaccgattaaaaaagcgctaattcttattgattgatcaaaatatgctaacttagccagataaaaaaactgatctgaccagatcgcgcagagaaaattttgtgtgtgccgttccgcgctaatgcattcccctccggcacttttgtagttgccactaccactaacccatggcctatccgcttgactcgcgctaacccgtcaacaccaacaccagcagcagcagcagctgttgaactgcttgatcaccgtgatgggattttggccattgacaacaacaacgaccggctgatcagcagcaacagtgaccaacagacgccgcatcaacttgatgctgctgatcaacaaagtgatcagcagcaaaccgctgatattgttggtgataaccggagtgatcagcaaagtgaatggaaccaaaacggtgatcaaaagccgagtgatcagagtgaggctaatgatgaccagcaggaagaggtggagattgaagagggggaagaagaagaagaactgattgttgtgcctcgggaacaccttctttacggccaactgccaggtaaattgagtaatgatttactgtattaccgtaatcagtcagtcaactgcgagaaatgggcaacccaaaaacatgtccaaaattttttaaaaatctaccgcctaggtcttagcctgaagtcattccaaaaaacttggtcacatctaaatttttctaaaaatcctaccgcctaagtcatagttctgctgaattcaatcaaaaaaaaacaaccttataacctacaaattttcaaaaattttgccacctcccaaattccagaaaattccatctgtctgggccctagtctgcctctcaatttcaattttccaaaaattttacaaaattccccctcccccctgtgttgaagagttgtgcctgttgccggagcagcgtggcacctgttttggtgagcagttgcgctaccgctacgacgcgtcagtgggcgactgtgtgggctttttcttcactggttgtgacgcaaatgtgaacaactttgactcgtacgaggcgtgcgcacgcgcgtgcggtgcatggaaagcggacgcggtgtgcgagcggtcgccggacgcggggcgcgaccgctgcgacaccggcggcggcgaccatggtcagcgagttgagtggcgacagcgcgacaacagtaacatggcaggcggtatactgtatccataactcagctcataaatgatcagaaacgaattaaaaatttaaaaaggatattagagggaggaggattagcttatctcgaaatttgacatccataagattaagcataaaatttttgatttttcgaattttttgcgcctattttaattgtttatcaaatttaagctctcatagtcatctaatcataaaaaatgcaccaaatgttacatggttagtggagagattagtagtactaactactaagacagtattagcttaaactgacaaatttcggctgtgtaactttgcttaaaatattttaaatttttcttttaattttttcaatatttctaaaaattaatcgttcttctgaaaatgttcagaactgcactaaacattacatgaaaatgataattttaaaagattttgattataaatgttaaaaaatttttggcattttgttgccaatgtgttcgaaccgaaaacttcagccaacgtgccaaaatggtattacgatgcagcgctcggcaaatgtggcctgtttttctggtccggatgtggtggaaatgggaatcgattccaaaggtttctcggggaaaatttaaaaaattcaaaaatttccaccccctcccattttaaagtaaatcggagtgcgaaaacttgtgccgtcgcgaaatgttggcaaaaacacaccaaaaaagtgacatgtgcatgttgccaatggacgcaggaccatgtgccgacctagtgacaatgtggtattttgatgccgtacaacagcagtgccggaggcaagtaca

SEQ ID NO: 79132 - DNA, 740 bp, Heterodera glycines
atgcgtgactattccaaaacaaatacaacaaattacggacttatttctgctaccactgcgcggcattgccctgacaatcgtgaaccatataggtattaacagaaatttttttttgaaaattctgaaatttgcaaaattttcaggaatccggaaactggcgaactgcgcagctgtggcactgctgcagcgctgcatggcgaccttgacagcgtgcagcatggcatatgcccgtcctcgttcgtttgcaagcgtgacgtgcagcgacgaaagcctgcaacaaaaggggaggaagcgccgcgcgtatgctgttcgccaatcgcattttgccctgatgcgcgactgccgcaggtcgacccccgcactcggcatgcaaaacggtaagactactttaactaccgtaatccatttaattgagaggcgaattactgtgggtacggctcaattatactgtaacaatatcccaaattttcgttatgtctagctgtttgtctgctgacgtcaaagcatcgccaactgctggtgcagtgaaaaggcatcaccattactatggcgatagttacaatgattatggtaactgtaccccaccgtacacctgccagccgtctaccgtatccggcatttttgtgtgctgtaaggtgccaccgatgacgggaatttaaggtcgtaattacatgacctctatttcgacccattaaattttttgtaaatgtatgccaggggaggttattcaatcgaataaa

SEQ ID NO: 79133 - DNA, 414 bp, Heterodera glycines
atgctgaaattaaatctcaacgaaaaaataaaaaactcgaacatgaaggctgcctgtatgtcttccatttgttgaacgccgatggtgacgtaaaattttggcgctgtgaacatcagcacggcgaattcaaatgtcgagggcgcattcacacaacgctcaatgacgtcgttctgaagacaattggtatacacacgtgcaaccacagcgcggcaaatgtcgtcgcacaaaaaatcaccaccggcattaaactcacgtgagaattttttaaaattaatttttaaattctcaaatttagcgtttcaaaacagacgcagcctttgcacgagcagccaaaatggtcacttcgctggcgttcgtgccgctggcggaccttacacccgcgttggcagcactagaagactatctaccaaatga

SEQ ID NO: 79134 - DNA, 715 bp, Heterodera glycines
ccctttctctcactttttcaggtgctttttcactttgactctcgaccaagtgccaatttggggccttttcatcaattccgttctgctcgggtctctctccccactttccttcgttcgttcacttctctccctttctcagtttctttatgaccggctatttgccgttgggctttgaatttgccgccgaattgacctttccaattgccgaaggcaccacttcgggactgttaaacggatctgctcaggcatttggcatcggaatgacttttggcatgggcttggtaagtgttggcatcggttttcttcccattggcactttcgctggctggcctttcaaggtgatgcattccctgtcgatcctttggtgcaatttgatcatgtccgcattccttctgatcggcttctttctcaccggttttgccctcacatccttccatttaatcttacccaataaatccctctcaatagcaattatcaaatcggatttgagaaggcaaagggcacacaaccaacagcaggcatttttattggggggggggggcaaagaattcttttgtttattttagcgaacggaaactcaagacacaacgcaacctgatcagtgatcagaccgagggccgataaaattctctctaagtcaaattctccaaaggaaatgatctcccacaaacccaatgaattaataacgacagagataccaattaactctcattcg

SEQ ID NO: 79135 - DNA, 1148 bp, Heterodera glycines
atgatgcgctgcattgaggacatgcaggagcaagatgagcagacactgcgcaaatcggtgggcattttggcaatttgtccacgcccctttttattaatccatttatatatatttagtctgtgtattttagaatttttaattggactatttatttataattaattaattgccaatgtaaatgttcaattatttttaagattgaggaaaaggccttcgaattggccgaacttcgcaacgacgagaaaatgaaggtggagagcaaacgggcccagctgatgggcaaacggtgtgtttatttggtgtgttcatcgtggcatttctaattttactttttccccgttagtttcgatttgaaatgcgcctgcggcactgtgatttgctgcagtgaccgcgtccgatcggtgatgggcactctgtttgtgtgctgtgaccccaaagtgtggaggcgatcgaagcacacgctgacacgcgccccaacggtggggcggggatttagaaaaacattatttattggagcaaattgtcgattgtgatgtcttcgaatgctttaaataatcatctccgtgtttcggcatttgcttcgctgtccaaaaattgtgccaacttaagctcgtttcaatcacagattgatagagccattaatatagcattggttaatagctctgatcggaagtgattttctcacccgtctttcatagattttctttggcagaattatattattattattattttatttataattttccacgctttaagaaagagaaattctacacaaactgtgcccgttgggagtgcgcaaattgtggcgaacattggggccaaattgtcaaattttccaacgtgtttttgcccgaaattcgcgtccgcgcattcatattggagcgagtggatgaacaatggtcagcacagcaaaacaacagatggaaatttgcacaacaataaatatttaattgtttatttttaatagtaacgaaaataaattttattatttttatttaaattttattatttacaattagccaaaaaaaaaaacacttttcagcagtcaattcgaccgaaacgaagtcgtgtgcaaaaagtggaaggacattgagcagaacaatttcaacgtggacgccattagcatggcggacatcgtaaattga

SEQ ID NO: 79136 - DNA, 1664 bp, Heterodera glycines
  unsure (1)..(1664): unsure at all n locations
atgcaaattatgggcgtgcttgccaatggacacttcttacccgattttttaaactttaaatatgcaagcgcacctataatttgcatttttcatcgttttttgacttttagactaattaaaattgtaaaatttgctaattttagggataaatctgttaacaatgttaacaaattgcactcaaattttcaattttacccccggcggcgcctatcggcacctccggccccccaaaatttattatttcgtaaaaaactggctcaaattcgcaaaatttggtcattttttggacaaaatcggtgcacaaataagactcaaattttcaaaaaatttttgcgatggcgtctatcggcgcctatggaccccccttttcccaaaaaaaaatttttggaaaatgataccacaaaaaaagtttaaaaaaaaattcgccgccaaaaaattttttcttanaataaaaattcacggtcacgaaacccgtgaatttcacgggttttttggatcacggtcacggtcacgattcacgggacctattcacggtcacggttcattggtcaattcacggtcacagtcacgattcacggttcacgggttttttcagtcacattattggttcgtaaatttaatgcgtacaaaaaaaagcaaactggcaatattgtcattatctaagaaatttaccctaatttaaattttcaaatattaaatattattggaatttaatttaaaaagtactaaaaatttaattggatttataaaacaaagtaatgaaaaaatgataaaactgacttttttggcctttaaatttgaccaagctcacctgggttaagccaaaaaattatatttaagttttttcacctttaacattgggtggtgtgacctgtttcgatcattcaaatgatatttaaaaatattttcaatggaaagattgataaggattcgaaattcgaaaaaatcaaaaataaattttcagtatccggaaattcattcgctgcaacgaatccaatcaaattgggttccactgataagattaaaagttatcaacttccatcacgaaattgacattgtattcgcatcaattcctggcgaaaaacaaattcattttaatgatgatgataattatgataatgacggtgaccaatggcagcaaaatattttgtcaaaaattgaggaaatgattgaaaaattgggcaaccaaattggagcggtagaccaagaaaccaaaatgcaaaaagatgatgacaaaaatgatcaatccgttctaataaacacgaaggaacaaatgcttcgatcgctccgctcactcgcgggtaataaattactgacacttcacaattatcctaattatgctaattgctatgattaagggtttcactccaatcttcgattgtttgacatggtcacagacaaagaaaattttcaaaaattgcttttgacgcttaaactgtgggcaaaatgtaagtattttacatgaaaattttgatttgccatacggtattaagaggtaaatacggtcctaaattaccgtttttagctcattatatttacaacaatgcgttgggtttctttaacggcacatcattggccattcttgcagcaaaaattatgcttctctatcccgatgcaacagtaccgtttttgttggaacgcttcttcctcacttatgccacatg

SEQ ID NO: 79137 - DNA, 1439 bp, Heterodera glycines
atgtcaagcagttttggcgtcttcaaactgacggacgatgacgcaatgaaatttttggtgatcgaatcgcacatcggcaccaaaaagatggactaccaaatggagcattatgtgtggaagcgtcgatcagacggtttatttttttagtctaaatttctaaatttttttggttcctccaattcaaagtttcatttcagcaacgcttcgtcgcctttttcgagaagaaggagcgcggcgtggacatgcacgcgagcatcaaacggcgcaaggactacatcaacccggcactttacgaggcgttgcgcaacgcgtacggcatcgacgagaagggcacttacttcgccgtgccgtgtacgacccgaacacatttcgctgccgacgacttttacaacgcattggatgaggtaaatacggacggagtataatcgctcccggaagcacccccccccccagtttttgaaaaccaactgtagctgctaaaaacctggatagcgttttttattttcgattaattatcgattagttaaaattaattattttggatttgaacccgtaacatcaaaaaagatgtatttaaccaactgagccaccaattctgctcctttttcggctctaacgcactttatgaattatttagagctatatcaattatatcatttgaataatatagacaatacagacataaaacgtatacacgaaatgaggaatcagagatggcagattctcggggggacgaactgtccaagtgaatcaattgtaaaaaacaattaaaaatcttaaagggttcactttgaacaaggaaagtgcaaaatgatgtcacttaaaatataatttacggatgcaaaagacacaatttgctcttgtgggtgaagagtatcacaatggctttttgggaaagggacggacaatgggaaaaggagaaaagacaaaagaaaggaggggggggggggaaggggtcgaaagactgttttaatctgtgctgatattctttaaagggtcgttttcggctgggggtgggagaagctctctctctgctaattgtcaatcattagagcggctgcagcaccaccttccgttccgcggaataggagggcggtacgaaagggttgttgccgctgtccgtgccgttgtccgttccgccgccctgccgcacccccgcgccggtcgcctgttgttgttgctggtggttgtgctgcgcgtgcatctgctgctccgtcgccattccgccgccaagcgccgcgacggcggcggcgccctcctcaaagaattcgtattttgggtagccgaggaatttgtgtgggtaattgttgttgttattattgctgttgtagaaggccatctgttgaattatacaaaggctttgaattaaatggatttgtttttgaaatgattttaaacatttcgccaaaattatttattttaatgccaaatttaattca

SEQ ID NO: 79138 - DNA, 771 bp, Heterodera glycines
atgctcgcgcacaccgacgtccgttgttcggaggtctcccgcgatgagtgggttagtcgtccacattatctcgcggtgcaggtgcagcaccatctagtaaaaagcactatgacccgacccataaaaattcattttcaaattttcagactttaaattacgatgaattgataggaaaccaaaatacatattgaccccaatattcctttttagatgtttttctaagattttcatataatgaaataacctccagtgttagttcctttgcgtatatgacgctagtgtttaaaatgtaaaaataacgcgcatcatgctcaaaaagagagcgctggtcctcccatatgaattaattctgcttgtgccaaatttgccattattatgcttaatttcactttcaaaaaagtttttcgtttgattactatccatactaccggtttttttcaataattaatcgctagaaaaagccttcgaacctccatttctgacagggaaagaggtgggtggggcattaaaatgaaacaaaattttgtcgacgacgggaataagcaagatggaaaaaagccgaacaacaaagacgatggtgctgcagaacgacgcgttgtacacgctcaaaactcgcggaacgaccaaataattggaacgccaaggtttatgggcccattttagcataaggatttcagagggggaaagttcaagtctaaaaatgagcaaaaaatatccatgaatttggttgcactccgtcctgtgaattttttaatattgtcagccaataaa

SEQ ID NO: 79139 - DNA, 100 bp, Heterodera glycines
atgggtatttctttcaaggttactgtattttactcaacgatttgagcataaatttttccaggtgccggaggcaccgccgggtcccaatcaaaatggctaa

SEQ ID NO: 79140 - DNA, 1033 bp, Heterodera glycines
atgctcggcccggcattgttcaaaattcgttttccactaatcccaaaagaggatttcacaaaaggcgttggtaataaattatatatgatgactagagaatttggtatttcgaaaaaaatcttggacctattctgatttcaatgttgggcctggacctgaatttttggacaaatcccagaaaatccaagtagtgcgaatccgtgatttcaagcctgggtccagacttggtctggaacagaacaaaactaatgattcgtttcataatgtattaattggctaattaattatccatttaaatcaaacttcagtttcaactgatgtgttaacaattaaagaagtgatcagcatttatcagtactattccaatccaaagttaagtgatgtccaggcgcttttcccattgaaatttcccactcaacaacggtacaaaaagggagaaacaatttcaatggaaattgaaaaagtgtccgaatttgggctggagccggttgaaagtcgacttagcgatgccgtggacatttggggattttcatggaaaatatgggcacaaatcaaaacgaaagtcggaaacaatgagaaatggttgggattttacctttacaatgatggccctgaaaaaggtgataaaaaagacactttcgtaaatctgtcagtagaaaagataaaaaaataattaatttcattaaaaattatgaaatctttgttttaagctgaattacatttactcgattctttttttctagaggttttattaatacaaaaaatgaaaaaatataaaatattgtaaattttggttcatttgttcataatgaatgcgttaaggtaattattaagtttgatgggtactgtacttttcatatatatccatttatcataaattcttgtgttgaaaacactttgttaatcttggattttcagggtcgcgatcacaatttcgatatgggatagacttgaattcgaacatagtttaaagttgaaattttccaaatttcaacttttgggtctaaaactgtctaaaatgcatagaaataaa

SEQ ID NO: 79141 - DNA, 357 bp, Heterodera glycines
tatgggcttttcaaggtcgctgaccatgacaagatttttgtatcgccgaagccaaattcgaacaataagtcttaaattcgaaaatctgttttttacccattaaatgatcgttataaaaagttaaaaggaattacttgtttcgggtttcaatttttgtctaagatttatctacatgatcgcttattatagtattggcgattttcaatttatttctatgcattttagacagttttagacccaaaagttgaaatttggaaaatttcaactttaaactatgttcgaattcaagtctatcccatatcgaaattgtgatcgcgaccctgaaaatccaagattaacaaagtgttttcaacacaa

SEQ ID NO: 79142 - DNA, 353 bp, Heterodera glycines
atgccaagtgcccgcacacttcgacgtcaattcttcggagttcaccggcaacaagggggttagttgtccacataatatgtttgtgtaagtcgaccagcatctaaacaatgcatcatcatgaccttgcccactccataaaaattggaaacaagccccttgtaaaactttcaatgcttttacggcgactctaagattgtttcttcaattttttattaaaaatattttcccaatgacttagaaattccagatgacctcaatttggcaaattccctggctgtaattttcgtaaaataccaaaaataatgcactaaatcgtgctattttggattaaatagaccatttttacaaataaa

SEQ ID NO: 79143 - DNA, 154 bp, Heterodera glycines
attaatttgaatcaccactcaccgcaaaactaatgaaattgtgaaatccacggcttatatttttattaaaaatgcgatcaccacttcttccaattaaattctcagtgcctttcttttgagaaataattcgaaatattcccgaacttttacaaga

SEQ ID NO: 79144 - DNA, 66 bp, Heterodera glycines; identical to SEQ ID NO: 53774

SEQ ID NO: 79145 - DNA, 2216 bp, Heterodera glycines
atggttgcccttttgtaccatttccaccctgaccaacaaatgccgaggatgctttacgactcattgcaattcccaactcacagacgggcaacatatgacggtatgatttgattgggcaagatttttcatttatattattagtttctatctctgaatttttgatgaatttaaaatattttgttaaaactctattgatcaactgtattttcatcatctttttttttttcagtaatcgaattttgcttctcttgtaagaggtgacagcgaccaataaaacttcggggttttcgtttgtctcggaaattcggctttcaaacattctacaactttccctaataggatgaataaattaattatgcatttttcagaccccaacaaacctcagggaacgctcattatggaaatcaaaaaattctctgaatttttgaaagaaaatgacaacgttacacgtctaagcgatgccgtagtttatatcacggcacttccatggcgattaattgtatataaaaccaaacacagtttgatgtttgaagcgaaatacgacacggcacaaatgagtgggcaaattagccaaaggaaacaatattttaaataaattaagctttgaactacaaatgcccttattcgacaacgtttcgaattgcttcgcaaaaggagggaaaaacggattttgttaagaagaaaatgggcaaaattggctcggatgcatacaaccgatgtacatttagttatatttcattgtcggtatgtgtaagaaagcaaaaaaaaaaaagaaaaatttttgagaaatacgttttcaaataaaatttcgtgaatatttcgggtagcgcctatcggcagacagtaaaccatccgcggctttattttttgagttaaaatgctccaaaaaatgaatttttgctgtgaaatttttaaaaaatttaaattttcgctctgccgtaccctttgtataaaataaaataaataataatttatagaaactgatgtgcccggacaacggatggtacaataaggaggaggacacagtgaaagtgacggtggaagtgaccacaggcgaactttgcggggaggaaaaagcggcgaaatgaaaagaatgaattttattttatccatcccatacaattaattgttttgtgtcggattaaacgcttttcctatacaacatttaattacagtaacctgagtttttttttgccgaaaaaccgttatgaaaagaaaattacagtcaaagatggtaaaaagcaaaacaatttttggttacattgacgcaaatggaagaaataacagaaaataaaatcaaatttcaaatatgcaataaaaatttgagatttatgtaagaaaagtcacaaaatatctaataaaatattgaaataaatatttatacacgcaccaaatgtcctaaaattagttctcaaaaacctcaattttaacaaaaatgaaaatatgtaaaaagtgcgaaatattgacaactatgaacataataaatatgtacactgagccggaaaattggttatagaagaaaacttataatttttagcgaaaaaacgccgcaaaaattgaaaatttacatttttgatttatttttgacataaatttaccaattttcgagaaagtttaaaatttttacgagaaaattttttgaatgttttttaattttccgatcataaaggtcgaaaaggctaatttagcttatggggacagttcaaatagatgatattcgaaaaatgccaaatatggatataaataataaataacaaaatgtggaaacaagaattttcaataattagcattctaattatattcagaaaaagaatttattaattatatcaaaattaaccatcttccagaaacttatacatatttgcgaaaatgaagcttctcccaaaaaagcaaccaaattaaggaattgttggacccgagcaaaggattttacaacaaagatgaggacaaagtaaaattggccatttatttcattgtggacgagccaaaaacagagaaatttgtttccaatccgaacaaatccaacggcacactttcgatggaaattgaaaaattatcggaatttgcgcgagaaatcgaagaaagtgaacgtaaaagcgaagaaactgtgtatataaagggaatgccatggaaaatatgggcaaatattaaaacaaaaaatgaaagcactgagaaatggttgggctttttccttttgtgcgacgcttctgaaaaag

SEQ ID NO: 79146 - DNA, 990 bp, Heterodera glycines
atggacaaagacattgtgccaaaagaaggaaatcgctttaaaaagcacttcgacccattgactaccaaagaaggtgggctttgcataaaatgacatcattatttaattttatcctaatttgttaaaaatttaagcaaagtcttccgtcacttttcgatccaccgaaattactggtgattattttgttctaccataacgatcaaaatgggctttggataatttttgaaaattttttaccgaaaaaatttaattttctattttattttgctttaaaaatatatgtcataatgtgcgaccaaattttaacaatggatttcttacaaattatggtcctaaagttcagaattttataattttttcaaaattctcaaagaattcgctaatttttagcccatgaatatttggatttttcattgtttcgtttggtgccaccgcatttggtggaccctggcacaattgtggtgaaaactgtgcgacagccaaatgttcttgaagagcacaattatcacaagcggccaattatgtacattatcaatcaattaattataaaatcaatcaatcatctcacacaagggataaagccaaatgccttatttttgacataaaaattgaaatttgaatttcaaaataattaaatttgtgtagcgatcgttcgctgccatcggtgccaaatttgcctctctttcagcaaaaccctggtcagaaaacggttgtattggctgcgttctccctccccaacttttgctgattctgatcactcgcaaaacaatgaatcgtcgatagaatcagcggcgaatttgcatgagaatacggcgacggaggagagaccgcgcgcagaaagttaggcaaaattttcttttggaaattttcgtgttttcctttaaatttaaaaatttaggggaagaattgatgttttgtaatccattgataactttcaaaatttaaagatttaataattaatgggcggggaaaacattcaaaaagaagcga

SEQ ID NO: 79147 - DNA, 263 bp, Heterodera glycines
atggtatccacacgcagtaaaactgataaattcaagaaaatgggaaattcaagtactgaagcaaagcgaaagcggaaggaatggcgccaggagcacgcaagaaaagctggatcaacaccaaaaagtgatgaaattttgataaaatttcatttcaattaaaaatcaaatttttacaggtccacgacaaaccacaaaagctccatcaacaaccggagagggaacatcgaccgagacaatgccatcgactttgaatgccgagcccc

SEQ ID NO: 79148 - DNA, 330 bp, Heterodera glycines
atgaaattcatacatcaattgatatacgtagtgcgaccaatttacggtaagttgataaaataagtctagtagttaatagcgctgttcgagagtctctgtattaggatgtgcgagaaatgatttttaccgagaaccgagaccgagaccgggaaatgaccccgggaaacgatacgagaactgagaccccaaaaaacccgagaaatttctcgattcgggaatcgagaaatctaaaattttttagccgtttttcaccaaaaattactatttttgccattttggtcaccatttttcaacaaatatggtaaaatgggagtccggcagtgccgttag

SEQ ID NO: 79149 - DNA, 163 bp, Heterodera glycines
cttaagttaaaaatttaagaaaattatattctgaaagagaacaattaaagctattgaatgataccacgaaatattaatttggttgaatttgagccaagctattaatttaattattttacccattttttgttttcaaacccattggcagttttaacaaacgcgc

SEQ ID NO: 79150 - DNA, 207 bp, Heterodera glycines
atgaataataattgccaattaattttggttttatttttttcaaaaatatttctcggaattttctgtgccaaaggaggcgattctcctgtggaaaaagatgaaaatgttgccccaaatgatgacaaaaaatcatcactagcatcaccatccacagcagcagcagaacaaattgatgttgatgagaagaaagaattactgaagaaagag

SEQ ID NO: 79151 - DNA, 225 bp, Heterodera glycines
tactccccgacgaggatggttcagtcatccccgacactttttcggggaatttactccccgttccccgacttttctctccccgagggtcaggaaggtggtatgggcgttgtctttagaggttttcccatttcttttatcccactttctcccacactccgcttccttttggcaccaaaaatattcaaaattaaattattattattattataataagttatttttatt

SEQ ID NO: 79152 - DNA, 155 bp, Heterodera glycines; identical to SEQ ID NO: 51421

SEQ ID NO: 79153 - DNA, 1658 bp, Heterodera glycines
atgccaattgctttcgcagcagagccaagccgtccccagctggtcaaggagagcatcggcgaagaccatttcaacatcacatttgtgccgggcgctttcaacgaggccagcggtgcgccggtgggcaacgcgtttttggtgcgctaccgtgaggcggacgacgaaacggcgccgtggcaggagaagcatccggtggacaaatcaacgctgcaggtagtccagcagttgtgtgcgcaaaaacgttgattcctaatgagttctttacttgactttttttgatcacggatcaaaaaatccctgaaaaaattttttcttgaaaatttcgggagaggaacgctttgcggccggaataactaactccccacccttgagttcgaaatcggggcctaaaaacacgataaatttctctcattcttgtttgaaacacttaatccgtcttttgctgatcatcgatcaccaccaatttctttatacagttaacagtggacggtctgacgcaaggcaccaaatacgatgtgaaggttgtggcggtgcaacgggacgaggctggcagcacgttgtccagcaccgagtcgcgtgtccatcacatcacaacggcgggagtttgtaagtgctgtgattggcatttgaacatttttttgttgaaaagggatttttgccgtttgatcactcacttcaattttaaaacattttgaaggaagttttcaattaattcaatatattagtggttttgatcattttggaaggtttatatggatcatgatgatacatttcttcaaaagctttctttgttttctgaccagttcttgagaattatcaagtaggatggatcttttcactaaaaatggaaatttatcgaattttttttttgaaaatttgaatgtcaatcaaaaattcattcctttccatcgtcagctccacgacgtgccaccctctactgggtgctcgctgtgctgctcatcctgttgctgttgctgttctgtgtgtgcgttgcgtgctgcttggtctaccagcgtggtcgcaaatatccggtggcggagaaggagcggttgcacgggcgggagccaatgttgcccaaagagcgtcaatttgaggagtttggaaagtgagcgagtccgtgtttggaaaaaatcttttctgatcatcagaactcagatatttcaccaattcatccgacaaaaaaaaaacatgggattatggcaatctaaacttagggcatcgatcagtttataaaaatcttgaaaatcattgaaatttttatatccctgccttataaacgaactatttttgcaggggagaagagacgaatcgttcactttccggacacgtttggggcggtggcggagagtcggaatcggtgcgttttcaacaaaaaaaaagaagattttttctaatttgtaaacaattaaaacatttttaaatgggctcctttaggattcattgaccgaatttggcactgacaatgaccgggggtacaatgaggacggctcatttgtccgtaagtgcttttttaattataattttttattgaaaaacctctttttattcctttttcagatatgtacgggccgggaagcaaaaatgccggtttggccaccacctcacagccaaccgttgagtcatcctcggcaggcgcacagcagcagcagcagcgatga

SEQ ID NO: 79154 - DNA, 744 bp, Heterodera glycines
atgtctgctaatatttctgaaaaggatgaagcattgagcgatctcaactgtctcttcgttcaaatgaagaacaagaagttcagcttcagtttgatgtcaaaagtggcacagaaatttggcgatggtggagtcgccgcaaaagtccttctgccatacgaagtgtacaaagagtgagtcgcgtcgaggatgggattcaatgcgttcctttctttttgcctttagggctgtcgatcttttggcttccgctcgctttgaaattgattatcgcgtggtgatgtacacttttgtttacttttttcttggaagaaatcgcccttttcagtcactttcttcccactttcaaagccattttcctccatctcagttttgacgattggcaattggcgatggaacgtttttttgagatcacagaattgcgtcagactcatcgaggctttccacgagaggaaatgcacacgctcagtcactcatattcggtaataaaacattaaaactgaaacgctttggtccgtcgtttctttcttctctctccgcttttattcttcgcttactaagtttatacctctgaaatgcgtttgtttcagcttgctttgttggaaaatgccaatttcaacaaagaaactgacaggacttctgagtttctcttcactgactatggagacttggccaatttcattgacaattgcttcgaatgccaatgccgtcaattgtcttttctcattttactggagggaaaagcgttga

SEQ ID NO: 79155 - DNA, 1970 bp, Heterodera glycines
ttcatttacattcattcattcatttccctttttccgtttaagtgccaattccgtcgatgttcaattcgcctccgtttgtcgcaactgcacacttttgatggagaaagatgcgcctgaattgggcgaacacatcatagaaaagggatgcgcagaagtggacatttccgcggaggtaaaaaattaaaaattgccaaaattttccaaaagtgaattttaaaggcggaaaagccgtgccttggcaaagggaaaagtgtcggcggacggtgccaatgcgaacagggcttttccggggaacagtgccaatatcgaggtgggatcagacgaaataaacccattgggcgacaggagggggagtgctaactaacgttcccaccagatgactgtacggaggacggcgactgtggccacggagggcgttgcgtcgcgggagccattcaccacgggcaacggagctgcttctgcccgtttggcttcattgggacgaattgtgaacgaagtcactgacccggggggggggataattgtggctgaaaaacggcgaacattctcagaatcgagcataacgccaaaggacacgcactgtttcgcccacggggggccacggaacggaagtgccaatggcaatggcagcgaagtgttcatctacggaatattcaacccgaactgttactcgtcgagggagctcaacgaggacggagaccgaatctattggcgattggtcggcggggaaagacggcacagccaaagacaatgccaacaattccaataggtgggcaatcagttggaactgctgctcgacttccgcaccaactcgtggctgtccctgggctggcgtcccctcaacatccctccttcgtgtcgactctttccccaaatgcacggcacggcagccgaaggtcggcacggggaggacggagtgcagacgagcggatttggttggtggtgacatggccaacaaatggccattcattggctgccaattcagcaaagtccgcgctgagtttgcctttgcatccaatggactgcaccgacgtaataatggcctcggtgctggagggcaccgaccttttgcacattgccgacatgtactctcgagatcggtcgagcccgttgcgggacgcgtggttagacggcgaagactctctgtcggcagcctacggattggcaaccgacgacggacggacggtggtgatgttccgtcggatggtgcccggtcagaaatcgaatttggcattccattggcattggccttaacccataattcaaatcagaaatcgaacccaccgaccatccgttgggtcccggcgaattgtttctcatttgggcaaaaggtcagccgaagaagccaaaggacaaaggcttttattcggacggccaatggaaataccacggaggtgaaaattggaggggggggggaaattcggaggataaaaatgccatcaaacgaaagacagcggcagcggacgagggcacatgcaaatggaattcgtttcattggagcaaatgggaaaaattcgggggcccctgattcatttggacccgccgcaggggccgaccaacacaagcgaacaacgaacagcagagaaagggtgggaggaagaaggaaaagcaatgccaacagcagaaagggtaaaaaggggaaaagcaaaggaaaaaggaaaagcatgaaaaaggaaaagcaaaggaaaagggaaagcataaaaaaggaaaaataaggaattaaaaaattaaatgttcatcaggtgactaaaacaacaattgccacgacttcgtcagtgccaacaaccgaaagtgatcaaacgacaaaagtttcatcgcccgaggcaacaacgaactcaaaaagcactttgacaacgcaaagtcaaacgacggacaaagaacaaaatttaacgaaaacagaagcaaaaaatgaacaaattcagacagaggaaaaggaggaaattatgcaaaatgaaaaggaaacgacggca

SEQ ID NO: 79156 - DNA, 3846 bp, Heterodera glycines
ggggtcaaccaaattttttgcgaaatggtccagccatgtaaattgacaaccttttttatgcttttcaaaacctctttttttgcgacactctttttccaaaaaaagaaaagttcattttttataactgacagttttcattttaaggccttttccatcgccatccgttccgatcatagatgggatcgaatacgaaaagacaattttctgtctccaactttccctgtaagttttgaaaatgcgtatatttgtacattttaaattttagtttccatttgtcgtagataggatcgaatacggttctttggtgcattacgttcatgtgtgcaaactgtgcgccctactcggccgtcaggttaccccctattcattatatctaaacgaacaaaaattcaatttttaaaaacgaaaaagtaaattctgcagattcttgggttttggtaaaaaaaaaaactcgggtgaaactatgaggggaataaatgcacccatttgttcattcattcgttttcctctcaaatcattaaattggtactcataatgtatttgtatttgactgttttgttcggagtctaaacaattaatcctttttaaggctgccaaacagttgcggctcatcaaagacccattggaagtgcggacgcgcactggcgaattgctgatgggcgtcagcaaagagaaggttctatttcattttaagttctttaatttcctattgttcagatcgatattgtaggcccacacgggcgcaccttcacgaggtgtgtggctgtgagtaaccgcccggttcagccgggcggtgaaaggctgtcgcctccacccaatttgaggtttcccgaatcttttttattatcattactgaacaaatttagagcacttacgcccgcaatgcctttccctgttgatggtggtccgatctttggctcatggagggttttgctgcattcatggaatttttgttcaccgacaaatactaccctgaatttaacatttggtccgattttgtcgacgcggaaatggtcaaaacgctggcttttgactctaagcgcagtacgcatccaatcgaggcaatttctataaattgatattatattgtaaatacagaatttttaggttcctattgataacccaaatgaacttgaagaaatttacgattcgatctcttacgcaaaatcaaattcaatcattcggatgctcttcaatcatttgggcgaagcgatttccaaaaggccattcgcgattacttgaaaaagcaccaatacgcaaatgcagagaccaacgacctgtggaagagtttgtccgacgcttctgggattgtgagtttaaacaataaattcaatgtcgaagcaaagaatttccgcacattaaatatatttgcaactttatttcaaagaaacaaaaacactaggaaaggaaaatggttttacattttggtttaggatgtcaaagcactgatgtcaaggcgcttcgcacacgacggaggaggaagggaaactttcctccgccaacttcggctcctgctcgccgccttccaactccgtgatggaatgctcaacaacgacggagcaacggccgggcaccagcgaacacattgacaacgacgaccactgctcatcgccgcccgttaaaccggtgggtgggtctgtttgacattaattcgctttatttaatcagcctaactaaatttgaacgtttagtaaatgaataatcatgactaatttcctttcagttgacttatgcgcaagcagcggccaatagaccgagaagaaatactgcgagcaatttggatacaaaatccttccctttttccaacgtcaaatgattgaatttccctataatttctgattttttccatcactgattgctgattgtgagataaacaaatcgaaactaaattttcgccgttcgatttccaatgtttcggccgaattcgcttccctcttttcttctttatattagcttctcctcgcctttatgcagagaaagggcgggaggaagaaggaaaagcaatgctaacagcagaaagggtaaaaaggggaaaagcaaagaaaaaaggaaaagccaaaaaaagaaaaatagggaatttaaaattaagtaattttcattaggtgacaaaacaaaaattgccacgacgacttcggatttggttggtggtgacatggcgaacaaatggccattcattggctgccaattcagcaaagtccgcgctgagtttgcctttgcatccaatggactgcaccgacgtaataatggcctcggtgctggagggcaccgaccttttgcacattgccgacatgtactctcgagatcggtcgagcccgttgcgggacgcgtggttagacggcgaagactctctgtcggcagcctacggattggcaaccgacgacggacggacggtggtgatgttccgtcggatggtgcccggtcagaaatcgaatttggcattccattggcattggccttaacccataattcaaatcagaaatcgaacccaccgaccatccgttgggtcccggcgaattgtttctcatttgggcaaaaggtcagccgaagaagccaaaggacaaaggcttttattcggacggccaatggaaataccacggaggtgaaaattggaggggggggggaaattcggaggataaaaatgccatcaaacgaaagacagcggcagcggacgagggcacatgcaaatggaattcgtttcattggagcaaatgggaaaaattcgggggcccctgattcatttggacccgccgcaggggccgaccaacacaagcgaacaacgaacagcagagaaagggtgggaggaagaaggaaaagcaatgccaacagcagaaagggtaaaaaggggaaaagcaaaggaaaaaggaaaagcatgaaaaaggaaaagcaaaggaaaagggaaagcataaaaaaggaaaaataaggaattaaaaaattaaatgttcatcaggtgactaaaacaacaattgccacgacttcgtcagtgccaacaaccgaaagtgatcaaacgacaaaagtttcatcgcccgaggcaacaacgaactcaaaaagcactttgacaacgcaaagtcaaacgacggacaaagaacaaaatttaacaaaaacagaagcaaaaaagaaacaaattcagacagaggaaaaggaggaaattatgcataccaagaatttttatccaaaaataaccatttaaaaaattttatttacatattttagtacatggaggtttttgtacatatttcatatatattttagcattttttatatatattttatttacatatttcgcgatttttcttacataaaattcccagccctagtaattataaaatattccccaatcattcaattgaaattgggccgtattttctcaaaaattatgcaccattaaaatttatcagataaatttgaataaataataaaaatttgtaaagtgaaaatgttgcgacgaggtgaaaatgggcgattaaatgagcaaagaaaaacaaacaaagaagaaaaagaaggcgtaatattcacactaacaacgcttaattaattatgctaattaccggcattgtatgtcaatttgtcattatttcgtaaatatttatttgcgcatttttctgtccatgcagtggtcagtccgtcccatcgtccgttccgtcacaccacagttggcattttcaaattcgtcgccattccgccgccatttgccgcaaatgacggcactgtgccaccgttggcactgttcaactttttgcgacggggcaatgactttttgaagtgattgtcagggggagagacgacatacgaagaagcggaagggggaggaaaagcggaagaggaaaaaggaggaggagggagcagctg

SEQ ID NO: 79157 - DNA, 1308 bp, Heterodera glycines
atgtctgacaaccgaaaagaagcggaggagaaaatggcgaaagcaatgtaaaattaaaatgccattttcaattcaattgtaaattttgttttccttttcttcagtttcatctccaacgactgttggctttgtgtgttcgatttgattacgccttcacaacttggctttggcattgcaatgatcagccaccgttttgacatttacgtggacgaacacttcaaaacgcgcaaaaggacattggcacttattcgaattcgaagcaaaattggagaaaatggcaccaaggaaatggaaattgtcaattctcgttggaaaccattgccaattccgcaaattcaaatgccacgcaaagtcatcggattcgaatggatcaacatctcgtaaattggccaatgtcaaaattttttgtcaacacttccctttcagtttcatcgaccgcaatgtcatcacttttctccaccattttcgccaacttttcgccgtctgtccaatttttgtggccatggatagctcaaaaagctacatttttgatatgctcgttacccacatttggtcattgctcggaaaaaacattcatggcttacgatcgcctgccccatatttccaccgtttgcgcaaattcgccccgtcatttctcgacgactgtccatcgcttcgctttttcaatctctttcatgacggtttcttcgccgaatttccatgcgatgacagtgccgcggcatcggatggacaagcattggccaaatggcttttcactcctcgtcctgacggtgtgccaaagacattcaaatgcacgttgcatttagttttggaaaaatgggcatcaaaaatcgagccgctcaaaaaggtgatttgattccgtgtttctttagtcaattttcccacattttagacatttgcctcggcttcatctcccgtcaatttcatcgtttccatttggatacgtccaacgtctgtcgatacctccgttgtgccctttgtgctgaccaatgaattgactcgggaacaactggcattgaaaagaacttacaatagcagctatcgttttctgttggtccgtcatccaattgcgcgagatgaaagcaaatggacaaaatgggaagaagaagcgattgagtggaaatgttttgatcagtggaacaaaattgacattcgtgtgcatcgtgatgaacaaataggcgatgggtaagtgatgctttttcaaaaattgaaattgattgtttttcaatttttaggcttttcgacgcaaatcccggcccaagtgatcagctgcagcagttaatgaatgatttgctgagaaatgattga

SEQ ID NO: 79158 - DNA, 1172 bp, Heterodera glycines
atgagttgttggttcaaacatggctatctcaccaatgacaatttgaatatgcttataaatggtatcaacttgtgcttatttgccttttacattgcggcctttgccttttatcagccaaaaagggtaggcgataaaacagagttacactaaactggaaattattatatttttcaagagcaaaatgagaatttgaaaaattgtaattatttttaagttttgtttaaattcgggattcgaaattaccgggttaaatgtcagaatttgtgattagcgagtccgaaataatggatttcacaaaacaagaaataaaggcacaaatttattaaaattatttcctcaacaattcttcctttggttctgataggcgccgccagagaaaatttcaaaatttttgacgaatattgtaacagattttgcccaaaaaatacctgaactattttaatttatggtggaatttgttatgctttcaaaaataataaaacaaaggacaaatcatttaaaatggatcttttagaaatatttgtgtgttcaactgacttctctggtcattgccctctttactttgttctcttatgtgaacaataaaccagccgaggcccagcccgactcaatgggatcaattgcagcagcagctcaagtagcatcattagcaggtgggggagggaaaggggtaatgccacggggcattaattgcagtaaaagagcacatatccattaattcttttcaggaaatgtctatgatttggtcagtttcgtcttttccttcggttgtctctctctattcggtatttcatttaagaaaagggccattttcgacttgaaaacgaccgaatatatccccgcctcaattcaattcggcctctttgcccttaccattcagtggtccatttttgcacttattgtcggcaattcttatatgctggtgagtttcgaagctctccttgtctttcttttgcaaaaatgggcttttaaggttgccaatttggctggtttggcagttaatctcgccactttggcaacatttgttgcgtatccacccaaaacttggaaagtgccaatatttggtgttggtggagaagagaaaaagcagaagtgatcgctcagaagaagtattagtattagtgcaattcacgagtatatgcctagagattgcccaattcaatgcctccgaa

SEQ ID NO: 79159 - DNA, 1681 bp, Heterodera glycines
atgaactgttcaggggacgggcagttaagagttgtcgcgatcagcgtatccaattgcttggtggtcaacggagttgaagtcgtcggcgcaattgatgaaacagtcctcaatgacgacgcgccgtgttgctgctcgccaccgtccgccatttgttgttgatgatgttgttgatgttgaatgacgatgaataaacagaagcagcgccggagagcaataggagaaataaggaggacgaaattatggattaatgagtgtgaggagggaaaacaaagcacttttatagcaaaatttttttgctttttctaccgaaagtttgaaaatttcgaaactaagagaaacattatgtcaaagcttctattttcaaaaaatttttttttgttttttttcaaaagcagaaaatctacaatttcgccttttcttcaaaaaagccttattgtattccggattactaatttatggttggcaattcaattaaaaaataataataatttgccaaaaaaaattttaggaaaacgatcaacaacaatctccggaagaccaaatttcagcggaagcggcaatcaatttgttggccgttaccaccactcaccagcacatttttgggggcagaaatggtgcactttttgtggaaatacggcgaattgcggagcaacaactggaacacgcgttggcaccagtcgatggtacacaaaatttggatgggattttttggctagtgattagaacatccaaaaaactattccttgctagatttctatttttgtttttatttctccgaacgttcagattaccgacaaaaaactgagtggtaaaacgtgtctgttgcagttagttacattaccacaaaatctgtttttttggccctgtttttatacatttgagaaattttctaatccaatgcaaatctattttaaacaaaggttgcttaatttgtttggtttcagttgctggcggaaaatgggagctgtttgtgaaggacggcgaactgcgcatgtacagccgcgagttggaagtggagaatggcattgcggttgacccgttgaaagcgcttcatgtcattgatgtgcgaaaattgcatttttaagcgtaaaacaaaattcaaaattatggctggtgggccgtccagttttacacaaaaaaaaaacttattcggcgccattttggtcacacagttaagccccatcgagcaaaaattatcaaacaccgacaaaatcaaattttcgacatgaatttatcgtttttcagggtgtgtcggctcacgaattcatcgacctgttctttcgacctgaactcaaaaaggaatgggatggtgaggggagagcgaattcaaggcccaaaattcctaaaaaaatctgttttttttcagatactcttgaactgggtaaagttgtggagactctttcgccgcacactgccgtcatccatcaaatccatcgccgggtttggcctgccgcacaacgcgagtcacttttttggtattttccaattaaattttttgatttttttttcaatttatgtttttaggtcccaacggttgaatgtgttgtcggaatgcagctctgtgactgaccatgtgccgggtgaacttcttggcgcttggatggtaaattttggacaaatttaaaaaaaataaaaataattttaggtatgcaaccaatcggtggaacgcgacgatgttccg

SEQ ID NO: 79160 - DNA, 490 bp, Heterodera glycines
  unsure (1)..(490): unsure at all n locations
atggcaccgcctgtcgtaaaaaagaaaaaactttcatccgtcgttgaaaatcagcagcaacaaccgttgggttcaattgtgacaccatttggaagacggcaaagcgttcgcttagcaaagaaaatgaacaatcgaactttgaagaaaatgtgagccaaatttggcattttttcatggcattaaactataatgtttcagctggatctgtaacgatgttttgatggacattctgccattctttgaccgtgtccaactcggcctcaaattggcaatgatttcgccacgttttgatggtttggtggacacgcatttcgacagtggaaaaacagaattggcacttcggagagaatacattattcgaaaaaacactgatgaagctcaaaagcccatatttgttgttgccgaacacgaaagtgtgcaatttccgatgcccgaccgtccgctgcccaacagaaatcgnttttcgaaggcttacgattgcgtaatttga

SEQ ID NO: 79161 - DNA, 80 bp, Heterodera glycines; identical to SEQ ID NO: 51817

SEQ ID NO: 79162 - DNA, 1108 bp, Heterodera glycines
atggaaccatttgaattgacgaacgaagcgacccaagaaatgttgacattggagaagctacgcaatacaaatctgcagtgtttgaagcgacaacaatgctcaattggggcgaagacggacgacggcgattcgacagcatcaaaaagatggaatttttatgcttcgaacactgtcatctttgatttgcgtcctccaaattgcattgggtgagcagtggggcagggagcagctcgttccccccatcccgagtaatttaaaaaaaattctcaaacaaatttttcatgaaaaatctagaaagtttttctgatccgtggggaatcggcgggggaggggagggaaacgtagtgcacccgcgggacaagttctaggggtatttcgaggcggcgcttagtacgaatttctcctccgttttatccattttgaacccctgacccgaattcgaacatttacacttttgttgttgttgttgttgcaaatgttgcttataaaaccgggacgagtaaattccaccttggggagcaggtcgtttcccctcccccacatcgaaatttttttttaaattttcaaacctagaaatttttcaaaaaaacttataggaaattttctcataagaaaatttcaagaaaaaaattttgaaaaaatttcagcgattttttcaaaattttacgatgaactactaagttttttcaaaaatttttccaaaaaatcgctgaaacattttcaaaaaatttattcgtgaaattttcacatgataaaacttgctacgaattatgcattggctgagcaacaaacagctgcttttccttttttgtttgaattactcaattcaaattgcgttgattttttaggcctttgtctccaccaacggccacaaaagcggggaaaagcagcgaaaagggcgtctgattatttggaaatgaatcctttggcatttgacaaaatggtcgctcattttgaatgaaaattgttgctttgatacatttttctctttaaatgttttttttattggtcggttttttcgacaatatacctatcggagtaagacatttgcgcctatgtccaaactcggattcaaactaaaaaatttttaagtagaagtctaaaatta

SEQ ID NO: 79163 - DNA, 737 bp, Heterodera glycines
atgggcactgctgcgatcaaaacggttgagctggacgactcattaaacggactgcctgtccagtacagagaggtgcgtttttgaaaaatattttattaattactttaattgaattaataattaattaattaaaatgttttgcaggtccaggaccatgagagttcgctcttcctgagctatttcaaagacggaataaagtaaaaaaagcaattgataaagagtgagaagtgatcaaaataagaaaatatattaagtgattttcaaaatataagtaaagtacggcaaaaaacggacaggaaaagcggaaaattggacaatttccaactttaaaaaaatcatctaataggcaaattcaactccgaaaagatagaagaaatccccccacctcataccaatctcaattattgaacttaaccaattctcttacaaaaatgcaggtacctggaaggtggagccgagtccggattccgccatgttgtgcccccctaccaaaattgggccccaaaactgttccactgcaaagggaagcgaaacgtccgctgtacccaagtgaatccatttttttatgagttgaatttaaattttaaaaaaacacatttaaggtcaaatgcattaaagaaagcttgaatttgggtgatgtgttcattttggacatgggactgaatttgtacgtgtggacgccgccgatgagcggacgtttggaacgcattaagggcatgaatgtgggaaatcgttga

SEQ ID NO: 79164 - DNA, 1044 bp, Heterodera glycines
atgacgaagctttttggcaatttggtgagtgaaattttaaatttttagaattttatatacggcaatttaaatttttttagaattttatgtatggcaattttaagaattttatgtatcggcaattaacatttttttttaatttagtttttgagccgagtgacgaaactttttggcgaattttatggtgtgtcactgtttttcacacaagagaagtgcgtgtaattggtgtgacgtgagaatttcagcacaacacaaattgatgcgagggtggctggtataaaaagagaagttcatcaaatcaaaaagcacttttcactctcaatcattgggcccaacaaaacagcaactaattttcaactccccttttttgatttattcacccattttaatctttttttatacgatagttttttaattcatagttttttaaattaaattatataattaaaaaaagcaactaattttgtgattaattttaattacttaaaaagattggaaaaaatctaattaaatttctttttaattccaaaaattttggtaaaaaataaaatctctctttttaacccaaaaaaatggcaagaaaatctataataaaatctctctttttaatcccaaaaaatggcaaaaaaaatcttaataaaaactcttattaatcccaaaattttaataaaatctcttttcaatcccaaaaatttcagggcaaaaatggcaaaaagtggtcaaaacaacgacaacactttcacacaggaactgttgcatcttttggaaaccaatttttcaccacaactgttggaaattgcactaaggctttacaaggcacagatgtttattaaattattaaattgtaaaatatttttaatatatttaattaattagtttatttttgacataatttttggtcggaagacaaaaaatgaaattggatacatccatccttttgttctaaattaaacatacacacacacacacacacacacacctcaaaatagaaaagatgagcttttcacatttgacatggtctttattctcttccctcaaaataaa

SEQ ID NO: 79165 - DNA, 457 bp, Heterodera glycines
ggaaattattcggttaagaagtttttgaaggcatgcaatttttttgataagcgtccttcttccaaactttcacccctggcagacaaaatttggtccggacaatccgtcagtggacaatccgtcagtggtcaatccgtcagtggacaatccgtcagtgaaggacaatccgtcagtggtcattccgtaagtggtcaatcagtcagtggacaatccgtcagtggtcaatcagtcagtggacaatccgtcagtggtcaatccgtcagtggtcaatcagtcagtggtcaatccgtcagtggtcaatcattcagtggacaatccgtcagtggacaactcttctgtgaaggacaatccgtcagtaatggacaatccgtcagtggataatccgtcagtgtactattcgacacaaaatttttttgagcaataattaaaaatcttgcttgaatgattgttaaattta

SEQ ID NO: 79166 - DNA, 3067 bp, Heterodera glycines
  unsure (1)..(3067): unsure at all n locations
ctcatccatcattggtaaaattgtcgcggatatctctttttcattgggttgatcttcgatggaaatccttcccaattttttgtttatccaaaattcatggcctccgttcgttgtacgtttccatatcgacgttcaggtggacggcagcagggagggcttttacctttacccaaatggtcggaacaaaaacatggacttgtcctacgtgtcgcaatttcctcccgagtcgggcaaagttcaggtggggtttatgttatttagttgtcacattgcttaatcggactcaaccggcacgatcagcagggctgcaaaaaaaagcacgaaaaatgaccagaatatgcacataaatatgcaaataaaattgccaaatatgcacaaaaatcgcaaaatatgcacaaaaaatcttaaattaggggtgcaaaataaataaaaattttattcctcataaattatatcggttgtttttgtaattgtaaatcaaaaatttctcaaggttttcggcagtgaaactcactgttgacccactcgcgcatcaattcagatttggatttaattttaggcattttcgaaattttttcctaagagatagtgaaatctgaaaaatttgacgaaaaatggcaaaatatgcaaaaaatctgaaaatacgtacaaaaaatgacaaaatatgcataaaaacccaaatatgcaaaaatatgcaaataaaagtcccgatttttatacgcaaacacaaaaaaaaaagtgtttttcctactatttagagcatggagaagccaggaaaaaatatgcatttgcatattttttgcagccctgctgatcagtgaccgattcattcgcaatttaattctatcaaaatttcccaatccgcttgatcatttctgaataattctgaattttgtgccaaattataaatttagattttaatgttcaaaaaataattattttatatgtagaaaatgatgcaagtaaaactcaaccaaaaaataaaattaattaaaccaaaaaatgccctctctcccgcaggtttcgtcggagcaataccaaatttactgtgagatgggcacgacctttgaattgtgcaaaatttgtgatgaacgcaacaaaaactgcaagttggagccgtgcgggcatttgctatgcaaactttgtctgatcagttggcaggtgaaaaatgggagactttctttggatatacgatttttagagaattttctgaaaattctatggtgtttaagggatttttgagtattttatttatttttaatgaattttttcattaataaacaaccaaaaatgatgagttgatcaaaaacaaaaaaattaaattatttttgaggttttcacgaattttattaaaattttttttcatttttcatttaattataatcttaaaataaaatataaaatattatttaatcttcaatatgataacgaaaaattaattttttatataaaagttattccgcttgctccaatggcgagatggccgagcggtctaaggcgctggtttaaggcaccagtctcttcggaggcgtgggttcgaatcccactctcgtcataattttttccatttttcatttattttttcctatcatttttttttctatttttaaaaaattaaaatttttatttcattttaggaaaaagcggacggcgagaaaaattgtccgttttgtcgatgcgaaatcaaagggaccgaaagcattgtgatcgaatcgtacgacccctgcccatcgtcatcaacattattaacaaatggccacactaagcaacggagtcgagccgaagcgcagcaacacaactcgaaggcggcggcaacaacgacaacgccggcttcttcaatggcaccagaaaagccaaaagtgcctccgcaaccgccgccacgacgggtggccaacctgcaattacataggtggatggatacctgaaatagcaacaccaattttataattttgttgttttcttttaaaatggggatcatacaaaggggagagggaggggtcgactcccggctcccggacaatccgtcagtggtcaatccgtcagtaattaatccataagcaaatttatttttaaatcactcagatttatttgtaataatgtgagattaatttaagtcgttaaaaatatgaattaataatttgggttattttataaaaattatgaattaatcttttttaaaagaattaaatgataatttctcgagatggtcaattaattgaattaaaattaattagaaaggttagaatctataagaaattgtatttattaaatttaacaatcattcaagcaagatttttaattattgctcaaaaaaattttgtgtcgaatagtacactgacggattatccactgacggattgtccattactgacggattgtccttcacagaagagttgtccactgacggattgtccactgaatgattgaccactgacggattgaccactgactgattgaccactgacggattgaccactgacggattgtccactgactgattgaccactgacggattgtccactgactgattgaccacttacggaatgaccactgacggattgtccttcactgacggattgtccactgacggattgaccactgacggattgtccactgacggattgtccggaccaaattttgtctgccaggggtgaaagtttggaagaaggacgcttatcaaaaaaattgcatgccttcaaaaacttcttaaccgaataatttccctttaaaatttattctctattttatttttcaatattatttaaaagggaaggaaattataaaatcaaattttaaatcaattatttcatcattaataacatgactaattataattgatttggtaatttcaatttaatgaagaaagaaaaaatttagaatcaacaagttaaaaagcaaatatgaattgcaatcattgatatttttaataaataatattaatatacaattatcacaattttgattttcgatattttgnccctaaaaagatggtgaaaattaattttgtgattattttcttctccagggtgaggttctaattgatggaattgatgaagatttatttgat

SEQ ID NO: 79167 - DNA, 504 bp, Heterodera glycines
atgtcagcgaaagttaaaacggaggcgtcgtcgccaaaacaaatgaacgaaaaggcggaagagaatgaattgacagagcgtttggagttagactttgtcgaagtgcgccttttttctcgatagtatttggcaccatcaatccaaattgattgctaaaacttggcgaaaatggctaaatttcctgggttttcccgccgtgcagaaaaatttaagggaagttacatttgtcaaaaacttgggccagaagagtaaaaacttgtagagcctcttccgaaattttctttcttctatacgcacctgtttagaatgtccagtttcacccatctttatgaactgtttaggagtcagtcggcgacgattgggacggaaatgccatcatggaatgcgacgacactttagccaccgcagatgaagcggaggaggagggcccactcaaaccgtcgcccgactcgccgcgttcgttgtctgccccgcgttcccccgaagacgaagtggagacaattg

SEQ ID NO: 79168 - DNA, 272 bp, Heterodera glycines
gaaatgaatgccattttgaacaaaaatagcgcttccgttgtcggggcaacattgtgtaagtaagaagaatcgggcattttctgtggaaacagagaacattgttcagacacgacgctttttccatgtgcggaatgtgccaaaatgatcatccaatcgcgcatcagtcgggttgtttatttgagcgacaaaaataccgtccaaatggaggcttcgcgtcgccttttcaacatcacaggcatcaaattcaggtccgtccttccttatccctctcg

SEQ ID NO: 79169 - DNA, 687 bp, Heterodera glycines
atggctgtgaacaatgaacaaatgatggtatggtggcatgaacttttatataaatttaatttgtgccggttcatttggggtcagtgcgtgcggtgccgtgcccaaaacgatttttatgcagtcagaaaaaaaaacaaataggcgcataacttaataaatataaattttgaatacgattttttgagaaaaattttttatttcttaggtgagtatttttgaaaattttatgctctttcagacaatagggagagcttaggaaaaaaaataggtaaacacctaaaaattgtatccctagtcattacaaatcgtcgtaactttgatgactttttttttattaaactttatttttgttgttgcacatttgatggaattatgaggcttttgtcagcacgttaatttggattaaaagctagataattatttcagttcgaaagaaagccaacaaatgccgatattccgtataataatgacacaattggaacggacggggagggcaatgagaaccaattgggcattgtcaatgttgtaggggtggacaaacggcggcggatgactcaggtggtctggaagatcggacatgacatttttacaattgtttgactggtcgtacattttccaagctttttttagcaactaataattatttccaaaatttttgtctgcctgaaaattcaatttaatattaaa

SEQ ID NO: 79170 - DNA, 651 bp, Heterodera glycines
atgttaaaaattcgaaattgtatttgtaaagtttgaaaagcaaattttttgcaattgtcaaaaaatgctctaggcattgttttgatgtttttaaggccaaatctgtatttttacacaatttttagcatttttatgagggttaaaatccatgtttggcactttttaaggcatattatcatatttagcatttttttagtgcatataatttaaccctaattatgtcacgaaaaaaacggacaatcatagatgaacccgtcggcaatgagctttttcgatgcggacaatttgtttgccttttgtaccatacgaactgtttcaattggttgaacctcgtcgtacaatttgaaacggcataatttgtgcttgctggggcccgagtcgacaatgtaaatgctttagatcaagaaaagtttttttttaaatattaaaaaataaaataaatttattgccttgatgtatttatttttacagaaaggtcccgggaatcctattcaactcggttcccactctcccgcatcgacggatgggagctttaatgaaggagggtatgtgttaatgatgtgcgagaaaattacccgggaatctggaactgagacctggaaaaaagccccctggaaacatcaatgggatcccaaaatacccggaccctag

SEQ ID NO: 79171 - DNA, 285 bp, Heterodera glycines
attttctaagaaaaaataggagttttgggggcgcggcggtgccgataggcgccgccggggaaaaaaattggaaattttgatcatttataaacagtttttcactgaaaattagccaatttataggtaaaattttgaaaaattttatgggaatttaatcaattcttaggggtgtaaaagtcgcatttcgcgccaaaaagcgaaatgcgaaaagcgaaatgcgaaacgccaaaaatgcgaataatgcgaaaggcgaaatgcgaaaagcgaaaccctcggccatccctg

SEQ ID NO: 79172 - DNA, 1135 bp, Heterodera glycines
atgatcaaaatttccaatttttttccccggcggcgcctatcggcaccgccgcgcccccaaaactcctattttttcttagaaaatggcccaaaatcgcaaaatttggtaatttgatgaaaaactgttcgcagcggcgcgccaaaactcttatttctcattagaaaaatgatacaaaaatcacaaaatttgatgattttttggtgaaaatctgtcaacaaattttaatcaaattttcaaaaattttcccggcgccgcctgccccctcttccaaaaagtttttttggaaaaagcgcgcctcaaaaaagcgttttattgatttttaaatttggaataaaattttaaaaaatgatttttgctttatgattttaactattaaaaagttgtagaaaaaatttcgcttttcgcatttcgcttttcgcattttcgcatattttggcttttcgcatttcgcttttttttcatttcgcatttttcagtttcgcaaatttcgcttttcgcatttcgctttttatttttcaatttggcccatccctggattgtatatattttcgagttttccgcttaaaaattgcaatcagtgtacggaaattttcaactgatattcgacttttatagattttttagggtgaaattcagaattttatgttcctgaaattttgggggcacggaattccatctttcgcgcttgtctttttatttctctctctatctttcactcagtctattctttcttttgttatctcatcactctatttctctctttcctcctcctctctctcttttccccactctctctctctctccttctctctctcctcccacatctttccctctctatcccctccctatctctctctctctctcgcctctctgtctatccatctctttctccctcccgctctctattctatctcccgctctcctctatctctcattcactcactctctcaacgcttattcctttttcagcttgttgctgatccaactcgtttgctcggcactttgccttacatggatgaagtgcttcgaaatctcaacaaagatgctgctgatgtcgccgtagcagctgatgatctggcaaagcgggaggaggaagattcggagcagtacacgggaaaaattctgtaaaaataaa

SEQ ID NO: 79173 - DNA, 995 bp, Heterodera glycines
atggacaatccgatgaacaaagacaatgaacataatgaacgacggtcgtcggttgggtcagtgagacgacactttgccaatgcatcggtaaaagagagaagagaggacaaattgcggaaaaaagagtcgacggtgactaatgaaagcaagtgagtaggggaaagagtgttttgttaattgttcacttttactgttagactcagttcggcaagcggcggcacaacaaattccatttcgtccccacaaaaacgccaacgtgccgtttcggattttggcgcttcgtatttgcccgcattgaaaaccgacgacattttggcattgggcgctgccgcaacggaagagaaatcgcacgaaagaccacagcgttacagaaggcacaagacaagtgctggtggattcctcgagttaaagttcagaaactttccattttctgatttttaatttcagttcctttgactccgactccgacagcggcgataacaaaagcggaaacgcaaaaagaataattgactcgactcaacgaggcgaatacaaaccacaattgccatccgcattgtccatgtactcatttttgggcgacgaagaggaggaaaatgccgaagaatcaaatgttttctccaaatcgtcggctaatgtgcgcttaaacgttgaccatcgacttcggcccaatttcggcgactgtttctgtttgttatccctctctcaaacccaaacattgattgatactttcagcaattgaaagtcgcaataggccagaagactcttccgacggtcgctcgcccttcgcttctgcagtcgaacgtttcgctcgggtggaaaatgcaactgatgcggtttcctggagcagtgcaaagctatcgacaaaagaggacagtcgttccaaatgggggtgagttttgatttgccctcaaatgtttgtcttctcagaacggaacaccccaataatttcaataattcacaaatagacaagtcattatatttattttttaaataaa

SEQ ID NO: 79174 - DNA, 1992 bp, Heterodera glycines
  unsure (1)..(1992): unsure at all n locations
ctgatgagtcgaaagggcgactcgacgactcttttttggactcgnccgatggaattgtcagtggcttttcgccagggacgaaacgaaaaagtggcgcatgaaagggacagtcaaagggacgaaacgacgacgaaagagcaaaacgcgcaatttcaacgcaaaaattcactcgaaccttcgcgttgcagcaaaaggagggaaagcggcgggagaaggacacttccgggccccaaatgtgctgcgattcaacacctccttctgagtttcccctttttagtccctttcgcttcttccgactgttcccgaatttctgagtccaaatgttcggcctatcattcggctcagagcgcagagtatgaaaagagttccgtggtttttcatcgcattctttcttcacctccattctaactttttttagaagaaaatggtctcattgcaccgttctgactcggccgtggttttcgtccgtcttttgaatgggcacagtgtcgaagtgaattgccggaccgacactttgattggctcggtctttcacaccgttgccgaagttcggtgcgaataaatccgttattaatccaaaatttcagcatttgaacataactgaacatttgttcttcgggttggccctccaaaggcaatttggggagaacatttttctggaggagcatcagcgacttgagaaatgggcgccgccggggtggaagggcggggccgggctgaggcgaagcttcggagccggcggtgccaatgcaaatttaaatttaccgcgtcgtttcgtttccatttgtccaggcactctttcccgtcacttcgacccctccgcgagtggtggcgtcgaacagttcgcacttttgttgcgattccgttactatcccaaaaaacgcgaatttgtcaagttaatcaaatatttgttgtgccgtgccacgactccattcacaaatttgcagaacggcgaacacagcgcaccaattgtacctccaactgcgccaggacattctcagcggaacgctgcgcttttcgcccaaagagcgcgcgatggaaatggcggcgttggcattgtgtgccgaagcgaattcaattccaaaaggggacgaggagtacttcagaatggaggattacatgccaacggtaaaacaaactcgaacttacgaaatcctgatgagctatttgttaaccatttgctcaaaaagattattttgtgatttttcttgtagaaattttacgcaatcgaagcaaacgaagtccttcaaacacagcaaagaattgccgaaaggcaccgccgtttcgccgcctcttttggctatttggaggcggaagaacagttcatcgcgcgatgccaagccgaagttccgccaattccgctgctttcattcactcccttttttctccctttagcccctttatggtgcccatttttaccgtgtgcacaagataaagcctaagcgtggctatgccacgccttcccgtccttttttgtctgacactcggattgttgctgtgcttccttccggcattggcatttgtcgtgaggagcgaaacggcgcacaacgcctgctaaattcaacacacgaatggttcgttcgactggtgttttttaaagacatattatgacatttaccgtccattttcaaattggtaggcatacgattcggacactccaattcgaccgaaaacgctttctgttgggcaccatcgaagagaacatcgccgtggaccacgttttctacacggatcaccattcgaagtgatgccttcttttttgttttgtccaactgcaattttcataagggcctcttatttggttcgttttgccgcctctcagcacagattcatgctgaaaatgcgccaatggcaggggacgctgaacagaatgcatttggtggagtggcagaaggacgtcggcgtggaacaaaggaggcgaagcgaaggtcgacgagcgaagcggggaaattggaagacaaagcggaaaaagccatttctaatggggggggg

SEQ ID NO: 79175 - DNA, 142 bp, Heterodera glycines
ctaaaacagaaaacatctgcgaatacaattttcataacattttgtaaggtcactgatggattttgaaaatgttggcacttccgtcgctgctccatttttggcaccattgagcggaatcgttgtcacatttaccggattgagc

SEQ ID NO: 79176 - DNA, 1358 bp, Heterodera glycines
atgacggtcaacgctttgtatgtgctggttgccggaaaatcaaggaccggaaagatgttccaagcgacagaaaattaccaaccagaaaagtgcttgaaaatggatcatgggccagcgatggtgcaaagtaccctcacttttgcgaaccgattcgaaaaacaagtaagcctctatggctgacttatcgtggaagaattgcacacgaggaaagcgatcacttccaagaactttttttgctagagtgtacggacgtgatggcactcttttcttcgccccgtcggttggcgctttttaaacgaacggaaacgattgtttgtgatggcactttcaaaatggcaccgcgaggcatttatcaagtttaatgtgaatatatttgattaattcaatatgctcatccagatttaccgagtatttggatttattgcacaaacgcattgtgttccattggcatgatttgctcagatttcccaagcgaattttgactacgaatctgcgtcagtgaatgcattttgcgatgtttttccaactgtcagaccaaaaatgtgcgcgtttcatgtgaagcaagcgataaatcgccgaattcaatcaatgggatttatgcaattgtacagctcaaaagaatcaaccatgctgagtcttaccacggacgacagcaacgcttttaccagcctggtttcttgctcggccgatggatagcaagttttcaggtacttgtttgtctctaacttttgtatcgtaaatgataggaactaaggcatgctgaagaagaaaccgcagtggccgttgatgaaggaagacaattgccagctcgcccgcttgaattaactcttgaattggacagaggaattgcctcagcgaaggcggatattttggcttttttgaacacggattactgcaatgatgaatttgttgaagccatgtctaattattatggaagaattggacatttggttggcttcaatccgccgtcaaaccgtaatgaagctgaagaaatgataattgaagaagatgcaaggcttttgcttgaacaaagtttggatgaaaatgggctgcttgttgatcaatactttgaagaaatgggtttgaatgaagtgcaagatgaaaactcgcctgatgttaattcagaggatggagaagtggatatcatgaattaattcatatgaatttttatttaacttttatatttgaagatgcttaaattttacattgttattaaaatacatgaaaattgggtcagaatcatttagactgcaattcattagcgctgagtcttgttttattaagcagtagcgtgtaatacataaaaattttcattgaaaatgaagtttttaaccaaaaaaacgaatcgggataataaa

SEQ ID NO: 79177 - DNA, 365 bp, Heterodera glycines
gaaatcacagtgtccggcttccccggcgccgaccgcgttgacattggccgtctcgtcgagttgcacggcggggtgttcaccggacagatgaaccgttcttcgtgtacgcatttaatcgcagccacaaattcgggcgaaaaattccgtaaggcgcgcgaatggggcactgtttgggtggtgacgagccgatggcttcgcaaatgcattgaaacggcacgaccgattatttaattttaatttcttcattttattttccagggatatcgtttatcggagagtcgttttgcgcattcacacgacgaagacaaacagcaaagggtttccccaagtttttctctgataacgaaaaaatgaaagatatttga

SEQ ID NO: 79178 - DNA, 1242 bp, Heterodera glycines
ttgccccttccttctctatttcatgctttctcgacatgtagacgatgttctcgttgattaagctggagagtcgcgtcgtcgatcgcatcgatgcccccattttgaatgtatctccccccaattcgcaaatttcttttcgcgacatcactttcgcgtccgtctttgcttggtatgtcagccaaagttaatttcatttatatttagttacatccccggcaaacctattctccgttctttgtcctttgacgtgccttcgggcaagaaagttgccctcgtcggtggttcgggttccggcaaatcgacgattgtccgactgctctaccgtctctgcgacccacaaagcggtcaaattcgcattaatggacaggacatcgccgccgtcaaattggacagccttcgtcgggcaattgcaattgtcccccaggacagtgtgctgtttcatgataccattctgtacaatatccattatggggacagtgcagcaccagtgaagaaggtttttagaaaaataaaataaaaattgcttgaaattgaaccaaaggttttctgtattataattttttaaaaattttaaaatatcaaaacgaattaggtattcgaagtggcaaagactgcggaccttcacaatgccatcttagggatgcccgcgggatacgacacaattgtcggggagagaggactgaaactttccggcggagagaaacagagagtagccatcgcacgggcaattctcaaagacgcgccaattgtaagggagtcaaagaaatgagagaattggaattggggtattttaaagaaaagggacgtccgtctttttctcagattgtttacgatgaggccacttcgtcattggacgctattactgaggaaaatataatgcgttcgctgaagaaagcattctctggtcgaacgtcgttgttcattgcccaccggttggccaccattgtcgacgcggacatcatttacgtgttggatcgggggatggtcgtcgagtctggcacgcactcccaactggtggggttgccaggtacgacttaattcgaccaatgaacgtactgacgcggagtcatttttgtaggtggtaaatacgccgatctttggcattctcagcatcgaattggagcggaattagaattggcacaaagagaggcggagcggcagaagaaaagagaggaggaggaggtaatgttggacatggagttgagcgaaggcaaatgctgtgggggaatgacttgcaatcgc

SEQ ID NO: 79179 - DNA, 1277 bp, Heterodera glycines
atgaatctttctcggcacattcccagtcaggcgttttttcctgatgtgtcttggagcaatcccaatcaggcgttttttcctgatgcgtcttatcctttgcgcgtttccagtcaggcgtttttccctgatgcgcattatcaattattttcatccgttaaaatcgtttttaacatcaattcgctaccaattatctcacccgttcgttccaatatattgaatgtattgaacattaaatttataagcatttgcgacctataatttaacttacataatatatatatatttttagccttaaattaaaaaaatctcattttcaattctcttattattattgatttttaccatgactatttaacttttaaaaaagaaacgattactgctgaaatttaaaaattagaagggtaagacgcaataaaactttgtaatgattaaaagcaaattaaaattaaaatagaaatgttttttttaattatatacaaaaattgttatgcagaaaatttaaatcaaagttaaaataaaaattttttttatcgagtttggaatatctgtcgccaatttttctattggcgacgagaaggccggtgccaacccgccacggcgtgcgcgagtgctcgcgttcaacaagggcatggacgggcagcgaatcgggagagaattggacacggacgaagaggaccgccatggggactcagttttctcggtaccgaatacgaacccgtgggccggaccctccaagacgaagaaataccgaaagaagagcagaaaggcaactagacgatcgggcggactcccgattcatcaatttctcaatcgctgatttcgatcatttttcctttcgttattcgtaccatacaacaccattttcctattcttcttgtcccatttttacttcacttttcaaattcatttctcatcggctggctaatctccggcccaaactttgtgcaaaacaattttgcacaaagttctttcttctcaatttccttaacttttcacatctgccaatttacattttatttttatgcgccatttctttgttcacatttttcacatcacaatttctgcccattttttgtcccatttttctcatcgcattaccgggccgtctgtcactccgcccattttttcgaattgtctatttaagcggccctgctcaaggggtcgctctcttcgcttccttcacccccccccccaaccattcgcgtttattcgttttgctggacttttcgatcaattttcaccatttacgcatttttaattcgtcgatcgcttcgtta

SEQ ID NO: 79180 - DNA, 1364 bp, Heterodera glycines
agggcgatgatgaaaaacagtcaaatttagccttatccctttggcactacggcaaagtccgagcggacgactgactttctacgcgatttacgagtacataatgaacaaattcccattctatcggtcagaatttgagtgggattttatcaatttaaatttgccgttttcagcacaaatcgaaaggcgtggcaaaacagcataaggcacaatctgtcgctgaacaaatgcttcaaaaaggacccccgcccatacgacgacccgggaaaaggtgaacacggacggagtcggcactaaattcacaattcttggcccaattttcatgccaaactcaccaattgtccccatttccttggctttctctcccaacattcgcccccccccccccaattcattgaagcattctgtaaatgacagccgatcggtggttgggccgagcacaaatttacgacgatcataacaagtcgagggagagggacaaatgattgattgttttgcggaaaacagaaaatggcaatgaaagaaaaccatgggaattttcagggaaaaaccttgaattatgcaaaatccgtccctttcgaattggcacttttctaaatttttcaatttcccctcagaatttttcatcactctcatttgccaggcaattattggatgctcgaccctgatttcaaagacgaaattttcatcggtgccaccacggggaaactccaacgacggcgacgtccgaacggaattgggcacaattaccaccaccagcaatacggcatgctgagaaaaagcggctcggccgtgctgaaagggctgaacgaaggccggcccaatcaccagcacggcctagtgcagcagcagtcaatgccatgcctgcagcagagtccgttcgcagctccgacttcgtcccaatcgctgctatgccagccgagcggcgcggcactggcggcgctgggcacaatgccggccaaagtgccggcacagcactcaaccacttcgccattcatgcggccaccgccctttttctgcttggccgcccaatcgcctccgcccagccatttgctgtcctccccgctgtcgctggtgctgcactcgccgcctctgctgccctctccgctgttcccccaacaaatgatcgaagcgtacgcgcaacacagccaaaacgaacagtcgcagcagcacttggcactgcttcaactcatccagcgagcgcatcagcagataatcaccaatcagcagcaaaaaatgatggtggaagtggccggggaagggaacggcacggccaattgagacgaaagtgtaataaaattggaaattcgactttgcttttacatttatttattgggtgtaaaatgcatttatatacaaagaagcat

SEQ ID NO: 79181 - DNA, 1363 bp, Heterodera glycines
atggcggaaggtaacgcaagagtggggaagagacagtgtgggaaagccgagaaatgcgcagaggaatagtgtgtgcaattgagagcgcgagagcaagcgaatgaaaggggaaaaatttgagtgagagagagtgtgtgagggaaaagaaaaaggcaaaaaattttgagaaataaggaaatatgtaaaaggcgggagaatggacgagaagaaagagagcggaaaaatagttgataaaattgagacaacacagaactggcgaaagaaagagagataatgaggaaattttccctatgtataattttaatttttgtcaataatttgtaaaatttaaagaaactttcttttaaaaaaaatttcaggcgacgccagacccgtaatcagaaaaaaatttcgggagcggcaaccgaagagcttttttttttgctcttcgtgccaaaaaaggaattgtcgccggtgttattttaaaattttcagcgccggagagcaaaaacatgaatttatagccgcaaaaaaaggaataatttttgccattttttggttaaagtttcataaattcggaaaaatatgggttacagacgacgggtccctaaaaaccccgtatacaggtacgacccgtattcgctctccaaccgtcactaatcaggaaatataatgagaaaaagagaaagcggaaaaccaagcgagagaaaaagagggggataatgataataattagggtcgcgacttttagtgacgaaaaatcccgaaatagttaactaaaatagtgacgaaaaagtgccaaaataatgaagaaatagtgaaaaaagtccgaaatagtgtcgaatagtgacgtaattttcagccaaaaattaagcaaaactaatttttattcactgattgcagttgcaaatgagctacatttcctttataaaattctcttagtaaatattgacattttttatatcaaaaattttgtcaagaaaaaaaatttgggggaagaatttttgaaaaatttttccaattcttagtggtgtatttaaaaaaaattttttggtcgattcttaggggtgtattttttgaaaaaatttttaggtcgattcttaggggtgtattttttggttttattgcatttttgttaaagaattttccaaaaaatgtcgaaatagtgacaaaatagtgacaaaacgccaaaatagtgatttttaactattttagtgacgtccaaacgaaaaattttaatgtagaaatgggttttttgagctcctttcttcaaaacaattgagcaaaaaaaaagttttttcactagaaatcccgaccctaataataatcacttttaatgcaaatatttatgcttatactatacatatgcattttgtgtaataaa

SEQ ID NO: 79182 - DNA, 696 bp, Heterodera glycines
atgcactagttagttttttaatttcatttaatcgcctctctcagtttgatatatttcttttataaattagttgacattcttcctttaaaattaaagaagaatcggcacaaataataacccaatttgatatttaaatcaattagttgatcattaattaatcttctatatatttattaataaaaagtatctattctatttttcattctctgcaaaaaatttataaaatatggaaatttttgccgagtttaccatttccgaggaaaattcaaaatacctaaaaaatattaaaatattttagcgaggccctgctcgacagtttttggctgaaattcaaagatgtgggaaacgttcttgaacaaaatgtgccattagcacaaatcattttatgggcgtgggacgacaacggggcacaagtcatcaaagaagtgattaccgaccaaaatgctgtttcacaaaattcttaatttagtcagtgatcctgaaaagcggcggaatggtttctttaccggtagatgcaatttcatcgccttcaattgtcgtccgttttctcaaaaaacgcgaagactcagaaaagtgaaaaatttacttcatttgtattttggttttcccctaattttttcatttttctccagtccttgccctccgctgagttcgccagccgatgatttgactgtgcatattggagaccggcaggta

SEQ ID NO: 79183 - DNA, 356 bp, Heterodera glycines
tgacttaattggtgatttattctttttgaataccaacaaaaaaacaaaacaattagttgaacaataatgctaataaagtgattttccattggtgggctttgcatccgtttttcgtccttaatctccgttaatccaaattcggttctccgtttgaacttttgtcacgtcacggggctcacccaaacattgcaatgcttttcgggcgcgtattttgaattcaacggacaattgaaagcgttgcggaaggcgggaaaattgcgcaaggagccgaacacgcggaactttgcgggagaatgagaatcgccgatcagctgaaggtacgtctcgaaatcgtcgggctgatcacaccacggctg

SEQ ID NO: 79184 - DNA, 615 bp, Heterodera glycines
ttccaatgataataagtgattacattgtgctgataatgcgcttttgtcagataaccacggggtccaatgggacgccgaaggtgcggccaacaaatggatggacgcgcattcgcaacgcgcattcgacagaatggccaaatgcgtggtggacgagtactcgcagctgtgcccattccctcccgatggcattgttcaacccgcgtgcattgacggagacaaaactcaggcggaaaacatcgccgacaacggaggtcaccaaataaacggactcaaatgtgatctgcttttgccttcaaaggtctccacgccgccttccgtgcctatcgctctgcgctcgaagtggacggaccaagcaaagcgttaccgggcaaattggtcggccgcttcaaccacgaccagctgttcttcctgtcctttgctcagccgtggtgtgatcagcccgacgatttcgagacgtaccttcagctgatcggcgattctcattctcccgcaaagttccgcgtgttcggctccttgcgcaattttcccgccttccgcaacgctttcaattgtccgttgaattcaaaatacgcgcccgaaaagcattgcaatgtttgggtgagccccgtgacgtga

SEQ ID NO: 79185 - DNA, 228 bp, Heterodera glycines
atgttaccgtcgtcattcacaacaatttcccgcaaagtccgttcccggtaagtaaagcaatggaagtgcatttgcaaatatttgatcttttttacaacactatcattaactaattaattcaggtgcgctctttccatttccggaaaggtttgaccactgaaattgaaagtttaccagcggcaaataatttcaagaaaaactgaccgataaacgaacaaaaaaaatcga

SEQ ID NO: 79186 - DNA, 327 bp, Heterodera glycines
atggacaaagtgactccgaattttaaagaggagaaacgaacaaatgccatcgttgttcccccaaaggatgcaattggtacaaattaataattaaacaaaaaatgatttaaataattattaaataataattgaaattaatatttttcataaatttcagtgaaacgaaataataaaactgctgttattgcccatttgcacgtcttttaccaaaaatgggctctttttgtggtgaaacatcgcactttaataatggcaatttgctcaattctttcgactttgggcgcagtgaaaatattcaaaacgccgtaaatgaaaattaattaaata

SEQ ID NO: 79187 - DNA, 600 bp, Heterodera glycines
aattggtacatcaccagcagcagcagcaacttgccaccagtggcctattccaacgtcaacaacaacaaaatttttatgctgaaagaaccagcaactcctcgtcggttgttacgaccgcgctgctggcacaacgtaattagtgtgccaaccgtctggtctcgagagtctcggtatcggttcttgaggccaaaaaacgatcggaatttttggagacttcatgtcatttaagcagctcgagagtctcggtatcgaatctcgagcccatgaaaaatattcgggattcttagatacggtatatgttggtacagtcactcaaaatataagacaaatgccatttatacatataggcacattgtaattgtactctcttcagatcccctggttgtcaacatggacaccaacaatgttgctgttgctggcgatgataatgatgttgccatagttgaacaacaacaacaacaacagtgtcggaatggtggtgttgctgctgatgagggagaaaatgctgcagcaacaaaaatgacggcaacaacgcccgtggttgttgaagcagtagcagcagcacacgaaggccagcagcaaccgacggagccgaataag

SEQ ID NO: 79188 - DNA, 1510 bp, Heterodera glycines
atgcgtcgctcgaacttcgttaaaacccaattggaaacattgccacacatttttgcacgtgccaaagtactgctcgacgaaggggaaaatgccgcctctgttttgctccatcgctgtttggcacaaacattcaaaattgtccaggggttggttgctgaactcatctcattcaattaacctatccaattgcccatttcagttttaatcagcttaccatgcgcaaattcctcctttcatcggctttgagcaaacctttgtcggatggcgggtgggcaatctgttctcgttcggagttggcaaaggcgcgcattcgttcgctggtcgctgtgctgcgggcaaatcgaagggcgtccgacacgtggaacgaattaggaaaggtcaattaactaattagcaggatattattttcctaacattttgtttaggcatttttggacacatttttattaaatattggcaagaaatccaagccaaacacttttctcgagaggtgctctctcgtttttatttctttccgttaattttccgcttttttcctttcagtgctcttcattgttttcaagcggctgttcgtttttcgagctcaagtctcaaaaaatcggaatacctttgcaatttgggtgatatttaatgggttgtttaccgattttgccgttgaaattgccaattttcgttgatttagctcgactttatttgctggagggaaatgcctcccgggcccaacattgcctcgtccgtgccattcagctgaatcggcactgtgccatcgcgtgggctctcctttcctttctctacctccaacttggccttgttggtgtttcccgaatatttcaataaattaaacacttaaaattctcagaatgacgaagcgcttgaggcgatgaacaatgcgcaaatgatcaatccgtcaatgtccgaaacttggcttccacacgtaagtatttcccaatgtagcccttaattgctgttttaattactttcaatttactcttgattacccctcgtgcccatccctttaggccattcatgccgaacagtcaaatcattatgacacgatggatttgtatcggcatgccattgttctgaagccatccgtcagttttctttctttttatgatatttgttatatatttttctgttttaaggcttttgcagtccaaaaatattgttactttttgcttgaccgccaacggcgacggaatgccctcgcggaagggtccatgataaacttcgaagtgctcaaaagccttttttgtaattattgtcccattttgctttgttccctttaccccccccccccccctcattaagttaattgccctctcagtgctcaatttgttcacgcgttggcttcacttgcggagcatttttggcatttggaagaagcggtggaatttttttgcgagccgaagagtttggaaaacgttctgaaggaggacaaaataatggccagaaacaaagagcggattctgatgttagtcaaagcgaagaagcgaaacatttccattaa

SEQ ID NO: 79189 - DNA, 789 bp, Heterodera glycines
atgtcatttcaagaattggaggcccaatggattttggttgagaatgaattcgatgccaaaaaattatcagaaaaattgaaaaataacggagggaatgtggcggagggaatgcctttgtcttcttcggattgcgaggagtcctttcggaatgctttgttgcttaaatgtctgattagggcaggtgaaattggcacttcctatgagttacaggtgccttttcctttaaaaaacgccattcttttcaaaaaattcctttcagagtgaatttgacgcgttgttccccgataaaaatgaccaatctttgcatatctttcatcatttattggcgctttttcatctatttgtggacaaacatttggaaaatgcgcgtgccaatataagaaaggcattggccttcagtttcattccaattttaaaatgccttcaaatttcaggcgattgcttttgcggagactgacattgaggacactctcatttcggcacaaattttcatcgccaaaggccaacgacaattggcgaacactcaattggtgaacgcggcgaaggaaggcgagtggacggacagttacatttattcggaaaatgcaataaaacgaccataaaataggccaacgaataaattatgcaaattttagcacccaatgattggcgtgttttctattggctttccgagaatttgctggcgattggaatgttggagaaggcaaagatttgtgtggaacacgcgcgaaaaaccaatacgaaaagcgaactgtgcgcgaaactgctggacgaaatcctcgaaaacgg

SEQ ID NO: 79190 - DNA, 488 bp, Heterodera glycines
  unsure (1)..(488): unsure at all n locations
atgccagccgccctgtcccgcgccgcttccgccaatgtgcgactgtccatcgtgttgcacatatttgccaccaccgcccccgccgccatgctgctgcggtgagttttttggggggcgtaaatcacaaaataattggaattttttattgagcaatttggtttttaaatagaaaaaaattagtctatttacaaatgtttcaaaaaaatattttttaattttgattctttcaataaaaaaaaaatattttttaattctgattctttcaataaaactttaagctttatcgaatttttcccgaaattttcaccgaaaaattcttctttattattaaaaataattttattaaaactattttttcactcgaaaaaattattatatatatatttgattanaaataatatgcgagattaaattcgaaaatgaatatttaaattttcaggtggaggaggatatggcaaataatcaaatcaatgccgtgccctttttga

SEQ ID NO: 79191 - DNA, 1030 bp, Heterodera glycines
atgttcagaaggatgctaaccaaaacatacacaaaacagcaaaagcaacaaatggccaaaatggtgaaagaaatgcttgaaaaaaaggttaatcagcatactgtacttcactgctgtagttacaattcaattttaaaatgaacgatttatgtacataaaattctcgtgtaaaaatctcaaaccaatttccaacagcagatgaaaaaggaacgtgggactggtaaacaccaaattcatggacaaaaactaagtgatgatgaacaccagctgagagcgttgccgaatgacggtggatttttttttttattttagattttttgctttgggacgattttgtttttgagattaagagttacctatccgttcgggccaagaaaaataattggtaaattttatttaaaaaaaagtcgggaataaaaatttaaaaatcttagttttcggatttaaaatgaaaattattacaggaaatcataaaatgatacaaaaaccccaacgattagcaaagcgaaattaaattgggaaaaattaagatagtacattaagtattaaaattaaccgattttaagcttttgtgatcgaaaagaaaaaagaaaatcttttaattttaaaattttagatttaagatctgccaatttgaattttggaaaaattaaggctggcaaattaaatggagtttctgagggcgttttgacacgaaaactgagttaaatcttttcactttttggcatttttctttgttttttaagctgattttctgaggaagaaagtagcggctggtggtgaaaatggtgaatttaattatgctttttaatttaaatagttgatattgtgaatttatattaattttagattcgtcaaaaatgccaattgtgctaattggccatttggacccggaacagacaaacgcactcacaaaagcagtcataccaattggccttgaaaagctggcctaatttatgagaaatctgaaaaaagagatactattgtgatgaaattactactaatatttgtcatttgatatttgagaata

SEQ ID NO: 79192 - DNA, 1170 bp, Heterodera glycines
atggacgcgccaaaagttccagcggaagagccattcaatgaagagggattgatcgccgaaaaagtgcgacttttgaatgaaattgaggatttaaagcaccgattggaagaaacagaaaaaaggaaggcggaggcggagaaaaagagaagtaagaataatgagcaaaggccagtagatgaaattgtcctggatatggacgaggaagacgaagaagaagaggaggaagaagaagaagcaccccaagagtcaaaaagggcacgtttggaccctttggccacaaaggaaatagtgcaaaaaaccattaatgaaaaatgggaggcttcgggattgataatgattgacccccgaccggtagattcaaaggaagcgccgaaaggtgtggaaagtcgggattgggaggactcccgccgcttgctaacgagagaagagcgagacagagggtggagtgatttcgtttcaacaataagaaaggaagatcgattaagcgtcattggaaaagtcggacttggatttaacggccgacgtatggccggtaattgcataagaagtgcggaaaagagcattttgcagtcagagatcattcaacctgaaggaatgaggaaacaaattccagtccggaacgaattggaggcaaaagaaacagaagaagagttggagcgaagaaaacgcttcgcagcaaaaacaccggcaacccaagggcagtttgccaattgtgtttgggaggaaacagcacaaaatacaaaagaggagaaaatgaagaaaattgagaacagcatttgccaaaaaataaaccaaattcaacaacaaatgacagaggcgtttggaggattaaaagaattagccaaagaaatggatgaactgacgaaaatcgccaaaaaagaagaaatggaaaaagcggaagaatttcatccgaattcgaaccgatttgccaacacaaatacgtcgacttggcgacaacatgacgagttccgctaccgtaatcgtgggacggtcggcagatgggtcaacaacagccgtggacgcgggcgacagcgcccataccaccacaattggcgcgggaatgaaggatggccagaaatgatcattcacaatcagaaccatcaacaagtggcgcatttaccgttgaccaaagatcaatttaaaaatgattcgaataaataccgaccatag

SEQ ID NO: 79193 - DNA, 388 bp, Heterodera glycines
atgccttacgtgaacgaaagtaagacgaattcaattgtatagggctctccatcttataaaaaatttaattctggcggcccttaaaaaattatcactttttcagggggtgagatgcaggacggcgctagcttttcaatcgtccggtcattttggagcctcgtctacttcttagcattcttgtaatcattcgcagcccattttaacaccattaaactcaatcattttactggtttaagttattgtcggcaaaaagtttattaatgagcaaattttttttttgcaaaaaatggaaaatttagaacctagcgtttttcaaaaatttcgatttaaaaattgtatcattggcacctcaaaaaacgatcattttgtttgcaacttttttgtcata

SEQ ID NO: 79194 - DNA, 75 bp, Heterodera glycines
atgactgttgttgtaaccggtgaagaagagacaaaaagtgtgaagaaacacaaggagaaggatgagatgaccaaa

SEQ ID NO: 79195 - DNA, 155 bp, Heterodera glycines
ttcttcaaatttattggttgaaattgcatatgaaatacatttccaaattttttgactcggtaaggcgctttgacaaagacggctttcgttttgcaattagtcggtcaacattcggaaattggtctcgaattttttcggcaattacgtgcaatcat

SEQ ID NO: 79196 - DNA, 901 bp, Heterodera glycines
atgcaagaaattgcatggatgagttggaaaggtgtgtggacatttcgccaactgacacttcgccaactgacatctcgccaactaagccaaattcagacgtttcgccgactcacccaaaaaatgacatttcgccaactaagccaaattcagacgtttcgccgactcacccaaaaaatgacatttcgccaactaagccaaattcggacgtttcgccaactaagctaaattcggacgtttcgccaactgacattttgccaaaaacattcatttcgccaaatagccataatattaacatatgagaaaaaaaataaacgaaactgtttctttttcatcaaacatatcattattccctgtcacttccctttttgtgttaaagttttaaaatttcttttctacctaaacaaaaaggattttcagattctagtaagaaatgccaacggtacgtgaaatacttgagagtctgcaaaagccaattaaaaggccccgaattccaacaaatgaagacatcgtactgaatgctgataggactgacgcagaacaacaaatgcgtcgtaacacacagaaaggcgatggcggtgaattagcgagaagaagcaattaccgcacacacaattagccaaatggggatggagaattgtatcccgaatccaaaatccaaacaatttacttttacaattaaagtccgaggcagcaaattaaattcacagcagaaaacaaaaacgaataatatcataaaacaaaaaccgaaagaatgagaagggaatgacgtggctgctggtcagcagcagaaacacaatcgatattacagtaatatagaattggcgggaaatacaaattcaaagcaaagggagatgaaaaattgagaaggaaacaaccaaattaaataagtcaaaaatgggaa

SEQ ID NO: 79197 - DNA, 1109 bp, Heterodera glycines
atgcctctgaagagttacgtgtgcgacccggaagaagtgttaagcgcggacgagcgacaaaaactcgcggaaatgctcgactctttccaggaacagacgaaaaatgtaaccaaagtcatgctcattgtcagtgttatgagtgatgatgtcacaccgttaaagaaaagttgtgatttgaaagaagaccaaaaatgccattcaatcaattggattcctttctttatcctccaataaatttcaggacggtggtcaaaatgggtgtaaaaagaagggagtcactggtgccgttgcgctttccaagaagccgctttattttgaaataaatgtgatggtaattttagtggtgccaaatgacacacatagacatttttttattgcttgtttaattattcgtttaaaaagtaatattttatggcaaattgttgaacaacaccgtcgacgcgcctttccgacttttgcatcaatgggagttggacaacgaatgccacaaggcctttctattgactcttcccattgatttgtttaattttggccgcgtcgcattttatttcgccacgccaattttgcaggacgaaataaaccatttgtatgcagcggaggttggccatttgagaaacagaaaaaataacgagaattattacaacatattgcatcaaaaaaaagcaaataatttggcatataaatttattagcaacaattgtttcaacaaaagcgttgggcggatgcaatccatggcattttggctggcataagaaaaataattaatgaccggcatgggactttgtccgttgaatcgggagacagaggaggaggaggaagggaagaacaagtaataaattaagtggataattcaaattctcgaaaactttttaatcggaaaataaaagaataaatatttttacaattcccagcagcaagccgttctgagtgccaatttagtggttgcccattcgtcctccatgttcgctcattttatgctttcaatttgctccattttggcatcagtggcattaacacttggcatcctgtggatatttcgggctcgtatctttttcatgcgctacgacattccactagtgcagtttaatgcacgaacgatggcggattaa

SEQ ID NO: 79198 - DNA, 6990 bp, Heterodera glycines
atgccggttatgcgaagtccgccattaacgcgacaaagagcgttaaacctcggcatacaattgcgaaacgagggcataggagttgcgcaagaacagcagcgagttcagcaacagcactccgacgtcggaaatgctcctttgagcgaaaacgaaaatcgccaaagccacgtttcatcggtttcatctgttttaggaccagacacaatccaccggcgacttttgcaaatcccaaatccacggaacgatatggacgcgcaacaaaatcgaaacgatttggacgaagatgctcttttggatgaccatggtgactcaatttttggtaacgaaaatccccatgaacaaaatttgggtggagaaaatgttcgaaatgcagttagtgttatgagaagcattgaccaggggagagtgcgcgttgatattgtggatgattttgggtttcacccgggcatgacttcgaccccaaacgtggtcgcaaattatcagcgtggtgaaccgagttttatgctcaatcaaccaccggcagtccaccaacgcaatttgatgctggaggaacagcattttcgttttgtcgcacagcctaacgccggggaacgcgctgaaccaagagaccaactttattttcgacaagcgcagcaaccaacgaatgtcgggccgcaacaaaatgccgaatatcatcaccagtacattcatcagcgaaattttccgcagtttgaaacgcgtgaaccccatcaacaaaaccaacgcaattttgttgaaaataaccaacaaatgcgtttttacggaaatgctgctcccaaattttgtcacgacccaataaatgttccacaaacaaattgccaagggccggtacaatccccgcttagtaatttggagtacgtgctgattctcgaccgtcttcccgagcttaaagggaacgaaggcgctgataaagtgcgctattttttcaaaaaattcgtgtctgcgacagagggatggccggacaacaaacggatttcctctctcgaatcaaaaatttcgggcagagctgagcgtgcgttcaatgctgctttggcaaatcagccataccggtttgatgcaattcgccgagcaatgcaagcgcatttagaggagactgattgcagagagatgggtgcttttgatgagcttatgaatggagtgaagagaaaaccgaacgaaagcatggatgcacttgccgatcgggttcagaacgtagtccaacgcgcataccccggcctaactcaaaatttgattgacgaatatgctacaaagcatttaattcgtgctttgtcaaacccggaattgtctttatcgcttgaaatggcacgccggcctggcatgtgctttgacgaatttgtcgcattggctgctcgtgcagagtcaatccaaaaggcgacaaaaaatgtgtcaaccgaacgtcaaaacattgacgaaagaaatcgtcctacccagcgaaacttttcccaatttggacagcaattccaaactcagcaaaaatcaaaatttttacaaagttttcaaccgcgtgaaaacattgtttgttacaattgtaacgaacccgggcacttttctcgtgactgtcgacgacgaaaacaaaatttcgattacagggctaaccaaagccacgcagtgcccgccactggagcaaacagttttcagatccggccaaatggtcctgaaaatcgagcacttccacagacttcaacaaaagagtctgatcaacgtcgttcacaaaattttttaaaacaaaattgcataattatgcaagaagaggcaccacctgaagttttttgccgcggcgtacagctttcgtccgaaatcgaggaatttttcgaaaatgagttcaaaggaaaaaatgaggaacaaaacgaagtgaaaagtttgggccgagtcgggaagattttggtcataaaagttgagacttttggggccaaaacggaagcaatgatcgacggaggagcacaaatttcgttgatcggcgctacattcctgtataaattgatcagagaaaacggcttagacctgcaaaaagcaaattttgcccgtacaaaggaccgaattgccgacgtcaatggaaaggaacttcaatgttttggcacccttacaatgccaattcttcgaaaaggctgtatcgaagtgcctatccatttttacgtgaccagtgccccatttgggttcgacattttattcggaacaaattcattaactgcactcggtttttcactgtacgatgcaccaaacaaagaacttataaagtttgaagaagcgaccaaaaatgaaaatgcagtcagaattatcttcaacacaatactgcagccacggacttccaaattcgtccaaatggaagttggaaagcaatggaacggccaagacgtgctgatttgcccagtgccaaacaaaactgaaatcaaactggaacaatcagttggaaaagttgaaaacggaaaagttgtgtgtcaaatttcgaatttgtcttcaatgacggaacaaatcgaaagcaaaacaatagttggcaatgtcgagacactcgaatcgacatgggaagccgacaattcacttctgccgtcaaaaattttcagaatcgatcattgtcaaaacggaaacaaaattggagaagctgaacaggctttgaaaattggacaaatcccaccggaaggaaaggacgatttaatggatttgttgcacaattttgaacaaattttcgctttttctgaagaagagctgagtcaaacaaatttggctagccatcacatcgacacaggaaattcggtcccagttcgctcaagaatgcgaccagtgccttatgcatatagagagaaagtctctgaaatgatccaaaactatcttggacgcggtatcatccgcccttcatcttccccgtgggcatctccgattgtcattgtgccgaaaaaagatggcactcttcgattctgtgtggactacaggggactaaactcagtcactgtaaaagacgcttacccgttacctaatatcgacaatacactattggcactcgggggtaaaaaattcttctctacacttgatttcctttccggttattggcaaattaaaatgtcaccggattcgattgaaaaaacggcatttgccacggaatttggactacatgaatttgtcgttttgccgttcggactttgcaacgcagtcgcaacgtttcaacgatttatgactcaactttttgagggacttatcaacgacttcgttttcatctacatagatgatattttaattgcttccgaaacgtggaagaagcaccaacaacacttaaaagctgtgtttgagagaattcaggacgcaggccttaaactaaaaatcagcaagtgccattttgctgcaagcgaattaccgttcctcgggcacgtgctaacaacagaaggaattaaaatggatgtgaacaaagtccgtccagtaatggaattaccaattccaacatcaaaaaaggctcttcaatcactgctcggatttttggcctattaccgtaaatttattttcggttttggtgctatagcagctccgctgtattcgcttctgaagaaggacactagttttgccatcggcaaattagaaaaagaggcaatcaacgccttgaaagacaaaattttggacaacgccgttttgcacttcccaaattttgaagcagcaaaaaatgaaccatcccgtcaattcataatgatgaccgacgccagtaaaatcggaattgccgctattctctgtcaaccggatgataatggcaatgttcgaccaatttacttcgcttcgagaaagtgtaacacttacgaaagcaaatattgcccaaccgagttggaagcactcgctgttcggtttggagccaaaagattttcgcaatttatcacgatgcttccaacgagagtctttaccgaccaccgagctcttatccatatgtttaaaagtaaaacagagaccggaaacagtcgcgtcgataagtggctgatgcagttgaactcaagatttatcctacaggttgaatatcaaccagggaaaaagaatgtgatcgctgacattttatctcgttcgccagctttaaaatgccccgaaccaccggcaaaaagcgaaatttcgagaattgcgcaaataaaaatttgccaaattcaaagttcggtggaggaagccaacaatcgtatggaatggatcgaaaaaacgaagcaaagcgaattaaatttcgtttatgagtttctgtccaaaagaattgtgccgcaggagccgaaaaataagcaaaggcttacggcatttctcccaaatttcacaattttggatgggcttctctacaagtgcgaagccgacggaaaactacgtctcttcgtgccattcaccttcagagaagcgctgatcagagaacggcactcaggaatttgtgctggacacatgagtggcaaaaagatttatttgcaactcgcgcatcaattcttctggccgaatatgtatgcagactgcgtcaaaattgccttaaaatgccgaatttgtgcacattcgcgaaagccccgagctaatgaaccaccaatgaaaatcgttcaaacatcggaaccattcgaattagtgtgcatagatatactatcgattgggcccgctaattcgtcgcacaaatacattttagtagcggtcgatcatttttcgaaatatttggtcgcagtcccaataccaaataaaagtgcggacacaattgcgaatgaattcgtcaagaatttcattttgattcttggaactccgaagaagcttcacagcgatagggggaaagaatttgtaaatgaaacgctcaacgaaatcaccaaagttttaaaaattgagaaatcgcttacatcgggttacgaccctcaggcgaatggaattacggaaagagcaaaccaaacaattttggggatgctgaaacgatcaacggcatctaattggacttgggacgagaggctcccattcgttgtctttgcctacaacatcactccgtccgagaccacgaaattctcgccttaccatcttattttcggcaaaacaccaaatttcccatcagaaatttctttgccagtaaacccgaattacacgattgatgtggacacttacatccaactttttcgtgaaaatatcgtacaattaagcgaaattgcacagaaaaactccgaaattgctcgtaaaaatatgaaaaatcagtacgatcaacagccaaaagtcacggcaaataaattccgcatcggcgaaagagcaatggtcatttatccgggagttaatacccgttcagctcaccggaaacttctttggaatcactttggcccatttaaaattttggatctcactgattcgacagcgtcagtcataccaatcgataaaccgaattttgagcctataaaggtcccaatagaacgccttgtaaaagtgcctgaaggtgtaccaaacattagtacacttccccggggtaaaaaccccttcaaaaatcagttaaatgcgctgataagtgtcgtgtgtttgatcagtcgcgaaatggaaaatgaaccgtgtggaaaaagtgcggccatggaaaagatcaaagatcgggaaaccgaaaatgaaaccacaaatttgggcaattctcaaaaattggaacacttgggccgtcatttaattgggcaattgaggacaattgcaaattcagttggtggaaaagtgatggagacggaaaacagctgcgggcctttgctttgggacacgcaatgcggtggactcggcatcgaacaccgaaactgcgtacaaatgacagcagccgacctcgacccagtgcttgaaagggccggtcttggcctcaaagtgatcagaaaatggaaaaagatccaaaatggggatgaatgtggcgattttaaggtgatcggcaccccaatgaaagcccttcttagcaatttcttgctaaaatcgaatgccgtttcatcagtcgccggcggtcggaaattgacacagctgatcgtcagtgctccggttggctttgaactgatcacttactccggcgcacgcgaagaccaagtgaaaagcggcaatttcccaacggaaaaggacatcgaaagtgcctttacggcgtgggtcgaaagatgcgcagtgacaagggacaaattgctgaagactggctacactccgatcgaagtgccaatgccaaatgtcgttgccgaattgccggaatcggaaaaactcggatggaacgaggtgctaaagaaggccagcttcgtactagaaaaagtacgcgcaacgacgatccaccgcaagccattgttcgtcgagaagccaagagtcatcgtaggcgactcatcggccaaacaattgttaaaaatgtggccaaaatcccaattcattggcactgaagaaggcacaatcaccgaagtgatcagagcttttgatggcgcaattttatcatcaaaagtgaaggccgtcattgtgatgatcggaagagattcgatcagaggtgaagaaacgatcgaaaatgtgctggaacgtgtggggcgacttgaacagctgttgaagcgctttagccatgcccctgtgttttggctgccacctcctttcatcaaagagaaaatgattgaatacgaagaactgatcatacgaatgaaggaacattttgggacggcacaaggcaatgtcaaatttgtaacgacaacgccggcgggacgatcagtgctggaactgtggcgctatggctccggtttcaataccgaccatgtgtcaaatgatggcaaaatgacggaaaagggcttattggttttgagggcctgggtcatgtcccaaatcaaagggatgccaaaggaggacgaaaaagaagagtcagaaccgaaaaagaagagtgaagaggggccaaatggagggacaagcagaattggaagaggccgtggacagttcaaccagtcagggtcgcgtggagctcggcatgttcaccagcaccacccgtatcgccgtcagttcgcgcagtcctttccgagtcgttctcgttttggagctgatcgccgttga

SEQ ID NO: 79199 - DNA, 865 bp, Heterodera glycines
atgccaatttggcaagctctatcgatgctcgcctttcggcctttcattacaatccggaggtcggcaccacatttgaaagttggttcaaacggtttgggaaattgatcgaggacgacggaagcacactgtaggaggcctcaaaagtgcgacttctcctcggcaaactcggagaggaggagtacagcaaatatcgggacacgatcagcccaacccagccggaccaagtgaattggaatgacaccatttcgcacctcaaacagctttttgccgagacacgttcgctgttcgtccgtcgcttcgaatgctttaaaattcgacagcaacaagggcaagacatctcatcactaattgcgcagatcaacgcatcatgtgaaaatgccgacctgagtctgacaaaggagcagctcaagtgcattattttggtcatcgcactcaacgatgaacaccatgatttgcgacaaaaggcattgaaaatgttggaggactctcagaaaaatggcaccaacatttcgctcaagaaaattgaggaggaattaagggcaattcaagttgtcaaggagagcgccctttcgctggtcaacccaccaattgccacaaacgccattcgcacaaggccacgacaatgggccgacccagcgcaaagacaaagcggcggctccaatcaaaagcaaactccaaatgccaattcaagcggaaagccaacgcgtggtcaaccgacgcatccatgcggatcatgtggcaaatccgaccattggcgctccgactgcacattcaaggacgccacttgcctcaagtgcaacaaaaaaggacacatttcaacaatttgccggcaaaagaaagcaaaggcaccaccgaacagccaccg

SEQ ID NO: 79200 - DNA, 632 bp, Heterodera glycines
ttttttgttgcacttgaggcaagtggcgtccttgaatgtgcagtcggagcgccaatggtcggatttgccacatgatccgcatggatgcgtcggttgaccacgcgttggctttccgcttgaattggcatttggagtttgcttttgattggagccgccgctttgtctttgcgctgggtcggcccattgtcgtggccttgtgcgaatggcgtttgtggcaattggtgggttgaccagcgaaagggcgctctccttgacaacttgaattgcccttaattcctcctcaattttcttgagcgaaatgttggtgccatttttctgagagtcctccaacattttcaatgccttttgtcgcaaatcatggtgttcatcgttgagtgcgatgaccaaaataatgcacttgagctgctcctttgtcagactcaggtcggcattttcacatgatgcgttgatctgcgcaattagtgatgagatgtcttgcccttgttgctgtcgaattttaaagcattcgaagcgacggacgaacagcgaacgtgtctcggcaaaaagctgtttgaggtgcgaaatggtgtcattccaattcacttggtccggctgggttgggctgatcgtgtcccgatatttgctgtactcct

SEQ ID NO: 79201 - DNA, 2638 bp, Heterodera glycines
atgctttgtccatccaatgcacttgttggtggtggtccatcattatttggcgagaatggcaccgatgaatatagcctaaatgttcacggatatatgacacaaaatcatgtgatttaatccctttttttcaaataattttatttcaattaaagtcatttattatgtcggcggcatattcccatccgattggctattatcaattaattgacagcaataatgccccaacaaatcaagaacagatccgagatgaatttcaaacatcagcaattcatcgcgcagcgcaacaagatgccaatggtaaaggtaaatgatgccaaattgaattaattattttgtaaaaaataaatttagctaattaaataaaaacaaaataatttatgtatttcatttttttatcaattattttctaattaaggaaagtcagcagctaatgaccaactaagaaatgaggcacaacaaaataatgcgatgcatgccgaagttgttgcgacacaaatgccacaaccagcgacatcagtcaattatgttcataatcactctaatcatctgatgcacaaccgatcaccgtttgaaccgttttgcacagttccaggcactttttaaacattttatttaaattaattaattattatttttaggtcgtatgagtttgttgagcagcacaacaaagtacaaagtgagcattggtgatattcaacgtcatatcaacccgcctgaatgtttgaatgcatcattaattggcggtattttgagaaagtcagtaattttgggggattttgtgaatataataccaccttctaaatttagtgtaagacaaatttagtaaataattgtatttttagagaaaatttaattaattttgtaaaaatttattaaaaatttttatattatcaagaaatgaaaatatttttatgctaaataataaaatcccgcatcataaaaaagaaaattatagaatgtgagtaaatattttggaatttcgttttactcaaataaaagccccccccacccctcaattagaagctcccccctatatgccaaccttcgaggggggttgaaaaatagaaaatactctgaggcttagtttcagtaaattttgttgttcattttttttttttggtttaatgagataaaacctttaaaaaaactaaataattgatcattattttattcattttaattaattgccattaaattttttccctaaaattagggctaaatccaaggacggcggcaaagcattgagggaatcgttgaagcgaattggcctttcattgccggccggacgccgaaagtcggcttgtgtgaccgcattcactgcattagttgaggaagaagccctccatatggtcgggcattaattaaaatttgtgccattaaaaaacaagcatttttaattttcaaatttatttgtccaaatcaattttaaaaaatgccaaattttatatgatttattaaaatgacaataaaaattttaatttaagcttttttaattttatagacattaaaaggagaatatttttttacgccatttaaattaatttctttaacagtttattaatttcaattattttttaaataattttattattttatttaaaatttgaatttactaatttttgattacatagtatttttgacactttaaatttttaacatttaaggccaatgattttaatgctgttctccaacacgatttcccggccaaggacatcggttttttcctcaatgcgcaattcctcagatatgttggccaatcgccgatggattccgaattggtggccagacgtcgtacaattttaaattgttcaaggtttttattgcaaaatccgaaccttatgattagtggatttagctgtccttggctttcataaatacatacatctcccgtatttaaaaaggctaatttgtaaggaatattttccgtttaaatgtcgtttttttaaaaataaattgacattgaaatttatttatttaacaatcgttgttatttaaaattttcattaatttttcaaatttattttcgggcaaaaattttagtgaatataataactcaaaaatcagaggttttgaaattgagtttctattatttgtactaatttcttcatctcttattaatgcgttacccatattttcgtaaaaaaaataaataaagaaattacaaaaattgcattttttaggatttttatcaaggagatcaccagccttttggctgcggaccgaagcccaatttgcgatcgtcgacctgaattgatgttggacccgagcatacaaaagcaactcacgcatttttcaatggcaatttttatgggttttttgtaaaatttttgaatcaaaatcttattaaatgctttaaattttttaaattcccatcgataagctctgcgttttctgccgctaccgtctcacaaaaaattgaaaaatacataaattttttaaacaaaataattgttctaacttttattaaaatgcgattatttattttagattactcatggctttggaggaattgcaatggtatttttcattatatgttttttttttgaatataattaataaatcttataaatatttatttataaaaataaaaatttttgcagatttcattgttggaagcattggccacctgcttggatga

SEQ ID NO: 79202 - DNA, 4213 bp, Heterodera glycines
atgtcggtccggcaaaagtcggtccgcaaatgtcggtccgcaaatgtcggtccgcaaatgtcggtccgcaaatgtcggtccgcaaatgtcggtccgcaaatgtcggtccgcaaatgtcggtccgcaaaagtcggtccgcaaatgtcggtccgcaaaagtcggtccgcaaatgtcggtccgcaaaagtcggtccgcaaatgtcggtccgcaaatgtcggtccgcaaaagtcggtccgcaaatgtcggtccgcaaaagtcggtccgcaaatgtcggtccgcaaaagtcggtccgcaaatgtcggtccgcaaatgtcggtccgcaaaagtcggtccgcaaatgtcggtccgcaaaagtcggtccgcaaatgtcggtccgcaaaagtcggtccgcaaatgtcggtccgcaaaagtcggtccgcaaatgtcggtccgcaaaagtcggtccgcaaatgtcggtccgcaaatgtcggtccgcaaatgtcggtccgcaaatgtcggtccgcaaatgtcggtccgcaaatgtcggtccgcaaatgtcggtccgcaaatgtcggtccgcaaatgtcggtccgcaaaagtcggtccgcaaatgtcggtccgcaaatgtcggtccgcaaaagtcggtccgcaaatgtcggtccgcaaatgtcggtccgcaaatgtcggtccgcaaatgtcggtccgcaaatgtcggtccgcaaatgtcggtccgcaaaagtcggtccgcaaatgtcggtccgcaaatgtcggctaacccataaaatatatgtttacaaaaaatcaaaaataaaatcatttttcttttttttcattcattttcatcctcaaattcgttgagcatgcctatcgtactttgaatcatgaattgcatttctaagtcgtcatactgttgttgtacgtcagcattttgactctgtatatctttcgtacaatttttctggcgcaatggatttggactgatgccaaaaactaaaatattaaaaattctaattaaaaaataaaattattattttcataatatccctccttaaaaattggaataaaatatttaatgatacaacattttttagataatttatgtatttttttttaccattttttaattcgaattcgtttggtagtggcggtggcgatggcacttcaagctttaattggacacttttttcgtttttcgctttcatttttaataattttgcgtctcttccaccatcttttttacgattttgcagattttttgctttatttgccgattcaattaaatatttttgtgcatttttcaaattttggtatgagttttttcccaatttttcgtcactttttaggcgataagtccaaacatttacctatcaaattaaaataattataacaaatcaaaaaataaaattaaaattacataatgaaaatccgtttgttcgtccttttttatcttctggtcaatttcgtagataaatgcccatattgaaacctgtaaaaaaacatcaaagcctaatcttttcattttttaaatccttgcaaaaaatctcaaagcctaaccatttttgtttataaaactcaaaaaatttcaaaaagcctcaaaggcctaattattaaaacatgaaaacacaagaagaggccaaaacatgcaatatataaacgaattttggattatcaaaccttgattgaatcttctttgttttcaaaattcatttctgaagaatttcttcttgcttaattatttttttgtaacaatttcggaaaattttttcacagtttcccatgaaaatatttttgtatgcttcaacaatgttagccattgccttggcaattggcaaaatgccatttctgtttggcaatgtaaactttggcttcagtgaaattgacattagcaatgcttcgccattaactgatttaaaaaaaaattcatttttttcctattttattattttaaatttaaatataccatttttagaattgatatatgttttgagattttcacaatagttgaaccaacgttcaatagatgaatagcgaatttgccactcaattaaagtctcaaatttgtccataatttgctcattgtggataattgttttgatatgttgccaatctttagtgtttctgtataaatttgcttcatcattttcagtcaactctttgcacataaattcgtgtaatgtaataatttccttaatttgtttaaatattttaataatttaaaaattaattaaagtaattaatcaatctaagtttaccttttcattcgcaccacatactaaaatgataaattgttgaatcaaaatagtggcaagaagataattcatgtcggcttctttaaatgcttaaaagtctctgcaaaatcatattaaataaatacatataaataaaaaattccgtagcaaatatgcaatatataatttgtaaaatacaacaacaaagaaataatcaattgtatatggaatcaaaattattccctatataagaataatatacccatgatccaagcttaaaaactaatttaagactttctagcgagttttacaggtcgagcgtggggtcaatcgacgcagtttttcaagggctataagggaaaaatagtgcggtttcgatcggtttagaactgttcgaactgtgttcgaaaaatgactcaaaaaatcaaacttttttgaatgtcccatttttgaacgctttttgcatgccttaaaattggtcaaaccaaaaaatgaaacaatttcttccaatctacaaagcctgggctttcgaatgataccagggttgtttgggtccgggtccgggaagtgccctaaaaagggattacaagcacttttggtcggaatttttcccaaaaaagaaggaaaatgaaaagggaattaaaagggatggtcgcaagcgacccggtggtcaagtggttagtgtgcttgcctttggtcatggggtgttgtgggtgcgagtcccaataatttatgagattttcccgtcaaatattatatttaaattattcgttttaaaatttttttttaatgttttttataagaattttatgagtgagttaaaagagaaagaaaggcataataaaaaatatggagcaaagtacttttggataaaaattgattactttcttttctttcctttttttatatgtaatgcacactcgccagtggtctttaacctcgccttttcaatcagcaaaaaatgtctcctccttttctttccccagttcattatcaattgtttccatttacatcagttttttactgctcctacttttattcaataaatatttccaactaaattattgctgttttaatagcataaatttttagtttttgccattggtggtggtggtcgacggttcgggtcccacctattctgggtgttttcatccattattttattaaattttttgaatgattttattttttttaattaattaagtttattaaaaataatttattttaaatattaaaaataataattctttctttctaatttagcccaaaaatctattgtttgaccttttttgtgcaaaatcatttaaaaatggagacaaattaataagttacctaaacataaaattataaatattttatgccaaaaaagaaggaaagtgaaaaggaaattaaaaggaggcaagcgatccggtggtcaagtagttagtgtgccttcctttggtgctggcttcccatgagttaaagtcccatttcttctgattattttaaagcaaatattatattgaaattattctaatttttgtttttttaaatttatttttttaattaattaactttatggtattttaaattaatgataatgattttttgaattaataaaataataaatatttttaattaatagaataataaagtctaaattaaatattaaaattaatcgaataaaaattaaaaataaacaaatattaataaatatttaaataatttataaatctcaaaatgagttaattttagggttagacgaatccgggtatttgggcaaaaccgggtccggatatttccgggtccagaaaagccgggtccgggtccaagtttttaaaccgggtacgggaggaagagaaagtggaagaggaacagaaagtggaagagaaagtggaagaggaacagaaagtggaagagaaagtggaagaggaacagtaagtggaagaggaacagaaagtggaagagaaagtggaagaggaccagaaagtggaagaggaaggaaagaggaagagaacgagaaatag

SEQ ID NO: 79203 - DNA, 373 bp, Heterodera glycines
atgaaagcgaaaaacgaaaaaagtgtccaattaaagcttgaagtgccatcgccaccgccactaccaaacgaattcgaattaaaaaatggtaaaaaaaaatacataaattatctaaaaaatgttgtatcattaaatattttattccaatttttaaggagggatattatgaaaataataattttattttttaattagaatttttaatattttagtttttggcatcagtccaaatccattgcgccagaaaaattgtacgaaagatatacagagtcaaaatgctgacgtacaacaacagtatgacgacttagaaatgcaattcatgattcaaagtacgataggcatgctcaacgaatttgaggatgaaaatgaatga

SEQ ID NO: 79204 - DNA, 298 bp, Heterodera glycines
atggttaggctttgagattttttgcaaggatttaaaaaatgaaaagattaggctttgatgtttttttacaggtttcaatatgggcatttatctacgaaattgaccagaagataaaaaaggacgaacaaacggattttcattatgtaattttaattttattttttgatttgttataattattttaatttgataggtaaatgtttggacttatcgcctaaaaagtgacgaaaaattgggaaaaaactcataccaaaatttgaaaaatgcacaaaaatatttaattgaatcggcaaataaa

SEQ ID NO: 79205 - DNA, 618 bp, Heterodera glycines
atgaattatcttcttgccactattttgattcaacaatttatcattttagtatgtggtgcgaatgaaaaggtaaacttagattgattaattactttaattaatttttaaattattaaaatatttaaacaaattaaggaaattattacattacacgaatttatgtgcaaagagttgactgaaaatgatgaagcaaatttatacagaaacactaaagattggcaacatatcaaaacaattatccacaatgagcaaattatggacaaatttgagactttaattgagtggcaaattcgctattcatctattgaacgttggttcaactattgtgaaaatctcaaaacatatatcaattctaaaaatggtatatttaaatttaaaataataaaataggaaaaaaatgaatttttttttaaatcagttaatggcgaagcattgctaatgtcaatttcactgaagccaaagtttacattgccaaacagaaatggcattttgccaattgccaaggcaatggctaacattgttgaagcatacaaaaatattttcatgggaaactgtgaaaaaattttccgaaattgttacaaaaaaataattaagcaagaagaaattcttcagaaatga

SEQ ID NO: 79206 - DNA, 2194 bp, Heterodera glycines
  unsure (1)..(2194): unsure at all n locations
ttgccaaaaattgtcaaagcgttgttggaccaaattgttgcggaaggcgaagaattgacattcgaagtgcaagtggcaggcgaagtggaccaaattcgatggctgaagaacggccaaccgctggacaaagacggaagagtcaaaatgatcaaagtggacgaacaaacgtacgtcgttgcttttgctctgatcattcagcaatcttagcaacaatcgcctcacactgacatttttccttagcagttacggtatccgattgattcattcgggccaaatacagtaccattatatatatattgattattggacagcctgtaaatctgattccgacctgactgctgctagtggacctctaataagctagcatttttaccaatagtaccgtatgctgagtttgaatttgttcagctaccgtatgacaattccaagtgccgcgctgtccgatgccggcgagttcgaagtgcaggccatcaacgacacgggcaaagctgtgtcctcagcgcatgctgaggtggaccaggcaccgcgcattgtgcaaggcctcgtcccagcagacatcgccgagggggacgagcaggtgttccgtgtggagacatcggcaccaattcggacgggttgaaattaaagataattaattaaaaatccattcgccttatttagtcaaatggttcaaaaatggccgggagattgaagcgccgccgggtgctcgcattcggctgaaggatgtgtcgccgaagaaatacgaactgctaattgatgacgcacagcttgacgatggggcgaattacaaggtacagaaaaaagagagagagtgagtgctacagtaattgtcggaaaagtaatggttgggttactgtattataagggtaacggattatggtaataaacctgcaccggtcaatgggcgtatattggtacttgtccttttctgttcaggttgtgctgtccaatcgtgctggcgaatgcgaatcgtccgccgatttgggcgtgtgcaaaccatcggtgttcaaactgcgcagcggactgcaggacgtgaccattgacgaggggcaaccgctggaattgatggccgagttggacggcgaaccggcggcggtcaaatggttcagtaatggcgaagagataaagccggacaaacgcattaaaattgtaagcacttaagttagcattggccttggcatagtgatcaatcttttttttcaaattatttcttaattaccccctcctaattaccccccactcttcgcaaggtgtccaatccgtccaccggtgtctattccctgagcattccaagtgcgcttgcctctgacggtggtgcgtaccgcgtcgtgttcgagaacccgcgcggcggagagctgtctagcggttcggtggcgcatgtgcgggccaaaaaacgcgcgccggagacgaacccagcagtgtttctgagcccactcgaagacgtggaattgccggagggcgacacgctcagcctgaaatgcaaagtaagtgtgatttgtaagcatttaaaaaatgtatttttaattgactaaaatgcaaaaaaaaaggttggtggacagccgttgcctgaggaggtcaaatggtaccgtgaggagaccgagctgaagccggacggggatcgaattgccatacgactcggcctcgacggcacggccacgctgcgcattcgcgaagtgcagctcagtgaggccggacagttcaaggtaatgaatgccatttgaaaataattatcttttttaattttaaggctaccgcctccaatgaagctggccaagcggagacaaaatgtcaagtgaaagtgctgacgcgtgagccggaaccgatggcaccgaagttcgtcatcccgctgcggagcatcgaaggcacgcccggcgagcgtgccgagttcacggtcaaagtgcgcggagtgccaacgccggaactgcaatggatcctcaacgacgcacccattgactttgcgagagaaccgcgcttcaaattggaggatatgcgcgacggcaattgggcaatgaccattcanngtaaagcattaatttcgtatcttggatatgtaccgtatacccataccgtacatccactgcatccccaattttataggatatccnagagancgactttggcactttgcgctgtgtggctatcaatccgctcggacgcgatgagtgcgagcccaanttcgacccagcgcggactg

SEQ ID NO: 79207 - DNA, 1608 bp, Heterodera glycines
atgttgtggaaagaaaaaatgttcaatgtgaagtgggtccagccatgtaaaattaaaaaaatgggggaaatgaatctcggaatggaatctattttaatatgaaaaaataatgaattttaagcgataaatcaacttatttatatgcccagtttgtagtggttgtatacatttatagggaaataataaaagaaaattccggacaattttaagaagcgatcattttgctgggaagatacaattccaaggacataataaaagaagactgttaggggcagcgccctttggctttcgagtgtggtcaacataacgccacacgcaatgccctttgacccaatcgatatttccttcccctctgttcgtttgttatttaaattccccctttccctcattcatgttcactcttccctattcagttcactttttgtgcaattgacattattgttcttccccaatttctcttcatttattttcttctaaataaattgtattgtctgcacccaaaataaatatttatatttgttgaacactaaacattggcttagcacccattgtgtggaccgaacaaaattggcgacgcccgttcggaagcagaaaaaaatagaggaggacaaataaaattgcagcttttagcagcaattcaacaatttgttgactcaaagagaagtcaacaaccaccgcaacttttcaacaaatttgtcatcccttctatacagcttggcgctgttagcagaagaaccggcattcagctagaaagctttcagcttttagtgtgaaagaaatattttgcgctgctatttatttgtctaggcgacaaaaacttagctcaaccacgcgcacccacactgatagcatccaggcgctgttatcaatagtgtggtgaacaaccaaaagaatggcacaaccgacggcacaagagcttttaaagctgattgccgaccagcagacggcgatgacacaacagcagcaacaaattgcacagcttttagctctgcaacaaacgcaaaaggctgatacagtgctcacactgccggatgtggccatcttagagccgagtgatgacaaatcgcgaataagcgaatggctaaagcgcgcacaattcgcaatcgattgcgtgtctccaaacgcatcggacgctgtcaaggttaagggattatgaacaaactctccgaggcggcattcagcgagtacaccaaattctgtctgccagagcccgtgacaagtttcagcttagacacaacagtcaaaaagcttgagaagctgttcgtcaagcctcaatcgatcttcatcgaccgatttgagtgcttgatcgcccgcaaaggaaagggagaggacttccgatcttttgtcaaccgtcacaagcgtttgatcacggatttcaaattcagcgacttaaaagaacaacagttctatgtcctgatgttgctgacagcgctcaaatcgcacggcgatgcaatgctaaggcaaagaattctgtccaaattgaccgcggatggagacaacatcacgtatgatgcggtggtggaggactgcatgaagtttatgactacaattgcggagaacaaagtcatcgagtcttcgtctagtggaagtcaacgaagaaaaccgtaa

SEQ ID NO: 79208 - DNA, 1182 bp, Heterodera glycines
atgcgcgggatgaaatttcttttggcatttttaatagtaaaaatctaaaaatagtatttaaaaacaaaatactactaaacaaataagcataaatgtgcaactcccgtttcattttccaagattcctttattctatgtaaatattttcgtttttattgaatttttgctaacaaattttgggcaaaacgccaaaataggcaaaaataggctctttcaaatttttttaggctttataggcgctaaaaataaaagcctagaaaataggcattaataacttgaaaagtagcttaacaaccgccgaaaaaaacatgtttttcgtgcatttcagaccatagggagctcaggaaaaaaataggcttttgcctaaaaatatcatccctacttataaatcagtttcagcttgggcaagcaaatgttgaattgttttctggacaatgactcaccatttaaattttgatcaatttctccaagttcatgagccccaattgttggcttctggtttgcctgaactgttctggaaatccttatacaaaaagatatccaatcaggcaatttgaactcaaatacctaaataaaaaaaacaaatatttttagattttcgatgcaggaaaatattttgaggttatcatcgaagaaagcgaaccgaatgaaacaatttcatcgcaagtcaaagctatgagcgaattgaaaatggacgacccggaaaagtcattcacttaaaattgttaaagaaaatcaaaaaagagtttagtgtttttctcattgaccatgcgtggactttccgtccgaatacagcacgttttgcacttcaacaagttgacggactgaggaagagattattggacatgttcaatatcaaagtcaacttatatttattaaaaaaaaatcaaaatattttttcatgaataggcttggtatgccaacaaagaatgtttaaaggacccttttgctgatgatagcgcagaccaacagcaaaagtgtgctgatgccgtagccactcattccgctgattgtgaggactcggaagtcgcatcgccatgcggccaaaatgtcgaagaaatatgggaaaagcattgcgaaatggacgacctaataattgacgaaatgtggaaatatgcaatgacatattcaattcgaatgctcaatttggtcccaaattttattccctttaataggccataaa

SEQ ID NO: 79209 - DNA, 685 bp, Heterodera glycines
atgctaagcaatttgggattggatacacaatttcagatggaaaaggtaaatttgcatcgctttcgattaacttattttatgatgggtctcatgggacagctttgcgtttttcgaaaaattagtgcgtttctcatttaatggaatttccacttatggattatgaaatttcagtttagcccacatatcccatttctggaaactttttgccatttattgttgtagattttttgcaaaattattttccttatctctgctctctcccacataatttttcttcacactgacactctctcgtctattccccccccctaccactcacatttttttgttcttttctctgccggggattttgctgggtaaatggaaaattgatcatcttcattgtgcgaaaaggccttaaattgtcgggtgacggaacatttgcgtccctacatttgcgccccgaatatttgcgcacctacacttgcgcccgaacatttgcgccccaattgtgaatcaaaaaaacattatcatgtaaatgcctttcccaagggctaatgtgagtgattttattaaaaaatcatcatgcacatccaaacaactctaacaattagaataatctcccgttagcccttgggaaaggcaattttatgacaaattttatttaaatcacaccttagctcaaaggtattttttgaaaaataaa

SEQ ID NO: 79210 - DNA, 1216 bp, Heterodera glycines
atgtcacacactgatttgccgccaaaggcaaaggcacaaaggggtttgcctcaaaatgggtttcaatttgatgcccttaaatgggcccaggtgcatcaactcatacccccgcccactgtcttgtaccccaatccacagatattgcgtactgcggtggtggtgcccattaaccagcagagttgttcgagcagttcagttaatggtgtacaattgatgccaaccaatggagaaatgatcgtaactccatgccaacagcagcagccgcaacatcaaagccaaccagaacaccaaaatcatcagcaacagcagcaccaaaaccaacagcaacagccgcaacaccaaattcaacagcaacaccaccaaatgcatcagaatcaacgccaaagggcaattgaaggggaaagccgattcacaccgcggcgttttggcccgaatcgctctcatccttatggaggccgaacaaccgcttcccatcggttcattagggaacaacgggaaacacaactacctatcaattggccatggaatccccttccccgaattcaaattccagtcgaaattcgtcgtgtcctcttgcgccgattagcacaggagcgggagcatgcctttggtcttgctggagtcatgcgccaatggaatccaccaatggcccttttgttgctgtcaatggaagctttctacagtactcttttggcatttgtagtgaatgaaggcgagccggggccatcacttccccaactttaattcgcgcggccggagtgtcatcgcttcgcagagcgatgacgaagcacggaaaaagaaagaaagaaatgactaatcataaagcgaggacggaggccaaattgactgttatttaaccgccaccattttgccttttctgtcagttgaagcataaagagcaatttgttgggcttttcattcaataggcaaataatttaatattgttcatttaagcttgtaaaatttcgggttcctctggcggctataccagagaaggttcacttaatttattataacagtaaataagacgtaacaatttgatttaactcactaaaaaagtccaaaaatataaataatgattactctgaattttggcaatgatatgtaaaatagttttaattattttatgagaaaataatcaagcttaaatttgccaaaatatcgagaatattttttatatttccaaaaattaattttttaatatatttttttctaa

SEQ ID NO: 79211 - DNA, 706 bp, Heterodera glycines
atgactttctcctcctccgtcgtcttattactgcccgttcaacttctgctggttgtcatcggcgctgtgttcatcatcctcagccaatgctgtggtggcggctccaagaagaaaaaggtgccaccgtttttgatcaccccccccctttttcacaaatgaattcattcctttttcagcccaaagccggagcagcggtgccaacgccacaaacatcggcagtgggcggaccaccgggagcagcggaagcgccctcgtcagtgtcctgcgcgcgtcttggtttttgtggatggcctgcgcgctgagacacgctccacgacggtgcacacaatgtcaaatatccaatttgttccgctcgcccaatttccaatttgccaatgcgtccaatttgcaatttgttctgcgcgtccaatttccgatttgtcagtgcgtccaatttccaatttgtcagtgcgtccaaatttccaatttgtcagtgcgtccaatctgcaaattgtcagtgcgtccaatgtccgatttgttcaatgcgtccaatgtccaattgcgcgatttgtctttgtccaattgtcggcgtcaatttgtccaatgtttcccgattgtccggcgcaatggttgtccgtgtcaattggtcgcagtggtcgaattgagtcaaattcccttggtgaggtgagaatgtgatttgacgaaatgagtgaaaatccaaatgcca

SEQ ID NO: 79212 - DNA, 540 bp, Heterodera glycines
atggttctcgtcagcgaattttgtgctcaatttctctcctgccctacaaagtcacttcgcgatcgactgaaccacccagaggaccgagtccgagttttgcagcaattgattgggaaaaaggtccagacaacatacaaggatcggaatggaatgcgcaagtgttttttcgttggtggaatgactgaacgaggcgcggcatttgaaccagcatatggacgtctgcgtaagccgttcaacattaacgtggcagcgcatttttacgctcgtcaccgtgtcaaattgcactacccctatgtgccatgcatcattgaaggctttatccatggtgaggaccgttattatccgatggaactgcttgaaattgtcgacgacaaaaagggagggcgattatttggtcgattgttcactgaaattgaggagcaggaggaggaggacaccaaaagtgaatgttcacactcttcaaacacttctatttacaatgttacggtaaaggatgcacatggtatgaaagcattgacgaaattgccaccactgggcgtg

SEQ ID NO: 79213 - DNA, 935 bp, Heterodera glycines
atggacacatttgaagaatttgttattgtcaacgaaaaatcattcaccgatattttactcacatttggttataatcgaggcggtatcagtgagatcaaattcagtgatgtcactcaattcgctgcactgtaattaccataattaatttaattacaagaaaaagaaagttctttttaagcgaatttcaacttgattatgccaaatcattggaaatcaaacacattggcaaaacggcgagggaaatcttgccattggcacaaattattcgctggcaatgggatgagaagggctcacaacaaatcacagatgtgaattaataaaaatatttaaattaaaaaaaatgtcagtatttttagacacaaatactcacgacggaaggaagtgttcggtttcattgcctcgattatttgggttccattgttgtacgaattttgaagaaaaaggacgactcacatacagcggaaaagtaaaattcatacaattaaaatttgtttaattaattaattaatttttttgtttgcttttaagtccatttcaatctctcaattctccggacgatgattttatggtggaaatcggtgacagaaaggtgaatattattaatttgcattttcaatctgtcattttattttattttttatgatgcttcatccgttttttaggtggctttgtccgcttctcggcttcgctgcttctccccggtgatcgatcggatgctaagcgtggagatgagggagaagcagcagcgatcagtcactttgaacgaattgagcattgacatggaccaatttttggattttcttttgtacatttcgccaaatgctctgagccaaccaattcttcccaatcgtaaaattgaaaataagaataagttacaatcagctaatattttactgtatgattcaaataatttaatttatgaaattatagtataa

SEQ ID NO: 79214 - DNA, 481 bp, Heterodera glycines
gtgactttgtccgcttatctgtttcgctgcttctccccggtgatcgatcggatgctcagcgtggagatgagggagaagcagcaacgatcggtcactttgaacgaattgcattgacatggactaattcatggattttgttttgtatatttctccaaaggagattccgttgatcgaccgagttaatctaatcgaaaaatatgggcttacaaatttgaaagttctttttttagttttgtcattttttaaattttttttctttcagaatttctttttgaatttcaatgtggacaaattgcgtgcctttttcaaggaaaatcatgaattttttttggcgacgatcagcaaagaattttatggcgaattgatcgcgcgaatttgtggttgaatttcaaaatgaattttatctaatcaattctttcgccagcagatgtgttaattggtacgtattgaagttaattataatttttggattgcaaatcga

SEQ ID NO: 79215 - DNA, 1607 bp, Heterodera glycines
atggcttcaaaaattgaaacaaaaaaacaacaagtgaagcttcctcacgaaggacatctttacatattcgacaaaatgagtgtgaatggagcaataaaattttgggtgtgcgaattcaaagacagcgtcaacaaatgtaaaggccgtctttggacggacctaaacaatcacttcattcgtctttcaacgccacacacttgtcccgcaaatgcttcgaatgttgaggctcaacaagtcaaaactacaatcaaactccgtgccatcactaccttggaaccgccatctgtcattcgttcagaagcattgcagaacgtgccatcaccagccgcaattttggtgacaaaaagggctgcgaatgacgtacgagaatttttttaacaaattaaaaataacaagcaaactaattttagttaatcaaacgggcgcgccacgaaatcaatgcaccaccagcagtcccgaccaatctgaattttgagatcaaccaagcatacaggacctacacgtccacggaaggcgttgaggagctgtttctgttgggcgactccggtgtttattttgaaaatggaaaaaccccgcaacggtaatttagaaaaaaaatgcgaaattctttttttctcagaattttattgtttggtcgcgattcattcgggcgttttgcggacagaatgaatgagtgttttggcgacgaaactttctcattggcaccagcccaattttctcagatttatacgatcttggcaaagtctgtttgttttaattcagtttttcaaaattgtaaattaaatatttaggtgtgaaaaatggattttcccggtgtgccatgccttaatgacttccaaatcgcaaacatcgtacgaaagaatgtttacacttttgcgtgctgcgtggccaaattttgctcccatttctttttccgtggattttgaaatggccatgtcaaatgccgttacgacaatctttcccggatgccagatccggttttgcttttttcattttgtacggaacttacaaaagaaagtgaagcagcaaggcttatggcaggtaaatttccctttaaaattttttttcaaattttaagcgttattgttctgatccggtgtttgctttgaatgttcggatgcttacatcagtcgcattcgttccactttgtgatatcaggaatgcagtgacggcacttgacatggaatttggaaatttggtggcttttcgacctctcattgattggtcagaaataaaattttattttcaatttagaataattttttaggcttttggacaattatgttgggcgtcctcgtcccaatggcacatggtcgcaaccactgttccgcccggaccagtggaacgtctatcaacgaacattggatggaaatgcgaggacgaacaataacgcaaaagcggaacaccaccgtttgcagggcgcgttcaattgtcgtcatccatcgttgtggcatttcactgatgttcttcgacgtgaacagaaaattgccgaccacaaatacaattctgcgatcgctggattgtcacctgagaaaaagcgaggcaaatatttggcagcagatagacgaattttgaatatggttcgcaattacattccattgaatgca

SEQ ID NO: 79216 - DNA, 897 bp, Heterodera glycines
  unsure (1)..(897): unsure at all n locations
atgtgcggtatgcaaaccttgccgcagaatgcacatgtgtatttggcatgttgagacacctccatctttttgactgtcttccgcaacgaggcgccgtaccgagtgccgtacttcccgacaatgccgaccttttttgtgcgctttgcctaagcaattgaatatgaattaattgagttatcaggaatgctattccgttacaacttaccatttcttgttgtcggacgaaaccaaataaaaaagtgaattcaataaatttctgaaaaattaaaaatgtttttgtttaaaataaaatatggaatttgatgaaaagtggaatgaaatgaaaaactcaattagtcataccagctttaaatgtctctaacacatgaaaaatagaaattcacaaattataataatcttgattgtaaaggtacaaaaacactatggacatttagaatcaataaaaaatgattaattttagcatttttgttaaaacggcggcctaggacttatgttataacaattccgactggtggaacgttgatccaagtctacgtccaaccaaaagagaagccgacgcatcagcccattgtacagatacagtttgatgtgaagaaccttccgcgacgaaagccagtgagtgctgatgatgaggaggatcgaagtgatgatgagatggatgacgacgaggaggatgacatgtacagtccaaaacagcagaaggaagcgtgcaaacaaccaaaacggttggaggatgggacactgaagaatgctcttgacaaagatgacatgaacaacgtgccggacgcattgaagatcaacaaaggcggaggtgacgtgcaacagattcgtggaacgacgaaactgaagaagtacaacgtgccggacgcattgaagagcaacaaaggncggaggtga

SEQ ID NO: 79217 - DNA, 97 bp, Heterodera glycines
tctgacattaattttggaccctaaatttgtgaaataatttgcttattctcaaaattaccatccaaattgcttattgcatttaatacattgtcaaagc

SEQ ID NO: 79218 - DNA, 356 bp, Heterodera glycines
atgccgaatccatttttatttgtgcttttcacgtgcccactttccgtcatctgggctacgcgaaaatcagctactcgtaacacattcgaaaaggtaaaggtcgcttccatacgtgatcgccagacgcctatgattcgacttggagacaaaaaatgattaggtaatagcatcaacatactcaaaatgcagaaatacaaaattatttaagaaacagggatggagcgaggacagaaagctcacgcggtcgcgcagcccggatccaaattgctgcgtcgcgctccacccctggtaagaaatttaaaagagaaattcagagattatgcagaatgaagggctggcgaccacctataaataaa

SEQ ID NO: 79219 - DNA, 1279 bp, Heterodera glycines
atgactgcgcagttcagcgccattgcggaacgcctgggtgaaattgagcgcaaaattaacaacaatggcattggcagcgcggaggagaaagaacgaaaaaggagccttgtgctcatcggtcttccggaatcggaggaggaagtgtcatcactgcgtgcgaaggatgacgcgaaaacggtggaggaagtgttggaccggctggacgtggaagtgtgcccgcaaatggtctacaggatgggcaggaggattgacgagaagaggaaaggaccgcgcttggtgaaggtggtcctgccggcttcaactttccaacgttttgcgctgatgcagtgggggcgtcgtcggacggagctgaagaagagacctggatgggagcgtcttctggtcaggccatccctgacgaaggaggagttggaaattgagcgggaacagcgccaaaagaagtggatggaatttggaaagaagaaaacgggggaaaacatcacgacgcgacgcggaggcaatgaaaaaaacttttgaggtcacctccttttttaaattgtttatatttcaatgcacgaagtttggcgaacaaattggacaagttaaggtttttgttattagaaaataggtttaaaatcattgctgtatctgagagttggttgagtaacaaaatagaaaacccccaaattttggaaaatctcccctattctataataagatcagatagacttaacaaaaaaggtggcggggttgctttcataatatcgaatttaattccttttgaaattatcaaaactacaaaaaacaaaaattccgatattctttgtgttgacctattttcaccccttaaccacacaaaaatacgttttattttggtctatagacccacctcccatgaaaaacaagaagatttcgaaaaattggtcgaacaactctctgttttagtctcggcttctgaaaaatgcattttgttgggtgattttaattattttcctcttttaaaagcaaaagactttagcatccaacattttgaaaaaagaaacaatcaccttgaatcacttttcatttcatttttagagggatataaattaagactaatggtcaactcccctacacggggaaacaatttattagatttattatttacaaacaacgaaaatctattgaataatgttatagttgaacccccatttggtaatagtgaccataatgcaattcaattcagcataaatttacaggttaatagtaatgcttcaaaaaaattttataatttcaaaaaagcaaattatttggaaataaa

SEQ ID NO: 79220 - DNA, 110 bp, Heterodera glycines; identical to SEQ ID NO: 58552

SEQ ID NO: 79221 - DNA, 2053 bp, Heterodera glycines
atgacaaaatatcagggaaatttgaagaacgtgaacgtacagaatgccaaaaatcgaaaagatttggatattttgtacgaatatttgtacagagaatatgccggaattccaacagtgaagccaaaatttgtatttaaaaatgaaattgaaattgaaggaccaataatttatgcggtgaattatttggccagaatttcgcaatttttttcaaattgaattattattataaatacaaatttaacaatttgttcaattcttattttgatccaaaattgttgaatgaggagaggttgaaatacgaaataaaattggaaaatcaaccaaaattaccaattaatgaaatgattttgcaattagcaattgacacagcgaatgaatgtcaaacaaataaaagtttagacggaataattcgacaaaaatttaacaaaaaattggaggaaatgttcaaaaaggcagaagaaaaggcaaaaaaagatgcaccatcatggaaagccaataaaattaatgatgataagcatgaaataattttggatacaaaattcgatgaccaaaaaacattggtgagacttaacttaacattcaataataataataataataataataatccaaatttagattgaagatgctctattttcggaatttgtcaaaggattagcaacaaattggaataaattttttgaaatggctaaagaatattcaaattatttaagtcgaaggaaaaagcaaagaaatttttatgggtattatgatgagcaacgaatgatctcttatggattagacgaaattgacaaaatgaaagagcatttgacgcaaaaatatgaagcacatcttggcattatgtatttgatgagagagacttggcaatgtgaaaaaattgtggatcaattaactaaatataaacggaaagaatatttggacattttatttgaatatttattccggttgtacgttgaaggtttgtttgaattttacataaatttgaattttttgatttaaaaaaatttgttaagctaaaaacccgaaggtgtcgaaacaattgccaccactggtgaagccaatatttattatgggagtaacttctcaaggatattcttacagactaattgaaattatcgaaacactgaacaccaattcaaaattgttttgggaaaaagatgaatatgccactttaaaatttgaattggtaaatgaggaggaattaaattttgaaaataaagaggaaaaaaatttgttccataaaaatatacaaaagggaaaacaaattttaaaaggaccaacggacattgaagaaagaattcgggaagaatttgaacaaaaaatgaaaaaaatgtatgaaaatgctaaagaaaatgccaaagaagaaaaggccaaaatggaaaaagcaattgaaaaggcggcaaatattgacgaaaagggagctctgaaagatgaatacaatgaaaaattcggcactttcatttcttcgccatttttataaaaatgcctttttcacaaaacgattgactcttctggtttttggaattttatatgccttttcctttcgaatgattcttctgtcttttttcaattttcagcttattttttgttttgttattttccttttcttttttaaatatatatttgattttatttaaacttttttcgaatgttttcatagtttaccataaaaaaaggcggcgcgcaacaattttaaagctgtataataagcaatttatatgtaaatttaaagttctgaaaaaaagtacaatcaatttttatttcatatttccaatgaaatggctaattattagggctgctaattttatgtaaatacatattttttcctggcttctccatgctctaattagtaggaaaaactctttcttttttgtgtttgcgaacaaaaccgggaccgggccgggaattcccggtcatccgaggtcccggtcccgggttttgaaaagctcaggtcccggtcccggtagggcaaccgggaaccaggaaaaacaagcactggtaagaacgggggtctgagtgaaaaattagtgatgaaaattggagttaaaatgga

SEQ ID NO: 79222 - DNA, 1062 bp, Heterodera glycines
gctaaatacaaagcctttcgactggaaaataaagtcgcggtgatcacagcagcgacaaatgggtgagcaacaccggcattctgaagggcactcaatcgatgatcactgataggaaaatgccatacaaaatgggcctattcacaggattggattggcaattgctgaacgattaggccacgagggagcacgtctggtggtcagcagcagagacgaagacaatgtgaagcgggcgatcgatcggctcgtctcttcgggactgaaacgttcggaccttgccgggtcgtcacttttgcattggcttttcgtccgtccaatttcaccttcccccccccctttcttttcagttgcacttgccatgtgtccaattcggaggaccgaagtcgcctgctgaaactgaccatccaacggttcggaagtgtgcacattttggtgaacaatgctggcatcaacccaattttcggcgatttgttggacgtggacgagtcagcctgggacaaactgttcgacgtgaatgtcaaggcgggcttcatgattgccaagctgttcgcgccagaaattgaacagagcgggtcggtcaaatgttcccggtttttgaaaggataaacgccgttgacagaatagcttcgaaattgtgccttttattttaattttccagtggagggtccatcgttttcaactcgtccatcggcgcctataggtccccccagggaatcgctgcttacggcatcacaaaaacggcactgctaggtcttaccagagctctggcagaatcacttgcacccaaagggattcgcgtgaatgcaattgcgcccgggattattaaaacaaaaatgagcaaagcggtggggatggaaattaaaattaaaaaatggaaaacactgttttaattagctttgggaaggcattgacgaacggagcagtgccgaagccattggcacacttatgggacggctgggaatgccggaagaatgtgctgcactcgtcgcttttctctgctcttccgacgccagttacataacgggcgaaactgtgccggtcgccggaggcgcctactcacgatta

SEQ ID NO: 79223 - DNA, 493 bp, Heterodera glycines
actagttttgtcttacagcacaagttgcaaaggagaagcccccactgactgttgttggggatgttggcggcaaaattgccatccttgtcgacgatattattgacgatgcacaatcctttgtggcagcagctgaagtaatttaattttccccttttaatataaaggccagcaaattaactatttgcaggttttaaaagcgcgtggtgcctacaaaatttacgtggttgcgactcacgggttaatgtcactcgacgccccttccttactcgagtcatccccaattgacgaagtcggattaggacacaacgattattatgataaaaattcaacggtttagataattgttacgaatactgtgccacacgaaatgcaaaagttgcgttgccataagataaaaaccgttgacatttccttgctgctcagtgaagcgattcgccgcatttataacaacgaatcgatgggccctcttttcagagaccttacaatcgatgat

SEQ ID NO: 79224 - DNA, 1304 bp, Heterodera glycines
atggcaaaaattagtctttttttggctaaaaatggttacaaaaaaaaattttttggagtgttttgggaccgctgatcaagaacacgacatccattttgcccaattccgaaccctcacccgaacttgaataaaatcaaattaaaaaacgcttgaatttttaatatttttgatcattttgtgattaaacctcatttcgttatattttggacttacaaaaaaatgattggactcataaatatttgattggactcaaaaactcagattgctttccttttcagatcaaagtgttcatgaaggaggtgcggatcatgcgacagctccaacaccccaatgtcgtccagttcatcggtgtggcggttggccaggagcccctgatgatcgtcatggagttggggacggacctccggcgctatttggacatgagcaagcgacatcggctcaacgctcgcgccaaactcttcatgtgcctcggagcagccgccggactggaccacatccactcgaaggacatcatccattgcgacatcgctgccaggaactgcctctacgcggacggcatggtgggtgagaacatgatggacgagggaggggtcagaaaaattggataccaaaatttaaggaaattgaaaaaaaattttgagacttttgcttttcaagagtgaagtgattgaaagagcatgcttttcaatcgaatttaatttttcttttttttccttccccaattttttatgtaaatgaattctctggttgactattaattttgctcatttttcaacaggtgaaaatctccgacttcggcatggcgcacaaagggacggtgaaaaggtggacaacaacgccaagctgcccatcaactggcgccgttccccttcgggggtggagacgaaaaggcattgagtgaaaagtccaaaaaagttcttttttttatcatttctcccttttgcagaaaatgaagggccagaggatagtcttcccccggactgcgccaccggagttcgtcatgctgcacatctgggactcgaagcacaacaaccgttactcaatgggcgcggtgtacgactggctgaagcgacacaccgaagaaggaggaagaaggacgaggagagcgcctgaactagtaaatatgatgatgtgtgtatgtatattgtatatgtgtatattatatatgtgtatttgtgaaatttctgtatttttcatgtcaccgtttagaaaaagtgggacggggacagcgggacaaacgccacaattaccggcccaacaaaaagacattcaacatggacaccagttttggatttgtgggttta

SEQ ID NO: 79225 - DNA, 416 bp, Heterodera glycines
atggacattttgacaccagcgaaaaagaggaaggacaaatggacaaaagtgaaatggtacattaaacacaaaataaatattgtatttcaaataatttaccttggaatatgagttgtttttgcagccttttgaccaaaatgggcattttgacagcagtgaaaaagaggaaggacaaatggacaaaaacggacaaatggacaaaagtaaattggcaaatattcaaattttatttttaaatttaaggtctgtgagcaattatgactgttcagtgttatgtgttttttacaaataaccttctttcgttctctccaaattattattattatcattattattattattttttttttgggtattattgaaatgatgtttttttcttttacttatttttgttaaattttatgaaaaacaataaa

SEQ ID NO: 79226 - DNA, 1070 bp, Heterodera glycines
atggaatgggcggaaatgccggccgaatggcttctgccttccatgcttcatgtgctgtccaatcgcgaattgtcttcagtagcgaatggaagtgaaattgaaatggactcgaaactaagggaagaagcggaaaagggcgcgaagcaattggcatttgtggagcacgtgcccgaactttgcgattatttgccctcacttggccgtcagcaggtggcgacaccacccaaaaaggccattcaggacgaacattcagttggaatttggcataagccatctcatcgacgaattgcaaatgacggagaaagcggacgacgaattgctgaagaaaagttcaacgaggacgagcatcggactgtacaattgcggaaagttcgaagcggaggacgacttaatcggccgagcattcctttccccgggagcgaaggcaaaaacggagaaattaagcgaagtgagcgaccaaaggggcggacgacttattcagtccgtatttccgtcacttacagctgaacaaacgactcatttcggacatatttagccgcagaaacgaacgatggattgcgagaatcgttcagttgattgaacagaattcacagaagcgcactttcttcgcttttggaataagtaaattggcaggaccgatcgtttctctctctctctctctctcacccccccccactctcctctctctctccctccctcccactcttcctctctcgcctcaccctctttacactctctccctttcctttctctctctctcctctctcaaatagctttattactctcactcattaatcggtccttccttaccacaaaaggtcatttgctcggcaatggttccatcgtgcaactgttgcgattgcgcggatattccgttgatgaacgacaatttgagccaaatggaaaaagaaaagaaacggaaaatgccatcgtaaaaatcaatgccaatcagcaaaagactgacacagggaaagaagaagagacgaggtaaaaaaggcgaaggcattcctttggagatgggcacagctcttttggccaattgaactttttatttcattttcctaaataaa

SEQ ID NO: 79227 - DNA, 739 bp, Heterodera glycines
atggctgatgatgatttagaagataaatatgtggcattaaaggcaaaggtccaagacttagaagatcgtttggccaatcgggtcccgaattatcttcccccgggagttaaattccgaaatatgatgcgagcggtgattttttcaagtttttaaaagaatttaatgtgcttgcgacagcgagcaactggcatccgccggattgtgtccgctttttacctctgtttttggaaggggaagctaaggaaatttaccagaatatttcggcagataagaaaacaaattggaggacccttactagtgaaatagcggaactgaccaagaaacttgatggaccaatgtgggcgagaaaaatgctgaataagacgaaaatgggaataaatggatcagtaactgagtttgcgaataaaattcgtgagttagttgagcaggcaagcccggacccgaactatacagatgaggcaagagaaagtgagagcgtgcactattttttgaatggattaccaaccaaactaaaacggaaattatttgttatggaaaagcccgatagtttaattgaggcaattgcgcaagcaaaaaaggttatccaagtgaatgaggaaattgagaaagatgaaaaaggggatgaaatgaaacaacaaatagctgagctaacggaacaagtcaatgcgatttcgttccagagtaaagtgaataatgagagaaatggtcatgaaaatggtcgcgaattcgtgaatccgac

SEQ ID NO: 79228 - DNA, 1397 bp, Heterodera glycines
atgggacatacaatgaagagattgacagagaatttatggacaactgagaggccttcaaaagttgaatatgcatggattggtgaaagatgtgagacaacagtgaatgatttcattgaaaaaggacaaggcggaattctggatttttatttggtaacatcgtttggatataactttaatccgtacaacggatgggaagaaggacaaaaatggacatttatttgggaaattccggaaccaagtgaggcttattgggcaactcatttccctgtcggtgattttgtggcagaagtaacggagaacgcaattgtgttagaaagcgaacaaagcgtgttttattttgaaaaagaaaagggcgatgaaagagagggtattgttggcgtaccagacgaggcgtataaaatgtcaaatgacgttttcattctaatacacactccgagtccacaaaaagcaagagaaaaaagggaaacaaagcagaaaagtgaacctcagagaaaagagcgaccagcgaaacaggaagtgtttctgaaaatcaggccggatcaaaattcaaaatttgagaatttggacccagcgtccagacccaaaagcaattggacacggacaactttgggaccaaaaaggaacacaacggagctaataattttgagtaccccggttccccagtccacaagcacagtggggagtacgacaaaagtaaccatggcaattccgaccaaaattattacaacacggttccaacgactataaggcctaagacagaagtcaaaaaaccaattttcgagaaaattcaaataaaaaatgagcaaaaattcagtcagtatacaaggcagttgggaaaaaggtgaaacaattggtagctacgacaactaaagctccttttacaacgactaaaaaatcgaaaattgaaaacacactgaaaaaggcaacaccaaaaccaaaaattgtgggtttgaagagcacaacactgaaggttcttagcacagttagaccaagcactaagaaagtggtcagtgagctttttccaaagtcagctacaactccgagtacattttggtagtaaaaagcacaaataattccaaaaaattttctaagcatgcgctggttaaaaaaccggaggttgaattggaaaaggccacaacagcaagtctatttccaaagacaattaaacacaaacaatgaatgtgacagagattccagcacgtatgactccaattcctccaaccactcaaaaaattgtggaaaagttggaattgccgaaagagaaaggggaaaagaaatcagacagcattaaagctgaaaagaaaatgaaaagttattaattccatccacggcaattacggttgtgaagaaaattgaggacgaaaaagtaagagatgtgtcggaaaagacagtaaaga

SEQ ID NO: 79229 - DNA, 636 bp, Heterodera glycines
atggaagaattcgaaaattcattcgaggatgaaagcgatgaggaagttagtgtggaattattcgatgagaatgaaatcttcgacatggaacgaagaaaaagaacgacagttacaacacctgacgcccggtggattaaaaaagttgagaaaagcaaagtgtgaaataaagcaggacaggaaaataagaatttgaatacgcgagtcaattatgcattgtatcgactaaatgaggagaaaagaaggcaatacgatcatatttataaacaagcgtgcgaaaatactaaatttcagctacaattggccaaagcggttttacaaattaatccaaatgagggagtcaaaaaatatttaatcgagacgatttagtggcacgatggaaaggagataatttggaagttggtttttgtgcgccggttataccagaaaaaatattctgggatagaaaaatggggagcgattgttacgaatggataccaattttcgcagaaaatacaacattttttattcggccgggtaccagagaattgagcattataggcaaaagaatggagtgtacagaaatggaaaaaaccaataatatgaacaatgcgacacaaaaggaaattgttcaaaaattaactgaaaatttgggaaaca

SEQ ID NO: 79230 - DNA, 298 bp, Heterodera glycines
atgaccgagcagcactttggcattaattgcgttgacctcgaattgccgatggacatttcacaattcaccgttaacgtctcagcaacactttttgatttatcgtgtgaagaattcctaaaaaaaccggaccttgacgaactgccggactattatcttcaagtctcaaagcggtggcaacttgatgcctgtgaaatggttccaacagtcatgagatgcaaaaagtagagtgattctctggttagccgacatttgtcgaccgaattttgcggatgattagtgaacaaaaaatgatgaatta

SEQ ID NO: 79231 - DNA, 338 bp, Heterodera glycines
atgacaattaatttttggcattggcacaaaatgcgtcagaagaaaatctgttattaaaatatatgatggagttctaagttacggcatttatgtattattttacagaaatggaactgttctttttgcgccattcggagtatgaacgtctgttcaattgtacagggctcgacattgattccatcccgttggagcgacgtcaaaatgtgccggagtcaattgctgtctgtgtactgtgcaccatttattatgtatgattcaaatttcaatacaatagtgtaaagttaccgtataccaaagtgaatgcatttaaaaaatgatgccctgaaaagcagaataaa

SEQ ID NO: 79232 - DNA, 644 bp, Heterodera glycines
atgggccgaagccgactgagtgatcaagtaagtttttggattattatttttttagggtttgtcccagacccgaggcaccggggttttttttgccgtttttcttagccccaaaaaccgactgtctactcctgtcgataatatccttaacaaatgaacggcataaaatattcaagccgacctcattaaccctcattttccaacttcgggtttggcatatgactgaccctgattttttttttggcatttgtaaccctaccatgccgttctcaaatgatttcaaatgtcgttagccgaaataccgaagcgtctgggaaatgcttcatacaaaggggcggaatgcaacatgcttttttctcttttttggcatttttttcacggtctcaaataatttctaattacgttagccaaaatccggaaccccgaagaagcttcctacaaaagggcggaatgcacttaaattaaaattaaattttaatggtttttagatgctaattggtctacgtgaagtgtcggctaaacttcgttccgacatcaaacagaatggtccgtgcaacattgacttgagcaaactgatcagtgtgctcaacggttcctccattagcatgcttttgtttggccacccgcttgaagaggcaaataattag

SEQ ID NO: 79233 - DNA, 1282 bp, Heterodera glycines
atggacccggcgagtccggccgcacaatcactgagcggttccaacagtcagcagccccctctaaagacacacggagtaatgcgagcaggtaccatcggttcagctgcaggaacggcttttacacaaccgcagcaacaacaacaacagcatgttcaacaactttttcaacaacaacaaccaccaagcgctttctcagcgccgaacaccccaaaccaacaacagcagaacatttcccagcaacagctgacgccggcagctgcgcagttgggcacagcgaacagtccatgcccattgggcatcgaagaggtgaagccgcgttctctgcgctttacttggtcaatgaagacgacttcgtcacttgcaccggacgaaataatgaagtccgaagaacaaaggagtaaatgttacagagaatgcatttttagagaaatacgaaaagtactcgacagcaatggatgcgaatatgagcaaagggagaggtcgtcttttctgtgttttgaatgcattttttcctttaggtatttgttactttgtgcacacggcgacccaagcaaagactcattgatacaatgggagatggaggtattgtttcaggctgaatattttcggagtatttttttaatttaaaggtttgcaaattgccaagactttccctcaatggagtgaggtttaaacgtaagtttctcatttctttactgtcaaattttatcgcatacgttcttcttttaaagccctccaatcataacgttatttttatgcaaagttatataatgcgtatttattttattaagggatttctggctcttcgatcgggttcaagaacattgcttctaaaatcgctcaggagcttaacctctgacggttttgtgaaatcggatgctgcctccaaaccatttattgaactttgtcttcgatgttgtggattctgtttctcaaataactaattattgctaacattttcttctgcatgcttttgctctgttcgtgcttctctctctattcgtttgttttatcttttgccactatcgcttttttggtcggtcggtaaccaattttcttcagtttctcagcgacaatattcttattgttcgtgagtatttaaagataatttaactttcatttaaatgaaataattctacataaattgctataaatgtttggttaagttttatattagcattaataatattttgtgagagcacaaaaaattttgtttatcagggcgacggtgtaaaaaggtcgggggggaggagccggcggaggagtaaagggcaaaccttga

SEQ ID NO: 79234 - DNA, 3297 bp, Heterodera glycines
atgccgacagaatttttttttcaagtcctcagttatctttcaagttcttgcagtacttgcccggtacgtttgctgttacccagttggcgtcgcccatttgacattgcccagttgacccccaccattcgtttttaaacttgaccactttccatttatcgtcagaagtactcttaattgtgtttgccctgtccaatatttatcggcaattctgcttttgactttaatgttcacattgatccgccttgttaattaaaaaaattgattcattttagccacagctttcaaacgatggctcgtgcgcctgttttcctcaatgtttatgacatgtataagctcaacgacatcgtcttttcgagtttgggcattggagtgtttcacagcgggatcgaagtgtacgataccggtctgactatttctattttcttgcattttaacgtattcccactttaaatgtgaaggcggtttattgtcttatattttgcaaaacactttcagaatatgcctacggtggacatcccttccccttttccggaattttcgaaaatacgccacgcgatgctgaagaattgggggagaatttcaacttcaggttgttgtgtttgagagtttttatctgatgctcttttattcaagggaaagcattcctttgggcgaaactgatttttctgctgaagatgtgaacaaaatgattcagaatttgggccaagagtaccggggggacagctaccatttgatcactaaaaactgtaaccatttctctgccatccttagcaaggtgagaattaaaattcgtagcaatttatgagcggagtggtccaggtttttgtctcttgtgtatggttcggaaatcccaccaagggcatcaaaactaaattcacgattctctaaaagacggtccacttaagaatttttgcgtggattactcgttagctggtaatgattgaactctaaagggcttcttaaacttgagcgattcttaagcaattactctggtcttggtccattcaggttctaacgggccaggagttgcccccgtggattaaccgtttggccaacatttccggttctttgccatttgtcgagcgatggatccctcaggtgccacctccgatttctacatttaaatttgttattctttcaaggaatggcttactccaatcgcccttcaacagtcgttggattcgcggtcgcgcagtattcccttacaaaatggcatcagcacggcggcactgagtgtcccggaggaaacgaaagcggacggtgagttggccaaatgaaacttcaaggattgctattcgtgaagacatatttccctagatttttattctctctgaaaaacttctaacccgaattcgacaaaaggtttttgaatggttaggaccgcattttttatcgattttaattgcgattttgatcaaattttgaaaattaaaactttgttttgttcgaaaggactgtaaatttggttaaattcaaaagtattttatccttagaatctaaataaattctcggcctttaggcatttttaaaatgttgattgccaaaaaacccgttaattaattaattaattttttgtattgttttgttttgtgagtgtgttcccattttaagtttcgactgattccaccgcaaggccttcgtcttacaccgtcggttggcggctgttccaacggcgcaaccccagctgcgatcaatcgtcgtcccctgcgaatgcgtcctcctcctcggcacccgccacctctagacagcccaactcacaatcagcgtccaacaccctctcacccaccctttctcgcttgtggcaatttggaaagtccacccttttctccccaactgcagggaatgtcccaacagatgaaaaaaatgccaagtgaagtccttccgtaacactctctacttattgaatactaatatcttgtaaaaattgcttataataaaagattgtctccttccaacgttaatgataagtcaaagaatttaagattttttgagaaaaatttgggttttagttcaatgacatttgtggttttttcatttgaaaagcatataattttcaaatgcaaatgattttttgttaaaatagtataaacccaattagtcttagaatcaataaggtagaagttggacgggagaatcgggcggactgtgcgctggtggcaaagtgcgcaactttacaaataattgctggtgggaattaaggcggacatgggcaagcaaaaacagggaatttagcctcgtaaaaccaaaacatggagaaatcatttttctttttccccttctctggtgaattttttctgaatgttaagaaaatttattcaaggtttgccctttactcctccgccggctcctcccccccgacctttttacaccgtcgccctgataaacaaaattttttgtgctctcacaaaatattattaatgctaatataaaacttaaccaaacatttatagcaatttatgtagaattatttcatttaaatgaaagttaaattatctttaaatactcacgaacaataagaatattgtcgctgagaaactgaagaaaattggttaccgaccgaccaaaaaagcgatagtggcaaaagataaaacaaacgaatagagagagaagcacgaacagagcaaaagcatgcagaagaaaatgttagcaataattagttatttgagaaacagaatccacaacatcgaagacaaagttcaataaatggtttggaggcagcatccgatttcacaaaaccgtcagaggttaagctcctgagcgattttagaagcaatgttcttgaacccgatcgaagagccagaaatcccttaataaaataaatacgcattatataactttgcataaaaataacgttatgattggagggctttaaaagaagaacgtatgcgataaaatttgacagtaaagaaatgagaaacttacgtttaaacctcactccattgagggaaagtcttggcaatttgcaaacctttaaattaaaaaaatactccgaaaatattcagcctgaaacaatacctccatctcccattgtatcaatgagtctttgcttgggtcgccgtgtgcacaaagtaacaaatacctaaaggaaaaaatgcattcaaaacacagaaaagacgacctctccctttgctcatattcgcatccattgctgtcgagtacttttcgtatttctctaaaaatgcattctctgtaacatttactcctttgttcttcggacttcattatttcgtccggtgcaagtgacgaagtcgtcttcattgaccaagtaaagcgcagagaacgcggcttcacctcttc

SEQ ID NO: 79235 - DNA, 699 bp, Heterodera glycines
caattttcgcagaatgcttcgagaaatctattaggtattctcggataaattaactcatccaatgcattgcctttaaaagctccgcaatttccttgctcaacgtctcaattttcaaacgtcgcacattatcacccttcttttaatccaacaattgcaagcaacatttacataaacccatctgttttcaatacttctcacgaccagtcctttgttcacagcaatcagttacaacacctttcctcaaaaagcagccaaaattggcatttgatggtcgatgatttcgttaaaaaaactatttcgggtattattttatcacatcttttgttgtctcattcgaactctgttttagttcctccacgcaattacccgaagaatcgttccccatcctccgattcttcctttcccgtttctcacccttcgacgcgatcgaacagtcgaaattcccgaaagacatcgccaccgacacgcaaaaggcgtttgaagcacaatatttcacaaggcaaaagaacgcaaagacagacgaaagaggttgtatcacacttaaggcaacaattccttttaatttgtgaattaggcgcatttatcaaagcaaacgatggaatgtgcgaaggcaattggacttgacagtgactacctaaggaaaatcgaagaacaaaagaaactgagagaagaaattgcgcgcaaaaaaaaccaacaccg

SEQ ID NO: 79236 - DNA, 982 bp, Heterodera glycines
atgaagacttgctggcgtttctttttaattataaatgagatagtgatcaatagtgatcagatttcgaatttgatgcttttgaggtggtgtcaactccgggaacaagcggcgccacgggtgccaccgctgtgtcacaactcattgaaggtactaacgcttgtctttgacacttcataaaattaatcgtaattgtgaccaaattgaaatttagaagacgaggaaaaatgtgcccgttgtgccacagcatcagccactgtacgaaggattgtaacaagcgttgaatccaaagaattattttattttcatttgtgcgtttgttttgatgtgttaagcataaaaatttttcattttttcgtgcctattaaagtgcctttcacgatttttggtgcctaaaaatttttgaaattcttttttttaaagggagcccactttggcgattttttgaaaaatttggttttttacaaaaatgtcttttttggcactcaaattcggtaatagtatggtttacaggtcccacaaaaaaaagaggcaaaaggggggttttatgcaattcttcaaagtcctttagggttctcgagggcgctgatcacgaatataatattcatttcgaccaatttcgaaccccgaacccgaattcgaacaatttttttgttacttttttttgacttaaaatcaacgtcaatattgaaaatttaaaaatgaagaacaaagcaatgtcaggcacccaacgcaatttgctgccgggttatatggacgaatacatgtggcgccaatttaatggaaaaaacaattgcggcctatgaaaacatttttgaacaaattgctcaattttatgttgtcaatgcttgagtttgtatgcatatttaaatgcacacggcgattcaattttgggctccaagtacaaataagtttattatttatttagtaatcagaacgccaaaactttgcaaaacttaaaatttattggggattttcccttaaa

SEQ ID NO: 79237 - DNA, 491 bp, Heterodera glycines
atgatcagcaattacttaattaatcatatcttctttggtaagtgtctaaacgctgcaattttatatatttaagcttcgttagactgtgtgctttcgaatgataccaaaaaaataggtgttgttcaaatgaacaaagttattgtataaaaaccgagtattttcaattgattggactcataaagtgcactagagccgttttcccttccaaatatttctcaggtcgcacttcgaaaggccccacaaaacggcgccgtcggcttcaaacaggaagtgaacacaagcagaaatgccacattcaattgggctttaatttccccaaatcgttcgcaggtgaacaaatgggtcgtgctggtcaaattgctcatcggcgaaatccccgagcgcagtctcttccgcacggccgaacttcgccacgtgttggcgccgtatttgctgctgacccaaagttggttttatgcgcggcgaatggaaacgcacatttggacatttga

SEQ ID NO: 79238 - DNA, 1377 bp, Heterodera glycines
atgagtcattttggcgtttcactgctcccgattggcatagggctaatcataatgctcatactcctgataccatcatccacggatggcatgaaaattacactcagagtggaaatgggtgaacggtggatagtcaagcaaatgaaggacaatccttttttcacctttgaggtggagggcacggacagtgtggcaacattgaagaagaaaatcaaggataaaattaaagaatatactgggaggagcttttcactcgctctacaaacactgagactcaacaaatttggtcttgcgcttgaggacaccaaaacaatgcaagaatatggaattaaagacgaccaaaccatcattgtttgtacgttgggtgaatttcaaattgacgtaaagtatggcaagaaaaggcattccgttaatgtgaaagacacggacactgtggcaacattgaaggggaggatcgaaaacattaaagaatttggaaacattccgcacgaaaaacaaatattgataggagacggagttattgtgtttaagaatagtgaaacaatggacgaatgtcgcattaaaaaaggcgatactgttaccgtgtcgtgggagaaatttgaaatttcagtgaaatacgacgaaaaagaaccgatcaatgtagaggtcagaattgtcagaaaaaaaatttccaaaggccttattttagaaaaaaaaatatattgaaattaaaagttagggggatgttaaatatcaatttgagggttttttcgaaaataaaacagaaaattctgacaagcaacatatatatgtatctcaaaagcttagatttgagagttagccttatttccgcccaaaaaccacaaatgagtctaaacccgcatttgcgtatcttcggacaaatttaatattaaggtgaaatttggagagaaagagtggtccgttgaggtgaaggccactgattatttgtctcagttgaaggagaagatcaaagatttgactggaatttcaatagaacggcaaaaactgcacttaaaccgaagaatgctttttggccatactatgatgttcaatgacattgtaaaaggcgataccattttcttagaagatgtgtttgaaatttccgtaaaataccaattctccattccttatagtgtatttgatttttgcaaagttgaggtgaatgccggggacactgtgaaaattgtgaaggaaaagatcaaggcgatgatcgaagaaaactgggaacgctgtggaaaattagtggaaatggagctgagaaagaacgatagatttggtgaagttttggacaattacaacgaaacaattgagaaagctggcattaaaaaagaaggagatacaatttatgtgaagtgtgctttccctccgaaatcggcttaa

SEQ ID NO: 79239 - DNA, 270 bp, Heterodera glycines
atgcgttccgtccgctgctccatcgtttcatttggtgccgaagtgttcgcatttaaacgcctttgtgcgacaacggagggtaattttttttgaaaattttgcaatgatttgacactgccatataattgtaaggcaaatacagcgttgccctggacgaacagcatttggagcttctgcttgacgaacatgtccaaccgccgcccgtccaacgccgtccgggtcagcaggactcaatcgtccgcatgggctttccccaactccgccgcgtga

SEQ ID NO: 79240 - DNA, 1017 bp, Heterodera glycines
ggcgaccgtccgcagcaccgcacttccacgctgggcgaaatggccgccgcggcagcggtcggcaacgcgtccgcctccgccattctggtgaacatcgcacgagcactgttcgtccgcgccctgctgatggcccactcgctgctgtgcatttgggcagcagccgaaacgcaaggggacaactcagtgtgggccttcgcactgctcgccgtctgtttggtcggcgaagggttttacgcggtggtcgtccgggcgggcgacgaccccaaatggttctcgcccgccgtgctgctgtatctgttcgccactgtgtgtgatttttgaatttgcattttttcttgaaatatggccccgcggttccataaaaaagggggcgggtaaaagtcgccactttttgaccgcccgtcccccgccttaggtgcccccgctttggttggtgcacgcgtcgatgtgtcccacggcagcgttttcccaccttccgcttcctccttctccggtgaacgtgtccgccctctgtgccgcggcccccgccgctccgtcgttcggtctgcagcccaacccgcgcgaggacaccgtcggtaagcagttgctcggccattcgctgttccttgcgcttctcctcacgcgttggctgcttccgcgcgcggagctcagccgcgaagagctcacccaaattctgctcgcctacgcggccgtcgtcacggacattctcgagttcgtcgggctgctcaacgcgtgcgcagtgtgcgccgatccgacgcttcagacggcggtgctcggcgcgtggactctgtcgctggcccaatttgcgctcgttttgaccgcgagccgagcgcgcaaaatgcgaatcgcattggccaccaaaatcatcgtcaccaccaactgcagggccgactttcggcaggtgaaaaaggaaaagtcaaaagagaaagaaaagcaacggatggccagaaaaattgaagaaagagacgcggttactgtacttttgctaccgtacttttattggggcaattcttggca

SEQ ID NO: 79241 - DNA, 242 bp, Heterodera glycines
ccccacaaagtgtccaagccacgaaatgtccaaaagagtaaaaacccacgaaatgtccaaaatttttcaaaatttataaaaacaaaatgagtttaatttaggatttttagggttttcggggtcgctgaatacgaatataccctttatattaccccttgcctaaccttaggcccatctgaataataaaaaactcaaattcgagacttggacatttcgtgggctggacattttgtgggtcagcg

SEQ ID NO: 79242 - DNA, 936 bp, Heterodera glycines
aactttacgcaacccaacgaatttgaagaccaaattggccatcaattaacctgtcaatcaatcgccactgatttggcccatttgcaaattgcgatcccttcgacttcgaatgtttttgccgcaattgaacagcatgaacttagcgttgttgaggcggcagaagacgtcactttggagcggattagctcgttgaaaagtcggctggccaaagttgacttggacacggcacaaacggggccaagcagtactcaaaaagtgggcaaaaagaacgacgaaacaattggcactttaattggccatttcaggtggatctgtgggcactgctgaagaagaaacgcaccattttggctagggatgagagttctgaagaggaggcgcgtgcctcactacgcgaaatggcactgatcgacgacgaattaggcgatgagctcaaaggcaatgccgaatttgaaaaattgagccgacaatggacgagcaaaaaagccgaattggatcgactgatgattctgaatgaccaactgaaacgaatttgtgggcgattggacgaagggcagggcgaagaagccaatgccgaagagttggagactgaattggacgcgttggcccggtcattggcaacgacggcactcgcccattcggacaatggcacttctgctgccggtgattaggaatggctttatccattggcattttgaagcttatcaggccagctgacttagcattctgccattggaaaagttgacagaacaatgtttgcatttttaagcatttccgctgcatcgtcaattcatccgccgagtcgaaacgatcaaaaagcgaattcatcgccgaatggcggaggagcaacgccaacaacggcacgcactcatgcacaaaatcgaggcgctgaaaatgagtcccgagggcgatttgccagttgcgttggaagtggccgag

SEQ ID NO: 79243 - DNA, 279 bp, Heterodera glycines
atgtgcgcttttaaagctctctttgaaaaatgtatggaaaaagcgcaaagtgaaaaacaaatcgaaggaaaagagacgaaaaaaacggtggaaattcaaaacaaaatgaatttaaatccgtttaaatccgttaagcaattggaattgaacgcgttaaaaacacaaatccttggcgcagtgcccgaactttttgaagcgcaaacaaatgcacggatatcggtccctgacattgacttgcaacgaatgctcgaccaaattttgggcgattcgattggaccc

SEQ ID NO: 79244 - DNA, 1991 bp, Heterodera glycines
atgggagaacatccgaacgacatgagcatcgagcagattctggacaaagagtccgaggagaaagcgcgacgaatagccgagaaacaggtcattttcatttgccatcaacaaataaacgcacaaaatcccattttacaatcccttgaggattttcgtcagatttttgaaatccgatagtaattaatggtgggtggtaccgatatacgcctccataaaattttttagaaattcatggtgggttgggtcgatgaattaattattcaagctcttaaaaacttatttgaaaaggggcattaccccctgagtattggtctgcatttatttttttagataattcaaacacttcaaaaggccgacaatggagtaacacgcatttttttttgtacttattgataaaaggaaatattttagactatccaaaagcttcgtttgtctgacgacttgccgaatttgttggaacgcgaggaagcggagttgaaagcggaattggcatgtatggaactgaacggcacggagaagagcagcacgacaacagacgaaccaaaggtggcgagtgtgccgaaaatggcgaagcaaagcaattgccaaccatcgcaatcttaagccaaattcgcattctccctacgatgacgtcgtcgaaaaccatcgatttgacatccattttgagtccaacggtccttctgtccagccaaccaccagcagtgccgctggtgccacaaatcggccgccgacggacggcaaaattcgtcaaattgcgtcatttccccacctcaaacaatcaccctttttgagcaatggaagagaggaacagctcgaattctatggtgcatttggtcagtgatttatttgttggtgtttttccttttgcagataatgtcaattcattttgtccatttgaatcaaatggccgttcaccaaacaatttgaattataacgtaaaaaacggacgacaaacagacgaccggccaacgccaccgccggtgccggagaagccggcatttttaagacggacggtgtccaacacgatggtgatgaacagtagcaacgacgccaacaatagcagcaaaatcattggggtgagcactgcgaatgctttgcccgcgttaggaatgttcgctttcaatgtgctcttcatttttgacaaaatttaccattagaattttaaaaatttaaaaatcggtcttcaaaatttgcttttctgtttaccgttgcttttgatgactctttgattctctctgctttttcagtccatccgaacttatattcccgactctgaggtggagaagcgccaatcccaaatattcgaccagttgcgcgagcagcgtgaacggttcgattttgctttaattactgtatatcagtgaatgttgattttgaggttggaacgcgaggcggaggaggaggcgcggagggaacagacgcaatgggaggagcagcagagacgcgcgagggaagcggaggagtccatccggcggattgcccaaaaggcgcggtaggcctaactcgccgaacccaaccaactcggccactgtgcccttaagggagcagcaccggaagtgtctgcgcacctccgactctctgctgccgctgttccaacgcaacggctgtcaatttgccggaacggcgcagtcaatgcgcgaggctctgagggcactgccgaggccgccgaagccaaagagtcgccaaaacgtaaagggggcacaaataattcaattccatcggcacccaaattcccccttttcgggttcagctcttctcccccccatgtttccctccggaaaaatgtttaaacctagaaatttttacaagaaaaaacagaaaacttaaaggaaacgaatttctcaaaatctaacaacaaaatttcacaaattatctccaccttttggttgtgagaccacatgacacaaacttacattctcagatcatccaatggtttcgttcgtcggagttgggccaatgggcacaaaagaaaccgcctctttggttccatg

SEQ ID NO: 79245 - DNA, 3042 bp, Heterodera glycines
atgactgcacggagattggcatctgctgtttggcggccatctcctgattctgttttgaatccatcacatcctttggtaagttaaagaaatgcttaatttaagaataaaaaaattaattattcactttgtgcaatggcttaaatatattttaaatttaaaccctccttttgtctacccgctttttctccttaattaaatgaccactttttggtttcattttcaacatgtgaaaaccaaaaacatccattctcactttttggctctgattacttttttatcgtttagtttaaggtgagcgagagattttgtacgcatttgtagccacttttgcctttaattattaaaaattaatctcttcggcggctgtaccccaatttaattaattatatattctaatttttgtcctcctcacttttatcgaaacgaatgcctcctcttcttcaataaatatgctgaaatttagaatagcacgtattggcccggacgctctctcacgaatacaataattgcttactttgataagaattatacccaggtgagtgaacgaggggggaaaaagttcgaacttggttttggagattttaaatcgcataaaaagccttaaatgtgttttaggaggtgattttattcacgaaataaaatttcattttccaagtccatattttaaataagcatttctattttcaagtccttttcacaacaaataaattccccggcttccattcagcagcatcgtattttttcttagtgttcgtaagactcataaccccttttttggaaatcagttccttgtgccaatgtggcccggtcacttcaaaatatgttttatttttccattcacagttggagcgaaatagactcgtcggtgcggtcggacggaaaatggtactagaagaaaatcgagcacaagacgcaaaactatgggagaaaaaccaccccgaccccagatataagtgtaagcccgacatcgtccaagaggtggaaaattgataattaaattataaattatggttttgtccaaagcctgcgaatggtcagccaaagcctgcgaatggaaagccaaagcctgcgaatggtcagccaaagcctgcgaatggaaagccaaagcctgcgaatggtcagccaaagcctgcgaatggtcagccaaagcctgcgaatggtcagccaaagcctgcgaatggaaagccaaaggagttcattgagatcaagtcgattacggaggggagtaaaacgaaacccaagtagagaacattattttatgaatttttaaatttacgatcgaattatataagatgcggtcactctttttaggtataatttttttttacgtccattttgactgccatttcgatttacagcgaaaaaatttggattttccatattttttgtaaatattttggcttttttcatataaaattcagaaattctttaacaataatgatttttttgatgcgattatattttttatcgatttagctttgaaacgtggcattttctgtagtatattgaaacgtcatactgaaaaacataacgaagccttcctcgataatttttattttatttgacagacaaaattttttatataattattagagaccggtgggatcggaactcccgcgggattttacgggagtcccgctctcgactcctgttttttcggtgaatgggatttttaacgggagcgggatttttacgggattcccgtttgggactcccgtcccggaaaattttgaactcccgatcccgcttccggaaatttttacccaaaaaacgggagtaaaaatgcacttgtaagaattgagttttttttttggtaaaaataatgattttctttgaaaatctgttaaatatatagccaaaattttacaaatcatttagactatctggacctcagaagcaagctgtaaaggacgggaagcttaaatccgtaatcaagatgtaagcaaaaaataaaaaaatctgaatataaaaatttaataaaagtaggcacaaaatcagtttcaaaatctcgattttcactccgagatagcaattagcactaaataagtaccggaaatggttgcacatgatacttttatctttaatgaagctgcctatcgggatcgcaggcaccccaaaaaacctaaaaattttgctcaaaatcgaaaaaatttataattttagacaaaatctgttatagatctatccaaattttcaaaatttttcccggcggaacggcaccgccggacccccttctccctaaaagtctttagaaaaagcgcgccgcgaaaaaaagatgctttgaaaaattttgggaacaagggtccggcggtgtcagtaagcgccgccgcgaaaatttttcgaaaattagagaattagaatgcaatttattaactgattttcatcaaaaataaccaatttttgactttgagtcaaatttttttaagaaaaaataagtttggggacccggcgccggaggaaaaatttgaaattttgactatttttacagattttcactcaaaaattgttcattttaaaaatgtcttatcgtttttaattaattctatacaaaaatatttatgataaaaagaaataaaaaaagtacataaacttattattattaataataaaaatttttaagctaaaataataaaaaaaatttgactatatggtataaggcaaaaattgaaaaaccccgaccccgaaccatttggtcaaccctgaccccgaccccgaacttgctgaccccgacgactccgaaccccgacttttccgaccccgacggtcgggggcccaaccctaaatatcaccgtaaaaattgtttatgtcaatgtttagagtgccaaagaaaaatgtcgccactacgtccctatcacgaacagaacaacatggtttaaagggaaaagaaagatctctgttggacgctgctaaatggggaagaagggtgcttaaaggattgaatgttgtcggagtagtttcggactgtggcaaagtaattctcgtctgcaaagaaaaaggactatcggaagcagctgggaccactgttggaattgttgtcgaacg

SEQ ID NO: 79246 - DNA, 204 bp, Heterodera glycines
atgtctcatcccaatgcttttcgtcattccaagtgtatcgaagcatatgatcaaacagagtgagaagaaataaattaaaaattgtaataccgtaaaaattatttacatttttatagattactgtacaaaattaactctctctatgaatgcagttctgctgaataacaaaaaaatattaattttttcagaagctaatttattaaa

SEQ ID NO: 79247 - DNA, 651 bp, Heterodera glycines
atgataattttttggatgtcaatgcttgtcacagtgacctcgaaattttttggccccaactgtttgataattaattacaaaagcgatggaagtggtaaattttgaaaattttaatgaattttatacaatgattagttaattattctattttaaaaggttgtcgttctgtgttcgcaaaacatcctattttctgcagtgaatccgccaccatttttttacttcgaaatgaaaaccataaatgtgaaaaagtatgttgaaatgcaacaatattgcatttcatgtgaacatttgttcagcagtgaatttttgtctgttgtggcattaatttggccactcggcggattattttcacaaagaatggactttgtttgggttggttatttttttattattaaattgttttttaacaagtctttgtctgaccttttttactatgaaatttcagttatgaaaaaagaatagtaagcgaaaaaaatcagaaatttgaagaaatatttttgcctattttaaaaaaatgaaattaaagcctttatttaaacttagaattaagacaaaaattcaagaaaaaatatttaaaataataatgattaaaaaagaatttgtatttataaacaaaaaattaatttaaagacaaaaattataaatttaaaa

SEQ ID NO: 79248 - DNA, 2694 bp, Heterodera glycines
gttcacacaccgcaggaggaggacagcagcagcatcagatagaggaggaagagcacagcagagtgaggacggaggaggcgaacgcgtgactgacgaaggaagagcagcgggaggagggcggggccaacagccgacgaccgaagcagcgagaaggaggaggaggcggagtcacaaacagcgaccgaccggcgaacgaccgccaaccgtcgataacaacaaaaaaacagcacagcgaacgggtcggctgctggtgtcccaaccctcaatcgatcatcatcggccggcgaccgggcggaatagcggcgccggggacagcgacgacagaaaagaggcggcggaggcgagcggcggcgggcggggagcaccccaattgatgcgctgttggtggtggttgtgctgctggggctgttggttggccattccttcgaccatcgtcatcatcatcaccaccacctttactagcaccacaaccgcagcggacggcgactactctttggttgaccacgagcaggagcagaaacaacagcaacaccaccaccaggaggaggaggggtcgaacgcgttcaaatcgttgtttttgttggcggtggacaaagatcatcagcaagacaaggagtttttattgaacgacgacgacgacaacaaccagcaccaccgagtggaggaacagttgccgttgttgttcattgttggcagcaccgttggcaccgcgttgcaccgactgttgttgagcattgcccgcacgacgcccatgggttggcccgactggctgcagccgcacattggtcagtctcagtgttccgtgtcgatccaaatgtggcgatgtttctgctgctccccgttcatatccaacgaagcggaccccccccccccccccaccgccacttgagggcttttattgctaattgactataattagaggcaattactacgtgaattcatttccatttttcgctaattggttgggattgttttccccaagtgtgtctgactgctggtcaattaccaaatgtttgtttgttttatgaggtaatccgtaattagcgaatgctttatccctgtagataatgtcacggatatgaatgtcttttttccaaaaatccgctgcattaaattttcaattcttatccctcgctggttgtgagctttagtagtttttgttaatctctttcttctgtgtgccctgttttacaaagtatgcttttcaagactctgatttttcaatcaattctccaataaaacactatgtggctttctctcaatgaaagtgcatttgaaacaaaaatcaaatgagcctcatttttctttttttgcgaaagaaattaaaagccatttgacgaagtgatgagtcacatgcattttaaaaatagaaaatgagacaaaatgcaatcccctattttttgttgcacattccacaaaaattacaatgattcaacaatagcaaatgtttttgctgcaaattcggggtaactttcgcttcatttcggccggcattttcatctattttcaaaatgccgaaatttccaacaaaaacaaatcccccattttcagatgccttcgtgctctgggtgaatgggttgctcgagtattggcatctcggctacttggaagtgcgttgtttttgagaggggttgcaaccccgccccgaccccgaaccccgacatttttggccattttcgggaaaaaccccgaaccccgacgcttcataccccgacaaccccgacccttaaccccgatcggggtcggggttaaatatacacccctaagaatggcattttcgtgggagaaaatgcaaaaaagttagacgaaatttgaattttttttaaccatttgccaaatttttattaaataaagaagatttgctcaattttggacatttggaatgtggtgtagaggttagtgccatgacattactttctgtcgtgatttcgataccgttcgacgttttcttctttaattattttccagggcccaaaaagtcataaaccttattaaaaaattggctcaaaatcgcaaaagtttagcatattttggacaaaatctgttaacagatctaaccaaattttcaaaattttcccgcggcgcctatcggcaccgccggacgccgtaccctttctccttaagtctttagaaaagagcgacgtgaaaaaagatgttatggaaaacaaaaaagtaataaaaattttaaaatttcaagaaaaaaattaattctatacaaaatttctgataaaaagaaataaaaaaatataaaaacaatacaaatattattatggaaattaataaatattatttccgaaaaaatattaaaaaaattttgactatttggcataaggcaaaaattgaaaaaccccgaaccccgacacttccaaccccgaaccccgaattttccaacctcgacgtcggggttgcaacttgcaaccctatttttgagtgttccgcccgtgccattaatcccccgtccgtttcagtacctcgtctggcttctcctcccaattttcattgtgttcgttttgcccattgtttttctgttcttcagctacggttgtgtgattttcttgcgcatttacaagcatcggaatcgtatccgagaagcggtgaggggtttttttgccgttttttcagactaataaaaacggattgacgagtttttgcaccgatcagaggccgagaggagtcggcctttttggccattag

SEQ ID NO: 79249 - DNA, 867 bp, Heterodera glycines
atggtcacccaccttggcaagccgttgaacttcgagatcggcgacgccgccatgacagatggtcgaccgccagtgtccgcggaacagatcaagcgggcggtgcgtgacgcggtatgtcgtgccgcgttccacgccgatccctcccggaatcccttaaaatttgccagaaattccaaattctatttttgacgggtgaccatgtaaatctacggttttttaatggatttcataccgttttttggcacgctttttcaaaaaaagtaagtttttggggaaccaggggtccggcgatgccgatttcatgtcattttttatgatttcaaaaaacatgtatgaatctaatcccccctggtaccacgattccaaggtggatatccaaggactttaggattcgtagtcggtcactgtccggaggctctattcattacatatcgccacccccccccccccatttttaggtggacgtgctcatccaacggcaccagcgtttgccgggcagcatttggcgtgcaatgttccaacggataggcgccaagcggacaacgcccagcgggctggacgacggcgcgctgctgccagccgacgcggaggcggcacgcaaagagtggcggcgacggcaccgccggcggaccgaccgtgaggacaacgagctgcagcaaaatgccgaagatgacgacgacaaggatggcaccatcgatcaatcgcggcggggacatttcggcacggcggtgatggtccgggacgaatcgtcaattgttgtggacgcactgagcccaagcgacaaagagctggcggaagtgccgttgttgctgccttcgtcctcctcgtcgtcctcggcacggcatgccgaccggcggttcggcgacg

SEQ ID NO: 79250 - DNA, 2129 bp, Heterodera glycines
gaaagcactgaagaggctgtgctccgcgagttgcgcgaggaggccggcatccgtggcaaagtgctgttttgcatcggcgaattcgttgtaagaaataaataaaataatttttaaattttttaagtccgattcccatgattgaggacacagcaatttaaaatgatttgaccgcaccgtatttggaggggcgcgcttaaaattattgtcccatggctcgtcagtagagttccggacctggatttcccggacaaaaatccaatggccttgtcctggattccaggaaaaatgcaggcctggctctacactaggttcaggtcgaactctactcgtcatacatgcccacgacactccgatttcatcattttacccatttttgtaccaaatattttttgctccgttttattttttggtttgttcaggacgaccagcgctttcaccacacaacactgttcttcttgacggtgcgcgaagtgttcacggaatggggcgaaaattgtgagaatgggcgacaacgacgatggatgggcatggacgaggcacggaaaagcatcaaacacaaccagcgggacatgctggagaggagcatcaaaatgttggtacttttttttaaattttcccaaaaaatttccaaattttctgcgtccaactcccgttcttcttttgttcgacgatagatttttgggttttaaaaatgtaaaaagtcatggacccgtgtctcattttccatcctttttgtgtttagcattgagcaaacactgggcgaacagttggagccgtcggtcagcaaatgtctcagtgctgtgcccgttgtgtcactgcgcgcggcggaggatggcattggcattcaacagcagcagcaaaaacaactgtcaccgccatcgacagcaaaatcaacggcacaaggtggtgacgacgacggcacggacctttgccggtgatggtggcagaaatgggggccgtcactttttgttcaacggccattccaatttgtattgcgcaaattagccatgttgttaatgaggacgacgaacaaatgattattattattacttttgtttttttaatttttttttccattggtcttcttctaattctgttaaatccccaccaaaaattcgcttctgctgcagctaatttgtttttttctgttttttattgtttttgttactgttttttgttccgttttccattgacttttctctctccgctttttgttggttcattcacattaattccattcaaatcccccctttttttgtgatgcttttctcaatgcttttggcataaaaaagcccttccaatttccatgttaatttgttgcatttttcagtaattcggcttcacctatattcctatttaattcacatacatagctaattgtaagttgttttccatctgttctcttttgtccgtttttcccctggaaaaaagacattttccgtataaaattcaacaaaaaaagagtgtattttgtttatttttaacggaattttcccgtcaaaaacggtattttatacataattcaaagttaggcacctaactggactttggcttacattttctctgatttttgccatgaaatttgtcacttcgttcgcccgtcgttggcccctttcgctttctgtcgccgcttcgtttggccgcgtcggtgcgacgcgcgccgcctcgacgctgacaattcgcgacgcattaaaccaggcaagtttttagggtttttggtcatgtattcggcatcgtttcaatcaatttcatgggttaccggacccgaaattcgaccgtaaatcgggttgggttttaaattgataattttttattcaaaccgtttcacgcaagtccgaattttgccattttcatcgtccagcaaccccgaacagattccatgaaatgagtttcggtaacacaaaattaaagcgtgccgaaaattttgtttttccctcggtgccatttttgcagatttttaagtgcttgtgacataccatcatgcatttgtcgtattaaataatttctcatcgtcaacagcagcagtgtctcaatccgtctccactgatcgctcccatcgatcgtcggcgatttgcgacagtcaaaaagaaacggcaatggaacagaacggcacaacaatcggaggatga

SEQ ID NO: 79251 - DNA, 145 bp, Heterodera glycines
atttgttgaagaatctcatttgccaagttccatttagacgatgctacggcacattgattcaaccaacaccttttatttgcgaaagaatgcaacatgatccaaaattgaaagaaaaagtggaaagagtccagaaagaatatgaggt

SEQ ID NO: 79252 - DNA, 328 bp, Heterodera glycines
ctcggcaagccattcaaggcatcgacaaccgccaagaagttcgaagggatcgtcgcaatggttttgtgaatttatcattcaaataaggcttgataagatctttttttttgcagagtgcgtcttttccattgcgcttcggcgttcttttggtaatatttttttaatataagtataaaaaggcttatgaccaggcttgtaaaattcgtttcctattgttctttgttgaatgggcaataaaattttaaatttatcaggacatgctgagagtattcgagccactgctgccccgcttctccaaattgcgcgggctgtgcaaaacgcgtttgcc

SEQ ID NO: 79253 - DNA, 988 bp, Heterodera glycines
atgatcttcacaattgccccttccgtcgctttggtcgcttttttattttttcccaattttttcctttacgtttgttttgccaatactcactttttggccaaccatcaaagcggtgccattgattctgtggtcagtacccatccatcataatttgcctggacttctctcaaattgtttctttcagtccgattctccgtttcaaatccgtcagcctcattcccttcccgaccttttgggccaattggaatggattcgggaattaacggcgatcagaacattcattagagataaacaagtacgaacaatttttgccaggttaggtaaataaattttgtttacatttcaacaaaggctaacattgaccagcgatatggggaagatgaccccgaaattgagaagaaagtgcgggaaacggacgaggactgtgtacggagcaaaccgatggaactgcaaacggagaattttgttgtcacttatcccattgacattatgcccaaatttgtgattggaaaagaatcaatgtaaagaccaaaaaaaaaaaaaattagaaaaatcttttagcattcattcgacgacagaaacactgaaaatggactttctcagccgaatgtttccgaatgatgagttgggcaattctcaacaatcattgtcagaagaaccaaactgtgcccatttgacgggtacaaccgaagagagaaaagccaacgaagtgagcacgacaaaggtattcctcgccttggcaattcattcattaggcataattatcttaggaattccgttcgttcgtttccgagtatcaattggcacgactaagtgaggagcaattgcaccatttggggcttttccttgcacaaaaactgacggcaaatgacgaaaaatcgcgcgaattggccctttattatgcacatttttactggagaattcggggcgacccgttaaagtcgcagcagtgccttcgcctctatttgaagcgacggccgaattgcgt

SEQ ID NO: 79254 - DNA, 1311 bp, Heterodera glycines
tgccaattattttgccttcactcatatttgatcagcagcaacattctgctcagaatcggtccattcatcgtcgttttaccacctctacaaccagcttcaccacctatccggcacaacccccatcgtactcgattgaacctgttggccaagctatgccatcgctaagctacccaatcgggccaccacagccgcctgtgccaccttcttacccaacagtgccgcaagcgccttttgctggcacaacgagtccaacggcatgtgaatgttgctgttgttctgccgtatgtttttatgtattttaatctcttagaaaacaaaaaattggcaaatgaataatatacaccaagaaattgaaaaaatattgtcacaggctcgaaaaaacaatttaaaaaagcgagattaatcccttatttatgatgtttttctaatctcttggtggttttcagttttgaatcttcaaaataaggagcattgattgatggattatcaattgaaaatatttcaagtataaatttatttgtcatttggcatggggtttaagccttttaaagcatctactatttttttttaattcttaaaccaattctagtatcgcagttgtccatgccggccgagctgcccgccatgttgtggtggaacggtaattaaaaaaaatgatttttttggaaatttaatttttgttcatacatagcatacaacgtcaaccacagtaccaccaacaaagcccacagaagagacaaccacgactacaaccaccaaggataaaacccccaaaaccacaacatcaagcagtacaccggttacaaatccgctattacatccgtacaagtaaggaacacttcacattattaaaattcttatataggaatattaaagaaaattaaattaaaatcagtttttttagcagataagaaatttctataaattctcaaaacatcgaaatctaaaatattaataggtttctttcatctagtccatgctgtctttcattgatcatcaattgtccaaacaacaactgcaattgtccaccgtcatcatgctttccgtacacacacagtggtggttgttctgcaacagagccttgccctattccgccttatttggccggcaccggtggttatccgattgggatgccgccgaagtttccagccattttcccacccatgccaaactatcctggcattccaatgccaaactattacccaacgatgccaagaaatccaggcattatttacccacctgttggggcaacaaattatcctattattccgcctttaccctacgccgtttcaccgttgccaaactatccgg

SEQ ID NO: 79255 - DNA, 1232 bp, Heterodera glycines
atgccgttggactcgttgtgccagcaaaaggcgcttgcggcactgttgggtaagaaggtggcacaggcggctgtggtggcccgattgggtagcttagcgatggcatagcttggccaacaggttcaatcgagtacgatgggggttgtgccggataggtggtgaagctggttgtagaggtggtaaaacgacgatgaatggaccgattctgagcagaatgttgctgctgatcaaatatgagtgaaggcaaaataattggcactgagtttggcagaatgtcatcgtcaattcgctaatttgtgagtttggcgaaagtaaaatttaaaaaaaatgtaaatttaaaattacctttgcatcggtagtatttccatgaataaggtccgatgcagccacagaaacttaaaaaagaaaaaaattaaatattttaatttattttatttttttaccgataatgaaaaggtgaagcaaaataattattaaaaacatttgtttaagttattaatctaaaacctaagaaaattgaccaaatgacatgactttataaattacacataagtgggtaatattagtcaaattaattaatttagtttatgggttcttgatccgtcatatccaagatgaaaatttccttattgaatcatatgtgtatacacaaacattaaatagtttttttttacacttgattttccaaaatagaagttaggtaatacaaatgtatgaacaaatgaaaattcagcgtatttatacagaattttcagtgtaataaaaaaaattatcaaagaaatgtaaaaaaaaaaaacgttttaaattggtatatttcaatggacatttgatgggtggtcaaaaaagccgccaaccgattggatgaaaaattgcattgttagttcacctcaaaataggcaaactattgtaatattagaaattttatttatacaatgcaatcagcagacagaggctgacgacaaatgtaacaattctttcaaagaaatggaaattttttacaatatttattttatgttgctgcttaaatttcttcaaaaaattttcattttaatatttgaatttatttaattattctggtagaaaattcttttatttattttttttttgatttaagtaaatttcaattaatttaattattaattcagttcctctacttttacgcaaaaaattaaacggttatttttatcgaagtactaactaattacgttttttaagttatgatctttgataaa

SEQ ID NO: 79256 - DNA, 666 bp, Heterodera glycines
atgctgatcaaaaaaggtagcaacaccaagttgatcagatcactccttcatggtgatctgatcagcccattttggctgggaacgaggggtaaatttcaaaaaaaatttctagggggttgggaaaatttttctggaaattttgagtaggcccattttatagagcacaaaattctctacaatattcaaaaaaccgcatgtctctatgacttataccggctgaggtatgggcacttcaattttgacgtagtgtaaaatgcactattttcttaagaaatacagtactttttataggcaccgaaataaaagtcgacgtatctcagcgggcctaaatcgtagacccactattccaaaggcttgcggatcgacttttgcggaccgacattatcgtttttgggcaataaaggtgtattctggtgaaaattgaattttcgacttttgttcgagttcgggatttgaaattggtagaaatggatgtcatattcgtgaaccccgaatacccctagaagatttttatcattaaaaacaaaaaaaatttttatctggtccaaactgtatgtacatgtaccgaatgtttttcaaaaaacccgtaagaaattaaacagcattataccgcctaaacacaattcggagctacatattatatgagttttaaaaaaatttatttta

SEQ ID NO: 79257 - DNA, 66 bp, Heterodera glycines; identical to SEQ ID NO: 53774

SEQ ID NO: 79258 - DNA, 1031 bp, Heterodera glycines
caatgaaaatactcaattaaacaaagagaagtgcgaagagaatgcgacggcttcggaagatcctctgcacattttcgaccttttgagcataacggacacgcgaattcccgaactgtcggcacgcgccgggcagccttcaccgtaccttatccttcaggtgggtgtccgaagtagggaatcgaaactgtaaattgttgaaagtttgaaaggagaagccatgcaacgccttttcaggagtatctgaaacgatgctcaacttatggcaacacaacaatccaactgacgacgcgccgtctccgccatcaaaggcatgaatttgcgttgagtgttggcggcaacaacagcgaaagagtgcgcgttgtgtccaccaacaaacgcgaggggaaacagaaggcggcgcaagcgatgctgaagaaattgcatccgaatgtgagttgaacagaattggaatttgaaaataactccaaatattttggaataaaaaagagttaaatattttttcttgcattaattggcgtcgttctttcatccctcagaattcaacgtgggggtcacttctccgtctgtacggttacgaggctcaaatgaaactgaaggaagcgcggaagtgcaaggacagcgttacaaagttacaaggcatttcaggtgaacaaaaagccacggcaaatgacaaatcgaaaaaaatcaaacattcctctgcagatgaaaaatggcaagaaggaaaagcaacgggagagtttcaaccgaacaccattattctgaaaaagcttcaaagcgaaatgcttaagttatctgaaggcattattagccagcaaaaagacacaaaaataatgccgaactgtcagcaaacgattgaacgccttttggagaaggaagaaagtggggagccgaccgcgaaactaagaaggagtgatttccactcggaattgcccattctcactgaagaacaattgcgccaattgtcttcgaaattggccatcaaataccccaatgatgaagagcttgtgcacattccctcacttaaatcttaa

SEQ ID NO: 79259 - DNA, 310 bp, Heterodera glycines
acagtggaaggagatgccaatattttatgcaaattgagtgcaccgagtgttaaagttaaggtaattccttattaaggcgaaactgaggccaaagaatatttgaatgtttaattaaattatttgaaataatgtaatttatattgaaaaggaacactaacgaagtctggatattttagactgaagttgacctccacaattcgcaattaaatgccgatcaattgtacgaatacgccaagaattgcttcaaattcaaaaacatttgcgttttacgctttcggaaatggtccgaagctcgcaatttttataagca

SEQ ID NO: 79260 - DNA, 1116 bp, Heterodera glycines
atggcgaaatttcggcttatcgtccgatgggagggagccgagcgcaggaggggacaaagggcgaatgtgtgccggatcagggagttcggatcgacggccgaggccaatggcagggttagccaacagtgtcaatgccagggtggggataatggcaggatgggcaccgtgggtcaatcaatgctaattgtcaataatgggcaactggaagggtgagccaatcatcggctgatcactccccccgccctccctactgattaggctatcacgcgctgatcagttccgtccagctgtttcgttttggtggcgaagtgaatgcgggccaaagaattggcgtggcacgagatttggaatgtgccgggacgcggcccaagccgaggggcgacgaaaatttcgtgcgcatggaactcttccgagaggacaaacccatcgacccaacccatcatctgatcgactgtacgcaagccgattatgtcaaatacccccctcggttttaggcatgtgcaccggccaaatttgcgagacaaatcgcgcaaatgccctcgagggactcccatttaaatttgacaggtcgaatagtgcgaaattgactgactaagaagcatcagtgttgactcccgtgtttgttaagccgtttcaacggagtgcgcgggtgggaaatcgtttgtccgaatgttcggcccgaagagccgaattcgtcgggcgaatcgcctgaacaaagtgacaacagacaaacaatgagtcccaaaatttacaggtgatggcacaattattgaacgatcgaaatttcaaagtgccatttcagtcccatcgaaggcgaagtgatcggtcgcgtgcggctgagtgcgtcgagcaactcgcaaagctattcgggctgtgccaacgaaggaatatttgtagttggcacgggaaaatggacggactacgaagtgcgcatttacaacgcgcgattccgcgaatccctcgcgcttggcaagcagcacatcgaacaggtggtggaggacgacgcggacagaacgccacactgaacataatgcactcattcatctccagggacagcacattggccatcgcttggactgtgccggggaggaggtggtccaatcggtgttcatggag

SEQ ID NO: 79261 - DNA, 459 bp, Heterodera glycines
gaagtcgacttgtacaccgtccaagtgtccgaccttgcctttgagaccactttttctttgcgtgtcattcgaaacgattatgtgcaagcgttggtcactttcttcaccgtcgaattcaccaaatgtcacaaacgagttgggttcagcacagctccggactgcaaatacacggtcagttgggcacagcaaaacaacattttatttaattgaattattttcaatgtttttagcattggaaacagacaggttggtgattctttccatttttaccggaaattctttttttcagtcttttacctttacgaatcgctgacagtgaagaaaaacgaggaaatccatggcgtttttagcgttgtcccgaacgtccgcaacccacgcgacttggactttcgcattcagatcagtttccatggcgatttgtgcgacttggacgaggacaacacgtacattatgcactga

SEQ ID NO: 79262 - DNA, 1019 bp, Heterodera glycines
  unsure (1)..(1019): unsure at all n locations
cgaaatccacaagcttcgcaaggagcgcgaagcgcaagccaaagagcggcgcacgcagcgccgtcgcgagcgcatcgagcaaagcaccgtttgggagcaattgacacgcacattcaccgtgggcattttcgtttgaacattttcaaaaattgatattttctaaatcaaaaaattctcgtctcttgtcagcttttttgaaaattattttttcgctgtgctttaggccggcagtggtgacgacgattcggacgaggacaatgcggcggagggagccgcggagcggtggaagatggagccgatcagtctgttccagcgggtgaccaccgcactgtccaccaaagcggtgaacatggtcagtcgggacaatggtggacactaatgagccactaatgggtgtggtaatgacgatgaaaattaagcaattaacttggtcgtttcgtccggtggtgccggcagacgcggaattttgcaaaattaacgaaattgaaatgaaaattgaaacaatttaaaaaactactaattggaattcaccatttgttgtccattggttttcattttccaggccgccatgctttacctaggcatcgatttgctgttgtgcatcgtcttcttggccgtccaaatggtcggtgcccattgggtgcaattgtctgacattttccggtatttttaaaacatttatgtatatttcctgggatctttaattttggggtacttaactgtttaatcttctactcattttttgaaaaaattatttttcatgaaattaaaaaaactactacctctttagcaatttcaaactttattttccgttttttcaaaattttaaaaattttttattttttagggattgccgattaccgatatttttgagggtcggatttccgattcagtcacgggattcatatttccaaaattttgtgggcctcggaatgccatcccttcttttcacctatgttncattttccgagcaacaaatgtcttgtaaccgcaccgatggggatggtccccnaaagtga

SEQ ID NO: 79263 - DNA, 594 bp, Heterodera glycines
atgccaagcgaagtgaacgccgccgcgttggttctgtttgcgatgaaactgttctttgggcttgacggggaagaagacaagcagcagtcgcgcgatggcacaaagtaaacaaactgaaaaacagagggtgcacttcctttctttaccttctatgaaaattttttgatttgtgggagggtaacggatacactacacccccccccccccgttccgaaatttttaaaatttatggtgaattactaacaaaatgtttttttttaatttttccaaaatcgctgaaaaatatttcaaaatatatttcttcaaacttttcgtataaataaatttcaaggacaaaatttttttaaaacttcgaggggggagaacgacgggggaaatgagctgctgccgagggcgactagggtcagaggcaaacgacctgctcccaaaaataaaaaagtttattttggaattaaacattttcagcgaagcgactcaatgcgccgacgatgacagtccgtcgccggtgttcagcttcgaccattggctgctgcaacttcagctgcgcatgcactgctggcagggcacaacggttcagaaggtgttggacaacac

SEQ ID NO: 79264 - DNA, 1259 bp, Heterodera glycines
atggacagagatcggattgagaaacaaaaaggaaacgacaggactgagttgaccggcgttcatttggtccggcacggaaatggaaacggaaagtcggacaacgccgagcagttcagcgtcgtgcgtaccaacgggacttgtttcaccctgaagctgaacagaccgttggaagcggacgtgtgttgggcacggattggtctatcacttaatgaaatgctttgtccctctttagccccctttcccctcgcccaattcatccgatgcttttcccccatcctcttccccctcattttctctgcttttcgagagagacggcaccggtgaccacgcgtctgtccaagtacaattggtcgatgtcaatgacaatgctccccgcttcttcggcggccctttccccgccgaagtgatcgtccccgaagtcctttccccggcagcagttttcttgtccattagccttctttttcgctttttacagctctcttcccccggtttccttctgcgccgtttggaagtgattgacattgacagaggaattggcggaatttgtcgcttttcgttggagaaaacgcaaaacgaaaaaggggcggcggagaaaggggaaatgttcgcattggactctcagcagtgccagtggccacgatgttgggccaaccttcgcttgaaaaggccaatggcagagggagaagtggccaaagtgcgagtgaaggcgagggacggggcggggatgacgaggagggcgaacgaagcgacggtggaattggaagtgatcggggcgggggcaaatggagcggagggagggggaggagaaaagaggggacgcggaagagggggaaaagaggggcggaagaaggaacacgaaacagaagaggcgaaagtagtggaagataaaataaacaaaaaagaggggaggaaggagcaaaacggaaacggaagaaacgggggagaaggaagagaaagaggaggaagagaaggaggagggaccgaagaagagggaggaagagaaagggaaagaggaagaaaaggagaaggaggaactgaagaagagggaggaagagaaagggaaataggaagagaaggagaaagaggaagaaaaggaggagaggccgaagaagagggaggaagagaaagggaaagaggaggaggggaaggaggagaaagaggaggagaagtaaaagaagaaggaagtggtaaacgaaagatagaaagaaaagaagaaaaattaaaggagggcacatccttagacgaatacagaatgccag

SEQ ID NO: 79265 - DNA, 663 bp, Heterodera glycines
ctttctcttcctccctcttcttcggtccctcctccttctcttcctcctctttctcttccttctcccccgtttcttccgtttccgttttgctccttcctcccctcttttttgtttattttatcttccactactttcgcctcttctgtttcgtgttccttcttccgcccctcttttccccctcttccgcgtcccctcttttctcctccccctccctccgctccatttgcccccgccccgatcacttccaattccaccgtcgcttcgttcgccctcctcgtcatccccgccccgtccctcgccttcactcgcactttggccacttctccctctgccattggccttttcaagcgaaggttggcccaacatcgtggccactggcactgctgagagtccaatgcgaacatttcccctttctccgccgcccctttttcgttttgcgttttctccaacgaaaagcgacaaattccgccaattcctctgtcaatgtcaatcacttccaaacggcgcagaaggaaaccgggggaagagagctgtaaaaagcgaaaaagaaggctaatggacaagaaaactgctgccggggaaaggacttcggggacgatcacttcggcggggaaagggccgccgaagaagcggggagcattgtcattgacatcgaccaattgt

SEQ ID NO: 79266 - DNA, 863 bp, Heterodera glycines
gtaaacggaagggtggcgggcactctctctccactagagaccggacaactggggtcggagggatcccgagtcgggatcccgactgaatcccgatcccgatcaatcccgaacattttggaaaaacgatcgggacggatcccgggtcgggatcccgaccgaatcccgatcaatcccgaagattttttttcgggatcccgcgggattatcgggatttgctcaaacccaattttttttacattttgtgccaagttttgttcaaatgtttatctaatatttataattgatcaattcgattgaagaaaaaaagggatgtgaattatatcagatttttatagaaatttttcaaaattgaatatcatgcccaaaaaatcagattttcaaaaatgagaacatttaacaacatgccttaaataattttattacaatttaatcaattaatatcaatttttgtattttcgcctcagataatcatttttaataattttgagaaacggaatcaaaaaatcagatttttaagattttttttgctgcaaattttttcaaaaactttagaggaaccgggggggggaggtcggcggtgccgataggcgccgccgggaaaattttgaaaatttgaaatgtaattgttaacagaatttataaaaaaaactgtccatatttagtgattttgaactaatttataagaaaataatgggttcttgggtctggtgatgtccgattgcaccgaaggaaaaatgcgtagacaacaatttttatctgattattggacagaattcttagaaatcgttgtgccataaaactacctaataagatttagaataatgttttagaaattaaaaaaaaataattctttttatgaagaa

SEQ ID NO: 79267 - DNA, 1900 bp, Heterodera glycines
atggaacgcactttcgtctgcattaagcccgaatctgttcgacgatgccttgtcggcaaaatcattgagcgatttgaggcccacggatttcggctaattgccattaaaatggtttgctaattttgtttaattggttggactctcttcatttgcgatgctttcagattgtttcaacacgcaaacaagctgcggaccattacattggatgctccgaccagcccttcttcccaaaagtgatcagttacatgacatcgggacctgtggttgccatgatttgggaaggtagacaaatttgttcaattttgattatactgacaatcaaaggattaaaaattgagaaatataagcatttttaacataaatttcagagatttaacaaatacaaaagattttttttgtttcgtttttattttgagccttaaaaacaaaaaattttgtgccgttctgatcactcgccaaaaaagacaattaattgagcttctcttttatgttttaggaacttttttttttgtattttcaataaattgcaaatgatttcaaacttaattttatttttaaacgaaacttcttcaaattaaaatggaaatgcgaaattttttaaggtgtcggcgttgtaaaaggaattcgcaaaattttgggtgccacgccggacaaagttcccccgcccggcactctccgtgccgaattccggaacaacagcgatgtcggcaagtaccatgacacggtctgccacggttcggactctgcggaggatgcagtgcgcgaatttgctatttggttcgacaaaagtgagatgccgccgcctctctcgagagtattgggctaattgaacagaagagcaattagaatggaggaaaaagaccattaaaagtgccatttaatttaattcgttgtacaaataaagcaaatttaaattctccaattttacttataagttaccataaaaatatattaagttcatccctaatccatccccgaatcgtaatgaatggggttttttatttaaaataaaaaaatattttgacatatttgaattgaatcatggcaaccaaaagcagatgaaaaaagtttgccttaattttcattccccgtaaactttttcgtgaatggataatccgacagaagtagacaatttgacagcgaactacttaaaatatttaaaattattcctaggcattaaacaaaaatttaattgcaagaattatgagtgaaaaaataatgaaaactactttaattgttatgaaaatgaataaattaatcttcaaagagttaatgagaaattatttgaaaaaaaacaatggatttttacttatattttagggatatatttttattagaatttcaatgcaaaataaataatttatggaagtaattttccatgcaatttaatttcattttttctctcttgagaatttcgcaaaaaaataaaacatatgcaaagtctcccagcactttttgtttataattttgactgtttgtaaattccctatttttaaatttttttcggatttcctaatcgaaattctaaaattgtcataaataataacattctagcgcatcgctgaaaaatgagaaattcttaatttttattagtcatttaaattgatatttttaaaaattttaaatttttcagaggcatcggtggagagtagagaccagacgggatcgggatcccgcgggatttcttcgggatcccgcgggattaaattcgggatcccgacctcgggatccgtcccgagcgattttttaaattcatcgggattgatcgggatcgggatttcatcgggatcccgaatcggaatccctcccgacctcccgtgggatcccgcgggactgaagtcacgataatttttcaaaaaatctacattttttaaattaagatcttgaattttaaattaaa

SEQ ID NO: 79268 - DNA, 1207 bp, Heterodera glycines
atgttccgcacgtttgccctacttttagctgtggtcaaagtgtacggagggtaattaatttaattttgaattaatttgagtagagctaaatccttggtcaacctttcagagtctgttctgaatgggataaatgtgaaccgattaatgcaaatgggaaaacgtcaattcaattggatggaaacagtaaaaagtgagtgggcaaaaaaaaattaaattatataattttcatttttcggcacctgatctgttacccgagcaagttggcaaaaaatttcggaaattggaaagccagtggacggttgaaagttgcaaaagtggactaccaggaattaagcaagaaatgtgccgaaagtgacgggccaaaacaggacggcggatggcacggcttaatgctaacgaaacaaagtgacgggcatttggcttttcaatcatccctcaggtgagtagtttccattttttaattatttaatttaattttgttaattttaattatagtgccaatttttccggcatattagatgagcaattctttagcaatgccgagctcaatttcacccaaggtcaatttcaaaccaagttttttttcatctcatgttgggctacagtaaaaatgcatctgacactgtagcttacaattagcaaaaaaaaaatgtcaacgaatttattcactaaaaaatccatagttgttttttaaaggtttggtttggtttttggctacagaaagtgttggtgatacagtagatttggcttattttattttaggaaatttctggttaataaaatgatggaccttttgtaaattaatttacaatatctgtttttaatagagaatttatgacgcattcaccgtttccctgttccagctttgctcaagcaaaatgggcttctttcgccagatgagtttcgagaggcacttcctcttggcgcctttttgtacgattttgatgggatggcattacgtgttgtggcattggaaattaccaacggcatcggaaaaataaacgggacaaaaatttgcaaaataaagtccagcacgtcaagcacttccagcattgattgttctctggacggcatcgacatggcatctcttcccgattttaagcggccctgtgaagagcggtggcccgagttggccccaatttattgctacggcaaaattcttgaagtctgatttaagcagctttgagaaattcaaatgaattgcata

SEQ ID NO: 79269 - DNA, 1412 bp, Heterodera glycines
cccgttggatcaaggaggacacagaggacaaaaaggacccatggaaattgctcaatttgaggaccactcaaattgtgccggttgacttgaacgcactgatctgtgggaattacaggaagctgtcggaactgttttccaaaattggtcattttaatgtggatcaaatgcgcaaaatctaaaatatttttatatcgttttttaattcttaaatatttttttattgtttaaaaattgattttaatcataaaaacaagcccccggcacatttacggtttcgcatccgaaatttaaaatttttctatcttaagacaacagtgaaaagtcggcatcgtacaacaaaacacattcggaatttcgtaagaattttgtcgccgtgttcaaaagtgatggtggcacgttcaacgattacgaattggacacaaagaaagtgcgcaaaaggacctattatgggagcaccgtggtgccacttttcacggggtgcctaggggacgacaaagatgcggaaaaggcggcaaaacgaatgtttaaaggactgatggagattgacaagaagcatggcattttcaataattacccattcggcgttccgaccaggtccaatttttggggtttgcgagtgcatgaggaggaaaatggggaaattgaaattaattgaggattcggaaaagaattactaagcgttaaatttattttacgcttgagactaatcaatggcatgaaaaaccaattggttaaatatacgcagggttcgcaaatgatgtgaatttatcagcgagtcaaagctgattttttaaaatgctgttttcttgaattttgctgcttttttaaatttgattgtttttgtggtttttagggggaaattaagaaaaaaaattcaaaaaagttttgcttgctttttgtaatagaaaaattttgaatgcttattttttgtcacccaaatactgatttttgaaaaatttcaacggcgcataaagaatgaaaaaaatgtgcccgtttttttctaaaatatccttcctgattttggattggatgtcatttataaaagtgcaaaaaataatatggttttcagctctgtgctcaactccgcacagcagtgggatttcccaaatatttggccggttaatttttcgcctatttggtccgcccaattagtccccttttaagccggtgagtcacatgatggtcgaagcatttcgccggtccggcagcaaacagtaacagaccaaaactgtacttacagtgcaccgagactgttcaaattcatttacagaatgcagaaattcgcatttgataaggcccagcaatggctgtctgccaactataagctgtacaaaagctgccaaaattttatgtggatgaaaatggctgcccaaacgggcacccccggggcaaagggagatttccatgcgcaa

SEQ ID NO: 79270 - DNA, 337 bp, Heterodera glycines
atgaaagatgtctgcccgaactcatcaccagcatttgatggtgccaccaatgttccgttgttggccaatacgcttaatccggccaccgccgacggcaccggcgcgtccagcacaatgggatgctcaatgtgccagtcgtaggtgcgcggagtgtacacgcggaaaatcggccaaacggtcagccattcgccgttgtccgtgttgcattggtggtaaacgcgcaggtaaaattcgggcctatcaaaagtataaaatttttttattttttagtaaaaaattcacgtccagacctttgcctgggtttttgcgtaccgcttatttgttagttaaatattga

SEQ ID NO: 79271 - DNA, 1004 bp, Heterodera glycines
atgagcgcaatcatcgaccattgttcagtcccatgcgtttatgggctattgccaaataaggagggggcaacatatgtacgtttctttgaggcaatcagagacagcattggcaacaattggtcgccgcaaaggctaatgagtgactttgaatcggcagccattcattctgctcgaattgtttttccaaatgcaatccgaaatggctgcctttttcactttgggcaggcaatttaccgccgcatccaaaggctccaaaacctacacacccaataccttcaggaaattgagttccaacgaagcattaggtcagggctaggacaatattataaatagtcaaaaacactgttataaaaatgggaaaaattcgcttgtaaaatttgtttgtttatgagtagccttatttcaccgtaggtcattgcaagcattggcatttgttcctattggcctcgtttataactacttttgcattgtggtgtcaaccctcaatccaacagctgagctacagggttatttttttgtcgaattaaattttataatttatgaatatggatcggatttttaagtttttacagcttgaaggctggcatgccatttggaatgcccatcttaaaggaaatcagcgactcagcggttttgtccggaaaatgattgaagaagatgagatgtggtctcagcgaattattgattatcagattgcgcctgctgatggaataagggggccacacgcagcaagaaaggggaaatatgtcagacaagacaacaatttaaatgctcttttacaggacattggaaaccgtgatccgcttgaatatcttcgggcctgtgcataccatttgcacttttgaattgaattaagcatttttaaaaaaaaggaattcactgacaaaatcgtccactgtcgaatttgtttgaaattaaataggcgtttaaatatttagttttttttgtggtgaaataattaaatcatatcattttatggtgcttaagcccattttttgaataaa

SEQ ID NO: 79272 - DNA, 357 bp, Heterodera glycines
atgcttttatggcatttcatattttccataattttctttgtttataaaattgaatccgccaaaattcgaccaaactttgatgaaatatttggcgacggattggacaaaaaagaaagtgagcaaacagtaaaaattgaacaaaaagagcaaaatgaaaatttggaatttattcattttcttcaaccaaacggtgatgaaatgggaaatgatcaaattgatcaaatggacaattcggatgatcaaaaaattctcaaatgtgatcagagttataaaaagaatgaaactgatcagcaaaagagcgaaattgttcaaaatttgatgcaattaaagaaaagttggggaaacgggaaaatttga

SEQ ID NO: 79273 - DNA, 1026 bp, Heterodera glycines
atgaatttgtggcatttattatttattatatttttctttatttttgcaattaaatccggcaaaatccaaccaaattttgaagaaatatttggccaaagatgggacaaaaacgaaagtgaagaaattgtgataataaaaattgaacaaaacgaccaaaaggagcaaaatgaaactacgggcattgatcaaattggtggagaaaatggaacggacccaaatgatcaacaaaaaagacaaataattttgaaatttgaagcaattaaagaaaaattaaaagaaaaaggaaaatacaaatggaaagaccaaaacaaaattgagagaaaaattgcaaaattattaggaattggtcgtcataaaatatacaaatggaaaaaagaattaaatataattaaaaagatgggaaagagtttttatgaggagaaaaagagagaattcactgaacgatttgatgaatttaaagaattatatggccaaggcaaacagaaagaatttgcgaaagaattgggcatttctgaagcaacatttttaaaatggaaaaaggaattgatgccaaatgatcataaaagtaagggtttttctttttaagcatataataattttctattcagaagagaacaaattaaaaaagttgaagcattattttgaaataaaagaagccaacccaaaagtgactgacgaaataattgccaaaaaattgggaattggaagtgcaactctgaccagatggaaaagagaatttgctaccagttgatcacagtgattaaaaaaattcaagaaactgagatacgatcatttactcatttaacacatttaattgttccccctaatctatcattaacaaatgtccctggggcgaaacggggcggtcccttcaattgttatcctccccccgtcgttcttctctgatcacttttgggatttggccgatccaactttgcgagagggaccccctcaagcgctcctctgttcccgaggacgttctgggctggggcctccagttgtacccctttattattacccaataaa

SEQ ID NO: 79274 - DNA, 1017 bp, Heterodera glycines
gagaaactttttcgagaatgggagaagccgatcaattccctcttattttgggccgcgattgtagcggagaagtggtggagaaaggacgggcggtaaaggatttggatgtcggagatcaagtcagttcgaaagtttattttaaatttactagatttgttatatccccatttgcaggtcatcgctgtcgtccctccccattgccaaggatgtcactccgaattcgctctctcattcacaaacgctgtcgcccccaaaccggcgtcactcagccacacagagtctgccgctttgccgtacgtcgcatgtactgcttgggctgcactcgtcacggtgaccacggaacggcggagatgaattttaaaaagttaatcaccattcagacaggcagaatagacccaaataaggcgcaacatttacgtgtgcttatccatggcggtgccggtggcgttggcacaatggcaattcaaatgctgcgctgttggggagtcgaaaaagtggtcgccacatgttcagcgaaaaagttttgagtctataaataatgcaagagccatcgcaattttcaggatgcaattggtggaagaattgggggcaaaagcggtggactatcgcgcgaaggatgcaaagcaacaactggtcgcagagggaccatttgaactgattttaggtggataaacgtgtatccctcccggcaaaaaaaatatttaaaaacaaaataaatttgcaaattttcaattaaaacttattgtttgattttttcaaaaatcttgaacaaacttgaaaaatagcgaaaacttagcaaacaatattttttaggattttaaagagaaaaaatccctttttaatttaaagtaaaaaaaatgaaactccattgattgccatcgaaccatccctcacaaattttccataatttggtcctctttatcgtcacaatactgacaataaatttattctagactgtgcaagtactgaattggccgaatggagtgatgaactgcttgggatttggcgttgctgtgt

SEQ ID NO: 79275 - DNA, 392 bp, Heterodera glycines
aattcaatggtaatgcaacaaattgaacaaattaaatatctattgccatacatttaaaggttctggcgcgctcttaaagctttcgatgccgaggacaaggccaaatttcttcaatttgtcacagggacttcgaaggttccgctgcagggtttcgcgcatctcgagggaatgaacggtgtacagaaattcacgtaagcattagcacacaaattcattcctctctaacaaacacgcacttaagtatacaaaaggacacgcgttccaacagtcggctcccatccgcccacacgtgcttcaaccagctggacttgcccgaataccctgattacgaaactcttcacaaaatgctgcttttggccagtcgcgaatgttcggaggggtttgcttttgcg

SEQ ID NO: 79276 - DNA, 281 bp, Heterodera glycines
atgcgagcatgggcagtgaacgcattcaatgcaccgcttgttctcagcaatgttccaatgccaaccatccaaaatgacaaccaagtgatcatccgtgttaaggtggctgatttttatttggaattagaattaatagctaattctcaagtttgtatgcgtttttcatgtgtttgtctcgactttttcgttttaggctgcttcagtaaatccaattgacgtgcgaatgagcgaaggctatggaaatgaagtgctaagcaaaatcaaatgtttgactgaattcg

SEQ ID NO: 79277 - DNA, 1944 bp, Heterodera glycines
atgttacggtaggtacagtaattaaccattgctcatttcccttaactatttgacagtaacttccttcgtctgcactttcacatcaatttgtgccatgacatttttctcaagcttttcttatttttcatgttgtcatcattctccttttcggcatcagcgttcgtctgtagcatcttttacggcattttagcaaaaaagaaaatcaaattcaaaatgtgctgatcaatttgcttcattttccttttttcacattttcccaccttttccatctgatcaatgcttttctgttgttctttctgctgatgatccatttcgaccaactttttctgtaattcctccaaattttggaaactttatttttatataatgagaaaagcggaaaaccaaaaattctaacgaaaatcacattttattcaacaatttttgaattttgttcgtcttaaattgttgccaatggccaatgggaggcgaaaaatcattgacaaaaacggaaggcgcggaaacattttgacataaaaaggccaaaccgttttttattagcctataaaatttcaaaaagtttcgttaagtttcaaaaaagttataacttgagaagctcaaaaacccaagttttttacaacattttagctcataactttcttgaaacttaacgaaactttttgaaattttgtaggctaatagaaaacatctagaactatcgaatgatataaggaattaaaaatttgattgattttaagtaaagatatgaaaaaattgctacaattgatggtaccatttgccgggcgttttaccttatccccccacccacaaatcaatcaatcaaataatcaattggacggataatttttatccaactttcatttgcaaaaggttagaaattttctttgtcaaccaaatccaacatttttggtagcaaaaatggaaaaacgagggaagaggaggaaaaggatgaaaatagcattggggaaggaggagagacggaagagaaagagagaaaaaggaaaaattcgaagcaagaaggaatggagaaagaggaagaaaaggatgaaaatagcattggggaaggagcagagacggaagagaaagagagaaaaaggaaaaattcgaagcaagaaggaggggagaaagaggaggaaaagagaatgaagctgaaaagagggaggaacagcagcaaatcgacactttttaattttgccggtgctaatattgctaatggatgtcgtaaatccccgtcaaaatcctgaaaactacacaattttcgaaagaaaaatgcattcattcgattacataggcaaaaaatttatgttgtggcgtgggttttgcaggagcacagcttgttccccaaatcccattaacgattttaaaaaaatcattaaatttctcagggaatttccggcaaatttcaaacaatttattacaaatagagctaaaatttttagaccctctaagaatcggtcggggccgttttcgcgtgagtagctgtttaggactgaaattggttggatttgtgcaaaacatccatgtttcgaatccgaacccgcattcggacaaatttcttaactttttaatttttttatttcttgcggctaatatcttctacagtaatttgtcagtttggtcggatgtgcgtcaaacggaaaaaatatttaaaattttataaaaatataacaaaaaataacaaatttcagaacaaactaaggtcgcatttcatggtttcgggaaacaccagtgagaaaattgataatgttttcgggattcacattggcattggcataattgggatcattttgggggaggtgaatgttattgatgtcgttatagagtgcgccgtcatgttctaacataactttgtttcgttttgttttaattttttgctgctggtccatattatataatttaaaaagccttaatttagtttataaactcattaaattataaaataaa

SEQ ID NO: 79278 - DNA, 498 bp, Heterodera glycines
atgacatttaatttcggaaagggtggctctttcaacgcacaaagtaacaatcacaatggaagccaatcaatccattacgattcaaaaatgccgtccaaattttcaggtggcggaggagtgctggtcggaggagacaaattcggcaccaactcaacattcggtgtggacaaaaaggggctggtggcggacacggacatgcatttgctggacaacaaaacattacatgtaaatgggggggggagagaaagagacaaacagtgccatcagtcaaatccatcatgttaatattgtaccttaaaaatatgattaagggcggattaggcaaggagaaaaacttcatcgacgatttggccgatttgatacggcaaagaaaagaggagaagcaacgacagaaggaacagagaatcgccgaaaggatttgaaaaaaacgatgaacgtggaaatgatccaaaaatgtaccaccaaagaacaaatggataaatttattactttacgaca

SEQ ID NO: 79279 - DNA, 1036 bp, Heterodera glycines
atgccatccaaagaagtcattccggtgactgctttcaaattgcccaatcttcagtttctttggccataattttgactttttcgttgttatttctttcttaatgtcagtattttttcttttttttgtatttatgaattcccgggacttaaagctttcgtctgataccaagaatgtaggtattgcaaaaataagaaaaaagttatggtcaagaaactgaagattgggcgcctaaagtgcattagagcccaaatttgtttttggttaatagatcacttcataattatttttaggataaaaatcgctctcgattttcgtttttcaccacgagaaaactgttttaacagaaaattttattacggatttatagatttttcaaattcatttatccctttatatttaaatttttaaaaattgacgtcaatttttttcctttctatatttgtctacatttacatatctttataaattttaagccattttctgctccctttctgtgtaacaatggattcgccgtcaagtgtgaaagcgggcttaaaaaaatcagtttttttagcgattaaggtcatttattttagtggcattctagtgggcgcgcaacttcaaaataaaaaaaaagtcaacgacaagacttattgttaatttgatttaggggacggatcgtttgttgcgagcgaacaacgcaaatgtgcgaccgcaactgcaaggagtggacaacgccaaagactgtttgacaccgtcgacaacaggcaataatcaaccgacacgagaacagccaaaactgatggacattgacgaaaggattgggatggacgacgaagacaacgacgacggggacagattcggagaagcagcagaggtattgggtggaggagacaacgctaaccgagttggtggtgagagagtcgtgggtaacagactgcggaaacggcgctccgtttcctgtgagccgacagcgaacagtccggccaaaatggcaccgcatcagccagccgatgaccaatccgctggttgtctgctgcaggtcactgaacaatga

SEQ ID NO: 79280 - DNA, 453 bp, Heterodera glycines
atgattgttgttgttgatgttgttgttgctgttgtctgtgcctttctgctgcttgcgcattgccttcccgaattgttaaaggcggattattttgcgtttggagcgatggagacaacagctaaattaaaatattgggttctgcagaatgaggcacaaatggaaccgtattgtgagcggagtgccgcggcacaacagaagttgggctattcaacaaaagactctgaagagatggcggcgattccaatggcatcccgtgccaatttgaagatggcggcgattccaatggcattccgtgcctatttgaagatggcggcgattccaatggcattccgtgccaatttgatgattgtgcaccgtattggaagggatttgacactcgcggaatgtttagttggaggagcggcttttgcgcgatgcattaaaaggcgagtgaacgaattgggccgattatga

SEQ ID NO: 79281 - DNA, 497 bp, Heterodera glycines
atgaagcggccaatggacgatgaagcgggcgaggggccgagtgccatcgaaattcaaaatgtgcaaatggcacggtcagaaaatgacagcagaacggcaccgaaactgtttatcagaacgggtaattgtgattgttttaaaataattttaggatttttagtcaatgtttcaagtttctacatacagtcatggtcatatgtttaacaacactcaaaattttctaccaaatttgatttaaattgattataaaatctcaatatgactatattgtgtatatatgttttatatttcttgtagcattttttgtgggctttataatgataccattcactatcccctgtcaaaatgttattattagttacaaaccattttaccaactgcactccctttttggggtggtcatatgtttaacaacactacccatatattttttcatcagcattaaaaaaatctaaaaaaattcaggtaagcataaaaaggtagcaacaccaagttga

SEQ ID NO: 79282 - DNA, 620 bp, Heterodera glycines
atgctccgttcactgctcttcgctgccgtgttcgcttcactgctcatcaattgctacgaggcgcggacgatacgcctggccaacagtttcttatgtgccaagagcggtttcacagtcgaggaaggcctcacgcagcacgaggcgaacaacatgtgagtgacaaggggaattacacattttcgaataatatgactttccccccatttcagtcaagtcaaaggcgaagagatatcaaacacacagacggagccagtgcccattctgctggtgacagcgaatgtggagttcgacgtggtgttccacactaacagcaaggagtgcaaggagcaattcaaaatcaaagaggacagcaaaggatgcaagaaaaaaggcactctcgttggccatgtgagtttttcaagaaatggcgaaaatttggctttggaatgttttgtttgtttcagaatgattttccgaagacgcctcactgtggtgaaagttgcacagggtacgaagtcgtctgcaccgttgtcaaactggcttcagtcgaggaacaggaaacaggcggcattgttggactcaagcgatcggaattcgccagaatgttcggcggcgccaagtgcgagtgggaagcggtcatt

SEQ ID NO: 79283 - DNA, 483 bp, Heterodera glycines
atggaaacattgcaacggcagagaaaattggacatttatgacaaaacacaaatgaaaggggaggggggagaacaaaagtgggaggaagaagaagaggaggaggaggaagaagaggagagtgaatatgaaacagatgaagaagaggaggaggaagaaggaggaaattgcacgggggaaaaagagagtggaaaagaaatggaggaattggaagagagtgggaagaaagaaaaagcggacgaaggggacaaaggaaatggcgaaatggaagagaatggagatgaagaaacggaagaggaggaaaaggaagaggaggaagagggagaggagaaagcggcagaaaagaagcagcaagtccaacgagagaataaagtatcatttttggagttggaagaggaagaaaacagcagcaggggagaagaagctgaagaggaactgaggatgttcacactttttgagaagatcggagaattggtgctgagagat

SEQ ID NO: 79284 - DNA, 771 bp, Heterodera glycines
atgagttcttttccgaaagcggtaaacatcaagattgagcacaacaattctttttcggaccacgattactgttacaaagaatctgcagttgaagaaatggacgaagaaaatcgttccttttttgtcgacgtggagaacgatgacgaatatgacgatgagtataatgcccgtggtcggaaacggaggttttttttaatggaattggaaagtgataatgaaataaggcgagcaaatccgaattttgctgcaaatcggtgaattttattgtctttgtcattaaaaatattatcttttgagttttaaccaacaaaatgcttaggagcgtcaaacagccggatttttttatgatcaacaacaaagccaacaattcgaataagaaaacgtcaaaggcgaggccgaggaaaagcgaaagcaaaagaggaaagagtggggagaaaaaagtcaaatacgaagtggaatacatgtgagggtttttttaaatttggaaaaggaaaatttaaaatcgtcaataaaaattctgattgagataaatttgcaaaaagtcatgtttcttacgcgactttctcttttttcagatggggcaaacgcacggacaaattgcgtcctgataaggtggaatatcgcgtttattggaaggggtatccgattgagaagagcacttgggagcccgaagataatttggtcagcggtggtctgaagaaagtcaaattatgccaccttttttcagcgtttatgccaagaatccatcgaccgttacgaacaacgcgaaat

SEQ ID NO: 79285 - DNA, 574 bp, Heterodera glycines
atgtttttatgtcatttaattataataattttctttccttataaaattgaaactgcacaaaaccaaccaacttttgacgaaatttttggtaacggatgggacactcaatatgatagcgaagaaaaattgttggacaaaaacgagtcaaaaaatgaacaaaactatcaaaaagaaaactttgaattcaatcattatgctgatcacgtaattgaagaaaatgaaaccgacccatttgatcaaatgaacaattgggacaagcggaatattatgaaaagttatcagaaaaatgaatcaaattataagcaaaaaagagaaatcattcaaaaatttgatgcaattaaaaataaattgaagcaaaaggggaaatataaaaagaaatatcaatgcaaaattgagatgaaaattggaaagcatttaggagttagccgatatttaatattcaaatggaaaaaagaatttctgaatgatcagcaaaaaactgatttttccgatcaacaaaaaagagaaactgttcaaaaatttgatgcaattaaaaacaaattgaaagaaaaaggaaaatatgaatggaaaaaca

SEQ ID NO: 79286 - DNA, 1755 bp, Heterodera glycines
atgcggacccaaactattttttcaattgcaattgttctgatgatatgcgaagtcaactcattcccggtaaaatgaattttttttttaatttgaattttttaacgatttataatttaaggcattttcatcactattctcttcagcatttggtggaagtaaaaaagtagaaaatattgggactacaaatgatgaatcgcacagccgacagaagagacaagctgaaactgttgttagtgatgcagacacaatcacactaacaatatctggggaaaatttgacagtcacccaagagacattggcggacggaacggttgtgctaagaataactgggcaaaatacaaacgttgaaacaagtaaaaaaataaaaaataaataaatcgaaataatttaaatacaataataaggtaatgctgatgattccgcaatcgaaacagccactgaagagtcagcaactgcggcggaagacgcagcaaatgatgagtccgcaaccgaagcagccaatgaagagtcagcaactgcggcggaagacgcagcaaatgatgagtccgcaaccgaagcagccactgaagagtcagcaactgcggcggaagacgcagcaaatgatgagtccgcaaccgaagcagccactgaagagtcagcaactgcggcggaagacgcagcaaatgatgagtccgcaaccgaagcagccactgaagagtcagcaactgcagcggaagacgcagcaaatgatgagtccgcaaccgaagcagcaactgaagagtcagcaactgcagcggaagacgcagcaaatgatgagtccgcaaccgaagcagccattgaagtatcttcaacatcagttgccgcgtcccccactactaaagccactgcacctttgaaacccccagcgaaaaagccaggaaataaatctagtagcagcagcagttgttcgtctagcgaaagtgatgaaaagaagcaaggcccaaaacgtcgtcctactcctcctcataaagccaataaaaagaagggcaatcagaagcacaaaaaaggacgcaaccaccaaaagaaaggtcatggccatcacaagaagggtcatgggcggccccatcgccatcagcacaagttcgctaggcctgattttggatggtttcacgcatttcctcaatatttcagaggacttcgcttttggtaaaaagaaatgaacagaacaagatgaaattggcttggaaatcgaatttgaaccatatttaaaattatttttatattattgtaaattgtattgatgagaatattgaaacacattgttggaaaaatttttcttgaatgtgtttgaaagttataaatcatctgagaaaacaaactaaaaaaatatagcttgtggaaaagctgcgttttaaaattggaatttcctattatttctttgatgcgacacgcttaactccaaaaacatttaaaatagttcaaaaacacggcaaaaaattccaactttttttaaaacacggcaaaaaaaaatgtcaacttttaaagtttttccaagaaaaattctgaaaatatgttgaaatttcttgtccaaaaatgaccacatatcgaagaattaaagtcaattttaaaaaattgcacaatttctgtgtgaatagttgccgccgagggaaaaatttaaattttttattggaatttttttaggaattagctaaagtgttagaacatagaagttaaaaaatgggcaaattccttcacttataactaactatgttattaatttataatttatgaaattta

SEQ ID NO: 79287 - DNA, 2736 bp, Heterodera glycines
atggaaaaagttatagttcaaaaactaggctggcgcgaaaacgaccggcgcgaaaacgaccccgacccgatttgtgagggtatgtgttagtcaaaaaaccaaccatcaaaaggaaaaatttttttttaattttaaacaaagttatggccaaagaaactcaaaaaatcaatgatatcaaaattgttagatttggttgcttttgatcaaatttctaagcataattttttattttgatcggttttttgactaacttcataacatcgttttttcgggttaaaattctctccatttttttcaaggactgtccttattccctatttttctgtacaatttacccattttcaagtgctatctttttatatttatatattttaaaccattttttggcatttgtttttcatttctctgattttctattttttcaattaactctttgctggccggtaggggtcaactccgtctcagcaatgttcaaaaagctataacttttttctttgttggccaaactccacaatcatggtatcattcgaaagccctagatgtttagaagatatttataagctattctcagtgattaatcagctctcaaaaaagttgtcagtttaaaaccgcaaaaaaggcagaattttcaaagttttttatttctatctttttttatagttcgaaattttctgtaatttttagtaggctaatagagcctgtgaagagctttcgattgatatcaagattgtttgattcggtcaataacttcaagagttatattgactcaaagttggctcagacggagttggcccgttccgttgctggcactgtttttaaatcggtttttaaattttggcaaaatttgccacataatttgctaatttaacatttgtgtagaaaacaaattggaaattttctcgagtcccacacttgagtccgtctcgaattttaccgcattttcaaggaatgcccttgatgatttcctgtaaatttgtttatatgtccatttgtttttaagtgttcatctttcggtatttatttatttattttttgtgttcttttctctgcttttctattctgaattaaattttgaatttaaatggcttgcttaagaattgaatttttatatttttttcaagtactcttaatttttcaagatcaatcctataaatccagtttagaatttccaacagtattaccattgtctgaagatggatttttcagacaaaccacaatgacaaaaaaaaatttacaaaataataattttatccttaaatatttaaatagctgatcaaataaaataaaacaaaattttaaaatatttcttcacggttacttcatattaattttaataattagtttttaccgtaccgcaagcagatttctgtctaattgagattgtcaagaactttctaatgaaaaaaaatttgatttaataattaaaaaataaattttttaaattgttttctggcaaaagaaataaaaatttatagtttcttaaaattttcaaacaaattacaataaaaattttaatttcttaaatgtgaaatatctgatgaaaatatgcaattaattaaataaaaattaaaaataattattctttgttatttcttattaaattattttaaaaattttatttatttactttttgctttttctacaaatgcacgcaaaagaacttaaattgaatcatcacaaacaaaaaaaaatttccgattttccgcttcaataacataaaccatttagagtaagtggtctttcagcatatgcatttcctaatttggctgctcgtactttttaacatttaaacgaaaattggatgtgacatatgaattgatcatcgccctcaggcgaagaccgaatgtttcgcacaaatcgccccgagggtcactaattaaatgggcggaaattagtgaaacaaattcaattttttgttgcaaaattaaatgtgcaaaatctgatgatgatgatgatgattattagtagattttttttctgaagctttattttgatggtaaatgcacgaaaaacttttggtttaagcgaaagatccgacacaagcagaaaatccgacacaagcggaaaatccgacaaaagcagaaaatccgacacaagcggaaaatccgacaaaagcagaaaatccggcactggaaaatccgacacaagcagaaaatccggcactggaaaatccgacacaagcagaaaatccggcactggaaaatccgacacaagcagaaaatccggcactggaaaatccgacacaagcagaaaatccgacacaagcggaaaatccggcactggaaaatccgacacaagcagaaaatccggcactggaaaatccgacacaagcagaaaatccggcactggaaaatccgacacaagcggaaaatccggcactggaaaatccgacacaagcagaaaatccggcacaagcagaaaatccggcactggaaaatccgacacaagcagaaaatccgacacaagcagaaaatccggcactggaaaatccgacacaagcagaaaaattcgaataatctctgtgatccttgggaaacgagaatgtaaatagtgcctaacaatttttaacatatggatgagggatatcctccattttgcatgctattccgtcctctgttctcgaatcatttggttccaccaaaccccctgagtttgtcacaatgtcttccgaagagggcgaaattcatgagaattcaactggacctaatcctccccaggcaaccgaagttgattaaa

SEQ ID NO: 79288 - DNA, 370 bp, Heterodera glycines
atgccaagaaagttggatttggttggcaatgaaaaaacttatagttcaaaaactaggctggcgcgaaaacgacccggtacgaaaacgtcctggcccgccactgggccagagacgctcacattggcttcacattctttataaatgatattgatatagtaaaaaggaaaagcttcatatctcggccagaagcttcattcttgggtaccactcccttgttagtgaagaaaatttaaattatatttacgaaaaaacgccaaatatttacaaaaatattaataaaaattgcagtgcaaaaaataattgactcggcttttctcgagttgagtgagactcgagtcctataattttttaaaattatatttaaaaacca

SEQ ID NO: 79289 - DNA, 81 bp, Heterodera glycines
atgtgttattatgctatatctttttattttatcaacgttatagttcatttttttattgcaatttcaagtgcaacgtcaccg

SEQ ID NO: 79290 - DNA, 1108 bp, Heterodera glycines
atgaaccaaaaattgttgaatgaggaaagattgaattattttgacaacaaacggctaattaacgtgaattattatgacaaaaatcggtcaattaatgaaattattttgaatttggcaattgacgcagggaatgaacgccaaaagaatgaaagtgatttcgaagaaataatttgcagacaatgttttgacaagaacatggaggagatgttaagaaaagcggaagaaagggcaaaagaggaagaagacaaattgttggaagataatcccgaagaatttgaggatgaagaaatagaagaagaagaaggagaaagaaagtttgacgtgcataaaattgtcacgaactcaaaattcgatgacgcaattaattgggtgagtttttttaatacatactagggtaggccgggtcggggtatttaggcaaaaaccgggtccgggtattaccgggtattgaaaagtcgggtaccgggtcgggtattagtttttaaaccgggtgccaggtcgggtattagtttttaaaccgggtatcggctcgggtattagtttttaaaccgggtatcggctcgggtattagtttttaaaccgggtatcggctcgggtattagtttttaaaccgggtatcggctcgggtattagtttttaaaccgggtaccgggtcgggtatggtgtaccaggtgaaatcgggtattgaaaaaatttttaatttttatttccttctaaattattactatacagaaattttttttactgtaataaatgctaaagaaaatagttcaatcaaaaattttcatattattctccaaaatcttcaaaaagcttttcatcgacaatcacttttttctcttaaaatatgtgcataaaataataattattcattttttattttatttcttaaagaagtcaattttagacggatgaagccatttttactgaatttgtgaaaggaaaggcaacaaaacttgagaaattcttctttttgatgaaagcattcccgaaaattattgattacctgaatacgagcgcttttagtttctttaaatttgggtattgtttggctggtcccttaatttggcaattttctcaaaatttggttgattgcttaattttttga

SEQ ID NO: 79291 - DNA, 1279 bp, Heterodera glycines
atggaggctgagcttggccttgtgcatttgatgaaggtgaattgggactgtaacaatgtgagaaaggaacaggaaagtgaatgcttaaaatatcgcaaatatttacattatttgaacaattatttattcagaaaatatgtcgaaggtacgattttattcatttctttatgaaaagtaatgcgaattttagtaaaaaatcgcaattagagcttaaacaggaaaaaattcaaaaataggcacaatataagaggaaaattgcaattcagaggatcgatccatttctaaaaaaattttcattaattgaaggatgaattaaagggattgaatgttgtcacattaaaacgatcctttatgactttaaccgttattttaagtgttgattgaatatttataaaaatattgataactcactcaattaagcaaaaaacccggagatggcagcacaattaacaacagtgaagccagtgtttttatatggcgaaaaaattatgagtttatttatcattgtcaaagaattgaattttgttacgaaatgtttttgggaaaaatgcgaaaacaaattggagaatgtggatctaaaaaacgagaagatggaattgctaaatgagaaggaaataaaagaggagaaaaatggaggaaacacaccgaagagaaaagtcaaaaagcaaaaaacaaaaaaaattattgtgccaacaaaaattgaaaaacttcaaaaagaatttgagcaaaaaatggaaaaaatgtgcgaaaatgtaaaagaaaaggcaaaggaagaaaaggcgaaattggaaaaagcgatggtaaaaaatgaaaattacaagaaagaagaagcagaaaacatggaaaaagaatacgagcacaaatttggcactttcaattcgtcgccctttttataacaatgccttcgttcgtttgcctaaaaacggcgaattttccccaattctttcggcttttccttgggaatttctcttgttttttatcttttatttattttttgctttttgttccttaagatttatttgcattttttatgtaagaaaatttatataaaatttctcttggcataaagcctttttaagaattgttgacatgagacggtttttatctttaatctatcacaagctcactcccctatatttttattcgagaccatctcgcccagtctatagaaaaaaaaactatttccatgctattatttattgtcatggcatttttcttcattttctcaaaaattaattctatttttttacattgaaagaaagacaccataataagcaaa

SEQ ID NO: 79292 - DNA, 1089 bp, Heterodera glycines
atggctatcatgctatcattccatccacagattgacaagctgaacgcgttaaccatccaacaatcggctaaactttccccaattttgccgcctccgtccgccgatgaattccacgcggttgccgtcgcattgaccgaatcggccaatcgtttgcccacccttttgcacaattcgaccgaagagaacgcccgggggatcaacgaattcaccaccaattttgcccgatttcatacgacagtcagcaaaatgacagcgcaagcgaatgacacgacgggccaagaaatggcagaaagactcggagatgccaaggaatcggcactaattatgttggaaaggtggagggggggggcaaatcaaactcaatttgttgaacaaatttcggcattttagtctccgcaccgcccaaaccgacccaaataacgcgtcacttgctcaggtgttccattggaaatgaatataaatactcatccccaattcaagtcactttcgtcctccgttcgccaattcgttgtgacaatttcggcacttgtcgaattggcacaatcgcaagggacgagcgcgtggctgcgcgagtgcgaagaagccatccaacaaattcattcggtccggcatttgttcgacggcgcaacgacgagtccattgaatgtgccgttgaacgggaacagttactacgagtcattggccgaagtgacaaacgaagctcgcaatttgggcgacggttggttttggcaaagggaaaggcaaaatgcaagtgaattgaattggaagggatgaacggattggcacattacgcacgtcgcaatgacaacgaacagttgtgcttagcagtgcgacaagtggcaaatgccgtctgcggattggccaaaaacgcggcgcaatccgtaagaaaatggcataacggaagaggcaaattcgaaactgattctctctcattctcaaggcgtatttgatcggagttggcgacccacaaagtgagcccggacgagcggccatttacgacgttggacgatgcgaacagtctcttgaggcagtcaaacaattaaccgaacaaatctgcacaggacggagcgaaaagcggcaaataataaa

SEQ ID NO: 79293 - DNA, 2509 bp, Heterodera glycines
aaatcgtcgaatcatccaaccgaatcatcacaaaccaaggccatcagccgggggccattgtgcgcgactccgagtcagcaattcggtactgatcaatcctctgatcactccgtccgtcgtttgttcagttcgtcccaattactcgtggagggcatggagcaagaggctcagctcagtccggcggaacagcgcaacaaattgttgaacgctgctcgtaagcgaggaaagcgcaatgctttacgcggtgcatcgttttaaggttcggttgcccaagcgacgagttcgatgatcgacgcgacgcgcgagtgccaaagtcgacccggcgaagttggacctcaagtggcactgcgaaacgcggccgaacaccttgtgcaggtgggaggcagctgcaaaacatgacattgcaatgggaaaatgattgaaagcataatatatgggagggtgagaaaaagccgatcagtgatcagaggaacgaacaaaggcaaatttagccagaacgccatcggagggaaacagcggcgggctgaggagagagtgtcagttgagattgagccgaattgaatggggttgggggaggacgatctgatcaccatcattgatcagagcgatcagcgaatctccgcctcactcttttcccacaaaacttttcccgccgctttgtgtctgcgccgtcttctctttctctctctctttctttgtttgtctctttctcttcctcctcttttcccacactcttttcattgaccgatcgccctctctttcatcccctgcacatatccttcaaagtgtcctttgccacttttgccatgcccatttatcactaattatcccttttatagccattttttctttttatcttccgacaatagcctcttttcgccctgctactgattagcattttcatttttgtaaattatgctttctcctttttatcataggcttttcctctctctctgtgcttttctgttactgcaatgttttgccttgttattttatgatatattagtacatataaatattccaatttggcatttcatttttgctgcttttctcctttaattagtttcttaattacttttgtgtccctccctctccccccccccctttttcaatttttcgtcgcctcccatcgctgattagttggttcacttcattttccatgccattccttgcccatcatccgcaagacgttcttcgccgtctcggcaacacttttcctcctccttttggtaagcttccgtcgttccttcgtcttctgcttttttgttcgcttttctcgttttgctgtgtttgtcccccccccccctcaaatttccaattcctttgtccaaattcgggctcaattcgactcatttttattctcttcagctgccgctgtgttcctccaccattgtaaggctaaaaaaaaagtcccgattttttttgtttgttttgaatttgattgttttggcgttccgtttgggtgtgtgagtgatcactgatcagaaataactcaactcccattttggcattttttgttgtgaaattgcatttttcacaggtgaccaatcaggcgactggcgaacgacaaattcaacaaaccatccaacagcttgaaaaagtgtccaaagagaccgccgcttcgatcactcaaaccgtcgctgccgccaattcggtcagtgcctatacagtacgtctgccgatgccttcatcccccatttgttactgtataggctcgccctcacattctcgcccagcaaccgctcgattcgcttgttcgcgagtgtgccgatgttagccgttatgtgcctccgctgatcaaacgcatcaaacagcaccagggggcgagcgaagcgggcgcacagttccgagctgtcagttatatcaattcacaaaaatgcagcatttgtgtgccttgcagaaggtcggccttattcacgactctcaggcggtggttggccccgcgacgcgactcgtcgacgaaagtcgctcttccgtttcgcatgtgcgcgacaaacactccgccggccttttgctccaaaactgtcagcagctttcggtagtccaatttcgattgcgtttgccctaattaattaactatttggttaattgattaaagataaatgtcgctgagcttcgtacagtgcttaataatgtgcagcaattggactttggctcccaattggaccattcggaggagctcatccgttcattggatgcccagcttcagcaattgtcgcaacgaattcgactcggtcagccgcttctcccgccctcctccccgccgatggacagtccgcagcaaactacgcgaacatttcgccagcagtgccgtcttttgaactcgacgatcgcccaaatggtctccgccacacattccagcgaaagtcgccaaatgggcacagcgatgctcgaaatggcacaagcactcagtgattttgccgattcggttgaagacgtcgcagcgacagaagcaaatgccaatggaagcggcgaactcgcagagggcgacgagagggtggacaagtga

SEQ ID NO: 79294 - DNA, 972 bp, Heterodera glycines
atgggggcgaacattgtaactgcggacgaattcgggaacaccgcgctgacgatcgctttagcaacgggacgagtgagttttctctttctcctccgtgggtcggaaacactgatcagggttgtgattttgccctataaaccgggcatttaccggattttcgagatctgtgcaaattttagcaagtgccacggttttggaatgctttgccgcagtactgaactcatgtgtccagttttttgagttttggccataacatccatggttttggtcccgattttttattttcgagaaagattcttcttaaatgatccccaaaatttcatccccgaaggcttaatgaagctaaaacagaaggaaacgacttttttagaaatgctccaaacagtcttttcgattatcgccattttatgttcgcttttgtgcagaatttttggaattttcggtagtttttgggttcgacattgccgatagccgatgtaggaaaatttttttgattttgcttaatttctctaattagaattttggaaatatgtgctaagacccaataaaaatatagaaatcgaaccccatttatgaaatttattatctcaaaaaatactctttttgaaatataaccgaacggaaaattattttttaattttttttccataaaatattttaatttagtaaataaaaatttctaagtgcaattaattttattttgcccattatatataaatttagaaagtgctgatgtcataaacattgctctggtcaaaactgaactttgacgcagttgttaagaaaagttgacgcaaaaatccgattcagttttcgccattttcctaatcttgttaaatttaaaaaacttatttaagtttgaattaaaattaaatgtttctggccattatggcgccgtgctccatatctttttttgaaactaatattttaaaattttacagactaattgagaagatagaattaaataatgta

SEQ ID NO: 79295 - DNA, 91 bp, Heterodera glycines; identical to SEQ ID NO: 53030

SEQ ID NO: 79296 - DNA, 452 bp, Heterodera glycines
atggcttttgattttctaccgttactgctcttattactgttttatttccaaattgatcaaacacattcggatggcataattaaatgccgtggcatttcaattgatcaaatgcaatcatttaattaccaatcggatcaatggacgaagccaaaggaagtcaaattttctgagagaccgcactttagtgtaatttttgttaaaatttaatgccttagcttaggtctgagctgaagtctttcttcattctctgcctcggttcaatcccccaaaatctttattcattttcgaaaaaatgattacaatatgcttacgaaaatttgaccgcttttggcatggtttttcaatagtgaagaacaaaattatgattatttaaaaatttttacacatatctgaaaattggggataaatattggcggatttaccgacaaacaaatgagtcaattttgaataaa

SEQ ID NO: 79297 - DNA, 1424 bp, Heterodera glycines
atgacaacatccaaggcatcaccaagaatgattttgcccgtaattaaggagtcaagggcacctccggcgggatcaacgaaatttggccaaacgatttcagaatggtaaatattaaatcaaaaacagaataattataattaattaacaaaaaatatattaatttggtaaatcttaacaaattcatgtagacacgacaggtcaaatctcaaagtattaataaaactaagtaattatattttgtatagggagatcgaaggcgctactggtttttggagattaggtccaattttaaatgatttcaaaaaaaatctttcaacgtattattaattttgttaaggccgagggggtcaggccagagaaaatttgagcaaaaatgtcgatcgaaaaagaaattaaacgaaattttacgcaaaaaaatctcataggcaatacgattggctttttttagattttcattaatcaaattatgatcgatcaatcccgatttgtgaggaaaattggtcgaatcgtaggaatagacggtagaaagaacggctaaaatttgtttttttaattccaaaaatttcatgctcgtccataaattctttatttttcttaaaaatttgctaggacttagaaattttattgaaaatctgttaacaaatagcttttcaacaaatgatcttgagctggaaatttgttcaggacaacaaaagtaacacaattgtcgaaaatttccaaatcgatgagaccgaagagcaaattgactgggaccctgacgcgaattcggcatttctcgacattggtgcaactgttgaacttgttggtgccgagtctgacattgatgatgggaatagaagttcaactttcaccgccacttcaacatcatccaagcgggcaaaaaacacggcaaaacaacaaagaaaacgcgcaaacaaacgcaccaagccgaagccggtagaaaagcgaaatataaaaaattgaatcgtgaaattctgtataataaataagaatcagagcctggagattgggacccccgcgggatttttacgagatttccggtcccgcacccgtttttttttggtgaacgggattgtaacggcagcgggatttttatgggatccccgatcgggactcccgtcccagaaaagttttaactcctgctcccgcctccggaaaattttttaccgggctctaataaaaattatcaatccgccttttaagttggcagtccaaattgatgaaggaaatccggacagcagaattgcaccggatgagcacggtcgctatttgatcagcaaagttcatgccgtttatgtacaccaaaataatagaaaagcatattttctttcatttcatggcatgttttttatctattgaatttcttgttaatcaaagttaggaattaaaaatatattttgagaattaatcaattataaaataaa

SEQ ID NO: 79298 - DNA, 695 bp, Heterodera glycines
atgaaaagtggtagcgtaggggaatttgaaattgaatatgaaaaagctgaaataacggatgcggaagggggaggagaggggactaggggtggggggaattgggggcccaattttgggggggaatttgggggcggaataagggtccttacactactaaggcacaacaaatcaaaaacggatgaacaaaaaattgaaattgttcaacaatttatagtaatgaaagatgaatataagccaaaaggaataaaatattcaagaaaagaatggcaccaaaattatgacgaaattggcaagaaaattggagttggttatgtaacaattgaaaaatggaagaaacaatttggaatgggtgaaagaataaatgagaaagaaaaaatggaaaaaatgaaaatgtaaaaataagtgatgaaaaaattgccaattgttgcaaattagtgggcagaatattcgaagatggaaaaaacaatttgtagaacaaaaaaggtaaccttagaaagaaatgggaatttttactgatttttatttgtttggagctgtttgacaaatttattcatataatttctctatttaaatttattgctttttaaaatgcataaatttgctgaaaaattagcccgaaaatggcgcatataaattatgaaacaatataaagaaggatttttttggaaattttcattaactctgacattttcgga

SEQ ID NO: 79299 - DNA, 801 bp, Heterodera glycines
atgaaacaagacgaactcctcgcaaattttctcagcagccctctaccaccattgccaccaagaaaaaattcatcaacgaatacccgaaagagcacatcgatcaatgatcagctgaatgatccgagttggatatatgatatcaaaattaactatggacaatcatcgcgcaacaaaacgtaccaaaatagaactaagctgaccaaacatgaaacgaactttcacaaacaatttggtcaaaatatttttaacagtaaggacggatcaactgaatctgaaaaacgatctaatcagcagacaaaaaaaaatccaattagcatatatggacgagaaggacaagaagtttccggcaaccaaagtgatcagaatactaaaaagacatcctctgataagcaaaggaacgaaaagaataaaggcatttcatttgctaagaatgtagtcaaatatttatctgggcattcatctgacacccagaaagatcaaaagccaaaaaatcgcaagaacgaagctggatcaactggaaagaatactaatcagtcgaatgatgtcccttctataaataaccagcgtgatcaaatttctcaaaaagcaaccaatgatttatatggacaaccatctgaaaccccaagttatcaaaagaaagcaaatcgcatgaacggagccggaccatcggagaagaaaagcgatcagaatgacaaaagcgagctgaatgaagggacaccatcagaaaatcaaattgacaaaaccaaaacaaatcgcctgttaaaagcaaaagaaattttgccctttcaacagaaagagtag

SEQ ID NO: 79300 - DNA, 698 bp, Heterodera glycines
atgagtttcttcgataatccaattgttctgaatggtggaaaggcattatttgcctttttgatgcttttctccaacggattgttggtgttcgtctcgtttaaagcaaagtattttgttaattatataaaattcgcataatttagataatagttaattcaaaattttccctttaaggttcctcaacagcacctgcaattggctgatcacagccaactcggcatgcattgccatctattcattcacttattttatccagttttggcattgtgttgatcagtccctccggcattcccctctggctttgttttctgctcgtctccgtcccgctgttcgccgtctgttgccaatacattttgttcccagtgatcgctttggacagattgatcggagccctttttccatttaagtaagtaataatataatttacaaatcttcaaacgtctagcgggggtttttttaacccctcgtaggaaggcacaaatttttggtcaaactttaagaaatacggtaatttaaattaattatccagacaaatgggcaaacgttataagcgccgtttcatgctatttgcattaattgcctcaatttcgtttgccatttttatgctggccgcctcaatcaacaaatccatcattcatttctctgaaaagtaatttcccatttatttctgtagttaaaaaatctttgataatgaaaaa

SEQ ID NO: 79301 - DNA, 520 bp, Heterodera glycines
atgtcgcagcctcaagaagtgcagccaatggaagcatttgatgaggtgaacacgcaacaatggcatgacttagataatttaaaatgtagagcagacgaacattgcggagcagataaagcagcagctgctgaccccgtgccaattcagctacgcggacagagtgatcgaacgcgtgccgtgcccccaggacgcggaggagtggtcgaagaatcaaaaaagcggtgttgaagttccaggtgactgggcatctgatgccgaactgcttgaccaatatgggcgttcaaaaaattgttttccttataactcatgaaataattaccgtatttcctcgattatacgcccccccccctcgaatggaagccccccctcgaatataagccccccttggaggggggttgaacaatagaagccccccctcgagtagaagcccccttcgaatataagcccccctcaaaaaaaaattttttttcaaaacttttgaagtcagaaacgtgcaaaaactattgaacaatttgtttta

SEQ ID NO: 79302 - DNA, 187 bp, Heterodera glycines
atgttgtatttggatgtcaaagaaaaaagctatcgtggaaaaagagctggcgccgaaacgcgagcgccgaaacgcgtgggtcccgtttgtacatttagtctttctaaaatattttatgaattttaaaaaaatactatttttttcagaaaatttttgtgttttaaaagtatttaaaataacaaataaa

SEQ ID NO: 79303 - DNA, 157 bp, Heterodera glycines
gcacaggccgattttgcgttgaaattgctgcgcgaagtgtccacggacgaccgttcgtgcattgtttcgccgttttctgccgccgtcactttgtccatggtttacgcgggcgccaaggaaaagaccggcgaagaaatgggccaactgctggcaaatg

SEQ ID NO: 79304 - DNA, 599 bp, Heterodera glycines
atgaccagtttgatcgccgatctcggaggtctcagcggactttggattggcatctctgtggtcagcattttggaggtggtccaactgatttggttctgcatgcaatacatccacaagaagaagtcggtttcaaccaaagaaggaactgacaaattccagctttttttactcaattattttgtgattttaagaacgcccgaactgttggcaatggtgcgcagtgcgcggcaacgctcatctgctggccacacagacaaatcgccgtccggcagctcttcgtcgccacctcgtgcccggactgagtcggtcggcgcctactcactcaaatcgttgcattccgtgcgcagcgatttgcggcccggcattcgcattacacaggtgcgaaacggcgccaatcggcggcatgttcaaacaccaatccgaatcaccccaattaggagcggttaaaaccgtaaaatttgcaggaacgtcgcccatctcatagcactggttcatcaacgccttacttggcgcccgaagtggaattgccctgtacatgtttgtacggtgcgcgaggccaaattgtgtttatgaagccgctctgccctttccacgggtaa

SEQ ID NO: 79305 - DNA, 860 bp, Heterodera glycines
atgctttttttgctgctccttttttcctccgccccttttgcccttttgtttttgccgttggatatttttttcacgcaaattgtgcccgcaaaagggggaaacggcggtgggaaggggggctgttatgtgagttagaaaattaatttcattatttaaatgtgattattataagaaacgttgcccttttttgttgaataaatttaaggaatttgattttttatggattattaaatttttaaatattttttaacaaataataagtatttgttagttaaataaggagaaaaaatcagaattatttttgtgcatttttatttattttttataaattgattaatctctctaatttataagggatattgtgaaaagtttaatgcgttggaggatgacttggagaaaatgaagcaaataaaggcaaacgctgaatgttttgttgacgacatgggaaaagtcatcaaagggtttgagaagaatctggacatattgaggaccagcgtaacgaaattggaggaagaaaatgagagtttaaccggggactagcagggattaattaactaattgaagcgtttaactgggattaattaagcataaccttggctaattaaattaagattggataagcgccggttcgtttcgcttattatttttttttaatttataagtagggttgtaaattatatggactaaaaaacgcgaaatatggacattaaatatggactaaaaaagcccgaaatatggactaaaaaggccaaaaatggccaaatatggaccaaaatatggataaaaaatgccaaaatatatgttgtaaacccccaaaaatcccaaaaaaggtgtgcatatttaatatttgcttaaataaa

SEQ ID NO: 79306 - DNA, 1340 bp, Heterodera glycines
atgaaagtttatcacccgctcgtctctccaacactgaaaagcattgaagaggtgagctgtcacttttgcatatttgttcatagtttggcatggtaattagtccaattgggttccttaattgtctcattaattaaggaacatcattcacttgagcattcggaagcgcaccagcaagacacatatcttaataaggtgagaattcgtttttatggcaaatttattgtactatccatggcacaaaaagagaggttcggattatttgtttttattttcttaaaattaatttaaaaatcattagggacccattttcctttattatatacaaaaaccgtcgggtttgcctctcccacgccatttcttcgagtcgggcctctcatgtccagaaaaaacgacaaaatcgacggccttttctctgttcttttgacataaaaaacgccgttagaattaaaaattttgaagcagattttccccaaactgctgctggtcctttttaggatacttataaccaaaattctaatttggaggtgccgtcgctatgcgtgtgccgtccaaaatattcaattcactaaattttgaaaatttactcagagtttataaaggggaaaggccttcaatttgtttgtgatcataatctcattattttctattaatttgtttccgtatttgcataaccattccaaatttcagcgtattcaagattctcgtgccgaactttcctttttcgttggtgccaatttggtgcagcgtttggcaacatatgaaacggcaggccaagtgatgaccgaactgttgaacagcgtcgttaacatgcaccaattcattgaaaagcaagtcccagtggaaatgcggggctatggtacacggagtaagcaccccccccccccaaaaaaaaaaaaaaagtaaattccagcgggaactccccagttaaaaaatcctaaattatggcaccatccttttttatcccggaatgtgttttaagaatcatttcagaaaaatgccaataaatttgaaaacactcatattttttgaaattaaaattttctaataaaatacaaactcactgaatttttcttatgaaaccttgcctaattggccgaaatatgctttaaaaagtctaaaaaaatcgtgccataggcatttatatgcactaaatgttcacttaaacaaaacaaaaaacgaatgccaaaaggttttatatttttgagcccctttcttaagcacaaggccgcaatatttaatccaacgtcatatgaacaatttcaatttttcagctttaagaagcgaatgaaagaaatggacgagcgattcaacgaagtcaaaaggcttgccgaccgaataaa

SEQ ID NO: 79307 - DNA, 1380 bp, Heterodera glycines
atggtatggagcaatggcctggacagagtcatgccttacaaaaatatgacatttgggtacgaccctaatgttccggcagaagttatacttttgccagtacatttccctggacattgggctctcattgtccatgatgtgcaatttggcactcattttgccgattctttgcctaccccatatggcaggttggatccgcaactgacggataaaattaaaaagatcatttgtgacattttgccgtcgacagtgttgaccgggattcttaatgccgaaaatctcacggtacaacacgatggaaatagctgcgggtacttcgtttgcctgtatgctgaatcctggcttatgaacaatcgaacatttgttctaccaagtttattcataaattatgaaaagaagcgtattttgtggcacattaacgagctgtatggctctgataatgtgccatatcatccaagggaaggggtgccaactccttgcccaattgtctatcgacatacggatgaagcgcagtcgacatccaaggccgctgagtcaatggaagttgatgataaaaatgacattatgatcatcgaacctcatatgagtgtaaatgctgtcaatgccgttctcacccaagcccaagtggcaggtgaaaaccaagctgacacacttggtttggtgtcggagtcttgcgcaccgcaagagccaattgcgcaggccgacgatgcaatatttgtcagaccgaagacgcctccaaggcgatcagcgcgcattggcaggcggcaatctgcttcgattagccgttcgccttcacccgcaccaaagcggcgcacatcggcaaatacactcagccaggttacacctttcactaaacggtgtcatcttatccacaagggctggtgctgtgctgctgcagcagctaagcattatccggaatattccgattctggaaagcttggcgacaaaaagtgctctcattgtggagcactactcttcccgcatgagaacagcagcctttgctgtcgacaaggaagggttgttttgccaaagcttaacccgcacccaaaagagcttgaagagctcatcgtgtgcgacaaacaaccccgcgaagggaaggagtttgttaggaatatgtcgcggtacaataatttgctccaatttgcgagtgtttcggctggcaataagccaagtcctgcaggcggaccgatggcagtaattctcaatggagaattccatcgccgtataagcagcatgcaggctggcacaacccagattcctggcttcggtcagttatacattctggatccagtcgaagccatggagcagcgacgaaaaaatcccacctttactggtgaaaaaatcacaaacgatgaagagtttgtgcagggtcatcagctttga

SEQ ID NO: 79308 - DNA, 893 bp, Heterodera glycines
atgccggcggcacagcaggtgatagtgccacccctggcacaacaacaactgcttcaatgtccaccaatgccgccatgccccgtggcaattccggtcccaatgagattgccaagggttagagcaatgaggggggggggggcagtttttggaattttaaaattgctccataaagcctcctcccagaccgccaacattcatttgcccaccaccacaacagtgcccacctccaccggtgtgcccgagaccaggcaagttttatgcatgttttcatcggatgtattacgcgcagttacccctcccctccaaaatttttatttagaaaattttcttataaaatttaaagaaaaaaaaattgattttttttttagcgatttttaaaattttatgctgaattagtgctttttcaaaaaattttccaaaaaccgctaaaatgatttcaaaaaatttttttttttaattttcttataaagattttcaggttttttgattttctgtctaaaattctcaatttcaagacaatgaccttgaaagtcccaaaaaatcagaaccctgtcctgtgcaaacaccggccccgcaagtgccgctgccagagccaattccggcactacccactttcattgccccaccgccgcaattgttgcgccagccaccaatggtgccattggttgttggcacacaggtggctctgatggccaatttttcaattatttttctaattttgttttaataattaaaaagaatgattgttgttgcaattgcgtacaaacaacatgccgtgcgatgggaattgccggcggaaggttggcaaaggaaaaatattattgtacatgtttttttcccatttttaccgtggtggtagggaaatttgaaaaaaaattgatttttaaaataaa

SEQ ID NO: 79309 - DNA, 653 bp, Heterodera glycines
atgtctgaaacggattttgtattcaagatcatagcgatcccgataagcccttggaaaattgtcttacttttcaggacgaaaaatttgttgttaaaaagggtggcaccatcggtaatttaccatattacatacataaaaagactagataaacataaaaaaattcggcgaaaaaaaaaaatcttttgccaccaaaatcatttatactatatatacctgagagcggagattacacaacacaaaaaataaaaacgagtaaaaaaaaaatcaatttttaggagaagtgtactcttgttgttgtggcggtgattgaatgagtgccggctggtgatattgctgctggtgcgggtccataatgacgggcgcggacggaaccgtctaacaaaaaatttttcaaaaaaaaaaatcataaaaaatttttgtaagaaaatttcaaaaaatttttttagagcattcatgacaattttttaaggtttgaaaaaatgtaaatttgaaggcgggaaaagcggcaacagctcttttccccgtttttatttacttctgttttattttaaaaaaaacattttttttttacttacaatatttaagagaaaaattttgaaatccaagttttgaaatgctttcaaatgacgaaaaaatttttgaaaagcaataaa

SEQ ID NO: 79310 - DNA, 716 bp, Heterodera glycines
atggacttaagtgctggtgatgaacagttgaagcggaactttagctgcaaaatttgttttgaggtaaataaaaaaagcttacaaagactaactctgtaattccaaaaattttttttgaaagtgactcgaattttcacattttaatattttgactccggtaataccggagaattggtgtcccggcgaaaaataaattaaaaaattttttttaagtcgttaaaacatatttatgggggttttctgggtcgctgatcgcgaatctgacatagttttgactaatttcgaatctcggacccgaacaaaagtagagattcaaaattctcacaaaatcaattttttaatttcgacttttggtccgaattcgagacctcgactccaaattattttgtcagataacataaaatacctttttttaatatattaaaaccaagagggagttcaaccaaactctctttcaatttctttaaaaacaatccgattatctctttttcctttagcccttctccaaggatcgtcgttatcccatttcgctaaattgcggtcacaccttttgcgctcgttgcgtcaggcagctcagcagcttcggcacttcaattgcttgtggtctctgtcgccgaggcacttactccgactttcgtcaactcggcaagaacgtcacactgctaggttttgtgcttttttattggaagaattcaaatttggttgccatcgggtga

SEQ ID NO: 79311 - DNA, 1460 bp, Heterodera glycines
atgcacgcgttttgcgctcgagctatttatcatcgggcttgtcaatccaaagcgaaacaacaaagatgctgttttgaacgaataaagggcataggttattttgaagaagtgtcaaagaacatgcagcaataagcctgcaaaatctaataagtggaaaatacatgagtatagaatttattttcagaaaagtgtcaacagacttttggaaaaaaatccccccccccctagatacgggcctgggtggcaatctcgccctctcccaacaccttccctgatacgggcctgatatggagctaaaaattaccttgcgaagcattttcttttgtcgaaatagtcgacgccttgccgttttgacctcgtgtagctcaatcaatttttgtttttgctcttcggaaagcttctcgaaattctcacgcttttcatcgccaatttgctttgctctgtcagcataaaacttaaaatggttattgcaatatttatgtattcccggcgacgttttgtcatgagccgttcctgggccagttgatcgagattacccgtggtggtggtagccccacccacccgctctctcctcgttcggaaagattttcgacaacatcctcattccacttgccgattggaaaccgaaacaggacaaaattttttcgccgtaactttagtaatccaaataattcacgaataattaaatttaattatttcacaaaattgtataaagagtagtaatccatcccccccccttcctgatatgtattttatttgaaaaaaatttttcaaagaaattttattttttctagcgattttttggaaattttttttaaaaactagtaaatcatcataaaattccgaaaaacgctagaaaacctttcatatttttaatttaaaatattattataaaaaaaatttcttgacttgttttaggtgtgcacccattggaaacacagattaaaagaaagtttgggaaacaattccttttatagacaaaaaataaataaaataaatgctacctgtttttcagcatcgctcaaagttttccaattaacactgacagttttaacaatttccttcgctaagccagtctgataaccaaatttttcacgaagaaaaattgcaaaagatcgaggcgcattgaatttggacggaagacgaagttcaacaccactaatagaagttggaacaacaagacgcggaaaagtcgttgacaatttggacacacttttacaaaaaaaaaataattaaaaattagttaattaatcagggctcacaattgagcattgtgaaaggcattttttggacaatgttttagactttgttttaagaacgggaccatccatgtttgtttatagtgaacgacagacacccgcttagaaatggttaaatacttaaatgatgtacctacaagattttttgctcggcgaatttaatatgaacaaatcggtccctacggaaatggcaaaaataaa

SEQ ID NO: 79312 - DNA, 560 bp, Heterodera glycines
atgaaagcagcgaaaaaggtcggactgaagaagaaggagacgaagttggcaagcgggcagaaaaagggacgaatcgctaaaggcggcggcacttcgacgacaggcgccaaaaagggagacgaagaggcggcgacggaactgcttcactctgcgactttgagcgaaccaattattttgggtgggacgaatttcaaaaatttttttttcgttttcaaaaggcatgaaaacaaagtgtcgacagtagaagggatactcctgtgttaattttcaaaaattttcagcatcgggcgaaaaacaggaaaatttgtggcgttttgcgccaaaaatgacaaattttgctattttggagtcaagttttcaaaaaataataatggtacaatgataggcgacaccatgaaaattttttgtgaatttaattagatatgacaaaaaatagtgtaaaatttcaacaaaaaaaagcttgccaatttcttggaaaatttattccaagtcaagaaaaaacccatggaaacatgtgttcataattttgaaatactaaaaaaaagaatttttttctagca

SEQ ID NO: 79313 - DNA, 487 bp, Heterodera glycines
atggcggcgacatcaaagctgcaaaaaagtggacgaaagcggttgagatacgattcagaggagtcatctgatgatgatggcattggaggaggtgaatgggatttcaaatttgcaattagtacttgaaaacgggttgacctgaaatttgattgcgctcgttagccaacttttcgctttattgcagttaacacgaccataaaatttggcaagtttattacaccataacattgtgtaaacaccaaaattaaacattcttggtatcattcgatagtcccgagaggtctttattaggcccataattgaaaaactactttttatgactggttgattttcatcagatggggccactgttgcaatcattccgacgccgagcattgatttggtcctgcaaaatttggcaacaaatgcactcgcttctacagcggcgcccgaaatggaggagaatgaagagcagggcgatgccattcaattgggtaataatatctga

SEQ ID NO: 79314 - DNA, 231 bp, Heterodera glycines
atgcttcggccactgccatcaccgcgaaacttcctttttggcactgttgttgttgacaacggccaaagagaggaagaagaaacagaaacaccaccgtcggcaattttggtggttgtgtgccgtgatgaggagacaagcgatgatgatgaagccgatgatgacggttttgttgcaactgatcgtgcagcaacaacatcgtttatcgttgcaccaattgttgacgaggcctga

SEQ ID NO: 79315 - DNA, 3064 bp, Heterodera glycines
atggacgatgatcaccaggttgaattggggttttagttccacgcaaacccacggttttgtacagttttcgtgccgcctctgatgtgccgtcggcggttggcttgccccccgattggttgtcagactcctgtcaattaatccacaaaagccgtttgcccacttatcatttccaggtcaattagtgttttttgtgtttctacacacaaatcattaccaaaagtaaaaaaaaattcggcttaaaattttgttttatacacgtttttgtactatattaaccgcatccatttactcacctaaatctgtttcagaaatcgcttttccgattaccagtgcccagtttggaacactcttgcgaccgatatctatgctctgttggtgctgtgtttggcgaacattcagacgaatttgtggactccaaggaattggtggccgattttctcgatggcactaaaggcggagggccgggtaaaaaacaaaaaattgatcattttaagtgtttaatttttaaatttaatttattcagcgcttcaagccgaactcaaaagatacgcccaacacaataaacatacctcatacatagttagtttttgggggctttttgaatttaaaactatttttgggagtcgggggcgagctgttcacctaaaaacacatattgttattccagtcagaaccatggtttgacatgtatcttcgttcacgcatcccatgccccatcaacttcaacccgttcatgatgtttgcacccgaccctgagcctatctacaacgaccaggtgcagctttttttggaatttatttcgaaaataaaaatttattgcattattttagcttatacgagcaacaaatttggtcatttcctgtggccgcttcaaaaaggcgttggatgctgaattgctgaaacccgaagtattccacatgaatccgctcaaaagtgacaccgaaaaattcgaaaacatttgtcggtcggtttttgtcttttgcgcaagaaattttttggttttaaattatttgcatcgttttcaaaggttcgcccccaatgcaattcgatggcttgtggcagcgttggctttcaaagcgtacccattggacatggtaatttttcatacaatggcaaagcaacatagcttgggacaattttgttaccaaaaatctcgcacaaaaatttaaaaaaattgtgaaatttaaagaaaaaaatactctgataaatcatttgtccatgtaatacattttttaattggctcagagtcaatatcaatcgctgtttggaggttgtcgaattccgcagcgggacaaagatcgtttacatctcaacagaaattcgtaagtcaatttttcagatattttttttctttgacccacaacgttttccgggctaattttttaaaattatggtctctattggcgaaaaacataatgttttaacagtttttcgccgaatgatgaccaatttaaaccgaatttatttaacaaaattgatacaaatttgttcaaaaaatggcacccactttctttgatttttttccccaaataattcgtcaccatcccctggtttttaaggaagcattttgttgtttcacgccatggacatttctacactgtcaagctgtttgatcagaatggttggtttgaataataataattgtcttaaaatgagattttttttcttgtaggcatgcttctcgagcccaaacaaatttttgccagtctttcccatatttgtaaatcgccgccgtcgtcgtctgctagcaaaaccaattttgcgccagcagacgaatgtgttggctcattgaccacattggtttgtgttaaaattcaaacccgaactaataacaaccaccatggtctaaaatttcagtaagaaataaatttgaaaattaagggttttcaaaaaaaaaatcagcagttaattatagttttttttccgaaaaagacatctcatttgctaaagaaaaacaatatttatttaaaagtttaatccattttttattaaattattattattattattgaaattctgatcgtttttttttttgaaaaaaaatcgtgacattatgaaattttattcggaataattgtttttgttttttcaaaggaccgtgacacgtgggcggacattcgttctgaactgattggcaccgactcgagaaaccatgaagcgctgactgcaattgaggatggcctgttcctgttgtgcttggacgagttgcacagcagcgatccggaaagactgatgcattcgctgttgtgcggcgatgacgggagcaacagatggtcagtcagttcagttattgtttaatttcaatggtttaggccaggggagaccctccatttggggggggggtgagatgggagtaaaccggaacaggacaaaacacagccgccgaaacgcagtcgagacataacacagccgggaaaaaattttcaaaaaattttctaacagaatttttcatgaaaaaatgttagaaaatttcttagaaagttcaaagaaaaaaaaatttcaaaaattttccagcgatttttcaaagtttaatgttgaatgttgcattactaagatttacaaaaaaatttcaaaaaaatcgctggaaaattttttgaaaattttttttcctttgaattttctaagaaaaatttttctgagatttttttcatgaaaaatttctgtttgaaaattttttcccggctgtgttatgtctcgactgtgtttcggcggctgtgttttgtcctgttccgcctttttacttgcctatctgtacatatcaaatttaaattggtgcctttgtctccgaacattgcccaatttaataattaaaaaaaagtacgtttattttcagaaaattatccgtgtcgatttgcacaacggaggccaatggacgtgcatcccaacggaacatttggagggcaattgggttttgttggatgttttcttcgacattttgcttgctcaacactcggctcccaaccgtccgcactctttgcatattgccgacagtgccactaacggcgacgacaatgacgccgaacacggtacggtactcattgtcagccaaaatggcattttttaa

SEQ ID NO: 79316 - DNA, 74 bp, Heterodera glycines
ttgccctccaaatgttccgttgggatgcacgtccattggcctccgttgtgcaaatcgacacggataattttctg

SEQ ID NO: 79317 - DNA, 814 bp, Heterodera glycines
atgcaaattatcggcattattccacgagttaaaatcaatgaattggtgaaacaaaaagaacaattggccatggatgatttgagaatggttgatcagcccgagctgtacaattttgatccaatttttcaacagattaaggaacaaaagatggaaattctgaaagctttcgactttagctttgacacggtaattttgggtggatgccgaaatgctcagagactttgtgccaaactttcaattaacttttttttgccaaaattggttgtttaaattgtgctaaaatgtcggtggaattccaccaaaattagttccaggaaatgccgatcaaattttctaacatgcacaattaatcgaacttaaaaattttttgaaaacgaaatttccagtattttcgctcataaaattttttttgaccatatttggtatatgtttaaaaatttccaattaaatttcgattttatttattttttttaacaaaattactttttaaggtgggacaattccgtcggagcttgtccattcgagaacatcttcagcgtccacattaagaaaaaaaaatcatgaatttttacacagggggagaaaaaaattagaaatttattcgagaaagaattatttttataaatagaacttggaaattaattttctatggttttttaagtaaaaatgtgctttttaagtgaaattgtaggcattttttcagaatttacttgcccggtgaaaaaccataggggaagcaatattttaaaaatgaaatgggacaacacttttgaccacctatattttgatcaaattgtgaatatggtaaaataaa

SEQ ID NO: 79318 - DNA, 61 bp, Heterodera glycines
acatttatttgatttattttaccatattcacaatttgatcaaaatataggtggtcaaaagt

SEQ ID NO: 79319 - DNA, 532 bp, Heterodera glycines
atggcgattttgttcgagccgactccgaccgaatacaaccgtcgtcaatgtccgaccatctccaggccaaaacgggtgaagctagccctaaatagggtcattaaagctctccatatggcaatggctgagcccgctggccctaaatggtcccgcaatcactccgtccccgtccgaaacgttcagagggacaacgctcgccgctaaccataggcaagcgctagcgtactcagcgagcagcccggtgcacttggctagccacaagtccgcagcagcgactagcgagcgggaaacggcgccggcgagcaaatcgcatatttggcgttgtgttattgttcgttttatatatagtgggataataatgaatcttttttggatggggtgtaaaatgcgtgagggaagacagacaattgggtggggtattttcattgggcgctcgtttctttgtcagcggcaaagagaaaatatgccatgctatttcgcccttttcattttcactaattgtcacctaattacatgtaattcattaacttaa

SEQ ID NO: 79320 - DNA, 757 bp, Heterodera glycines
atggaaggtgaaatggaagccaaaattcacgtttattcaacacagccaattgatggcgacggatttatggcatttgcacgcgattttctcaatgaatccaaggaacttcttaaaatcattgaaaatttgtcgaacccaattcaagaaaatgttcgtaaaaatttgaaaaatttggccagtgttgcgcaacaaaagtccaaacagttgcgccagagcattgcgcaacaattggaacaattggtggcaaatgccgcaaacgaacttgccaatttgcagagccagacaggcaagttcggggacaacacggcatccgaatatttacgcatttttaggtgtaagtttggggaatattatgaatatttttgctaattaattaacaagggcttagattaatgtaagataaataaaatctcaaaaaaaatgtttgacataagaaactggaaaattaaagttttaaaaggtctttaaaaatagaaaaatgactgtatttttccaaaaaatcattaatttgcttgataacttcgtgaatttatcagtatttttatgaattttaatcaatttttttgattgattattagatgcaaatcaacggcagaaaattaaaaaattttgaaatttaaaaattctgttttttatattttatgttttacattcatttaataaaatatttttaataataattttagtcacctgttttggaaaaactctttaatttacgttatttaattttaattctaaattttttcataaaaataaa

SEQ ID NO: 79321 - DNA, 264 bp, Heterodera glycines
atgcgatttttaggtaagaaaaatcccagaataggtacttaaataggtaaaaaaaaaatctcaataggtattaaataggtacaaaaattccaaaataggtaaataaaattttttattaacgatttttagtggaaaaaagcaaacaaaaggggaaaattttggttctatttctttgtaaacgaataatttaaatatttttaatatgttcttagaaaatattgacattttaaattaaaaattttgttacataaaaaaacaaataaa

SEQ ID NO: 79322 - DNA, 705 bp, Heterodera glycines
attaaacttcctattcttttcaaaggtctgggccgaaggcggtccgagtgctatcgaaatctattggacgcctgagcaggaggcgcgtcctgttaaacattactttgtgcaacgtatggacaagggccgttggattaatgtgtcgaaggttattaattgggttttttaaattgttatgtggggtgagggaggttcagctaatgtcctggatttttgagatcgggaaaatcgcgaattccagttttcttcaaaaatctttcgagaaatcctcccgttgaatattttacccgagccaaacatcggttatgctgctctctctctactgcactcaaactttaaaaatttaagttgatttactgatgggcaggcaccgcactgaaaatttagcaaatttatatttctataagaattttaatcactacaatcaattcttttcagtccattcctttcactggacaaagcaaatactgccacaactttctgcctctttcacttgttcacaccatcgagtacagtttccgcgtcatcactgtgtttgttgatggacaggaggaggcgagtgaaacgtttactggccgtctcactatgaatgcggtaagcttcaattgaccgtaattgctgcttaaacattgaatcatttttcttgacttgtttagtgagtgaggaaggcccaacaaatgctgtatcagtgtgcggagaaataaa

SEQ ID NO: 79323 - DNA, 589 bp, Heterodera glycines
atggtgaccaaagagggggtcacattgtggtgcactcgtatcaacaaaccccaatttgtgccgttcgatgtcgtctacgacctgccagggcactgctttttccgcgtgaagaacaaagcgagggtgttcaatgtcccctacggagacctgccctccggaacgtgtgccaaaagcaaaccgacagaccaccaacaacaacaacaacaggatctgaagcgcaaggcaaaggtagcacttgacctcgtggaggctggactaatggccgatgctatgcaggacggcacacggtggaagaaggccaaaacagctatcaacgtgcttggcaatctcctattggctgaatcactggactccaccaacagcaattccactgatgccccgacgcaggcaaatgaagccgctgacatcaaagaagaagaggaaaatgtgcagggagaagaagaaaacaaagaagacattggagacattgataaaactcttgacgacttctttaacagccttaatgcttcaacctcaaatgtgcctatttaagtgaataatttaacacacatcattttctcaaaaatattaaacacacaagcattcacca

SEQ ID NO: 79324 - DNA, 819 bp, Heterodera glycines
atgtgggagagtgggtttgcgttgccagcgccatcacaatactatggcgatttgcctgtgctgccagacaacgcggacgaaattgaggagatggacaccgcacagcgcaggattgcaagcagaagaaaattaaaaaaggatgaagcagaagatgatgatgatgatgatgctttgcatcacaaaaaatacaggatttatcagcgttcacctccacggctcccttccccacctcgagcgaaaccaaaaccaccaccacgccaaccgaccacaaagagagagcaacagaagccaaaaaagttggaactaaaaccaccaaaaatagagccaaaatttgaacccgattcacgaccatcgacatcaaaagtcgcgcctcggtcgaaaaaagagcctgagttccagcttgacccacggccatccacatccaggcaggctggacacttgcctcccccagcacccaaaattgtaacaaaacatgagccgacaaagagacccgtgccataccgtatcccgaaaagagaacccaaaattgttgaagaaacgccacagaggcaacagcaaccccttcctgctgctgtcgtcgaagaaatgcctcctgttcctccgcctaggagggggaccaaacgccgccaccccgtaaatggtgagaatgatggtgaggtgcgcataagaaaacgcgtgaggcaagcgaggagggtgcgagtacagtactcacccgagccgggtccatcaacatctgcacaaagtgatgaacaacaacaacatcgagaactgtttgccatcccgtcaaatcagctggagagcgggccgccctaccattaa

SEQ ID NO: 79325 - DNA, 1195 bp, Heterodera glycines
atggacggctcctccaaagaaaacagcacagagcacaaccaccaggacggcaccgaaaatcaagaaggaatttcgcccgaaaaagtggagttgatcaactccacgcttgacaagctgtacaacgacccatcctccccagcggcgtttgcaggtgttacagcgctgtggaaagaggcgcgaaaaaagttgaaaaatttacggaaaaaggatgtgcagcattatttggaggggcaccgcacctacactctgatgcgcccccgaagggtgcgctttccaagagccaaaactgttgcggctgggttcatgaccgatgttcaagtggatttggccgattttcaggcgctttcgcgccacaatcggggtcaccgatacctgcttgttgcggttgatgtgctgtccaaacgcctgtttgttgtaccgctgaaaaacaagagagccgaggagatgttggaggcattcagacaactcatcgaccaaatgccaatggtcccacatcgcatcttctccgacaaaggcaccgaattcaagaaccgattgttgaaggaattctttgatgagcaggaaattgagaagcatgagccagtgcattcatccgtcaaggcatcggttgctgagcgggccatccggaatgtgaagcagcgactgtaccggtattttgctgaaaaggagacgctgaattgggtggatgcagtacagaaaattgtgaacggaattaacagcgctccaactcgtgttcacgagatgcgccccattgatgttgacttttcaaatgcgcagaaagtgtggaagcgattgtacggacaccctgcccttcaaaagcggacgccacgcttccgtaaagatgaatttgtgcgcatgagcagagagaaagggcaatttgagaagagatatttaccaaattatggagacgaaatcctggagattgatgatgtgctgaaagcggtgcgcccaattcggtacaaactgcgggatgagcacggtgagaaattcaagggcagcttttatgagcaggagctggcgcgcgtaagaaaagatgcagacacaagctaccgcatcgagaaggtgtacagaaagaggaaaagagcggatggatccacagagatgcttgtcaaatttataggatatcccaatcgggaatggattaatgagtctcagcttgtataaaagcatgtgcatttttcattttgttgtgata

SEQ ID NO: 79326 - DNA, 131 bp, Heterodera glycines
ctaaaatgcgtcttctattaatcctcccaaatttacttccaatgctcgctttaatgatcgccatgggcataattggttctgttgtgtttggaatggacccaaacataaaggagccattgctaggctactag

SEQ ID NO: 79327 - DNA, 309 bp, Heterodera glycines
atgcgtcttctattaatcctcccaaatttacttccaatgctcgctttaatgatcgccatgggcataattggttctgttgtgtttggaatggacccaaacataaaggagccattgcttgaaaaagtacaaaatgctgatcaggatcagcagcttaaaattgatcacattaatcagccaaaaatggaagtgatcgtcgacgatggcacaacggaggatgccgacatggccaaggcattgaaattgcgagaaactttggttttggcgcaaaatgatgacaaaatgggaatgcaaagagaacgacgaaaataa

SEQ ID NO: 79328 - DNA, 914 bp, Heterodera glycines
tgtaatccgatgatcattgtcattgcttttctaatcatttggtcccctcaagggtttctcccaacgcggcacgtctccgtcggcgagtgcggttgcggcgggtgccctcctccgcccgagcggcggtggctcgagtccaactcggcatcgagctgcgactcgccgcgccctccaccgccccctccgtgctgcggttgtcgagtcgtcttgcggctgcggtggcggcggatgtgagaattttcaaatttaaaactgagtagtgccaatctgatccggacaatttttgccattaggaaaattctcggcattttaaggtacagacggttttgtttagctttggaatttttccttttcgatttttacattttttgcataaattaaaattaattttcgattttttaaggtggcggcggttgcggcggcggtgccattaaactgacaattggctgcgactccccacgccctccgcctccccctccgtgctgcggttgcgggtgcggctgcggcggcggatgtgagttcatttggtgacaaattaagacaaactgaattaattggccatatttgcacaataattctttcaatgaaaatccaaagattacttttcattgctttcacatcgctttctcaaccaagaactctgactttgtgattttggcttttttttgggtatattcgaattcgattgaccacgacattcctcgggggtcaattccctaatttaaatttgctattattattaaggtggtggtggcggttatggtgcaaatggcggcggcggctgcggcggttccattaagctgacaattggctgcgaaggcccaaaagccccgccaccgccccctccgtgctgcggttgcgggtgcggctgcggttgcggcgggtgccctcctccccccagcggcggtggctct

SEQ ID NO: 79329 - DNA, 421 bp, Heterodera glycines
atgctatttccaatagcggtaaaaaattcttgactatctacttttacatatttctgtaatttagctatggaatctgactcatcgcctcgaaattggtctttcaagaagcaacaattcgttagaagcgtggcataacatttggggggcccttcttgaaccaaacccactgttcagcaaatttgttaagcgaatgcttaaagaatttgaacgttggcagcacattgttgccgattttcacaatgcaccggcaaatgggataaggggaaagggccttaagagaaagtccatttatctacaacaagacaacaatttgcggcaactcttcgctgaattccaacaacgagcgggtcaagacccattgcaatatttaagagcgatttcatatcacttggctcaaatttaatgcttttttattcaaaaa

SEQ ID NO: 79330 - DNA, 369 bp, Heterodera glycines
atggaagaacaaacggaaacgaagaaagggaaggcaacaaaagaagagcctatcgacagaagcgaccccgcagttgaaagaaaaaagcacgatgaacatcgaatccgatgggcaacacaacgaaaagcagcagtggatgaacttcgccaacggataaagctacgcaaaaaacaatggtcagcagcagacatcgaaaaagaaatgaaggaaactgaaaaagacgacgaagaacacaacagcgaatgcccgacttctatccaacagatggagaaaaagttctggcctactgcgatagaagatacggcacaaatctcatggcatcctggagacgcaacagagtccaaacggaattaaaagaactcctggaga

SEQ ID NO: 79331 - DNA, 336 bp, Heterodera glycines
atttatgagccacccaatttggcaaatcggtctttttaaacgcattaaagaagatttcagtcgattgcttggagtgtaagcaaaaaaacgctattaatttttcatcttcatcattttttggtttaaaaatatatttgaatacttttttatactttgaaagacttttttattaatacagaattttttgaaatttcctaaaatccgcaatcctgcgcaggatcctgcagattttaaatgcaggatttgcaggattaatcctaccggatcctgtcctgtaaaaaattttgaattccaatcctgcaacaggatccgcaaatttgaaatttccggtctcta

SEQ ID NO: 79332 - DNA, 941 bp, Heterodera glycines
atgagctccaacaatgcgttgactgaaatgatgcggcgtgagaagaaaaagttgctgggaaacgtcgacgtgcaggacccactggcctttgtcattccagcaacgttacgcgaaaaacgtggcgaagacatcgtcttgtatgacagtcgcaatgtcaggcaaggcgaaaaggacgttgtccttattttcggcagtgttaaggtacattttttggctataaaattctgtttgttattggcattcctttagactctggacattttgcgccaatgtggcacgtgcacctcgatggaactttcaaatgtgctccagcgatgtgggagcagtgcttcgtcattggtgcttcagtacatcagaggatgtgcatcagcatgtggtgtctcctgcctggaaaacagcgacgctactacgaagaagcactgaagcatcggctcaccggcaccatcaactcttacgtggccaaccactgtgagtccacgggagcagcttgttcaatattcgttgagcccgctaccgactttgacagctccttcaggcagaatccttaatcaatcatccgtttaaatttaataaaaaaattcagttccagcgtgggaggacgaaatcgttcgtgcgccacattttccaattccgctttggaacatgcactcacaggcaacatctgccctcgctcgtacaaacaacggactggaggcaactcatcttcattttatggtctttaatttattaaaaacaaattgaaaagaaacatttagaaaggcctctgtcaccacaccaccccgccctctcggacttcatttgtggggttaatgaaagcatcgacagacaggtggacgctgcccgatctgctcgccatttcattcacaagcgacacaaacgatacatcctcccagatgctgtcattatgcgaattttggcggacgcgtcgtacaacagcaatg

SEQ ID NO: 79333 - DNA, 897 bp, Heterodera glycines
atgaagcacactaaaaagatgctacttgtaccggagagtgaatatttggcgcttatcaacctgctgaaagggggcgcaggtggaacggactcacttcaagccgaaaaagcagcgatcgatgccagcatccaaaaaaatctaaatgacaataaaacgggtgcggacgtgaaaatgaaacgccactcgtggttgtacaaacagaggcatcagctcaaggacatgattgagaacaaaccacaaaaggtgattgtggaaaacgctacaggcacagcgccacaaaacattgccccgtatatgggcatacagaaaccaaacctcaacaagcttgaagaattgaacgggcaggatggcaaaaaaataaataaataaataggacgaaaatctgtgaaagcttccagaatccaaactcacaatggtgccagctttggtgaagaaacggatacgtctgcgcctgagacagatttgcggctaagcaaaaagagacaacaaaagtttcttgaacttaaaacaagcccagagcattacgataagctacaggaaatgattgaacgaaaccccgaaaagtacggagtagataaatcgtccggtgaaattttaactaacttcaaaaagccggtgattaggtccaactacattgattctttaatgtacctgacaggacagagagcagatgtgccgaaaggtcatcgattttttgttcaaaaaggcggcagtgacccggaaatggcgaaattttttcattcccaacggggagagggtgatagtaatcggagcaagcgcaaaaagttcgttcttgttaaagcaaaagctataaaaacggttggactcagccgaatggagcaaccaaataacacgaagcgtaaattctttaaaccgcttctatgggcaaagctgtag

SEQ ID NO: 79334 - DNA, 1092 bp, Heterodera glycines
atgggatatgctgtaccattatttggcttttattatcgcctcattaacctctcaaaatcacaaatgagaaaaagactcaaaattacaattgataaaaatacattattgtcaaagtaatgtgaaccacaaaaatgaatcttaattatgtggcttgaacttgctataattttgaattcaaagaaaatccaaaaaaatatattttcaaatatacctcgagtgcaatattttgcattatcacttaaataataagcatgaatattttagccgaacaaatatcttattattaaagttcgactttcgaagcatatgctttttttctggcattagttccgaatataagcatgaaaaacgcattagcacttttttattatgctttttttgccctttaaggatttttatgccttaaatacctttttggcattttgccattttgccattttggtacctttttggcgtttttcgaaaaattccattaaaagggcaataaaattgggaaatacaccccctaaaactgaaaaaatttagaaaatatacccttaagaattgaaactcaaaaattgatctccaaatttcatttttcttgataaaatttttagatttaaaatttttccttcgaaaaacattataaaatttttaaaaacatttaaatgaggaaaattaagctttttgattaagttttaggtttttgctccctaactttttaaaaattaaatgccgtttttcatacttttcttttttgagattttcgtgccttccgatttttaattctattattaatgcattttccccgatttttgctgccctttttaaatttatactaaaacatttaactggattattttgaaattacacttttcaggtgtacccgctgcgagtgccctatggtacgtggaactgatgggactgatcgaatttcttttcaatacgggcgcccaaattcgctaactgctcacgtacttttcaaatttgttggaccacaaatttgacgaagtgtttccccatgttggttcaaatgagcaccaaagggctcgtcgagtctcacctattgttaccgtattaacaacgaatcgaacatattgataccatattaaa

SEQ ID NO: 79335 - DNA, 270 bp, Heterodera glycines
atggctttatactgccgtcctttttttgtggaagttcattcttttaactcaaaaaaaagtggtgtaaaatgcagcgtccaacggtttgtatttactccgtttgaattgcttgtggcaaaaaatacaatagacagtggaccaaaccaaatggttggttctggtcggcagcattcggcgaaggtgaaaggatacgggcatactgatttgttataattatttaaattattcatattttaaataacatttattttaaggtgatatctcaattta

SEQ ID NO: 79336 - DNA, 1659 bp, Heterodera glycines
atggatcccatttttgtcggccaacagttgtgcccagcaaattgttgatgcggtcctcaaagagaaggtgatcgcgttcatgccatggtggttagggctgattgcgctgcttcacaggtggcacaattaaaatatgaaaatgatcttctattcccaaagggatttgatcagttattgagatgacctaaatttcttatcagtgtagtctttgctcccaattttcttatcacaaaatgacatgaataattaattattgagaaatattccactataaaattatatgtattttcaatttattgttataaataagcaaaatctaagttgattttttgtgatgctttttccaaaaaaaaaacttttggggaacaaggggggtccggcggtgccgataggcgccgccgggggaaaaattaagaattttgaccatatttttagcagattttcattaaaaaattcttaattttatggattttcgaaaaaattggttattttcaggtttttatgaaaaatttaacaaatttttttggaaaatttggatgagattttcgttttgacgctcttttaaaaacccaaattattaaatgattgtcaaacattatgccaatttatcaaaattcatcataaaatttaacagattctgacgattttccccaaaagcctcaaaaatcctcaaaatttctcaaaaaaccgcaaaaaagctcaaagcctcatttgaaaatttagcctcattgacctatcaaaaaaccacaaaatgaggctaaagcctcagatctgggagccctggtttaaaagccctcccccctaaattttaaaaaaaggaaaataaaccaaaaaaaaaaaaattaaaaaaagaaaaaaaaagaaaaacttaaaaaaaaataaaaatattttcatgcaattttaaaaatatcagcattttaaataaattttcaatttttaattaaatttttcgatttgtttagcattctcccgttgaacatgcaacgagtggcgcgggacttcatcaattttcgctatgaagaacccgattatcccatggcagatgatgctcaaccaaaaacaacaacaactgccgttgaccaccaaattcaaaatggcgccaccgccaacacaaaattggcggttggcgaaatgcccatatccaatggacaaacggttgaggagagagtggcagagaagcaggcagaaaatggcggtgcaaatagcttccgccgaaaaccttcgccattgttgcgcctccaaaaacgccaaatgcgggagcacttcgaatttgccggattcatttggtggctgatcattgtgccggctatggcactgacatttgtaatccaattttaatttaaattttaattagtaacactttaataaccccctaattaactagactttataaccccacctttttaacaggtggtcttttatgatcctgcgcttgttaatgtgcattggcttggccctgttggtcaatttgtgtataaacttggtaaatttggatttaatttcaattttttgattgacttggttaattatgcttaaaaatttggcaatttaattgtttgccatattattttaattaaattccttttcattgagctcaatcgactaaatacaaaatttagcaaatgctaagtcaaagtcttggctgacattatttagaga

SEQ ID NO: 79337 - DNA, 553 bp, Heterodera glycines
atgccaaaaataaataaatttgttgaacggcaggaggaggaacaaaatttgttgcgggctggacgaaacattgaagaggtgactgctccaaaaatgtatgcgcgtcatcttggcgatttgggaggaacggtaaattttatatttatatattttctatttcattagtatgctatttttattcgtatacttaaataaacataattttaaaaaaaaacttagttttttggtatataaaaaagagtttcgagtcggggaggcttctaaaattaaattttttgttaattactcaatttaattatagttccaattcgggtttattattttatgattatacttttgccatagtttatctccgtttctgtgcgcaaagcattagaataattgggaaccgtttttatgaacttaaattttctataattttttttacaaattttgtaaaaaaatttaccataattttgaaatttttgaaattttttttagatgtttcgcttcggatgaattgttgttatatttttcatgttcaaaacaacacagcgcaacggtgaaaaataaa

SEQ ID NO: 79338 - DNA, 789 bp, Heterodera glycines
atgggagacgcagccattcaacgattgacggatattttgcagcaattgttggctgcgcaacagcaaaacgcgccaccggcacagaacgcctcccaattgccaacactcccggacgtgaaatgttttgatgctagtcagcatcgtggctgcgaaattgaggattggctcaagcgatttaagttcgctctggactgtgcagcgccgaacttccaggatgagctgaaggtgaagctgttgatgacgaaattgtgtggaccgacgttcagcgaatattgtaagtctgtcttaccgagagaagtgaccgacttcgactttgtggagacttcggagaagctgaaggcattgttcagccgacctcaatcagtttggattgaccggtatgaatgtctccgctcggtcaaagacgacgacgaggattttggcaccttcatcaaccggcaaaagaagcttctgcgggatttcaacttcaagaaattgaatgaggagcaattcaactgtatggttttgctcatttctttgaaatctccgaaggatgctactctgcggtcgagaattttggccaagttggcagcggatggtgacacggtcaagtacgacaccgtggtagacgacttgaagatctacatgtcgaccatcgccgaagccaaggcactggagcagccacatgtttcgaagcatttgttggcagcaaaattgaagggccaaaagaagaggaagaactcgtaccattcgtcgaatgcgagcagcgtgtctacaggaactcggagcagcaaccgatcgcagcgctaa

SEQ ID NO: 79339 - DNA, 722 bp, Heterodera glycines
atggacagacttggattgtcggactccatcagaaatggtctgaaggacaaattccgaattgagactgccaaagcgaacggagagatccagaacaagaagaaattcttcagaaaaaatcgacgcggcaaaaagcaaaacttcttcgccgttggagcgaatgtgatcgccagcttgggagatgaaccatggcgtgccggacgtgtgatcagccagaaaagaggcctttacaacgttcagttttcggacggcacgaccggagaattcccggcaaagagtgtacagccgtacatgccggacgaagacgaaaatttgaattttcttgacggatttggactgaagagatcctcatccggtggaactgtcaggaagcaccaaatcggcagtgacggccgacgagatcaattggaagatgatctccgagcttccgactgtgaacaagaggcataagaacgccgacctgaggatgcggatgatggacggaggcctggcactttttaaggggggagatgttagggttgggacccaattggccggtacccattttgaccctttgctttattgtatttcccttttcccttggttatgtcacgcccctttttccgcccataaatacccgcgatgttgaccctccccgttcacttcattcatttgtgttatttttccttcttgttatttaaaaattcctccccatttattttgtgtctttttcccctctgctccaa

SEQ ID NO: 79340 - DNA, 1701 bp, Heterodera glycines
atgaaaaataaatggcaatgggataaagaaaaaatgaaatgtttaagaaatgaaggagatgtttttgcctttgacaatttgtgagaaaagacggcgaaacaaactttacaccgcacaatcttatggccaatcatttgaacggcaaaaaggaaacattgctgtggtgctaatggaatgcaaaaaaaaaataattaaaaaaatttaatgatatacaataatcgtattgttttacattactgtattcccccccccccctctgctgtgtttatatttatttctcgtatttaattatcactaattaagctgacaatgagttaaaaaagcgggatatttatgttgattcataaacaaaaacagcttggatgactttaatggaatggaaagccattaaagctcattcaaaaagattcaaaaaatttatcaattaaaatatatccttatttttcaatacattttttgagctgtatttcattaacaccacagcaatgtttccttatttattttaataattaaaataataaattttcattttgattagctaattaataattacattaattcaaataaacaaaaatgaatcattttttgctgcccataaatctgacaaaaattggatggaaatgggattcatttaatggaaaaaatgaataaattaacagcaattaatcggcgtcaaattcagtcaatcattcagtcattcattcattatttttccattttgttaatgggaaaagcgttccattattacaaataaataaaataaaaataatatttcaattattgtttatttaaaaattcaaagcaaaatgcgtctttatttgaacatccctttaattttgggccacatttttgcgttgaatggcatccaatcttctgcagatgagcagataaccaaaccgtaaacaaaaagcattttaataattttggaatttaatttttcaatttttaattagcactcgactgacgggccacggcacaaaagtgacgaccatccaaattcaggactttgaccaatgctttcctcgtgatgcaaccaaaacttttgggctcgaatttcgtttgccacgagacgggggctgttgtgaagacgggtgaactattcaaatttatgttgttttaataatgtttggcgaaatgtcagggatttttataaaaatgaaagccgtagagaccggtaaagacaggcattaattattcagtaattaagtaaatttcgtactaaaattattgtcaacttcaccatcaaaattcgacaattaattaattttcagacccttttgaattttcaaaaaatttagcttgggttcaaagtttttcaaaatgttggcaattatcaaaaaaattttattttaattttaatagcaaatttttaataaataatttcagtctaatcatttgctacccgagcataatggccaccggagttttggacaacgatcattcagttgatactgtagacctaagcaacgaaatgttcaacattgacaacatcgataatgtgaaagaattttttggcattttaaattaaaaaaaattttttaaatttttttagaatccgattgccgaagaatgccaaaacagagccaaaaagcttggaaattcaatggcaaaactcacttggcatggcattagcataaaacttaacagacaaagtgctgggataagcacggcaattttggacacatcattctgcgagaaaag

SEQ ID NO: 79341 - DNA, 701 bp, Heterodera glycines
atgccaatccacatttcggacgtgaaccaagtgattaccatccgactgttaactgataaaatgaaaaatgacaattcgacgaataacacaatcgcgctgaaactttggcacacgaatcaaggaaaggaaggtgggtagaaaattgaaaatttttaggtaaaaccgaatttttcaagaaattaataagaatttttaatttttttttttttgcgatctccttattaaccttttttatcctaccattaggttgaagtttattttattaaaatctttttgaaagcccctgaaacaaagccatgttgaccaaaaaagacctaaatggtcgccctgttttttgcactaattttttcattaaattcttaatatctgctacatataaaccaatcaaaaatttaaaaaattgaaatgtaaaattaatttaaaagttagttttaaatttaaaaaaaagcaattttgcagatatcgaaatgcttagcattcacttttttcttgccaacaattccgtggaagtggtgattggaactgaaacacatttttgcgattacgaattttctaacgaaatattcgaaatgaatctgcaaatttggataaagcagtacggttacaaaattttgtttaaaaacaaacgattgggcaaaagggaatattatcccgcaaaatggtgggaaggattgaaattcaaggaccacaacaaattgacg

SEQ ID NO: 79342 - DNA, 973 bp, Heterodera glycines
atgccgccggatgcatttgacgatggcagcatcaggacggcaccgacccctcgggtgcaacaaatggaagagttggagagagaaatagccggaagcattgtgccggaactgattgtgccacaagtgatcgtaggagggaaacggaaagaggaaaaaggggaggacgaagaggaaaagggagacggaaggcaaaaaggaaatggaaaacggaaagaggaaggaggaaaagggaaagaagaaaaaggggacaaagaagagcaaaaaggagaaggaggggaaaaagaaaacggaaaagggaaagaggaagaaggaaatggcagcaaaacatcggcatttttgcaagagaaaaccgacgaacacaacgccaatggcaatgataaggtattatcgtgttagaagaatgaatctgaacagaaattggttaagggaacaacaaattccaaggcgaaaaacgaaattcgaattgagccaattgggacaaaaggacggacaaatgccaaggcaaagcctacggaaattcccgcggaggaggcagaagagggccgagaagacgagcagaggcaacagcaagccgaagaagagccggaacagcacgagccggcgtcgtcgagtgccgtgccgccatctccgccacaaaggcaacggccgacgacccccgaggcgaagagaacggcacggccatcgacagaaatggcaacaacggaggaacagagggaaacaccaaaagggaaaattgacaaagaaaggccaacaactcaaggaacaacaccagcagaagtgagccgaacattcattctgatcacgaacagcacgaacaaagccaattcgccgtccccgtcaattaaacggacgaaggcaacgacaacggcaccgaaagtgaagccgaataaccccgacggggacgagccaatgctaatggaatttgacaacggcaacagcaacattctggcggagagtgccgtgaacgggaaca

SEQ ID NO: 79343 - DNA, 480 bp, Heterodera glycines
agttctgttcaattgcatttccctttttctttgccctctctttcctttcccttcactcactgttcccgttcacggcactctccgccagaatgttgctgttgccgttgtcaaattccattagcattggctcgtccccgtcggggttattcggcttcactttcggtgccgttgtcgttgccttcgtccgtttaattgacggggacggcgaattggctttgttcgtgctgttcgtgatcagaatgaatgttcggctcacttctgctggtgttgttccttgagttgttggcctttctttgtcaattttcccttttggtgtttccctctgttcctccgttgttgccatttctgtcgatggccgtgccgttctcttcgcctcgggggtcgtcggccgttgcctttgtggcggagatggcggcacggcactcgacgacgccggctcgtgctgttccggctcttcttcggcttgctgttgcctctgct

SEQ ID NO: 79344 - DNA, 2109 bp, Heterodera glycines
atggacggatttgaggagaaaaacagaagagaagagatggtgaaaaaggaggacaaaaagaagaaaaagcaacttttagtgccattcattgttattttattccaaattccaaccgaacattttgcttaaaggacgcaaatgcctcagtttcataattttcatttttgaaaccatccattcacttttgtatgtaaatgaattacaatatttttgaataaatttataaattattaataacttttaattattttatttttataattttgattatatttttatgggggtaaaaactttaaataataataaattgcataattttttttttctttaggggtttaaaatctgaatttgtggggaacacccatcaatcagtaatttaccaacaaaaaagtatatcctatataataaagttgagtgtctgtatgtatccgccttgctttgaattggcgtggcgttttgtaattgttttgcgttaaaaaatgatttgaaaatgaaaatgtttttgttttgttttgcgttaaaaaagcatttgaaaaatggaaatgtttggttttgatttttcaatttgttctgattaattaatgcatttgcattgtattttatgtctatgattatagttagtctattattgtattttagtctttgtctattttttatgatttagccaaaaatgaattgtttacttaatttgaattttctacaggtttgatatattgactttctctctgccgcttcggcattttttttttcatcaacggccggtcggccatccatgtcttacccaatacttttgatgtgtgattttagttgaagtttgttttgtttggtttttatgcaaaattatgtttataaaatttagatatgacatgaagaactaaagttttatgatcgctcatggttttgtattcgttgtgaattcattcacaagtttgaaatctgccgtggccatcattcaacagcttgcgattgagtttaagtgcctcatcaaagtttattgggattaatttgtttcgaattatattttgctttgttatgttaattattatgtaaaatttagaaatgagaaccatcatattgaagaaatgctgttggcttacaattggttgtgatttcatctctgaagtgttgaacctgtcggtcggccactcaactttttgctcactttcgagaaattcactacttcaactttggcggccccttttgtaagtgggttgggaagagttgtggtaaatttgccaaatagccaaatatctgataaaacattagtgtttgttctgtgattttagtgtgacacaataatgtgtcttatgtctgataaaacaatagtgttttttctgtgactttagtgtgacccaataatgtgtgtcatgcttttgataaaacattagtgtttgttctatgaatttagtgtgacacaataatgtgtcttatgtcttttgataaaacattggtggtttgttctgtgattttagtgtgacacaataatgtgtcttatgtttttgataaaacaatagtgtttattctatgaatttagtgtgacacaataatgtgtcttatgtctttgataaaacaatagtgtttgttctgtgattttagtgtgacacaataatatgtgtcatgtttttgataaacattagtgtttattctatgaatttagtgtgacacaataatgtgtcttatgtctttgataaaacaatagtgtttgttctgtgactttagtgtgacacaataatgtgtgtcatttttttgataaacattagagtttgttctatgacttcattatgaaatttatttgcaatatgttaaaaattagaccaatataattattaagcaatgaagtgtgcactgggcttaccattggatctcttcaaaaaaatcatggatttgttagtgataaactgatcgtaaatcgtaaaaactttaaataaataataaatttaatgttatgaattcttcatttgattttcatttcaatacctacaactttttgttttattttaaataattaattttcagttatttaatattatggcttcaataaacgatttagattatgttcgagattatgattatgtttatgatttagattttgatgaagttgagaaatgt

SEQ ID NO: 79345 - DNA, 798 bp, Heterodera glycines
atgcttctctttgcctcttcgggccaacggagtgcgccacttttggccaaatttgacgcgctttttctccaatcgcttcgacttatccttgacgcgtcaccgacaattgggtgtcatgtgaatgggcttttcctcaggtggcaaatcgacacggccaatggcaaaagaaagtggaggaaggaattggatgcggaagcggaggagggggcgaagtgggaggaggagaagccgtgggatgtactcgacttaccaatcattggaaaattggaggtgggcaccagggactggacgctcccaggagttcggcttgggggggggggtaaccccacttttttagcttgcttttcgcaccactttttaacaaaaatatgtggtgatcaagggggtccgcggtgccgataggtgctgctaggagggaaaatatttacccgtgcctagaaggctttttgctgccaacctctaaataaatgtgtcataaatttcagatttggattaatgaccaaacgtccagaaaactgctgcaaaagtgtctgatcagtgccgtcaacaatttgatcaaaacagtggaaatcccttttaatgcgacgaaacaattcgccttccgcgtccgagtttatggcgatgaatattttgacaacaaatataccgcaagtctgaagatgtgcagcatcaaaacattcaaagcgcttaacctctaaattaatgaagaaaacattttgaacatttcgttatcattttcatattgaatttgtaattttattttagtaataatattattggctttgaatcataaataaa

SEQ ID NO: 79346 - DNA, 438 bp, Heterodera glycines
atgaataagagaaatgaatggaatggaatggaatggaatggaatggaatggaatggaatggaatggaatggaatggaatggaatggaatggaatggaatggaatggaatggaatggaatggaatggaatggaatggaatggaatggaatggaatggaatggaatggaatggaatggaatggaatggaatggaatggaatggaatggaatggaatggaatggaatggaatggaatggaatggaatggaatggaatggaatggaatggaatggaatggaatggaatggaatggaatggaatggaatggaatggaatggaatggaatggaatggaatggaatggaatggaatggaatggaatggaatggaatggaatggaatggaatggaatggaatggaatggaatggaatggaatggaatggaatggaatggaatggaa

SEQ ID NO: 79347 - DNA, 613 bp, Heterodera glycines
ttggtctgccgtgtttcttctattggtcgattgtgccaccattcttttttggttctttttggacaatgcaaaaaaacgacgacgcccacacaaaaaagaaatgtaaatacaaaaaacaaaaatttggaaattgcaaaaaaaaatcttcatttttcagctttatctgcggcgattgttggcttttggtgttcgattttcttccgccttctcagctcggactcgaaattgcactggtcagccgccgctttgactgcatcgtcgatgaacacttcaagacacgcaaatggacattgggcgaaatgcgaatttcccacaaaattggagagaatggcaccaagcaaatgcaaattgtcaattccgatggaaaaccattgccaatcccgcaaaatccgttgccgaacaaagtcatcggattccgaggcattacgaacgagtaaaaattaattagattaaaattttcgtctacatttctgcttttcagttacatcgacctcaatgtcatcgcatttctccgccgttttcgtcgtattttggccacttgtgcaatcagcttgtacattagcactgaaaatgttcgcattttggagtgtgctttgctcaacatttggccaat

SEQ ID NO: 79348 - DNA, 154 bp, Heterodera glycines
atgtccgtctgtccgttgtgtgattcgccagtgccctttgggttggccatgctcgccccgtgtcaccacgttgggcatgccaattgcatcactaattttgtccgccacaatggcttctgctgggtttccaactgtgcaatgcctgtgctggaaa

SEQ ID NO: 79349 - DNA, 430 bp, Heterodera glycines
atgccaatgatttcagcatattgcctcctcccaaatgccgatgattgcattttaatttttcatcgaaggtctgctcgtccgtccgctccaacgcttcgtctctttgtctttgtactgctccaatttgtcgtccgacccttggtcattcattcaatgctttttcctcccttcgttttgctattggctcccattccattggctttttccatttggcccatcgttttggctgaacccgtttttgcgttggaccatttgtcactgcaaaaccgtgccaccgatgaaaagcattcgtccgcttccacctccccttcactgttatcgtctgtcgcgttgacaaagtgtcaaagcgactatttgtccgcactgatccatcgctgcatgataagaggagtgcccacagcgatggaggggcgcatttgctttgcggacg

SEQ ID NO: 79350 - DNA, 1109 bp, Heterodera glycines
atgaaccgtaaaataactgcttgtggttttctttatgttgcaccgataaacttgggtaatttatcatgtaaaaatcccgatgatttttatttttgaagatttttcacaaccgtcacatgagaaaaagcgttggcaacgtcgctggttcacattgtacgacgatggcgaactcagttatgggttggactcaaatgtaagagaaaattggaccaattggcattcacccgtgggccatttcagtccgacactgtgccgcaattgaaaatggacatgaacaaatgcatcagagtatgcgaggcagatgcgatcacaaaccatgcccacagcattctgatcgcgttcaaaaatgatcggatggacggcttaggcgacggacttttgaagaaggtcaattggccatcggaaattgaatcggttgcgaagacggacgaacaccgacagcacccggttgtgtgctatgtgaaggccgactcaactgacgaaattcgatggtttgtttttggatgtgcataaataaatattctttaaataaaatttgaatatttggcttaaaaatgagcaaattgttttcaaaaggatgggtgtttcccatcaatttctaacaaattattttttatataaaattcattttttaggtggcaaaatttgttacaattttacgcgaaacaaaatgccattcatttgacgccaactcggcacttacaaccggacgaatattttattgaggatgactttcccccggatgctcaacaaaaggagtgtactattcaggtgagtgaatggcattttcgctcaaactttatgttcaccaaaagaagagggttttgtttttgttcgccctcatttaaaatgcgctgtttccttgacaatttttgagtaaaacaaaaaaatatccattttattgctttttttaggggtttttcgttaaatacagccaaaaacatgggtacccccaatgtttaaccgcgttagtgtctaatgggttttgatgggttcccttttttgtcattgggtaaacaatcgtagggacagcagggggaggggtgctccctcactcggagtcgaattctgtcgtgagaatggtctaattcggattttactaaaataaa

SEQ ID NO: 79351 - DNA, 1173 bp, Heterodera glycines
atgaaaaactctcattttgttaactgtttttggctcgttttgatggtttatatcgctaaaacgaatggacaaaacgctgaagcgaccactgaagtgaattcggagcagaatggaacggcaaattttgacaatggcaatggcaatttaaaagaaaatgacaacggaacatccacacaaaagccatctctgagaaggaagccgctaatggaagaggccgagggcggcgtggcggacgaggaaattgagcgattggaggaggaggagaagcagatggagaaggacaaagctgaactgcaggaagagaaggaggaggagggaggggaggaggagaagcaacggaaagacgaggaagatgaggaggagaagcaacaggaaaacgacgaagaatcggaagcgcaaggggcggacgacgcagagcaaagcatgaaagcaaagctctttaaagaaaaggaattggcggaagaaatggaattgagtttggctgattctgaggaggaggcgaagcgagcgaagaagcaggggaagaaacaccacgggaagggcggcgggggccatcgccacaaacaccgaaacggaagggacggaccaacggcgttcattttgccgtcatttttccttcagcgtttgttcagccgcggcgcttttgggccgtcgggcgctccctttgacggttcatcatttccaatgattcttccgattataattaataataacatccgtggggggccgccggaggaagaacatcagctgatgagcagcagagccaatcaccacaatgggccaatgttccaagcggcgcatcactttacggcgccctttccgcccgacttcttcgcgcagcgtcagtcgcccctcggcaccccaattggcggacaacgcccgtcccaccaaaatgccaatgccaatttccccccgacttcgtttggctctctccgagcccaacaatcgcaaggagttcctcaaatgcacaaccaacagaacaacgcctttggcccgtctgccagtgatccgtttccccctttccttcactcaatgcaacaacaacagcagccgattttcccatttggctcttcctcttttgacgggggccgtggaccatcgtcgaccgaaactcagcaagaaaaccaattccaacagaagggccaaacaaaattcagtgaagcgagtgatagc

SEQ ID NO: 79352 - DNA, 844 bp, Heterodera glycines
caataaattcccccaattcagccaacatccacaacgagtttggcatttgcggatggattctgaccattctgtcgtacgttttgatcatcctcactttgcccatctccgcttgtatgtccatcaaagtcgtccaggagtacgaaagggccgtcatcttcagattggtcagttggtcttcgaatcccttcaaatgcaaacatttgaccccccaggggcgtctcctccccggcggcgcgaaaggacccggttagatttgattgtcccgaaattacccgtatttctgagcaggcattttcttcattgtgccttgcatcgactcctatcggaaggtattcgccgttccgtccgtccctccgtcgttttcctccattgctccccccccccccaatttcaggtcgatcttcgcgtcctttcttttgaagtcagtccccctcctccttcgtctttatttgccattttaggttcctccccaggaaatcctttccaaggactccgtaagtttcgcctccgtccattggctttcgcttgcctttctcaccccccccctttcggttaggttaccgttgcggtggatgccgtcgtttattttcggtttgtcacctccctcaaaatggccataattactcactcagaatttcaaatgccaccatttccgtcaccaatgtcgaggatgcgtcccgctccacaaaactgcttgctcagacgacgctgcgcaatattctcgggacgaaaacattggcggaaatgctcagcgacagagaggcgatttctcttcaaatgcaagtgaggagcaataataataataataattgtcatcggttattgtcattgtcaaaaacatagg

SEQ ID NO: 79353 - DNA, 560 bp, Heterodera glycines
atggcgatgaagaagcgattgacgcgcatcaaaagcgaatggaaagtgagcggggcggacgtggtcacggtggagaagcggttgggctgcgatttggaggagaaggtgggggggcacagaaagatctggcaaaatttaatttattattaaattaaaattgcgctatttttgcacattttatgccactttttaagttgaaagaaatgtgcgaaccgtccgaaagcgttgaggacagtgtgctgctggtgctggacggcgaaatgtactacgacgtggagtttgacgacgacaagtgggcccgagtgttgttgcgccgcggggacctcattgccgtgccaaagggcacttactaccgtacaacgctgacgccacaggtgggggaagagtaccgtaattcatcgtcagccactaattgagggaaattgcataattaatacattccattctaatgaggcgacaaattaatctaatgttgcagaatttcgtgaaactccaacgcttcaacaaacaacaaaacccaaaaccaatcgcatgaaacagaagtggacagaaggaataaa

SEQ ID NO: 79354 - DNA, 2851 bp, Heterodera glycines
atggacactttgtgggcaccgccacaacagccaacgctagaaatgcattcgatgtgccacaacactagcaacaacaacaacaatggcacagtatttgctgattattacggaaattgcgactcccattcctacggtagttcctaccgtaaccaacctcagcaacagcagcacgagttgactgtgctgtcgcccgccaatgacagttatgaaacgatggcggtgccgcagtcaatgattggcaaaaattcagcgacggattacggtataaaaattataaaataattattttttgtaattaaaatggaaataacttaaatatgacaaactatcgccacatgttcgatcagtaatcgcaccaaatggcctttcgtgcactgaacaacaacaccttgagccccagttttcgcagctttcgcctccgatgaaattggcacgccccgggccaattgggcgtctcgtggacacacaatgcctaggcgcgccgcagctaaaggagacccggcgccaaattcgaaaagcgcagccgatggcatttggaacaattgcaatggaaatgggcggcgaagcgatggcacaacaaacacaacgacaaatgtcgctaatgaacaacagcggaaacatttgcgaacagtcgccgagcgaatgccaattggtggtgttgagacaggtgagaaagaaattggggtggaaaagcgatggaaatttaaaaatttttaaaattcattttcatcgcttattagccggaggaacaacaccgtgcgcggtacgcgtcggagggcagtcgcggcgcgatcaaagaccgaagcgggacttccttttgcaccattcaggtcccgagaggggagtggaaaatttttggaaaaacatttttctcgattttacgcttcgttttttaccgggttatcggtcacacattggcatatctttttgatagcaatttaaataagaaatgggcaaaatgttaggaggccacgggtggaaattgatctcactcatccgccaaatccgtgagcagctctaccattgagctaccgaggcacattcgcccttttttgatcttatcaatcccagctttccgtttttaattgccctgacagcttcttcggcgttcagggaattgtcgggaagtcccgactttcaaaactccgccatgattggatttcgtctcgttgttgttttttatctgcaaatgctttcccctgcctttttcagctgttgggccattttcggcccactcacgtcgaactttttgccgcccaacggacggacggaaacacttttgttgagcacaatctgtacagattggtgcccgtgtcgggcaagtccgccacggtaacagaacaaataaaaattattccaaattaaaatgcacaaattaaatttttttttttttggacaactccgtgccgtcgcgtagtcactgagcacggcacagaacgattggtggggagagagaggaaaaaagggcaaatgccaaaatgaatttttgattttgcaggaagtcatgctaagacctgagaacggaatggtcgttgtgtaagtgaaacagcaaaaaccgtaataatattcccccggttgcttttccaaaaaacggccaatgaatcgccaagtttcttatttgatttttaaatgtataattgaaattaaaaaaaggaatcttttccgattttgtaatcgcatgagtaattttcataacaaccggtggaaatgggccgtggaatggactaatttgtaattgatgctcgagagtctcgaatattcatttgagcatcacttttgcgagatgtcttttctcgatccaaaaaacaaatggaaaatccctgccagtagaagtgtcccactcatttgtcagattggactgtgtgggcattatgaaaatatgcgcctacggagcagcagccaacagcaaaaacaacagcagcagcaagagcaaaagcagcgccaattccaattcagtgccgaactgctcgagaaacgcggcgaccgccgcaaacggtcggcacagacggcgcacaaagggacggacgacgaacgaagaaaaagcgaaaggaggcggcgacgaagaaacaatgcccatgagggaggagcagcaaaagcggacggagcaacgaaggtgccaaaacgacgtgcacattgtggcacaggcgcaactgccggaggggcgagtgctgcggacgcaaacggaagccatccgatgcggtcggaggggggggggagaaatgccaacaaatttatttatttatttttgccatttaattggagtgaaatttggaatggaattggcaaatccgacgagagtcgggggaattgagtggattttttggtttttatgaaagtcgattagagaatttaaagtgagtggtgttcagtaggcatctaaaaaatacaaaaatttccgatgttttatttttaaatttttgcaataaattggcattttatattcttttgatccccacaattgcagtgcaacagctcggctgtccggacgtgctgaaaatgtcgctgctcgaggcttcgtccagcggaggccaacaattatttatcattggccgaaatttcaaccccaaaaatttgcgggtgctctttcgcgagtacaacaacggtgcgcgacgggttttattgtgatgtctaaattttgcacaatttccaaatttatgtgaacaatttttcaacgaataattataggggaaaaataaattaacggcaaaattacgtaattactaattaggcatttaattaatgcttttcagacggattgctgggatggagtgcggaagcaaagctcgaccaacgacttgtgcatcaggcatttcatccgtttaaatacaatttagtgcttaatttcgccaaa

SEQ ID NO: 79355 - DNA, 750 bp, Heterodera glycines
tccgcttctggcgtcacttcgatggttagcagctgcaattcgcgccgcgaattggtgccccaatcgccactgatcaaagtcaaagctgacggatcaccgcaatcgaaccagctgccaacggcagaagtgatcagcgacgaggagggcactattgcaaattcattttgtgcatttgccagggcacaagtcgaaaattcaaaaaaaaaaactgagttcttgggtaatttcagcagaaattagcggagcacagggcacagctcgaccgcaaattggacgtggtcagttgccatcgaatggctgtcgaaatggtcagtgaccagcagcagaagagcagagaatatttaaaagaaaaattgcattttgagaatcataatttggcaacaatgcgaattaaactcgacgttagcgatgacaaaacttattgtaaaaagtcactcgttttagattgaccaactgcttgacagtttggaacgaaaatgccattcaccgcaaagtgacgaagaaaagggagcggcaaaggaaggcaaaagcgaattgacaattgctggtgccgaaaataaacaaataattttgccatataattaattaatcactctaatttgcccaattaaaagtaaaagtgaatctcatttgcccatttcagaggttcaaaaggacttcttccccttcatttacgcaaaggctgaacagttattggttgaccggcgaatggcaaattcattcacgcgaaaattatccgacaaaaagtga

SEQ ID NO: 79356 - DNA, 1243 bp, Heterodera glycines
atgcgcaagcagcgctgcaagttggtggagacgttccgcgccgacctggacgcggatgacatcacggcgaaggcgctggcggagcgcgagttggacccgcgcaagcttttcgagcaggagatgcacaagcacgacgcgcagcgcgagctcatcgagcagaacctgcgcgcgcaggacaacatccttcgtgcgctgactgacgcgaacgcggattttgcagactttcggcgccaaattttggatgccaatgaaaagtacggacgcggtgccatggaaaacagatgccccaaagggtcggcgggaaacggcatttttaattgccatccaagagagagaaaaaatggaatgctatggccttggcaatcttgaggaaaaaccatgacaatttttggcattttcaacaccactaatcgctttggctacctagtcagtgaactcaaaattcctctcaaactgatcaaaaaattatccaatgccgaggctttgaccccaagattcaatacgagtcttgagaacacaagaaatctgccagaatcgtgcccaagactcgataagcattcacattaaaattcagtttttgcctcatttttcaattcttttttgcccaggcgcgccctgcacgcgctgacgttggtcaccgcctaccaagtgttcacggacattgtgcagaagagcgggcaggcggccgacttctacacgcagctgcacaaactgttggctgcgctggagcggggcattgtcaacattgaagcggccaacgcggagtttgcgcgtgaggagcagcgcaagcggcaggcggaggaggagcggcacagacgcgagacggaggcgcgcgaggcacgccgacggcaggaggaggcggcgcgcgaagcggcacgcgcggtcaatgaattccgctttgggtaacgaccgcgcacgcacccggctatgctgctgttactgctccatttccatgcgtgacggagcaattcttaccattttttcacaaatatgatacataaagatacaatatttaatttattacagtatattaccgtaagattggaatatcaaattaatcctctctcttatcactgtcattccggcactttgggggcacttaacggcttaatccacataaagtttatgtgtgcttcttgcacctgttgctgggatttgtttgtgtcaccttctcgaaatagcgaacgccgccatttcacccgccttaggcatttagcggtgtcaaaagtcggctaaaaataaa

SEQ ID NO: 79357 - DNA, 2424 bp, Heterodera glycines
  unsure (1)..(2424): unsure at all n locations
ccgatcgtcttgacctgttgagccgtctgaaccaaaaagcggttgaagggcagccgagaattgaagcggtcgaagccgctggcaaacagttggacgaagcgacggcacagaccgatgcccatcagcgattacaggtggtccccaaaaagtgtgccgccagaggcattttttggggacaaaaatggcttagattggcaaaaaatatacacattcttggtaattaaacaattttaaaatttggatatatggttgagtttaacaaaggaataagggccacatggacggacaaagtgactcaaaaattgccggattaccctaatctaaaaatgtcattgatctgaatctggcattggcagcaaaaattgctcgaatttttgagcccgagctggcaggaaaggcgtttcagtgatacagtatttttcanagtagagatacgataactgattaatgaatcttcagtttttaagcattaattgatatgagaagaaaattattgtatacttttctcttcattttatgaatttccatcattttcacaaaattttattaattttttatgctacagtatttttctttaaaaattcgctgtatcgctaccgtatttttcaaatgatccgtttccggtagccttttttttcttggacctttttatccattttctcctgagcatgactgtaacttggatgacgaccaaagatctttcatatgatttccgattgggcttaaggccgaacacgctgatcacctggcccaagtgcgcaaccgctttcgcacactaagcgaccggttgcgtgacagtgtggacggtgcgcgagcggagatcacgcgtcgcgaggggctggcacgcgggctccagcagatggaagaatggctgaacgtgcaggaacgcaagctggcacgcccgcgcgcaatcccgctgagcgcgggcaaactgagcgaattggtgagaggcctaaacaaaatgccgcatttgaagatctacttgcacttaagcttccggtctctttcagattttcaggttcaaaaaatgcacaaaaattgatcagtttgacaaaatgtgctattaacaaaggcaacaagcaaaagcgttaaaacacaaaaaaacactgtcaaaaaaagtcaattttggcattttttggttataattttttttttgagcgtgctgatagacgccgtcaataatttttgcaaattttaacgaaatttatttttacaaatttgctagaaatttcaagaaattttgtcgaaaattttttgttagtttgagctgatctgttcatgacagattgatctgaggtcgattgagctgttctggtttcgaatttactttatttaatcattatcaatgattagtcttagcattgggactttttcagaaatacgaagaccaattggagcgaggcgagttggacaatcgcgcaaaaacattggccgagttgggcgaactgttgggcacagaacggcacggcccccacgaacagttggggcgtcattttggcactgtcaccgaccgtttttggcgggttgaagcaatggcacgtgcacagagtgacaacctacgggatgcggtaagcatttttcgaaaaatatggaatttcgaaattattttttgaattttatacaggttgaagcctttgaacagtggcaacatgccgacgaagcgttggccgagcgaatggcggcactaagcgacgcgatagcccaactgagcgccgcggatgttgacggcgctgagcagttgggcgccgaattgaactcggtggaaaggcgcgaatgggccaagttggacgagttggccaatcagatagttcaaatgccgaatgtggaacagactgatcacctgactagaaaggtgaacaaactaagatggcgtaccattatcaaacaaataaaaagattacggtagagtgaaaatgatcaaatgaatagatatacgataagagggatataccagcagaaaaatgaagtaataagggtgaaactgatcagaatactgattggataaaattggtcaaaggtaataaataatatgagaaaatgaaaagatttgcttgtgctccccctctccgcatctttattaaaaatttttaaatagggcgttaaaaaatttttttaagctgatcaaaaaacatgattcatagacaaagtaatatttggagcagatcaacaccagaattgacagaaagtggtcattttttgtgattgattgaatgagaatgattaaattttgcttggatactgctgacaattatgatatttaacatggtataaatttaaacatcgttttagatgcgttccaatgagtcccaattggcccgaattcgtcgagatttggctgccaaactcgagagtggcgagaagaccagcgggctgcttcgcaaatttcgagaaaatgcacaaaaaattgagactgatctggcagag

SEQ ID NO: 79358 - DNA, 964 bp, Heterodera glycines
atgacacatgtgtttttcgatcccgagtcggtcgattggtcatcttttatcactccccaacatggaagaggacagaaacaatattttgtcggaagcaagtatcaacggggattcgggttccttggtaatgtggcacgtttcttgacccctattgcgaggaatattgcctcgagtgcaggacatgaggggctcgccgctgggcagagagttctgagtgacatcgctcagggccgtgatttaggggatgccgtcagggaacattcaagacaggggttgactaaccttaccgacaagttacaacaatgtgggaaaggaaaaagggctctgatcactaataagaatcggaaacgggtatttgatcagttaagtttcatttaaaggtataaatagaataaataacacaaataattaaaaaatgtcaactcttaagaaaatagacaaggcgagtgaggatggtctcgaggggggcctttcgctgtttgatatccccccgacgaacgttgcaattaataaatccagtattagggaattactccctctttcagcaataaatcaatctgggccatatatctttagacttttttcagataatcagttttgcgatctcaataaaacctttctctatctgtcaacttcaatagagagaaaagaaaaaagcaattggattccgattaccaaggacagtgaagctgaccaacacgtcggtgtcattcaaaattttgggcacagctttgtcaaaaccttaaaggtgtcaatttcaggtgttgagtcttatgattccggcatttactatgcgtttagggcatatatgatgaatgaattgggattttcagaagatgtcaaaaagggtctctgtgaagcgtcctgctattatgtcgacgatgtcgaccaggatgattatacaaacagtggctttaaaaacagagcgtcacgttttgctgatagtgcaaaatgtgaaacaatg

SEQ ID NO: 79359 - DNA, 489 bp, Heterodera glycines
caataaaggattccggagcaccgttgtgttaaaaaataaatgcaaaattgaccacacgcatctgagaattgatgttggacgatgcggtcgttaatgagaattcgttcaaataggttaagatatgaacttaaatcttcattgggataatcgcccaatgaatcaaaatattctatttctgttggcgaatttacaaaacaagcgacccagtgttcacctattgtgcccgcccggtcagtattcgccacaaaacagtacggaaaatgcctgtccttcaattttggcatcttgtcggaagcaaaaaccccgataaaatattttcgggttgtcggatgtttggatagaaatatttcaatctcatgagaattcatcatatgcttccgtcgctactgagcacacgattagcattaatagatagaattgaatcaaattcccccagaactatcatctcatacccgccgtcctttataggctcattaaactgcaccttga

SEQ ID NO: 79360 - DNA, 1108 bp, Heterodera glycines
atgctcaatcgaaggtctgcgatgtgtgcgcttactttgggagaaaacatttttgtgtgcggtggatacgacggaaaccacgcattgtgcgcatttcgaattggcttgtagagaatacatttccgttccgtttcaatttcagggattccgttgagtcatttgacatccgaaagaaccaatggttcgtccgtccgccgatgctaaccaaacgatgtgctgcggcaacggctgtcctcaaaggacagatttacggtgagcattttcaaatctttttttctaagtcagcagggacgaacccaagcttttgattttgtttgtatggggcaacgaccgtaaaaaaaacatgggtcgattgattttttgggtttgctgccttatgctcattccttgctgttcactatgcatacgctatctctgtttaagtcattggtgggcataatggtgtttcaattttcgacaccgtggagaggttcgaccccatctcgcagcgatgggaaagagttgcgcccatgcaacagccgagatgtgagctgatgacataaattcggacaaaaaataattgtcacttaatcgtaggtcgtctggcagccacaacataccaaaacaaaatttatgcggttggcgggtaaagaaaaaaacaacattaaataacagttgctttcaattagggctatttaattctaatccgattccggaaaagtgcttttgaaatttgttgttagtcagttttttgttcagctattacaacaccgaattcatgtcgacagcggaagtgtacgatccggagatggtgaattgaaattgttcatttgtctttgtttcacattatgtgctttatcgtaggatcaatggtcgtacattgcgccgatgggtgtgtgcagagctcgtgtttcattagtgaccaatggcgatttgctgcaagcaattggtggatacgacggagaggtggcaaatcatagactattagatatagtaacttaatataacatgaacatgatgaaatattctaaatgcatcttcactgtttttagaacaatttgagctctatggaaatttattacccgtcgcaaaacaaatgggaaaaggcagcgccaatgcgaatccatga

SEQ ID NO: 79361 - DNA, 911 bp, Heterodera glycines
  unsure (1)..(911): unsure at all n locations
gaaacagaatatgacttctatgcttgacatttcaatcgcttttgaagaccaagaggactctgatgttaatttggtggactgttcccgcgaacttgcaatttcagctcatggaaattttaacgaattgcgcttatccggcaaaatgtgtgacattaaaattgaaactgaaggcatcaaattcaaagcgcacaaagtcattttggcagcaacagtgccgtatttcatgaaaatgttcggctcggaaatggtcgaagcgcattccgattcagtccaaatgaatagtatgttgagagagactttcaaagcaaaattaattgactataatgccgttttttcagccattgacgcggaaataatgggattgattttggattttatttacactggtcggttgttttgatacccaataatatttctcatccaaattaaggtcgtataaaatttacctcaagaaacatggaaagactgcttaaggccgcagtaagttagcaacatttgcattatttgtctgacaatgtgtcactttaggattatttgcaactctccgtcctctccaatcgctgctccgaaattctaaaagcgcatatcactgaagaaaatgttttttctatccgaaagtttgccgtgctttacaatgcccaacagggttagttcaatcggtacaaattgtattgtaatcactcgtctctttagctgtgctcgacactgaaagttttattcagcgttttttcgagtcggtgtccaagtcggaagagtttctccaattggatttccaaacactcgtccaaaccctcgactgggacaatttgcatgtcggctcggaggagtgcgtgttcgaggccctcgcccgttggttggattttgacccaatgaatcgccacacttttgctccacggtcccacgtgcattan

SEQ ID NO: 79362 - DNA, 1779 bp, Heterodera glycines
atgaagcaacaactcgattcaactgatgcaaagtcaacgtgtgcttttgatgagttgatggcaggtgtccgcagaaggaacggagaaagcattgacgatttggcggaccgagtctcatcgttagtgcgaagggcctaccccgggctcggcgaacattcatatgatgattattcgatccgacacctcatccgctcactcaaaaatccggatttggcactcactaaactcgacatgatctttgacgaattcgtggccatggcagctcgcgcggagatcacacaaaaatccgcaaaagcagccgagcaaaaaaacacaaattttcgccaaaattttgatcagcgtcggcaaataaattttcgaccaccgaatcagcccgaacatttttcaagacgaaccaacgaaaacgaaagacagaatacatcttttggcgttgtcaaatgctacaattgcggccagcaagggcatatttctcgcaattgtcatctcccacggcgcgatcaatctaattttgccccacaacaatacaattcatcggcaagaggtgccaaccgaacccccattgcaaatgattacaggaacccgccacaaagttttccgaaccgtacccaacaatcgcgtaactttttgcgccaaaactttttggtagaacaacctgatgattctcctgcagtgtccaattcaaatgtcttggttggtgcaattagcactgcaagtgaagaagtgtccaagttgtttgaccaatggacggaaaataagaattgtagaaacgcggaaaagaacggcagtgctgttggaaaaattatgttggtaaaggtctcaattttagagcaaaaggttgaagcccgatcgacaaattgcacgtgtcatagacataaatggaaaagaggtcaaatgttacggtgttgtaactttgcctgttaaaaggcaggaaaggacagtgcaagtgcgtcttcacgtagctcaaacatcgtttggatacgatttactattcggaaccaactcactttcggagttagggttcaaaatttttgacgagttgtcaaaaacgatggtagacttcaagcaaaacgtgaacacccaaaactcggttcatgtgattttcaaaacgactttaatgcgttagccactacacttgttgaaatgacaagttcaacgaagaaagacaaagaattggcaatttttccatcaaatgacagaaaaaaggtgatgagaattgaattgaatgattcaatgttgttcacattgacaggcaaaaatgatgaagaccaaaattcgtccaaatctaaaagtgaaatccaattaaattgtgcgaattcaaaagaattccagcaaatctggcacaaaaaaacggacaacttacgtggagaagaaaagcaaaaattgcaaattctgatcacggagtttgaagacatttttgctgtcagtgattgggagttaacacagactaatttggtccaacatgcgatcgatacaaaagacgcagaaccaatccgaagtcgaatgcgcccaatcccatacgcataccgcggaaaagtggctgaaatggtccaagattatatgggacgtggtctcattcgtccatccagctcaccttgggcaagtccaattgttcttgttccaaagcgtgatggtactttgcgtttttgcgttgattatagaggtttaaattcgatgacgatcaaagacgcatttcctcttccgaacattgatcacactcttcttgcactgggaggaaagaaaattttctcgactctcgatttcatgtcaggctactggcaa

SEQ ID NO: 79363 - DNA, 1623 bp, Heterodera glycines
  unsure (1)..(1623): unsure at all n locations
atggaatcagaatctgtgaaaaagacaccatttgtacntgagttcggtcttcatgagttcactgttttacctttttgtctttgcaacgctgttgctactttcaacgatnttatgaacaaactttttgtcggaatgattaatgattttctgtttatttacatcgatgacatattggtggcttcagaaaattgggaacaacatatacatcacctacaaaaagtttttgagcggattcgaagcgccggactaaaacttaaaatcgaaaattccgaccacaaaaaagcaacttcagtctttccttgggtttgtgacctactacaggaaattcatccatggatttggaaccttagccgctccacttttccatcttcttaaaaagaattctccatttttaatgggcgaaaaagaaacgcaaattgtgtcggcattaaaagaaaaaatagtgcaggatgcgattttgtattttcccgacttcgcagcagcaatcgaagacccgaaaaggcgctttgtcattttaaccgacgcaagcaaacacggcgtttcggcagtcctttgccaaaatgatgaaatgaaacgcttacgtccaattttgttttgcctcgcgtcaatgcaacaaatacgagagcgattactgcccgacagagctagaagctttggccattcgctttggcaccgaaaatttacccaattcataacgggaattccgacgagagtgatcactgatcacaaagcacttgtccccatgttcgggacgaaaaagagacgggcaacgcaagaattgatcgttggcttatggaattaaattcccggtatcagttgaccgttgaatatcagcccggtaaatcgaatgtcgttgctgacttactttcccgttatggaataaattctgactccgaaaacgatcagcaactggaggaaaatcctaaagaaacaattttggttggaaaaatcgtcgagggcgaaaagtctcagaaagatggaagctttttagagttgggaggtcgaagtgattgggtagaagaagttaaaaacagtgaaatgaagactgtttatgaatttttggagaaaaagacgtgtccgcatagtcaacgagaattccaaagtctaattgacaaaattcatcactttacaatcgtcgacagacttttgtatttttgcgaccctaaaacttcgtcgcaacttttgtttgtccccgaaaagtttcgcaaagagctaattgcatcacggcatgaaggaaaatgtgctggccatttaagcggaaagaaaatccatcgccagctttcggagcactatttttggccgaatatgttgggagattgcgtccgattttgtttgagttgtcgaatctgtgcccacgcgcgcaaatcgcgtgcaaatgaacccccactacaaacggttaacaccgtcgaaccaatggaattggtttgcctcgacattctctcaattggtccatcggaatcaggaaatcgatatctcctcgttatgattgaccatttttccaaataccttgtagcagtcccaattcctgacaaaaacagtgaaacggttgctagggcatttgtcaaaaatttcgtgcttgttctgggttgtcctggtcggcttcacagcgacaaagggggataa

SEQ ID NO: 79364 - DNA, 874 bp, Heterodera glycines
atgaacaggataagaagcattgaagcgataaagagcgttaagatacaaccgaagtataaacggggcattaagagcaattaaaatcaaattaaaaccaattgaataaaataaaataaaaattcaaatcaacaaaaaatttaaaaattaatcaaattaatcatttatttatattttttggggttggtctaaaacttccgaaaaaatcgattcgaaaaaatgtttgaaaagtcgatttaaaaaaaaatttttttttgcgaatttattaagaaacaacgaatggctgttgatggaagaaattgggaaacagttggaacaaagtctgggaaacctgatgaatgtgaagctttttaacgcattgtttgaccaaacttggccaaatttggcctttttttgcactaaagtagcgcaaaacattgagacagagtacggcacttttttcccttcatgggcatttgcgtgcgatgtaatggtcaggttcaagttggagcaggaaaagaccataaaaaacaacaaaaacaaaacgccaaaaaggggaaagggacaaattcaaaaagaaaacaaaaaggaagtaatccaatggacagaagaaggaggacaaagataggaagaaaaaatcgaagacaaaatgatcattgacaagaagaaaaaggaatgatttgaaaagttcgacaaaaagactagacctggatttttttgaaatttgtctcaaaatgcaaaaaaaagtaagagaaatcaattaattgctttcgaaaatcaaaaaggatctaattgacaataattaggggggcttcgttttagctttgcctatttcgggggggggggggggggggggggacagtgtcgatacgacagtctataatgatgtggacacaaa

SEQ ID NO: 79365 - DNA, 321 bp, Heterodera glycines
atggacgccacccaactgcagcaagtgcttgacgcagtttttgcacgatttgccggaaatgcggcacctgcaaacacggcctcatcctcactggcacacgcgactctggccagctccttggacaaccggatcaccaaattccactacgattcggaatgcggcaacacatttgaccggtggtttaatcgatttggagtgcttattgaagaggacggaaaggaactccccgaacagaccaaagttcggcttcttcttggcaagttgggagacgacgagtataacaaatacagagacagcattagcccgtcccaaccggaccag

SEQ ID NO: 79366 - DNA, 1113 bp, Heterodera glycines
atgaaggaaaaggtgggaaaaaacagtcacaaataaatgaacataatgccaaacaaatataaaaataaaaataagggtcaaaagtccaacataacattaaaaaatatatattaaaaataaaaacaaaaaaaataaaaaaatcccatcacagttggcgcaaacggtggtcgtggtgttgtgattgaaaacgttggcaaaaatggcacagatcttcctttgtctgtatgtttttttcggatttttgtcactataacacccaaaaatgtaacatagttaattttaggcttgattaatttttcatccctttctcaaaaaaactgaattattacaaaatattcgggttcaaatgatgttttgctttaggctattccctcaattctcaagtgttcgcggctaccacctccgcccaagcctccagggcttcgtggcggtggcctgactcaaacatcaaaaaagaagtatctgtcagatgacactttgtcatctgacagtgacgttcatgcttcaacggggacaagacgtattttgtcttctgaagatgaaaaggaagaagaatagggcaaagaagcaaaaaaaatgttaaaagggggtgacggtcatgtgattttggagttgggaatttgtttttgttgaaggtttaaaataattttaattgtgattatttttaaatatgtgatattaatttaatattttttaatcacattaaacatgaaattaaatcgaattttattgcctcattaaataattgttcttgtagctattccggtggtttagtgttagtacgacgagttcgacagttagagctaaagttcaaactctcataatctaacttgttttgttttaatgaaagggaataatttagtgtgagctttatataaattatggtcatctgtaacaaagctaaatggtactttatgagggcgaatccctggaccccggcagctgagacaaaatcatgaagaacaaaaatgggtgtttttttaagcaggggcagtggtctggaccccggcccctgggaccttatactactattattttatatgagaatttgacttccgccttttttgtttatttttgaatttatattctgcatattttcttaatttgaataaa

SEQ ID NO: 79367 - DNA, 1903 bp, Heterodera glycines
atggcaagaacaaaacgaaaaccaaaattcgctagatatggaaaagttgacggccgtaggagatttggacggtacaagcgcaaatacaataaattgctcgggccggcattgcaaggagtgcaaaatttgttggtcacagcgtaccatgagtgcgctcacgcttatttaataaaatatgggcaaaacaacatcgacattttagacagagtaagtagttttcagtaatttaattaccaaaatttaaaattttttttaaaagaaattttctacgagaattctatttttcatgctgtaataagagtgaaatgccaaaataagcatgccctagtttagtggcaaaatccaaagtagatttctagggatgcatagggtgttaaaacgaagaactgtcggtttagttctagtcggttttatgcgttccatgtcatattatgcatcccatgacagattatgcgtcccatgaatgaccatacccagtttcttaggtcataattttttttcttacttggtcaatacctatattcttggtattaaacaaaagcttaaggtctatagaagcttctgtataactttatttttagctaaatgcaatagacaaaaaaattatgctcggaaaagttgaatttcgtttttttcattatcaattctttaataggtcacgattcgagcccaaggaggcaatttgggcgaaactttttggcattatgttgaaggattctacacagatgaagaactggtcgcgcaaattgtgcaatttatggctggacgtgcggtggaactattgatgtttgaaaacgcgcaaggacacgaggaagacgtcgaaagtgcgcgaaatgtggcaatacaagtaacgtacatattaaaattttcatttacattagacatttaaagtgaaatggcaccaacagacgaggcaatcacaaatttactccaacaagcaacagacgcgccgacccaagttttgatgaacaatgcgaggaggttgaaacgagtaagaactacatttaaaaattaagacttcataaaatacttaagctggtaatttaactgatcggaagaaaacactgacggacgaacaaattgacaagtaaattactaaacaaataaaacaaataacaattttttctcaggctctttcgccggtaccgggtccgccatcactgagaccacgcgcacgagggactaccgagaggttaaaactaaaactagtcgcatattaatgcttttttgctctgaaaatcttttattcggttgtcaggtgtcagaggatgggctgggtggacgtgttcaagaagcggcggcgccggaagacgcacaaattttcgaaaaataggagaaggaattgacccctcaggagaagtagcgcctcttttgatccattgactaccaagagagagtgaaaatggcaatttaaatgtataaattggcaaaaatctcagtaaaatatgccaccgacggaccatccgaaacattttgtggaaaacctgttcaaattgaacctgaaaccactcatgttgaagttggacgatgtgatggaagaattgcgtttttctcaactgtccgctaaattggaacaaaaacgacattaatccccgaacttggccaattgaaactgaacactttggacgagccgtccacaaaagcatacgaacatgtcagggaattgtttagggcatcattcaatttaagaaaatgataatatttgcagataaccgaccaaggagtgcgttcattggtggccaaggcatacgacaatttccaactttgcctctccaatctccgacttgtcttttccgactcatttgacaattgcatgaaagcccgggaggaccaatggtcggatgagcatttgctgaaacccacggggatgtgcatcgacatgctcagagccacccaccattga

SEQ ID NO: 79368 - DNA, 700 bp, Heterodera glycines
tttgatttgtcatttgcggccaaaaacaacgatggaaaaatactgggagttctgttgaatgcgcccttcaaattggaaaatattcacgaaagctacagagacattgggcgcatgccgaacaaaaaggaattcggagaaggttaggcaacgtaaggcggagattgaagatgaaagcaaattgttaagagattcgcaatggcccttttccatctcaaaatgccaatcgaatccacgccattctcactttcgtgaatagtcatatcgcactgttgccccccgaagaggatatcaaattagtcgaattgcaggccatggctgtaggtccaggacacgccaggtaacgttgtgttgaatgccaatcactcgctcgtcaaatgcggcactttccgctccttttcaggactggcttgggctccggtatgctccgtgcactcatccaaacggcttccgcaaaaggctattcccatttgttcacctgtgccaccgccatcgcctctcagacggggcttaaaaaagtgagttgtctgaccagcagtgatcactattttatttttccattttgaaatctttgactttacagtttggctttgacgagatcaaaactgtccctttcaactcttttctggaggacggagtgccaatcttttctggggttcacgacaacggagtgggcgcaaaacttgtggcattgcatatctga

SEQ ID NO: 79369 - DNA, 363 bp, Heterodera glycines
ttttcacatttttggtctaaaaatggctcaaatgatcttttattgaagcaatgttgaatttcagttcgtttccgtgtatttaaacaaagtttgaaccaaaaatgtgaaaatcgaaaatttaaattttcgactttttgttcgaattcgggtccgggattaggaattggtctaaatgggcgccggattcgtgatcagcgaccccgaaaaccccataaaaagtgtttttatgacttttgaaaacataaaaaaatttcgaaaaggggggggggacaaactgaactattaccaaaaaaacaaccgccattgctatttttagtatcatatttcgccagagtcatatttttaactttaattggctaatca

SEQ ID NO: 79370 - DNA, 756 bp, Heterodera glycines
atgaatttcttcattttctttaataatttcattcttattattattactattttgttgatcagcgttaatgtacatggtaataacgacaaaaatggagacaattcaactcaatataaagctaatgacaacattaaaagttacattgatgatcttggcgatgaattttggaatactttgcccacgatcactgatttaccaaaattagacggagttgaatttgttggaaaccatattaaatacacagatgaatcgaaaaatgattccaatgaaagtaagcaataaaagataattaatctaggcatgtttaatggtgctagcgggttgcttaaattccgaaacccatacgcgtttcttaagtctgccagtggggttgaaaacaaaaaatgtgtaacacataaaaattcatctcatggctcaaattcaaccaaatttattattcgaaaatttagcattatattctgatagaacaatacttacatttattaaattataccatgaaaattaatttggtcgagtttgagccaagttatgaatttttatgttttacacattttttgttttcgaacccatttgcggaaattaggaaaccacctgcacgttaaatcattggttaaaggtaccgaatgaaaaaaaaatttgggtgccattgaacaaagctttgaaaattgttcaaaaggatgacaaagattttgaaatttatgagacctgttgtgttttgctaccacacgaacaagataaatttattaaatgaataaa

SEQ ID NO: 79371 - DNA, 87 bp, Heterodera glycines
atgggcaaaattcactactgcaagcgtccggacaacagcacaaagtcgtgcaaagctcgtggttcagatcttcgtgtccatttcaag

SEQ ID NO: 79372 - DNA, 225 bp, Heterodera glycines
atggccggagttggccaagccgtcactctatcaaatctttgtcagtctcaatttgaatacattcaaattcaaaggcaaacagacgatccatctcgaggtgacttttttctatttttaaaaaataagtatcttcttagattacgaaaccaaccaattatttgaaactccatttcgaatggttttggaggtggagaagggtttctctgaagttagaggatggcaccg

SEQ ID NO: 79373 - DNA, 1278 bp, Heterodera glycines
  unsure (1)..(1278): unsure at all n locations
gctacaaagacccattcaaagcttttgaaagacatttcacattgagcaaccagccaattgtcaattaccgttctgatttccaaggcaaattccattttcttgttggaatttcggcaaaggtacttttggttgactaaataattgtttttatattagtatttttagtattaaatgttttaggagcaacaggtcattggctcgatacaattgtacaacaatgaaagcaaaaaatcgcaactgtttgaagggcacaccgcgtgctttacccaattcaaagcggagaacaattcgaaacccatcagccttttctgttacgcggtgcgcagcaaaaatggcgttggaaaagttggactttcaaatttaaaactcgcaaatattaaattgctgagtgaacataaatcagttgcacatagtccaactttcggaaacgcaaaagggtaatcaaccctatcagtcgaagactgacaacttccatttccacaccgatgaaacggacgattttcctgtcgcaattcaggtaaagaactaaaatatatctgataaatggaaatttatgtaaattatttgtcccatttaaattattttcctctagccttccaaatctggtcttttgtatttgttcaccaaacttgggtatgttcatttgttcgacatcgaaactggtacaaaagtttgcaacacgcgcatttcggacaaagccgtgcttttgtcgacagaactgaaagaggctgacgaagtgctctgcatcgatgggtcgggaaaggtccgtcccatttcaaaacggaaatgcatataaacatttacaatcataataggcaattttaaatctaaaaatgactacgaatttattatatttaatgacttaccaaattcaggtcattagtgtcggtcttgataagtcagcaattattccgttcatattgaaacaccataaaaacacggaattggcgcttaaatttgcttctcgttacaatcttgacactgatggggtcactgtaattgtgattaatttacttttaagacatattttccttcttcagtctgacagtaacaacaatgatcaacccgtggctattcaagctcatcaccaatgccaatctgtacaacaggtgcttcaaagaaattcatctgtaaatgcaatgggattacttatgtctgtttctaattgtttataaatttagtcgagcatttccaatggagcaaattctggcatttccaatgggacggcaccaatgccattgttcgagtcgaccccgagaaacgtgcttgttttcnaag

SEQ ID NO: 79374 - DNA, 82 bp, Heterodera glycines
gaaatgtatcattatattcttccctatctgaaaatggctcaaaagaagttagggagacgataaaaaatttttcatttattgg

SEQ ID NO: 79375 - DNA, 780 bp, Heterodera glycines; identical to SEQ ID NO: 77421

SEQ ID NO: 79376 - DNA, 1494 bp, Heterodera glycines
atgaaccaaccggatgtccaacatgctcggcccgcactcgtgaacgcaattttgaatcggcacacagaaacggctattttcttggtaaagtttccgccgacatttcgacgacagcaatttgatttccccacatttttcttcattcagttggagaagggtgctgatccgcatcagaccatgattggccaactgaacggcttgaacatgagtgagtagcaaacagcagcagaattggctatatgcactctttatgagttcaatcttcagtttctttgctcatacataaccttacttggtcaatgtgccaacattcttggcataatttttgtttctttgtgtcagtatttgttcttcctgtatttatgaattggccggactttagcctttttgttttatactaagaaagtaaattgaaaattttctttgaaaataatttcaggggggggtctcaaaacagaaaagtaccgaaaaaagttatgggcaaagaaaatgaagattggactgataaagaatgcaattgagccgttatttaaacgttgtcccccaaatttgcagatgtgacactgctttgggccgctgtcgtttttgtcaatttggagctgtgccgtgcgctgatcagccatggtgccaacattgaaatgggcacggactctggccactcgccactgctgtgcgcatgtttcaatggcaatttggagatcggtgagtcaatctcgaatggatgccgttttgccgctgcgtaattgccacaatgatttcccattttcagccacttttctcgtcgagaatggcgccaacgttaatctcgcggacactgacggaatgacgccattaattgccactacctttttgctgcgcctcacttcgccaacaattctctccgatctcaacatcaattcaagcaattccggcacactgtgtctcgatgtgtttgctgaagaaaatgattttgttgggccaaatgcgacgacggcttccactgggcaggcattggcaaatggttgcacacaccgagaaaagatggccaaccaaagcgattgttttgtctgaaaatgagtcacgggcccagcggacattggaagaaaaattgaatgaattattgggcgttgacaaatgatggatcgtatgaatggaaactgatctgaccattattgatgcccattttgttaattttcgatgattttccgacgaaaatattcattgtttcgctattctcatgcaaaaaaacttaaaagaattcacggcttttagagttattaaaaagtggtcataaaaaatagatgtatgtgttattgttagcattgggttcctaatcactaattaccttccatcacataatcagctttctcacctttgttgttgttgttgttccccaatagaaatatgtcttcaccatcgcagtcggatacttccaagccgaacacgcttgaactcagcgggtggataacttccaacccctgcggacatctgtcgacgaattggacggttacaaaa

SEQ ID NO: 79377 - DNA, 589 bp, Heterodera glycines
atgtcacaatattttgtaaatgaaaaattgaaaaggtcagttgatcagatggttaaataataattgcgccaaaatcagtttataattggggcaaatgacagggggtccaacaagcaaattaagcaaatatttaatgaaagagcgtgggtttaattagtgtacaaaatcatgaattaaaacaatgtttgttctccatacagatttgcattacgattggtaaaagtgccaaattaattaattaaaggttaaaaatttattaaatagtgaaagaaaaacagactaaaatgatttatgagcctaaattcctatttaacctatcaaatttcgctttttattaaacattaaaatctttcaattgcattttattaaaaataaatgataataaaatcaaatatcaataaaaaaatattttaaaaatcaaattgtgttgaaagttgctaactttgatattttaatttccaggtccataattttcggtatttttattactattttcaattcaatatatcaattgatcgttcgtatcgctggtgatccttcactttctaatcaatttgttaaaaatctttttaaaataattttcatttta

SEQ ID NO: 79378 - DNA, 402 bp, Heterodera glycines
atggcattaaaaaggacgaaaagcgatcagctttaccattttgatacacaaaaaatggaatacattaatttaatttcaacaattagtattcttattttttctttttcattgtttggcccaaatttttatactccaaggtgattattattattattattatttaattttactaaatttatcaccataaattttatataattatagtgatgccaccgaagaggaacaattggcaatgaaatgcaggcagagatgcggcatacggaatttgaattttgttgtgaacgacgatgatgatgccacggcaagggtaaaaatcataaatttaatcacaaattgaagccgtaaagctgttataaggggaggggaggtgagggagggtgttatagccaaaaaaccgaaaaa

SEQ ID NO: 79379 - DNA, 521 bp, Heterodera glycines
atggagaaggctccccaaaacgacacgattgatgttgttgtgcacgaagtgggtacggaacacagttccaaggacaaaaacaacatcaacaagtcacctttgaaaaaaaatgcacatcattcaatcgagggttcgcggaaaatggctaacaaaacggtctttttggcaaaagccgtaagctatgtgagcgctcttctgatgaaaaacggagaaactgatgtttcggagaaagaaatggatcgtgttcatcagcggcttttagatgtttgtttgtgattggcggtctattcaagcaataataatttttggcattaatttagatgcgttgttcaagttacagtgggtacgacactcataatctttggcgtgcttggatcaatgtgcgaaatacgcatccaaatacatatcaagaagccatggaggggaagtttcacattctcaaaaatgcaccaaactatgggggtccgccaaaccgtgcatgggacattctgcgccgcaaagaggaggcgaagacaagactg

SEQ ID NO: 79380 - DNA, 991 bp, Heterodera glycines
atggcaatggcacagcagctgtggggtctgcgtggggtgaaacgtttcagagatgctgtaaatgcatcgaggtaaacttcttttgattattttgctagcctttttatattaattataggatagagcgcgtgaggaagatgaaggggcttcggatgatagtgctgatgatagcaaaataattcggagccaatctacacgaagtgaagagagtgaaaatgaatacgacaaaaatgtttgatgtgggtacgatacttttggtgtttttgtacattatgcgatgcatttttattctttatttgttctgattaaatgcttcgcaataattagctgatcattttcctttaataatgtaaatttccacaaaagtaaccccgaccccaaaccccaaaaggaccattcatacggtagaagctctttgagcgacaaatgcaaaaaaatggaattaatttgcatactgatccgcccatctattgcagcagaagtcagggaataattatttggaatcgtttgccgtgctcggcacgtcagtttatcaccgttccaccaaagtactgcttgcccatgttgggcaccatgctttttttcggcatttatcgggcactggtttggtggaaatgcaattaaatgcagaaattgttgataaataatgatcagctaattatttgccaatttcctatcacgagtaagatagatatcataattaaaataatttgaatttttggaaaacggccaaaataggtgctaatgttcgaaaatgccaataggtgctaactgtaaacccctgcttttaagttttatatgccaactcatcattctttttgcttagtttgaaaaattttttaaacctaaaatgggaaacgttctgaaaaatatgcctttttaaagaatatgaaaaatcggcgaaaatttgaaattttcgatgcggtgccgattagggggtatattttcgtggtctcaacgtgtaattgggttgaggatgacaaatatcaaa

SEQ ID NO: 79381 - DNA, 1095 bp, Heterodera glycines
atggtccgcgccgaagtgaccccgaccccccatcgaagcctctattgcacttttacgtgtccaatcaatgacaatcatcagtttattaggtcgatattcttacacattctgcctacattcttggtatgaagttaatttttcgcctaactttaagaaataagcacgtcgtataatttcttggcaagtgagaccaaagttcaattctatttaagcaagtccacttttaagctacaaactatgtaagtaccaaaaagtcagtagaagataaaagacaaaaacaattaattgacagccaagggatttgaccccgaagacagccgccttaagtgaccaacattaaatttcgaaaaattgaaattatatttaatagcctgattctaaaaccacctatgagttttacaccattcaggatttggattttaccataaatcatttttagaaaaaattaaaaaacttggacaatcatgagtgaaattcgtcgacaaaatcagattttaaatttgaactccgattcatgatcagcgcaattttttaccatagaaaaagcgcagagacagacccgggactgaactggtcaaatacctatgggactgaaccgtcactacttaaaacgcatggaataccgacaaaatattcctctcagtatataaatcacgaatccgaaagaattattaagcgcaaaaaaattgaaaaaattattggtcagcaaacctccgaaaatgactttaaaaaataatttaagtgagccaaaaacgaaaacgttttcaggtttctgaattacgcaaaaaggagcatgcgaacacggagcaagcagtgggcgcccgagcgagcgaagggttgcgtgcgcctggttaaggccgggccgaagtcttcacttggtttttttaataatcggaacccgtttttcccatggtttgatcactgatcagaatctgtggtttcgattactggtttgaacacttttgtcatagtggttttgttgttcgtgatcagaatccacagtttgttactaatgattggaacccatcttgaccggatcattgaccaatagggctttgtttttaggcaaatgtctaaaatttctgcgaaaaacca

SEQ ID NO: 79382 - DNA, 121 bp, Heterodera glycines
  unsure (1)..(121): unsure at all n locations
aaattagtaaaaatacatgtcagattcgtgattagcgacctttaaaaccccggataacaaattatcatggttttttatcttanaaaaattttgcaaaacaaaagggtccctcccccctttt

SEQ ID NO: 79383 - DNA, 1570 bp, Heterodera glycines
atgcgaagggccaacagcacaccgaaaaaacgacgaaacccctcaaaaaaccgggccaattctgctgatcatcccccggcactgtccagaaatctctcggcaagaaagcaatattttgatggtaaaaaggaataaataaaaaattgcacagttttaatgttataattagtgtttgtttaattttatttttaaacggaaattttttctgttccgcgacaaaatttctttttttttgttgctcttaatttttataaaatttttgaaaaacgagcgtccctttgatgcggtaaggcgccgttgaggagaggaaaaatcttagtgaaattttgaaacatttttattcaaaaagtggacaattttgaggattttgccttatatgtaaaataaaaggaatggcggcccgtgtgccaaagaaacgatgggaaaaattattggaaaataataaattaattattattttttagataccgtcgattttctaaataatcagtcgtcatcaaaaggacggaaaagtgacgtaaatggcacattatgggaagaatttgaagcgggaagagtaacgcaacttccattgaaagaataccatagttcaatccctgattactttgagcgggaacgggcaaaaacagcccgcaaaaaaactgtcgagaagagcttcacaggtattgtaagcgcaaaccagggaaaaaacatcggaacgccaaatccgaagacctagctttttctccaagaattttttttttgctgtaatttttcaaaaaattataggtgctttgcgcaaagatatcatttaaaggcgtttcgcaaaaaatgactactttttggttttgtttaaaatttcgaaaaatttaaggaaattattcgtcttgcgatgccaataagtgttggcggacaaaattggttgaaggaatatgaaattaattttcaaaaaactttggaatttttttgttctttttcgtgagagaggaattcccgtcccttcctttaagacaggtcttcagatgtgtccccaattttcaacaatttttacttttttcacgattttaagagggttcggtaggcattttagagaaaatatgttaatttagtcgaaaatcataaaaatcattttcaaataacgataaattttcaaattcactgctatgtataggaagtattttgttcattttaaataatcttttccatgcccaaataattattacatatttgaagaatgattaccgtatattgccaaatcactgtttgaaataatttaagctaaacaatttttgcacttcattggcatattgtaaaaaccaaagtgacgctgaattcaaagttaaaaaaacgaaaattttcaattttttttattatgcacagaaattttggtatgataatatgcacaaattactacgatagcattgaatttaagactcagcgctgaagaaaaatcggagtcagaaacggaaatcgctcaagaatcatttggagcaagaaagaactaatgattaccgagaaatggcacccaattggcaatcagcgggttaccgtgactcatatggaagtgacagttactacagaacgtcatacg

SEQ ID NO: 79384 - DNA, 1738 bp, Heterodera glycines
atgccacattttgtgccacaacgctccgccgttcgttccaccacaattcacgtgccctcctcctccacttcctcaactggtgaacgaaaaatcactggcgacggtggaaatggcactgcttccgctcggctggaactaattcaacaactgcaattccgacgtcagcacagctcgccagccgttgttgaggaggactatgagcgaagtgtacagtttgaagactgtgtatcaatgaggtgctaaagaagaattaattgttcgatttaattcaaaaaaaaaattactttatttcaaaaagtttatttaaatttcatttatttttaaaaatttttcaaattttaaataattgtttttgtatatccgttttgaatattttaaataattttcattctatgagaaaagggtacacatattatgcgccttaatgaggtggaaatgattttttgtgttccaatttatattaaaaaaaaaatttgaattgttttataaaacattattaaatttaaaaaaattgagtttattatccttctatataataaaataattattaaataatttacaaagtttaaaagaatacgattctgggctaattcttatttaataaaccaaacgaattaattaacaaattttaaaatattatattttaggcatattttttcccccaaaaatttttgaatcttttataaaattaaattcataatatttttcatcatcaattaatgtattttgttaaaaaatatagcaaaaaagagttttttcaggtccgtttctgcgtggtccgcatttgacgacattgacacagagttggagcccaagcatgaattccaagttaaaactaataaattaaacgaccatcataatcgccaccatgacaatcaaaatgtgtcaaaaactgttcatcaattaatgggaaatttgttcaaaacaggtaagccaattaaacagatgaattaaataaatattatattaatttaatcgcattgttttttagtctacattataattaagaatatcatgattatttttttaaataatattattataattaagtattaccaaatgttttaaacataatataagcttcgtaaaatggcatctttgatatcttggttaaattaaataaaattatttctaatttaatgaattttctgcttttttttgccgattctagatatatatatatatatatatatatatttttttttaaattttttcattttttaaaaacatttttatataaattattttttatttttccatttcttaaaatattatttattattttcaaaataaaactttccacaatccgtcattcgtaaattgaattttccattcattattcgtgtgtccaacatttggaattttctatgttcatcttcgtctgttggttgtgtaatttaatataacgctgactttcatacatatatcaaagtctcacatgtcaattccaaattaattcaatttcatagcataacagaaaaagtacacccgtaaatattatttacaaattttttttttttggcatttttgatggcattttattcatcggcactaaaatggcgcattgccctcaaaacaaataattttttgagtctcggcgctgccagaatggcatagttatcccaaagaagaaaaaggcaccagcgggggacgctcgtgggaatatttacttggttttcatggaggaatttttgtgccacaatttcttcccaccctcaccaccacaacgccaaaataa

SEQ ID NO: 79385 - DNA, 453 bp, Heterodera glycines
ttacaaacggtttcggcaccgcgctgaagcacttgcaaaacggaatatgcacaatcgaaggcccaaaatttgttgatgcgttacacgcacatgcagaaaatgatccacgaggtgatcatcacggaacgccaacaacattggcaacatcaacaaattattgctgatctgccggtgcaagcaatctccgaaacaccacaagcatatgtgctccggtccaattgattatagatatatttattataaaattgataattttaattgtctttgcatttaaattttaacaatttttttaaataataattttttgcttaatataatagaaggaattattaatggttaaaatttaaaaagaaacaaataattacaatattgtgttcattgaatttatgaatattcttttttattgaaaaggaattttcttaaattatatattaattgtacaaaactttttca

SEQ ID NO: 79386 - DNA, 1294 bp, Heterodera glycines
atggccaccgttttttgtcgtgacagattcgcagtgccccgcgagcatctgagtaccgtaaggtggtgcaccatttggttacagtacattttatgacttaattgtacagtaattgccatcgtggatttgacttgttcatggcatttggtttttatttagtacattcgcgacagttggaagccggcggtggagcggctgaatgggccggtggttttcgtgtcgggcagagatgggactgaactggcagaggagaatggccaacatggggacattttgcagttggattttgaggactcctaccgcaatttaacgcttaaaatgatgggtaagtgaaagggaagggtcaattaaaagtaattaaataattaattaggcatttatcgcttcttcacggagaacacaccggtgcagcaaattgtggtgataaatgacgacacaattgtaaatgcgactgcactggaccaactcttacgagcgcaagtggtaataaaatgaaatgacaattacaaaccaacacattaatgagaatcaattacaaaatgacataaaaaacgtggaaatttccaatttgcgcatcggtgtaaaaatatgccaatttttattttttaattttctaaaaatatcacgttgaactttattttaaaaaacatttttcaaatgctttagtatttttatgaccgaattcgcgagaatttctttcttcacagaaaagggcaaaaattaaaaaaaaacccaacaaaaaacattttaaaattgatgcgttcattgtcagatgcgatagattaaattaaactaaaaatacatttgtgaatttcagccctcacaagtacaaaagggcgaaaatcggtatatgatcggcaaagtgtcgcgagcttatccccgaattgtattcgtaagttcagagtaatttttagtgaattccaagggcgtagccaaacccttggcttcgagagggggggggggggggggctacgccctttctgtatccctttttcttttttcatttattttaattaactaaatccaattttgctcctttccttctccctttagccgtggttgccatggcacgtcggctcggagctgtacccgcacaagtgctatcccccatttgtgcaggtcaccttagcaattagcaaaatctgttcaataaccattttaatattcccaatttttcagggctccagtttcgtaatttcgcgtgccgctgctgcggaagtgcttcggcacgtgtgcgcttttcccggctttgccattcatctcgacgacattctgatgggactactcaccaact

SEQ ID NO: 79387 - DNA, 321 bp, Heterodera glycines
atgtttccaatgttcattgagtggattgcattcaaaaatatgaccagcaagcctaatgtgtcagtttttgattaaatttaattttgaaaaatttgaaatttaaattttatcaaattaaagtgagcgctgttgtacgcttggcgaaatggtgggcggaggatgggcatcaattgttggacagtgttgcctgatttgcattgtgatttcggtctccttctacctgattgtttgggctcgtctcaaattggacatcagcagaagtgggcaaagtgaaagtaaacattttaaaattatttaaaaataattaaaatgaaaaataaa

SEQ ID NO: 79388 - DNA, 907 bp, Heterodera glycines
atgagccgactggatctggaagaaaaaaacagagctctgtcacacgaactgcgtgaatttggacaacggcatcatgcgttgcaagttcgcagtgatttcgagcaacaggcagcagctcgagaaattacagtcttgagaaaagcagtaggcgacgtacatgacattcaagatcaaaacgactcgttgcttcatcaaaacgactcgttgcttcaaacaaatgaaaaattaaacaaagaaatcgtcatgctcaaaaaatggctgcgagtgtttttttggctccttgcagttttactaccggtatgtatgcttgtagtgcttttacactcacattactaaatcgggactatagcccatcgccgtttttattcgtggaatcatgagtggtttacgttgttctgccattggacttcggtgcattaaatgctgcctcctttggttcctattaatttaaatagcaaaatactgaaagtcgttcagtttttgtggctggttcccgggcatttggtatgccttaaacatcgtacgagagcaagaaacaaacgaaagcaatttctccaatcacttctttctcacttgattttttgattcttcactgtcaggcggaaatgttttgtcatctgtcattcatttttaaaaaatcatgaaaagattacctaactcaggaaagacgttataaattttattttacaattcatccaattttataatcactagggcatccaaaaatatgcacataaaatcgcaaaatatgcgcataaaatatgcatcaaaaatggcaaaatatgcacataaaaagtgaaaaatatgcacataaatttttccaaattgagggtataatttttcaaaatttctttaaattcgccaaacgcaaagtaaaatttcataaatggttaaatatggcattaaa

SEQ ID NO: 79389 - DNA, 1012 bp, Heterodera glycines
atggcggagctgaagtcgcgtcttgaaaatgccaccgattgtacgtccattgacgcgctcttccacaatttgtccgtctctgccgcttcggcaggcgaagcacagccaccgcacgtcggcactcggccgtgctgtttcattgtggacgcggtggaacaggcgtcgccggaaatggttgttgaccgggccggacagtgccatcaatttgagcgacaatttctaccctgtacaggttcaattcctttgttcatgggttcgtcgttcccgcgcttcatccgtcgtccgtcgacgtcccgtcatttgcacttgcgcctccttttggcatgcgcccgcgctgcgtgagttgcgcgccaactgcttgcccgtgcgcgtgcagcggtgcaatcgccagcggatgcagcgacggcttgaagaggtggggacaaaagctagcattttgaatggaccagagatagaattttgaattgtcagatttgccattatgaaggcgtgcgaattggccgtgatcagctggacgaactgttcctttcccacggcagtgacattcgcctctgtctgaacaccctccaattcaacacgctgaaaacgcacacttccgaccgaatccaagccaacagaacgaccaccgggacgacaacgacgacaaatgccaattttgtgagacttttcctttcgtccggcagaaaaccttttttataccgaataatttttccataattaggcctttgtgagcggtgtttcaatcgaccaaaaagtgtcctcctcacatgctgtgccgtccccactaaacacggccgtcaccgtgtcactgttcgacactttgtccgccattttcacgttggacttccacgccgacaagtttgtcacaaaatcaggcactgcatgtgcagttgtctgtgtgccgtcgtgcttccaccggttccgtcacgttgttcagccgtggcatcgtccgtccgttgcccgttcgctcgcgtacgctccaggcactgtttggccaaatgtcctccgaaga

SEQ ID NO: 79390 - DNA, 2073 bp, Heterodera glycines
atgacctcagggtcaattggtgcgcttggagaaagtggttgggccatggcccaaaatcataatgatgatgaaatggtagcagtgcgggtggtaaataagaatgtattcaatggaaagacttcgggttcagtccgtttcgaggacgttgataaagtcttgggtgagatagtccgcctagaggaaggcataaatcgtgtccttcggcatgtcaatcgcaaagccaaccgtgctttgagcaacattagtctattgtctggtgaagttaatactggatttaggactctcacaactcaaattgagacatgtgctgaaagggttgacacagtagcacaagtcaatcatgccgatcgtcaacggagggattcgtccctggattcaaatcgtagcgatgatattcctgctcaggacaaccaagctgagaatgaagatggtttggatgatggccacaacattaatgatcaaactcttcaatgggatgaaacaccttttcaacgtgtcaacatgctgactgatggtcctccaattccgttggaagtctacagggatgattgtgtcatcacatatgacaggtgggccaaacgttttcgtgaacacatggaagcctatggtcggaagttggatgaaaaagaaaagttggccaggctggtcatttatttggatgggataccaaagcgtttgattgagaagatggaagatgcaaagaaaacgacgattggtatggccttaacgaatcttcgtgctgagctggattcgccgcagagcaagagtttatcaagacaagccctgttagcatgccgccaatctgatggagaatcggtaaaggatttcttaaatcgattccgtgaagtcgaaattatgatgtcagctcaatcaagcggtatgccgtttctgcagaatgaaagagttattcatgccgttgaacaagagtcaatgcagaatccatcaacgccaagcggtaggttccaaactttgactccaaccagacaggatagattctcttccaacaattatgaaccaaaccgaagaagaaatcaaacgccaggccctcaacaacgtttcaggcagaaattcgacaatcgaaaccagcagagccaatatagaaatcaacgcccgccaaatgacaggagatggaataatcgtccggtttgcaattattgtaagaaagttggacatgttgctaatgcttgccgtaccagactagcagactttcaaaacaatcagcggcctcaatcttttaatcaacgtgccaaatcggacagatggtcgacaactccttttgcctctggtgccaatgctgtccatcaggatcaaacattgtcgctgcttcatgaaattgcacgaacaatgaacaaattgaccgtcaatactgatcagcctggacgcagagatgatgtcaacaccattgccacttcgacagagcagtgccatgtcaagaaagtacacatcaaggataagtcagacatcagtaaatcagagcctttacaagtctcgtcatgggaaaaagcgactttgggtcccaaaattcaccctttcattttcattgtggctatattttgtacttgtggccctgtcttttcaaatacagcaatgattccacaaggaccaatgctatgccaaactgaaacccaacccactctttggaaattaccagaaattcctgaatgccctattccaaaagtgacagtgggacacgtcccaatttctcaaatcagggaattgtatattcctaatgctatcgagcacaatactaaagcatgggcgtgtaggaaaatcatcaaaagagcaagaaagttcacttcactttcgggagtgccaatcacggaggctttaagttctgttatgctggacgtctctgttgatgagtgcaagcagatgattgaacacaggtcatgcatttttggcatccttacagaaattgatggtctgtggggaacctcaaacccaattgacctgactccgagattctggtttattggctccttctcttggtatgaggttaacagcaaaaattgttttgcatttgagacagtaatctcatctcattttttcaataatcaaagcatctgtatctga

SEQ ID NO: 79391 - DNA, 4976 bp, Heterodera glycines
gccaaggcctcatatctcacttggaatgaagttgtgtcagaagtaaatacacttcatccatatatggcaactgtgcgtgcctttgtcaataataagcctgtttgtagtctcatggacacgggtgctagtgtaacgctcgctcccatttctttggctcaggacttaaattgccatctttaccctactaatgaaagagtcatttcagcctctggtcatttgattgatgtgagggccaaggccctaatgcacattgaagttgcaaattgtaaaatttatacagaagttaaactggtgaatgatgatggagccgccaaacgcaaaaattacaaactcattattggctgtgatgcgatgaagaaaatgccgccggttacatttgacattgcgaatgccaaactacatattctaaatgggtcaacggacataggcgcagaacgagattggctgttctcagacgtcaaagtggtctgcaatgtctccactgacttgcttccaggacattgcaaagtcattgaaggtaaactcctgtcattttgtgacttaaatcaggtgcttgttcatgacttggacagaagattgaaacaacaaaacattggattcattccaactgtttcagtgtcaaacaatggacacataaaattggtattgacaaatccaacatttgctcctgttcggttgtacaaaggtatgcaaatcgcttcggtgaatcaattgcgattgagtgatgaaggtccatggttaactgaacaaactgaccattcagtatgcgctgtagtcaactccgtcggtgaggtagacccctcattttgcatcgacttttcaaaaagctcggccactggtgataatttaacaaaactgaggaaattatgtgatgaattttcggacatattttcaaaatctcagtatgatttaggttcatgccttgtgggtgagcacgacatcgtcaccaaaacagaagagccagtcgcttctaaaccgcgccgaacaccattcagatttcgtgaagaagttaagagtcatctcgataaatggatcaaagcaggcgtgatggtaaagtctgacactccatgggtctcaaacttagttctggtacagaagaaagatggagggttaaggccctgtattgattttcggaagttgaatgaagttacaattccggatcactaccctcttcccagattggaaatgattcttgaaaagataggaaaatgccattggtattcatctttggacttgtcctcaggttatcttcaaattcgtctcacggacagagcaagcagaaaatgtggcatcatcacggaagatgaaatcttccaaatgacacacatgccatttggccttcgcaatgccacaagtgcatttgctcgagtaatggctcatgttcttacaggtcttgaagatacagtgattgcctatgtggatgactttctgatttacacgcggtctcctaatttggatgatcatttgtctgctctcagacaggtatttttgcgccttcggcaatacaatctcaaagtaagtcctaagaaatgtgttcttgcctcatctcaaatggaatttttgggttttgtaataaatgagcatggctacacaccaagcttaggcaaagtggaaataatcaaagaacttccagccccaacgtcggtgaaagaggtgagaagaataattggaatggcctcatttttcagaaagcacattcttggattctcaacactggttgagccactgactagactcaccagaaaagaggtaccatttgtgtgggaggctgaacaacaggatgtctttaacaaaataaaaagcattctttgtgataaaccagtgctaagattcccagattatcagaagccctttcatattttcactgacgcctcaaatgttggacaaggaggtgcgctgatgcagaaggacaatgataaggctccatttcatgctgttgcatactgcagtcgcactctctcaacagccgaacgaaaatggccaacagtccaaattgaattgggttcaataatttttgcattaagacaatttcgaccattcatttatatgggaaatgttgagctgcacactgaccacaagccattggcttatcttcttcagaaagcagacgctcatccaaatttggcaagatggctcattgaacttcagaactacaacataaaaatcgtccatgtggctggaaaacagaactcactggctgatgcactctcacgagctgcacatgagaacttatccgaagaagaggtaaagaatttaagtgaattaaaggatgtagccgaatttcctgcgtgtcttgtactatcatctgagtcacgcttggtcctcgatgagtcaatcaatgcactcacacttcgttccgatgacggtaagtcttatgtaattaatatgaggcatgaacaacaaatcgatattgaagcctctgcattcattgagtttctaaaatcaggagaaattcctgatgggttatctgacttagaaaaagaaaaattcgctgccacggcctcaaaaatgttaattgattctgaattgcttgttcatcaagaaagtgggctaaggcctaggattttcgttcctgtgtctttgagggcacttgtttttgattcgtttcattcatcacctcttggaggaggccacatgaatcttaaaaagacgctaaagaaatgccgaaaatatttttggccaagaatgcatgcagatatagttaattggactcgtacatgcatcacttgtcagctgaggcactctcctgttcctgcttacagagcagagatgaaaatgccaccagtaaacactctctttgcaaaggtgggattggatttagcaggtccattcccagttacaaaaagaggtaacaaacacataatgaacgtggtttgctggttcacgaaatttgttatatcagttccagttccagatgccaaatcaacaacattagtcaatgcctttctaacaaattgctatctcaaatttggtggatgcactgagttgataactgacaatgccactgccttcacatcagaatttttccgtgaattttgtgcgatgctctacatcagcaaacgctatgcaattcctcattggtctcaaggaacgcctccacagaaaggacctttcgtacttttcacaacatattgtcaaagtacatctcaaaagaccaaccggactttgatgaacacttagaagcggcaaccttctgttataacactgctgttcatcaatcaacgggagaaacacctttctttctgatgtatggtagggacccaatattttgcgttgatcaaattttagacccaaggacagcagacccagttgcttttactgatttaacagaattcaaatatcgtctaatcatttctttaagaatggcatgggcggccactgctgaggaaatccgggagtcccaaatgagggctaaggcccaatatgataaacaaaaccgagttctggatatccaagtgggtgacagagttcttttgaagaattatatctctaaagtaggcacatcaaagaaattccacctaccatggagaggaatttttagagtagtgaacattgatggtgtaaaggtaacaataacaagctgtaatgccccgcaagcaaaccctagggttgtgcatatcaaccaattgaagaaatccttcgatggattaggttgttaggaaaagaagagaagtgggtcacggcccaaaattctgagaatgaggtggaaggagaggaaaagaagaaggatgagggcgaagaagctgagttaaatgaggacgttgagaagaagaaaaaggagtgggctacggcccagaactctaagaacaatgaaaaggaagttgagaagagtggagagaaagagtttaaaaaaagtgaaaagaaaatgaagtgggttacggcccaaaatcattctgaaggcttcggaaacggtggttttggagaacaaaccaaaaaagttgttgaagtgcttcttttggatccggagacatcggcgcagataagagaatatgtggtctgccaactccaaagcaaaggagttgtgttggtatacccaaatccttcgggaaaaaacaactttccgtacttcatctttcttccggatgtgtttgatggcaaatttgaacgtccattgttgcctggtgaccgtgtctttgttgaagattacgcttgggtggaaggaaaagagcatttggacaagtcaagatggatttatgccgaacaaattcgctgtcaagcgacggtcacaaaaattgacaacgtcatttatgccaaacaccacaaagaatttgggttgatcactgccaaatcgctcagaggaaataaagaagtcggtgccatttcggtggttgcgtttggaatgaagagggctatggccctgtatgaacgccaatgtatgcctggacttgagctgaagcaagccattgtgtcggatgtgattgaagtgcaattggcgaaagttgctgaaggttggatgatcggttcgagctacattctgcctcagaagacacccgtgaggcaagggacggaatttaatgctggagcacatggcaagataccggctatggccgggctgtttgaaaaaaattggccaaggaagactgagtctggaattccaatcatcttcccgtttgtgtcagaatataccgaagatgagctcgtaatagctgagaaagtcgtcgcagcagctttaacagtcgcagccgaaacggaagaaatgctgagacttcagacgcagttcaaaggagtagttgggcctgtctgggacaacgtcgacacggagcaggaagaatttcctcgcttcttttggctgcgctttgaaacatcggatcggaagcacgtgaaaaagctggttgatcaatggaccatcgattcacctgttgctgcaagaaaggactacgattccgatgcgtttgctcaaggacaagtcctgctgctgaaaagaagtgccgagttcaaaaacgatgacgctttcttcgtggtacgaatcaaaatca

SEQ ID NO: 79392 - DNA, 2207 bp, Heterodera glycines
atggaaaatcacttaattcctggaatcccttttcttcttgacggccaaatcgccataaaattcttcactttgcgatatttcactagcaatcatcatccagcaccgtttgagatggatttcgacgactggggagtgagacacatgcactcgtccgagcaaggatatttcgccttgcgtgcggttgagttcggtgaccgacaacagttcgaacatgttcttaatttggcttcggccagagatgtgaagaaccgaggaaaaagggtacgcggctacagttatgggcattggcagacggtcaagagagaacacatgctgcgcgtggttttggaaaaatttcggcagaatgaaccgctgtgtgaagctttgctccggacgggctttgtccgcctcgtggaagccagcactgaccgatattgggccgccggattgctgataactgatgaagctatacgcagttcaaataattggacgggtcggaatgagcttggctgggtgttgatgcacgtcagagaccaacttcgaccattgccgcaacaagtccacctgatccacaagcactacgtcgtttgccaggcggcagcgcctgactacgttgtggcactcgcagctgagccacatgttcagccgtatgctgttcggattaacaacgaaactgtcaatgctgcccgacaactgcaaattggcgatactctggtgataggaagtgtggagtggagagaaggttttgagcagcttggggccgaaggaatgaacgacagaccgtgttgggtacaccaggccagattcaactggcaagctacggcttcggccgtgtacagtgtgtgtatgcaccagtgggttcctgccagagcaaagatccttcgttgtgttcgtggggggccaagacacaaccgaactatctgctcaatacgcatccagttggacggcatcgaatttgtattgacacagcgaaatgtcaatggcaacatcaacttggcacaacagggccaatgggttgacgtgtcggcaattgtggtggcagagcattggcacgcagattggggattcattttgcccccggacgctgtgtttagagggagacaccagattgtgtcggatgggcgtgtcagaatcccggtgtttgtggggtgatgcggggacgaagagaagagagtacgttgactaaaagtgtattaaacgggctagactagaccgcttgagaaatagccattttagtgagctaggttcgagaaacaaatagaaaatgacatgcaggcttcggcctgaaccataaaattgcagaaaaagagtcggcaggccacggcctgaatttaattggaaatgatgagagaaatgtatgactgtcaaatatattacggtatcaaaatttaggagcgcagaaggaagttgtttgggttgcggaggacgccgtagggtccgcgaagtcgaagaatcgtgagcgaaaaaataatcggacaatttatgtacaaataaattttctaatcctttcagctgttctccgttcccatcctcaacaacctcgccctgtcatggaagactacacgaccaacgccgctgatcaccgtctctcgacaacttttcaatcacaatttgcatccacttcaggtggatatttaataagatggaaatattattgatttatttagttgaataattaattaaaaacatcaaaattcaaaattaatggaaccatgggacggttcccggttaaggagggaggtgtaaggcgtaaaagggatcagctaatcggagggaagggccgcccctcccgttcactcccggggcccctccttataagcccgggaattccttcccaggcagttgagtcgcgacgatcagctatatcctattcaattccccatccatcgatctcgtcccccttctccagcccagggagagctcagcgcgcgggctacggcccgggatggacaagaggggatccgtgggaccggcacaactctaactgatttttgcggcaaccaattcctgaatatttttgtcgaaaattcaaaatattctatcaaagcacttttatgtggtatttttaaaatgtaaaaataatttttaaatttctcttaaatgtagcaaatatctttttgagtaaaattaaagaaaaatacttttggccccgagtttggcactttttgccaaacttttgtggaatatttcaattttctaatgacagagaaaaggaatgtatcttttta

SEQ ID NO: 79393 - DNA, 1360 bp, Heterodera glycines
atgtggaatgatgcgcattatcagcaggcggaacaaatgtgggggaagaggtgaaattaggggggggggtagattttggaaatttaaatttaaaaataaaattcttaagcccacttggcccagtggacaagtacagagtgcgcaagaagcatccattgcctccggcaaacccggaaaagcattgctttaatgataatacggtaaaatttaatggactaaatgcatttgatggaatgcaattttacagcggaaaatactcatggagaattacctgactgatgcctacccgagcccggcaaaggagcagcagctggcgcaagagacaggccttacggagatgcagggtgatgggttaattaattagtgccgggtgattagttaataaataagtgcaggataattagtgaattaatcaatgcatggcaattcgttaatgagtcaaagcagggtaattagttgaggccgaaaatttcctgagacttgacgcgagaccgagatgccaaaaacgggatttaagaatagggactctggtactcaatgaataattaactaaataaatggcatttttgagtcaatgcaatttgttttgactaaaacttgaacaaaaaatatttattaaaaatttcagttggcaattggttcgtaaatcggcaacaaagggacaaaaagaaacagcaaaaagtgcctgatcatccggaagtaaaacaaatttatttcgtgggagacggaagttttgttttttaagcgaattggcgaggagatcaaagcacaaaaacggattatggctgatgcgaaaaaaattttcgatgctgcgagtgctcgtctcgaacaattggagcagcaacagcaggcacagaatgtaccgtatccactagcattttccattttgggcggtggttttgtactgtaaggcataaaaaattaaatttctgtctttgaaaaaatcaattttcgctttcagcagagtttaaattttgcataaatttcaagagtataccgtatttccaaattctcccgccccctaaatagagcctcctcatagtttgaaaggaagaatcataaatactggaacaatcgttttaaaaatgtcaaacctttgaaattttgtaaaatgtatttgtttttttatagaatcgcaagagctcagaatttttgggaaaatccacatcgggccaggcttgacttggaccaaaaaaaaaccgagattgtgattgggatatcaggattttcaatcggattcacctgatttttcccaaagaaaaaacccaagctattttagcgctcttccacgaaaatgccacctgctgatgaattggagaaagagtacgaatttgtggagctgaaagaaatggacgaatga

SEQ ID NO: 79394 - DNA, 651 bp, Heterodera glycines
  unsure (1)..(651): unsure at all n locations
atgggaaatgttgagctgcacactgaccacaagccattggcttatcttcttcagaaagcagacgctcatccaaatttggcaagatggctcattgaacttcagaactacaacataaaaatcgtccatgtggctggaaaacagaactcactggctgatgcactctcacgagctgcacatgagaacttatccgaagaagaggtaaagaatttaagtgaattaaaggatgtagccgaatttcctgcgtgtcttgtactatcatctgagtcacgcttggtcctcgatgagtcaatcaatgcactcacacttcgttccgatgacggtaagtcttatgtaattaatatgaggcatgaacaacaaatcgatattgaagcctctgcattcattgagtttctaaaatcaggagaaattcctgatgggttatctgacttagaaaaagaaaaattcgctgccacggcctcaaaaatgttaattgattctgaattgcttgttcatcaagaaagtgagctaaggcctaggattttcgttcctgtgtctttgagggcacttgtttttgattcgtttcattcatcacctcttggaggaggccacatgaatcttanaaagacgctaaagaatgccgaaatatttttggcaagatgcatgcagatatag

SEQ ID NO: 79395 - DNA, 2484 bp, Heterodera glycines
atgatgggaatattccattgcgccgaggtcatttcccccaatttcagcgcaatgcttcagggcgtacatggccaagcgcacatgtgcaaagcgttttattctcttcgttctgcattccgttgcggacagcagacaatgcgcgaacgatgcgcaaaagagacggaaacggcaaaaaaaatggacgaacatttgactgaaatgcaatggacggtgagttttataggcgaggaaggggatagctaattgagttaattaggcgtaaatgaatttggatgcaccgcccttccgggattttacattggcaatgtcccccactccacacccttttccctccatgcgtttacattttgccgggctctccttttctgcttctcctccctcccccttttgtgccatcgttttgtgccgtttctcagttggaatccctgggccgtgaggagggctgtcccgccgaggagccgtccaatttggaagagcttctctcccgccgcgtcctccccgccggccgtccgccagtgggggcggcgcctcttctgacactccgcgggccaaccgcgccccaagcgcgtcctttgccaacggcggacgcactgacgccgaaggacaaccaatgcgacgagcaacagcagcaactgttcaacgagtgcgtgcagccgttgaccgcctttcagcccgtaagcattgattggccaattccccgtggattggcatggcatttccccccccccccccctcagcaccctttggccgtcattaaacagccgaagctgatcgaccaagcttgccaagcatttcgcaacttctccgagtgccgtcttcgtgcccaatgctttcccctgtgggctcgcggaatgtccgccatgttcgacttcgcctgtggcccacggggcagcgcgctttactcggaagtaaaaaacacttttgccggatcaaaagctgacaaatgtggcaaatttggcaattaatggccaaacgatgcgaattgccattgttcactttgtttttaaggtacgccaatgcatccgtcgcaacatcgcgcgaccgaatatgaaggtcattttcatttccattcactgtcttttcccttagaaattcttttgctattttccactgatatcccccccccccccgaatttccatttgcttttatcccccggcactttttaggaatgcgtcgtcgccttttcccacggcgcccccaaagacgcgtgtccatccgcgcgcactcttttgagctgtgccgtgccagaactcagtgaacgatgtggcgagaaagcagtgcaatttgtgcacgaatatgtggcggtatttgcaaaagcggtggacccaaattgcgcactgatggggggacgacgagaagaagagagagataacggtggacagagagacaaaggggaaatgagagaaaaggtagaaatgagagaaaacgcaggacagagcgataaagaggagcaaaacatcgaagtggggatggagagcggaagaaagggacgtaagtaaaagcgaaagggcagacggaatgccaaaaataattgttcagctattgccgctttgaactgctccgatgagcagaagcagttggtccgtcactgtgctgcgccgctcgaagcgctgcacgcgcagttgggcgaactgttcgagggcggtctccaaaatgtgctgaagaatctgaacggattggcacctctttttgctcaaggtgcgtcccccgtcttccttattttccctttttcttcccttcccgtccgttggtatccatccctcttccctttccttccctcccactcaatccctccctttttgatcatttcctcctcccccttctcctcagggtgtatgcttggtgccgagttccgtcagtgtctgtctttgttgtcgtcctcctccgctgctgacaatgaatccaatcgttgcgttgtctcaagttgtctcgtggcagccggcgccggcatttgcgatcagccggacgcaacgcaagccatcgacacgcacttgggctgcgtgttcaaacaagtgagcagaaaagacgaagcagcaaagcactgtctgtctgttcaggtgtctgatcctgagttcggcaaatgcctgcgcaccactctcgtgcccatcaagcagttcagcttggcctcccttcgccaagcactgccccaattcgtcgattgtgtccacgaaattgtccagcgcacgtgcggacccattccgttgaatgtgttgcacgtgttggcctcaaaggacaatatttgcccagtgaatgggccaaaagcgacggaacaatcggtgggcggaggaaaaagggcggaagagaatggcaatggaaaatcattggttaaaggaagggaaaatggcatctccggcactccttgcgccaacgacatgcacagcggagatgaagtcggttcttggagaaatttaatgattgaatacatagccattttgcaatatttccaagtgccattaattggccataattggccgatgatttaa

SEQ ID NO: 79396 - DNA, 939 bp, Heterodera glycines
  unsure (1)..(939): unsure at all n locations
atggattcatacgaagttgagagaacaacgacatcaccagtcgagctaagacatcattttcacattccttctgcattgactgcaaacggcggcgataaatctgaggttaataatcagagcattagaaatttattcggaagttttcaaggctgttcgtttttcactaacacagaaaaaacacaaaagtcggctgaatgagcacacgaatttgacatcattcattccatcgcccggcacttatgtcaatgctgcgtttgaactcgacttggcagaaattccgcatcaaaccaataattcaagagagaactcgtggcaagaagatgacggactcgtttacgcaaatttgtcagaaattacacgacggaaggtctcggcgaaacgattgtaaaatttaattgttatttctctttccaggaaatcgaggagatcgatcgtcagccctttccaccttatcccgatgcatctgcacagcctatgtgagttttggaaaagcaaaattaaaaaaccaatgaaaatttagacggataagtaccaatggttggcgcgaatacagaacattgggaggaaggtgaatttttgaaggatgaatttaaaaaagaccttccttcaggacatattactttcatccggaacaaggcatttgccagtggaaagtttgttcctctctttcgcttttcattgtttatttgttgggtttagccaccaagaagtacggacaattacaaacttggcagaagcagtgcaactaacaaccaacaccacgattgtgtgccttccacttccactgacattgcatcgaccgcattcttcgcggaaattccattgcaccaggaaatgagaaaatccgacaatgaagccacactgaacgaggtcgaaattgaggcgaatgaacagcacaaaaaggcaaataaggttgtcctttanattanagcgttaatt

SEQ ID NO: 79397 - DNA, 576 bp, Heterodera glycines
cactctgagagtttcgcgattgatatgcggcaaacggatgagcaaatcgtcgattatacgcagccttttaatgcccgtttcccctgtttagttaaagacacggccctaatattgcatttttattagaaatgctcactcatggcggacataaaatctttgtgcattgaaacgggaaaagttggttcggacagctcacgaagaaataatttaagagccccggtgagcacgtgaatgtcctcttcgtgatacaaagagtcataggaatctattaaaagtcaaaatcacgactaattgtaatcaccaccttggtcaatttggcatcggattctttggacggccgacaaatttccgttgacgcggtaaagcccatcggactcaagccctttctgttcaataagccgagtcacttcgcagatgaatttgggaacaaatgctttctcccgtgtgcaaatatccgcgagagtgctgccaaagacgggctccgctaaacaaaaagaaaatggcagaaattaaaaaacgcaataataaactttacgtttgtaaattccacgctctcgcagggattccatggaagga

SEQ ID NO: 79398 - DNA, 1644 bp, Heterodera glycines
atgcaaattcacaatttggccataatttttggaccatccttgttttgttccgaggaaaggccgaaccatcaacgcaaggccagccaagacaaagggaagagcgggcgacgcaaatcatccgacaaacggtcacagaacgaagaccaagtgcagacagagccaacacagaacttggcctaccgaatgattgtctatggacagattgttgaattcattcttaacgagacggacaggtaattcaaatggaaatggtgccgaaaatccgaaatttgtttcgaactttcgccttttagacttgctatcttcaggccctctctgtagctgccgtctccaacttcggcttggcatttgcttatcacaggcattcaatcaatgtgattacagtaaatagttgctttttgcacactttcgttctttcatcgttcgcattcattttcctattcgttcattcatttgtcatcgtttttactgaacccatttccggctcaacaaattactgatccgtttttctcattaattatgtgagttcatccattttcctgcttcactataattatctctaccgctttccacggccaaactccaaatgttttgcatctctttgtgtgtagtatttcatgtgtattttttctattgttaatgaagattttttaaataatattagtaaaaacagacggggaatttcatttacggtttaattgaatatcaacatgtcctattccattttatattatttaatgatggggaataattgctttttgagaatgttcctccgatggatgaatttctgactttcggccggtcaattgctgacccatggaggagagtgggctgcctggcggagcccgtccttttggtcgtcgaattctgtcaagttcaagggcccaggtgtgttgacaagggtatttcgttttcatgtgaaaaaatgcttttcctacatttatgtcccaacaggccgctttactggttccccgatgatgggactgtccctatgcatttgcttgaagaaattgccggttggttaaacccattttactgccttaaaccgtactccagtttggcttatgagttcggagaacgtgcatgcgaatttgtgctgcatgttcaaccagcaactcgccgtccatctgcttgttcagtacagcacaatgttggacatcaccgccagggcttttcaggtcgacccttttaaggccttggcccttcgcacggattgcatttcattttattttagcgtcctttcgccattgcttttctgatgccttctcaacccactgcaaaaaatgtcgaagcgttccaacaagcggcggctgaactgcttatgccaatcatcgcctgcaacaaacgttacgtccattcgattttgcgtcaagcgatgctaatgctttcggaacgggaccagcagaatgtgcagtcatactattccacttcagggaacgcacagcaaattgtgatcgtgtcgaacaaactcaagtccgtggttcaaaaggtaatcaaccgacaattcattcgcaaaaatcttggttcaatatttcatttgcagacaaatgcgtggtttgagcgtgtttcagaccaattgtgtgaaagtgacgggtcggcggatgaatgcttttgcgaatgcgctggccccgaagagtttcgccg

SEQ ID NO: 79399 - DNA, 504 bp, Heterodera glycines
atgtccgacaacaacacacattgtcaattgtttggtatttctcgtgaggcgaacgcgacttcgcagtggattaatggcgagaagtgcgaacattgtactgtcgttgacttgggcaaccaaaaaatgcgggcccatgaatactcgggccgtttgcttgcccaattgcatggcaagcgcaacttcccatcagactctgctgttgcggccttcgttgtatccgttatcactgatttaaatcagctgttggtgctggcgcattacgtcaccccggaggctgtcttcaaacacctaagcctgtccatctccgatcagctgattctcttaaatggtctggccgaattcaacgtcaccaaatattccgtaagaatttcttaaaaggaactatctatcaatattatataatttagcaaatgaataagaagaaattcgatagacaaaagtgcataccatataaaaagatgaaattttgatcaaattgtttattgtataaatttatattatcta

SEQ ID NO: 79400 - DNA, 1291 bp, Heterodera glycines
  unsure (1)..(1291): unsure at all n locations
ttttaatctttttttacaaaatttttncggttatattgcgtatattttatctgtagttgcgctgcttcaacacgttaatgacttaatcagcttggatgaatgtgccgtggctgacttgggctgtggcacgggaatgcttcttctcggaagtactttactcggagcaaagtggattttcgtaaaatttttttaactaaggaaatttattttaaaggtttgctgttggcgtcgattgttgtcagaatgctctgtcagttgcaaaaaataatatcgataaatttgaattcgaaggatcgacaactacaaatctcgttttggctgatgttacaaaatttgtaccattcattggaaaatttgatgttgtcctgacaaacccaccattcggtacaaaaaacaatcagggtgtgaattttgtaagattatttcacctttgtgaatttacggcttttcaggcaccgatgtcgcttttgtactcgccgggttacgtatgcttaggccaggaggaaaattattctccttgcataaaagcacaactcgaaatttcctcactaaaatggccaaaaactgggacactgtgaacggaatggaatgtgttgctgagctcaaatggaatttggagccgacgtataaatttcataaaaaaacaaatgtcgacataaatgttatcctatgttcttttgaaaaaagataactctaaaattttgtttttctattaaaaattatttatttattagataatataaatttatacaataaacaatttgatcaaaatttcatctttttatatggtatgcacttttgtctatcgaatttcttcttattcatttgctaaattatataatattgatagatagttccttttaagaaattcttacggaatatttggtgacgttgaattcggccagaccatttaagagaatcagctgatcggagatggacaggcttaggtgtttgaagacagcctccggggtgacgtaatgcgccagcaccaacagctgatttaaatcagtgataacggatacaacgaaggccgcaacagcagagtctgatgggaagttgcgcttgccatgcaattgggcaagcaaacggcccgagtattcatgggcccgcattttttggttgcccaagtcaacgacagtacaatgttcgcacttctcgccattaatccactgcgaagtcgcgttcgcctcacgagaaataccaaacaattgacaatgtgtgttgttgtcggacatggtatttgattcagtgctaaaaaagtaaaattaaaagggagaagcagtcgaaggaa

SEQ ID NO: 79401 - DNA, 2099 bp, Heterodera glycines
  unsure (1)..(2099): unsure at all n locations
atgaaaggtccctctcttcgaatttattatgattttgttaataatttggacggcgtatatttttaattatttatttttattttttgtaaaatttaattatttttttcattaattctttattgtctttctgtccatcaattcgttcattagaatgtttaattgttttggtttttcatttttaaatgatcaattaattatttactaaaaataataaatattcattcatttttttggaataaaccttggtataattaaaaattaattatacaattatcattttctctatttgttactttcttattgttagcttggcaatgtaaaaagcctattgaattcaattaataatttatctttgttaaacttagttgccaaaatcattccaattgacataattatactattatctttttctttttatgtattatttgcaattaattttaattttattttcgattttgttcagtttcattataaattttttttaattcactatgaagacttaccgtgctgagacgaacctaaaaaagtatcagttataataaaaataattaaatttaaatgttataaagtgagtaaatcttataaaattatatattatgtaataatcaattatgaattacatactcattttatgtcacataaataaataatgattttgcaatttaagaaccgaataaatgtaatttttgaaggaaaattcgttgatgataatatttaaaataataaacacttgtttattatttttttacatatattcattcatttttaagtttctagctagctaatactttctctgatatcgatgtttgaattgaaatacgaaaagaaatgttgcgtaaacataatgctaaaatggctgcaaaaaacgctaaaaatactttttttaatattgacggcattaaatttgatgagataaaagctgcggaggaacggcatgaaatttaagaaaataaaaatattcggaaaagcgtggggattttgaatgccaaaaacatttgatcctttcgttccattaatgagaaagcgagaaccacccattcacttccttcattagtttcatactaaaatttaataatatttttataattagggcccggattttgaagcatttgcttaaattttttgctaacttatgacgccctacggagcacaaaaaaatccggccctctttataatttgtgttttcatttttaaggtccatgaataagccatttctgtctanaccctcttggagataattcaagcgttgcatctactaccacattattttacaatttttgccgcttccagttgtatttttgacgcacaaaggagaattccgagttctctatttttgtatagcatccattctgttcccacaattgttttccccattacaagcttaatcgcccctatttttgttaactgtaatctttcaggcacatcanacggatcgtttgagtctgaacctgtatctgttttctttttctgttgtaagcccggcgaacttttattcaggatggataattgcttgtcaatgaatgttcatcaataggatttgtgactttttccaagtcatatttctcagaatccgtcttttaatttttctagttgtaatggttcacactcagaattatgattggaacgcaacataacaagattttttccttgtcgtatcactgctgtcgaaacaatagattggttattttttccttttcacgcaaatacaaacaacttgaacatgaaatatagatgtcctctttattttcattagtttgaatgtattttctccagtttgtttcgtttccaattataaacatattgttggtcagattcctggcaaaacatttttcaactttaagttcaggtgttaattcaacattttttttactggtgcaaaaaatatttttaattttcccaagtaacgttttagtgtgcatatagaaatctgtatgccttttagttgcagttgttgaagcagctcattaattgtttttatttccttgttttcatagcttttgacaagtgttattgcttcggagttttgtagaaattcttcaaatcctgatttggtgcttgccgaataatcgagtagaaatgagaacaaaataagtttaaaa

SEQ ID NO: 79402 - DNA, 144 bp, Heterodera glycines
ctaaaaatggtcttgacacgcaaaaaaagcgaaaatttaaagaatatgagcaactcaggtgttgaagcaagacaaaagcggaaggaatggcgccgggagcatgcaaaaaaagctggatcaacaccaaaaaatgacgaaaattga

SEQ ID NO: 79403 - DNA, 322 bp, Heterodera glycines
acgcagtaagcgaagtattgagacggctacccgacttttggagatttgcaacttggggacccgacattgtggtcccaacttttggggatcccgacattttgggacccgacttttggggatcccgacatttggagtcccgacttttgggtataccgagatttggggaccgaacgacatttggtgagctgacacttagggaacacaacatacgggaacccgacttttggggatcccgacatttggagtcccgacttttgggtataccgagatttggagtcccgacttttgggtataccgagatttggggaccgaacgacatttg

SEQ ID NO: 79404 - DNA, 419 bp, Heterodera glycines
atgtactcgaccgggtcccagacactacccggactcggttttttgaaaatccaatacccggtacccgacccggtaggtccgggtccaaaagtacactggtaagaaaaatggtttattgtttttttgggaaaaataaaaaaattcaaaaaaccgaaaccgaaacggtataccgaaaatttttcttcggttttttaaccgaaaccgttcgaccgaccctcttgtccggtctctagtttttatacaatatcaaaataataaaatttgaaggaaaaatagtattttttgcaaaataaatattttttggattttttcaggacgcgatacccggattaaaatcttggacccggcttttcaggaccccatcaataccgggacccggtttttgcccaaatacccggacccgtgtaaccctactttaa

SEQ ID NO: 79405 - DNA, 451 bp, Heterodera glycines
gtacgttgatcattccgtcatcgcttttcttcgttccaatcaccaaattttcgacaaaagaggcaccgatttatatttgtggattccatcatcacactctacgaatggccaaccaatttgggatgtttttgcccgtgaaatttggccaattttttcggcaaacatttaccaattgggcttatcccgtggtgataatttcgaccatttgcttcgtcgcatttcgccaacaattctcaccgatctcaacaaattgaattcaatcaaatcatttggtcggttgcccgctgcgtttggtgatgattttgatgtgccaaatgcaacaatttcttctggccaagcgttgtccaaatggttgcactctccgagaaaagatggccaaccaaagcgattgcgttttcgcagaaatttgaacgcacaagcggacttagattgggtcaacaacttcaaggag

SEQ ID NO: 79406 - DNA, 191 bp, Heterodera glycines
atggctcatacaaaatttttttgccttctcagaagccttacgtggatgtgctggacgtggataactgcacaaacatggtcaaagaactgtgcaactgcgggtatgcaaattatgcatattgtgtgcttcgcgttggctacgcgcgcaccccctgctgccccagcgattacgacttggtctgctgcgcgaaa

SEQ ID NO: 79407 - DNA, 1544 bp, Heterodera glycines
ccccaactatttgcgcgccggcacccatgtgcatctgcagtccgagaatggcattcttggcgtcgtccgttattcgacgaattaaatttcaaaaaaaaaaattttgttttgacaattttaaaaaaaatttctccagggtccttatccgtaccctggtgaagaggacccggattggatcaatgccggcaaggaatccatcacttttttgcccggtgcctccacttttggctccgatgaatcatttggcatgatcagagggtatttatttattacatttaaatctttttaattggaaaaagtaaattcaattttcaattttcgtggccatattgatctgacactgttgggtgctctacaagtatccaaatacggtgatctggcaaactggatgattccagtaagttttgactattgctatccattaacaggccccgaatttatatgggctcaaaatccggagataaaatagaaaattaaaaattttcaagaaaaaaggctaattttttgcaaatttttaatcaattttcttaaaaaaaaatcgtttaaatttccaaaaattttcctgatctttaccatatttacgaaaatttttgaccccacaaaatggcaatatttaaatttacttatttattaaaatatatttaattttgtgtcttttcatggtaaaatggtcaaaggaatgggcggagcgatggatttggtcggtgctcccggctctcgagttgtgatcacaatggaggtaaacaaataaagtttaaaacaaattcaattacatagaacaatgctttttctgttttagcattgtgcaaagggtggaaagccaaaaatcctggacaactgtacacttccgttgaccggcaaaaatgttgttcgtcgtatcatcaccgaaatggtcagcagaatgccgtagcaaaaaatgcccctcccccctccctccccaaaaaattctcgatttttcgaaattctgaaatttgttgaagcgacggaattcaaatttcaaaattttattaagcctcgagaccaagaaatttataaaaattaacatagcaactttttgttgtaatgccgtaaatttttgtggtttaccaacagagaccgggatacagggggtgatcctttcaggatcttctcgataccttatccgagtaattaaaagcacctggatcaagaatcccgaaattgtaaacaagatctaatcttgaaatccgatccgggtcgatttctcgattcctcctaatccggaatttttctaaaattcagttctcaattggccaaattaaacactttaattactaacaaattatgtcttttatttcaaaaaaaaacaataatattttcacatcaggctgtgtttgatgttcacccaacggacgggttgagcttggtggaggtgtacgaaacgttctcagtggaagatgttgtgcgggccaccggctgtcaatttaaggtccttcccgatcccctcatattttttcattttatttaataaaaattttcagatttccgaaaatttgaaaccgatgttacaggcttgattgatcaca

SEQ ID NO: 79408 - DNA, 345 bp, Heterodera glycines
atgagaggaagagagacgatgagagtgagcggtgaaaagagtgttgtcgctgcttttgtgtacttcccccccccctcttcaccggtgactctcccctcttttaaaccggccccctacgacgaacgaggagagagggggcggggtgggcaggagcacctcgtctctcgtgctacagccggatccctccctttaaacaaaaaaattttgaacgcaaaaaaaaatttttttattcagctgaccgaaacgagccccagatgggcacgaatgcgccgcacgccggaaaattacgcgctgctccaacaaggctacatcaacacggcactgaaaaaggccaaaaaacactga

SEQ ID NO: 79409 - DNA, 999 bp, Heterodera glycines
atggctgcaaacactagaactcttctccaagttgtaactatgttacaggcccaaaaatccgcaggattaatggcggcaaacaatgaggtgcttgatgcattaaaccatgccacttgggaattacgttctgcacttgatgcacttaaagagcaaattatagcgcaaaataaagggtcagatgctcaagaaatggacgaagatgagaacctgccacaaataaattatgaaaaccaaccacaccctctcgatgaattatcccacggtcatttgccgaccctcttttgtgagaaacaaacattttattctaaaacaaaatttatttacgtaaatgaaatatgtggaaaagtatgcatataaacattttgatcataaatttcagtaataataaataaaaatacaataaattaagtttaaaatcaaaacatagccaccactgatcgcatgtaagagcacaaattgcagtcaaagatgccctattccgacatggtcaatctgttttaaaaggacaaataacatgcgtcagatttttaaaccgagtacgttttcatcatcaaacggacttgtcgtcagaatattataaattttaaagaattttatggcaattgacatagacaccaaaaggacaaattaatttcatgtatagtggtattggatcccataaattgacccaacttacaacaaaattaagcctttaattattaaattcttatcccatgcacgagtttacacggggaataattcaaacacttagcccgtgtgtttggaagatactggtatctaagtgtgacataattgttaaaaccagtgccatacgggcattgaaaataaagaattttaattattcttaattggaatttcacccatatttttatatatactaacaaaaatgtatcttacagacgaaagctttatgttgttaaaaatgtcctatcgaaatccgctgtataaaaactttcgacagccataactatcaaacaaacattacataaaatagttgta

SEQ ID NO: 79410 - DNA, 919 bp, Heterodera glycines
  unsure (1)..(919): unsure at all n locations
cacaatttgccaaacccaacttactgctgctggtgctgcttctgctggaattgttccgttgaacacnagtcaatggatcagccacattcttgatcagcaacaaggcgacaacactgattatgagcagcagcagagggaagcaacacagctgctggtgggccgtcggttgtcttcaatgcgatcaatgtgggaggagcggatcagtgaggagagcgaacaaaaagaagtaaaaaaattttgtaaaatttttaaaaaatttcatatattttttttgagtacgaggaacaggtcaacgcagcgctgtttgctcggcgccaatttttgttcccgaaatggcgctcagtagatccgcttactgcttcacttgtaagcattggatgattaaaatggatcattaactaattagagccaatgtggtaaataaagttatatattccacttcaattataaatgattggctaattaggaaattgaaataaattgtattaaagaaaataaaataaaatgaaattttaattttttttttctcataaatttatcatggcctggatcaaggcatgggactgtgtttttttgttgaatttggtttttaaaagctaacatgaaaaaatcaattgattgcttggaacatttaaaaattgtctaattttcaatgataataaaatgtttttaatcctttttgaaaactttaaattaaaacttttggtcgcaaatacatcattcaaattttcaggtggcatcacataaaacgccagagatgattccagtggtgaacaacttatccaaaaaactgatatttgcctaatttaatttacctttaatttaggacagccgaattccgcaatatcggcatcaatcactgatggagaccgagcggatggcaccgtatgccaaagttataaaactttgaaaaaataaa

SEQ ID NO: 79411 - DNA, 424 bp, Heterodera glycines
atgctttttctcctttttatatttgtgttcttaatcataaacaattcaactgacaaaacattgtcagttaatctgtgtaaaaaatgtcgaccaacttttgctgaaatatttggcgaagaatggcaaaatgaaataataattggaggagatgaaaatgaaaatgagactgatcaaaatgcaaattttcatcaaaatgatcaaaatgaatcaactgatcagaacgatcagttggatgttcaacaaaaaatcgaaattattcacaaatttcacgcaattagagaaggaattaagaaaaagggaaaatattcggcaaaaatttggaataaaattgagcaaaaaattgcgaaaaaattgggaattagtcgacagaaaatttataaattgaaaagagaattaaaattaaataaaaataaaagaaactcaa

SEQ ID NO: 79412 - DNA, 1052 bp, Heterodera glycines
atgctttttctcatttttatatttgtgttcttaatcataaacaattcaactgacaaaacattgtcagttaatctgcgtaaaaaatgtcgaccaacttttgctgaaatatttggcgaagaatggcaaaatgaaataagaattggaggagatgaaaatgaaaatgagactgatcaaaatgcaaattttcatcaaaatgatcaaaatgaatcaactgatcagacagatcaattggatgttcaacaaaaaatcgaaattattcacaaatttcacgcaattagagaaggaattaagaaaaaggggaaatattcggcaaaaatttggaataaatttgagttaaaaatagcgaaaaaattgggaattagtcgacagaaaatttacaaatggaaaaaagaaattggattaaatataaaaaatgaccaaaattattacgaaatgaaaaagaaggaatttattgcacgaattgacgagattaaaagaacgtccgaaaatggaaaacagaagcaatttgcgaaagaattgggcattcacaaagaaacattcattaaatggaaaaaagaatttggcattgaaatgggcaaaagtatatttttaattaaatttttaatattttttatttatttatgttagatggaattcgatactccaatgaagaaaaaatgcgcaaaatgaatgtttattataaaatgaagcgagaaaatccgtctttaagtgacaaagaaattgctggcattttgaaaattggatttgccaccctaaagaaatggaaaaaggaaaataattcgtaatttttcgtttttcttatttgtattggtttcaaatgatgctttttattctaatttttgttttttataatttttccctcttttatatgtttgttttttaattgaccaatacaaattaaaattgtcaatttcttttttttactgttttcggtgtagaaaaacccctaaaaaaaaaattcccaattttcttttccgccaccatataaatttcgatttgacaaaacatcgaccaaaaaaacatgattgagtaattaaatgcaaccaaataaa

SEQ ID NO: 79413 - DNA, 1385 bp, Heterodera glycines
atgggaaagcatcaaaaagcgatcagatcagccgtttggaatagggagggcaccgtttttgtgctcgcgtcggaggacactgcgattacgatgaacaacgccgagggcgaaacgctgaacactttcacatgcaacggcgaaatcgcggagttgaaactcaccaccttccgcagtttttccggcgaacgcgaggaagactttgtgagagggcggagagcaattagtgggggtaattagcaaatggaatgccaatcgcaagagaaaatgccggagaatgtttgatcaacctatgaaaaggtaataaaatatcccaccgatcagatcagtgccatcatctctcgtcgcaatttgatgatcgttcggctgaacaatcccagcctaccgaccaatttgcaattccaagagcgatacggcaatttggtgcgcacagaatggtgagagagggcgtggcactgacagaagattggattcgattgttttcaaatttaggtttggcagtggaaatttgttggttggctttggtttgtcaattttttcatttccattggcatttcttttgatcagaccaaggctttatcgtctgtttgtcagctgagcggtcggctgagtctattagccaggaattgttctccatccaggaatacaaaaccaatttggcctccattacggttaatgagccgctgggcaaaatgttttccatcggcgacaatttgtaagaatttgccaccacgaaatgcctgagtaagatctctttttaggctcaaaggacgcgacttggtggatttgggagagatttccgacttggtcaacgtcgactcggacgacagcggactggtcgaagtcgcgtgctcggaggatggttccatgacggcggtttcggcacggtcgggtgccgtttgtgtatatctgaccaaattgccaatgctcgccgccgcttcgtccactcatatcgccgttttggcgtcgttgacggagattagcatttaccaagacggagaaattgtaagggaaaatcaaattgcaaaaaccaatgccaaatcgaaaactgatcatttccaaactgattaactcatctggccaaaggctaagactgatcaatgccaaactgatcagctcatctattcccccttcagcaacccagtcagaatttgaacatcaaaattgagccttcgctaatcgccgtcggtgccaaacacattgccattgtgctgaacagcaaagcatggttttatgaaatcaagcgcaatggcacttcatttatgtacgaacatgactatatgacgaccattgtgaagatgaagctgaaccgcgattttgtaatggcgcagttggacaatcgcgtgcatttgcacaaagttaataccatcctaatcaatcgcttttga

SEQ ID NO: 79414 - DNA, 370 bp, Heterodera glycines
atgaaaaagagtgaattcattgaacgatttgatgaatttaaagaattatatggccaaggcaaacagaaagaatttgcgaaggaattgggcatttgtgaagaaacatttttaaaatggaaaaaagaattggcaccaaaataccacaaaagtaagcgaatttctaactttttaaaattatttattattttcagcgctaattaaaccttcaaattatgacaaattaaaaaaagatgaagcaatattttgaaattaaaggaaaattttaattttatttgtttaattaattaaaaaagcaatttacaacatttgttggatatgaagccaattatggtcaattaattattttttttgaattatgtgcccaaaaaaa

SEQ ID NO: 79415 - DNA, 576 bp, Heterodera glycines
atggagagaaaaattgtaaaattattaggagcaaatctgcaattaatacaaaaatggaaaaatgaattaaatttaaataaaaacaaaattaaaaagcgaatttatgaggagaaaaagcgcaaattcattgaacgatttgatgaatttaaagaattatatggccaaggcaaacagaaagaatttgtgaaggaattgggcatttctgaagcaacattttggaaatggaaaaaagaattggcaccaaattaccataaaagtaaaagaaagaatataattttagtgaaattaaaaatgtaattttttatttaagaacaccataccaatgatgacaaagtgaaaaagatgaagcaatattttgaaattaaagaagcaaacccaaaagtgagtgacgcaataattgccgaaaaattggcaattggattttcaacgatgagaaaatggaaaaaggaatgttcatgaaccatttgatcagtgattttatttgatcatgattttgatgaattatataaggataatttgaaaatttacaaaaatttatggttataaaaatcagccaaaaaaagataaaaagcccaa

SEQ ID NO: 79416 - DNA, 695 bp, Heterodera glycines
atgaatttgtggcttttaatatttattatattttgtatttataaaattgagtccagcaaaatcctaccagattttgatgaaatattcggcaaccggtgggacaaaaatgaaacagaagaaaaagcgataaaaattgaacaaaatgagaacacacaatcagcagaagttggtcaaatggatgaagaaatggaaaatgatcaaaaaaatgtcaaaattaatcacaaaattaatgatgaagcaactgatcagcaaaagagagaaattgtcaaaaaatttgatgcaattagagaaaagttgagggaaaaaagaaaatttgattggaaaatccgaaacaaaattgagacaaaaattgcgaaattattaggaacaaatattaattcaatatggaaatggaaaaatgaattaaatttaaataaaaacaaaattaaaaagcgaatttataaggagaaaaagcgcaaattcattgaacgatttgatgaatttaaaggattatatgcccaaggcaaacagaaagaatttgcaaaggaattgggcatttctaaagaaacatttcgaaaatggaaaaaagaattggtgccaaaatatcataaaagtcaaagtaagaatataattttagtgaaattaaaaatgtaatttttatttaagaaaaccctaagaatgatgaaaaattataaaagatgaagcaatattttaaa

SEQ ID NO: 79417 - DNA, 644 bp, Heterodera glycines
atgaatttgtggcatttaattttatttattatatcttttatttttgtaattgaatccggcaaaatccgaccgaattttgatgaaatatttggcgacggatgggagaaaaaagaaagcaaagaaaaattgatgataaaaattgaacataatgaacaaaacgagcaaagtcaaaacgcagcgattgatcaaaagagaaatgaccagaaaagtagcaaaattaatcacaatattaatgatgaagcaactgatctgcaaaagagagaaataatcgaaaaatttgaggcaatcaaaaaaagattgagagaaaaaaggaaatacgaaaggaaacacctaagcaaaattgagacaaaaattgcaaaattattaggaacaaatcgaaaattaatacaaaaatggaaaaaagaattgctgccaaattattttaaaagtcaaatccttttgtatttccctttcaaaaccatgacaatgaatgccctcggcttactgtagactcctttatatcccattattaccatttcaatacagtatgcaacagtaacgactttattccgggaaaggaatgatacaattcttaggctctctacctacaataattcggctcgggaacagatactgcccggggggagaggcccgatgtgaataaa

SEQ ID NO: 79418 - DNA, 316 bp, Heterodera glycines
atgaataaaacagaatggaacagtgaatggaaactacaaaaaatattccgggaaaagcataattatttaaaaacaattaaggaaattgacgaaatccttgacacaattaaggatataaatttggaggtaaaaagaaggctgaaagcgctcaaaccaaattccccttcagaatccgaccaagagaatgaatcaattgatgaagagcaagaaaacgatgatgaagaagccggagaagaagaagatgaagatgaaaaagaatatgatagtgatcaagaggacgaatcacaagaaatgcattcaagagaacaaacacatc

SEQ ID NO: 79419 - DNA, 248 bp, Heterodera glycines
cttcgacacaagcgcaaatacgctgagtttggtttgccacgcgttggcccttcacgcggaagtgcaagagaaagtccaagaggaaattgactcggtgtgcttcgacgaggtgtcgtccttgagaagtgtagaaatttgaataaataaattcccgttttcaaggacccaacttatgagcagctgagccaattgaaatacaccgaagcggtggtcaaagaaacgctgcgccttttgcccattgcgacgaa

SEQ ID NO: 79420 - DNA, 989 bp, Heterodera glycines
atgagtttcgatgtgatcgcccgcgtggcgttggggcagcgcgagtcgcgacagtttgagactgaaatggcacacctggcgattgagtcgatgcaaaaatacaataacactccgttcgattacgtcggcttcgctttcccgtggttcggcattcattttttggaaccgttcatcagttggagcggaatattgcgcaaagacccgctaattatactgaggaagcagctaatggacgaattaaaggcacgcaaaaagctgagggaaagcggagaacaacagcagcagcagagagcgaaagtcgacttcattgacctgtttttggagacggaacagaacgaacagcagcagctgacggagcaatgccaaaacgagggcgaagcaatgctaagcaaaacggcacttcaggtggggagagagaggaagggggaaggggttggcgctagtagtcaagttcgagagtcttggtctcgaaccttctcgactcgagcaaaatacttttcgggatgaacgtttcaattctaaattcgatacagaaaagttcggctctattgcactttatgagtccaatcgaccaaacaacaattaattaattaatcaaatctttttggcaattgcctaaacgctgagattttatatatttttgcttctttatcctttgtgctttcgaatgataccaaaaacatagggtttgttcgaacatcaacaaagttattgtataaaaagaaggtattaatgccaaaacgagggtgaagcaatgccaagtaaaagggcacttcagcaggtgggaaaagagaggaagggggaaggggttggtggcggtagtgaagtcgagagtcttggtctcgaaccttctcgactcgagcaaaatactggggcttccaaggatccgggtttcaattctctaatttgatacagaaaaatataaatgaatgatttagtctttaatatgtataatgttctagatggaaattcacgagaaaaagacttga

SEQ ID NO: 79421 - DNA, 383 bp, Heterodera glycines; identical to SEQ ID NO: 51114

SEQ ID NO: 79422 - DNA, 1582 bp, Heterodera glycines
cgtggccaatgattgcgctcaaaaagttgaaccgtacctccgaggtggacatcaaacggttgtgcagccttgagcatgccaatgtcatcaaaactttgtttggcattttgtttgggaaaggcgccaaaaaataaatttaaattgttgttccagaggaatttgtacgaaagagcatttcccgtgcattgtgatggaatactgtgaaaagggcagcttatttgagcacttacggcgaaatccgaacatttcgaaggtaaaattttaaaataattaaaaatttattatttaaataaaaattttaaattgtttgattgttgagagaatgtcactttataaaaaggaattataatttttgatattgaattaaagtaataattattaggtgataacctaaaaataattaatttttcataaagttaaaaatttaaatttttgttcgttagcaatttattgaattaattcattaaaattaattgcaatttttatgatttaacaaaaaaaaaatttggaactggattttctgggttttttccggaaaattcaggtccagctctaacatggaatccgaccgaggccatgacaagcctggatttttcctgaacctagtttttcttgcatctttttccaaaaatccaggccaaggttaagcatggaattcagttccagcctttttttcaaaaaatcgaaccctaaaaagcaaaaattatttttaaaaaatatttcaatttttcattttttcagtcgatgttcatcaattgttccgttcaaattgctgaaggtatgtgctacttgcactccttgaaaattgtgcaccgtgatctcaaatcgcccaacattctcatcgacaaaaataacaccgtcaaaatttgcgattttggctccctgtacagctgggatcagaggtgggcttggcttttattttagggggatttcaaagaaattttttgaaaatttttttaaggcttaactcgcaaacccaaaatttgcaaggcatggccagcgttgtgatgagcgtttgcggcacctcacaatgggtaaaatttgaagtgaataattacagaaaatgaaattgtaatatttttttaatttttaaaaattaaaaaaaataaacatttaaaatatttattcattaatagcgttagttttttaattaataaataatttttttaattaactaattaattttctgtttctattcattaaataaaaataattatttgttgagattgaaacacgggactgggttttgtcaatttccgctttttgatcctgtgattcgagtaattttgagaggatcatacgaatttttttacccatacaaatattatttttgaatttactttttcatttttctattttggtccagaacatgatactgatctgatcttttctgattttccaaaatttcgggtctaatatttattttatttttatttattttattttttaaattaatttaatttaatttttcacaccacagatgtcgcccgaaatgttgaccaacaagccatgcaatgaacgcgtcgatgtatggagttacggtgtcgtactgtgggagttgctgaccgggtgagtaactgac

SEQ ID NO: 79423 - DNA, 553 bp, Heterodera glycines
atggccgtcacgggtaacgcaccatctctcgtcacgggcacaaatagcagtagtggcaacaacagcaacagtaacaataacaacaacaccgaaattgacagtaacaacactaccgtaatccacaacagtaatcacaacaccaccagcgaggacggcgactgggtgaagtcgccgccgccgccgccgtcggtggaggaggcgactgttgtggactcggcggctgggctgaactgctcgccatcgttgtctaccatttccctgtccagcgcatcgccggcgagcgtcacctatttgggcgacagtggcgatgacaatacgacggtgcggcgagtgccaaactcgttcgatagacggaggacaaactctgtggacctaaggactgatatctaaggcgtgctaaaaactgccaaaataggtaagttttaggttctaaaaaacccccaaaataggtgccaaaaagttccgaatttaggggtgtaaaagacaaaatttattcaaaaaagtaaaaaaattaggtcaaatcagtattgagctaaaaaaattttaaaataaa

SEQ ID NO: 79424 - DNA, 836 bp, Heterodera glycines
atggcctaccctcctccgcaatatattcctctttatcccctctccggtgcaccaaattacgtcatggctcggccgctcgccgatggaaatttcatggcgcccatccaggccccaatggcccgtgatgcaacgacgcagcaacagcgccttggaccgccacacacaacgccaactgctccaccggcggcggcacaatctgccgcaccggcacactccgttcctcccccccttaatcccccagcacactccgcagcaccgccccttaatcctccttcaaccggtgcggggccggacatggtaagtcgccgtcttttaggaaatgtgaatcgttctctactggagctggtccaagtcgcccattcgcaacgaattgttttggagcgtttgttaatgacggcttccgtcaaccagatgagcagccgcggtgtcgatggtagacgagggaatgggcggtaccgaaagaaggccaagggctcgggccattccttcccgagccaaaagcagggaacagttgggggggcccgtccctctcgttttcaggaagcgacggagaaccccggcccaatagggcttgtggaaaagcccacccttgggaatggaaatgagccggccgttgctgctgttctcccagaatcggattcaaacgccgcatcgtctttggcttcgtcgacgtgatgcacatctgcaccgcaaggggggcgggggagactgtctccgacagaaattaaaacaaaaaataataacaaaaaaatatataaaataacaaaatcaaaacaaaattctttttacacattttttggtcggggattagcccaattgtcccacttttcacataa

SEQ ID NO: 79425 - DNA, 575 bp, Heterodera glycines
cagactgcgaaagcaacatttcggctcaacacgattttgattatcgatacgtatgtgatcaaaataattataaatgttacctttttaaaaagtgtggaggaggtgaaaagcgctcccaactcttaaggtaacttccacaaataccaaagaagttgttttggttgtggagggtggagagtttcttatcggtgcttcgttcaacaagtaatttacttaattttcaattactaataagatttcaccattagaaagaattgtacggcgaaagattactttttgcatttgcccaccattaattccctgcttttcaatgcttacaatgcctataaacttcattatggatatttttcatatcgtttccgtgcagaatcgaatgaatttaaagaaatattggacagattttttactccttttttgcatttgtatcgagttaataaggcaagttcactaattaattattcacttcaaaagagaataaatctcagactgaaaaactaattaaacaatgcatcgtttgaatgtttaagattccccttgtcgatctcttcaatggagtggatttcctttccattggc

SEQ ID NO: 79426 - DNA, 1081 bp, Heterodera glycines
atggtgcccaactctcgccgttgcccgtccatctgttgcccgttgctcctcccaacactgtcgcccacccaccgcttggccccaccaatcaccactgcccgcccaccaacaatcacccgaacactgtggacccgcccatcccgtttggccgtataaaaagaatgaaggatgctcgacaattacttactcttctgggcgattacttttctcgcctttttctcgatttcgccctttttgctctacctactcgccagcaatcttggctttccccttttgctcttgccctttgctttacctttctcactttggctttaccattttcaccttgcttatccatttcaattttgccttcgctttaaaaataaaaacaaaaaaaaccttttctcttttggctttgcattaaatttttccgcgtttttggcccctgatcatttctggggcatttctcattttttgtgcccttttgaccattgcgtgggcattcccccgtttttggcccttttcatcaccggctactcctgcccgtggtgcctattttgcctttgctttagccattgcccggccattttgtcgccgctttagtcctcgttcgtttccgttgcctttggccagcattccactgactcaggcccctttgtcccttttctggccccccttttttttccctgtgtttaccacagtttgattaagagtcttttgctcttaccagactgaggtctaaccgggcccttttttcgggctaaacttgtaaaacaaacgggactaagtactgtaaaggggcaaaaccgtcactccttttttactcaactttttcgctttatctttttttctctcaactatgtcggccataatccggcagcaactccgcgctcttttgaccgccatttcttctgactcattacagggggccgattccgatttattgccaaacgaccccacttctctggagtccattagccttaccgccgagaagctctcgcggaaactaagcaaggcccaagccctcctgaaagattggacgattatcctttcctcgtcgagtaaagaagtcagagagcaggaaaatgctttgtttgactag

SEQ ID NO: 79427 - DNA, 141 bp, Heterodera glycines
ctcaaattcgcgctgtttaccacggcaatgatttgactgtccgacttggccaacaatttggggccaaagtgcacaaaaaggccatccaatcactgcttcggtccgttctttcgtgcttttcccgtctttccagcccccccc

SEQ ID NO: 79428 - DNA, 786 bp, Heterodera glycines
gatgttgaacaagcagacattgctcaacgtgtcaccatgttttcgagtgttgccgaagagtttttgggaatgaaagctgctgaattgctcgccaaggagaaggagccggagagccttgcgaaacatttggacgatttgattgctgtgaagataattgcgaaagtcaacattaaggttgttttttttttgcaatttattacatatttgacaaaccacaacataggcgaacagtcagacttacactggatttgattggattgtcaatttgttcaagaagtgccctggaaaaaatgacagtgatgtgccaaaagaaaaagatgatgatgatgatgacgttgatgagattgctaccaaaaaaacaaagaaaagttgagagagagagagagatagatagatagatagatagataacggattcattttgttgtgagcttcaaaaaaaaaggatttaatgtgtcctttacttttttaaaaatccattaaaaatgcattttattgttgaagatgatgagacacaaactccaaaatggtcttgatgtgattgcaattttgttttttcttcgtgaattcaccatgagacaggattgcacgttgacaatttttcgtaatgagcacagagagatttgcagttggctctatccgagtggtggatcgtcaactctcctcataacaatccaattaacgttgttggaaaagcttggcccatatgcgtttgtcacgtaaccctaatttttcaaaagaaggaaaaagcactcctaaatttagttttgatcttcatcaaggctga

SEQ ID NO: 79429 - DNA, 385 bp, Heterodera glycines
atgatcagtcgaaagcaaaacaacaaatggacaaattgcttgggaaaatttttaaacgaaaacaaaattgaaagaggtaaattgaaattgaaattaggtacatatgtgtcatttattctttttttttattggtaatgcattttcaattacctaataaagtaatgcattaattttagtcattttttcgcatttttatatgttttcgttattcccgtctgctctttttttgcttctccaccacattgacatttattcgactgaccaaattgaggataagaaaaatagccacaaggaattggataccgaaatccgtacgctcttcaacgaaacaaaagtacggattttgattctttgggtttctttgaaatacaaaacaatcaattag

SEQ ID NO: 79430 - DNA, 282 bp, Heterodera glycines
tttaggtcgtacatttatttttgttgcttcgatgtcgccaaaatcgtctcatgtcaattacgatcttctgccggaaatttctcacaccttccgcagccctgaaccccgaccatctgttctagtttctgacatgttttctgttttgtgtgcttcgccgcttatcatccttttccttttggtaaatgtttaaatttggatgttttttctacataatttttactttttagtggcttcgtattggcatcaattttggaaaattcaagttttcgctcagtgctcttg

SEQ ID NO: 79431 - DNA, 744 bp, Heterodera glycines
  unsure (1)..(744): unsure at all n locations
atgacgacgaattgctgtgcaaatgcaatcattttgcgacctgcggtaaggtaacaattttttttttgcttgttttatttttattttccttanatttctttttcttgttgtcaggaaggtgtggcgagttatgttggtgaacagtacatggacgtgtgccggnctggtcgaggcggatactgtagtcnggtagtgtttttgaacgcggatggcacatttcggggagtcatcacattcgtgagtntcctaaaaagtttttatataggtatttttgaagagcgattgaaaatttaacaaccaagttttcccagtttatttatgatgaaaaatttgcagaaggagggaccaactccaattaacaactaattttaaatttttggttgaaccaaaaaaaaattgactaattttttgggggaagtggttggggaatttggtttttggggtttaaaatttaaatttccgggcctttttttttcgaattttgcaattcaaaaaggcccaaaaaaaaaattttaaaaacaaaaaaaaccttaaattggggccttaaacagggggattttttcttttttttttttttttttttatattttgttaaaaaagaaaaaaacccggcccccgggaagatatcccttttccctccccaaaaattccccccccccccccccgggggaaaaaaaaggggggggggggggggggggggcggggcaattttttttttcaccacccccacccaaaaaaaaaaaa

SEQ ID NO: 79432 - DNA, 201 bp, Heterodera glycines
acttttcgaacacccgatcaaaagcctcaatcatcgtcctcactcttctttgacttggctcggtgcactgaagatcattcgactcagcacgtcgatgcataccaacagatatttgtaaccgtcgttatgctttttcaactggtcaaatatgcacaaatcgcactgccaatcggtatggaagccgctcggtatcgtctttag

SEQ ID NO: 79433 - DNA, 627 bp, Heterodera glycines
atgagtagatgtctacggatgcttggaagtggtgtttatgaaatgatcaagtaagtgtgtgagtgatcgtgtgattagggacgagtgagtgattaggaacgagtgtgtgatcaaagagagacatagagagatcggtgtgagtgagtgttaacagagagtaagtgatcagaaaatgatcagagtaagagttagaggtcagatagtgattgggaactaataaatgatcaaagagaaaaaataagtgatcacaagttagtgtgaaagggtatgtgagtaagtgattgcgtgatcagaaaaataatcagtgtgtgagtgttcacatgtgagagagagtgatcgggatgagtgtgatcataaagaatgaatgattagaaaatgatcagagtgagtgaatgtagattagagtatgattaaaagtgagaatgagtcattataaagtgaaagagtgattacaagtgagagtatgatcaaagagagatagaagagttatcagtgtgcgagtgagagtgtgattgaagtagtgagggattacaaataaatgattgcagaaagagagagagtaattggggtgatcagagtaagaagtgtgtgatattgagtgatcagaagctgccagagtgggagtga

SEQ ID NO: 79434 - DNA, 1758 bp, Heterodera glycines
atgattattcttatttacagagagaatgagaccagcaatttggtggacaatctgctgaaacgcatggaacaatatgcgaccaacttggaagggctggtggaagaacggacccaagaatatttgggtgagaagaaaaaggtaagaaattaaattaatgagatatatttggtatttattcattcgggttcggatttgattgcactgaaaattccattgaagcaccaatcaattgctaaatttaatagaaagatttggtttttccaagcatgagtctatttcaattctggttaagtcctcaatttgatgacttaattatgatgacaccgaaactgcaaaaaataaaagttctattacaattaaacgagtgccgcactcgattcgattttggcatcgagtcgagaacttgatcttcaagaagagtataaaatcgactgcggcactcgatttttaaaagtttttctttcaattcaaaaacgaattaaatcgaggattccaagtttcaaaagggcactaatatgacggagcaggacaaaactccgtcggccgaaactccgccaaaaaaaatttttcaaacaaaaatttttcatgaaaaaaaaatcttaggaaaattttttctaagaaaattcgaaggaaaaaaatttcgaaaaattttaacgatggaatttcggcggcggaattttggggtgcaccgctaatataacattcaatttattcgtgaattgtaagaaatggtgttggggcttaaagttggcgtctacgtatttaaaaaccgtgacacttatcttggccggctctgctgcatgcacactaattggtaccaaatccttgataggtggaagatctgcttcatcaactgttgccaccgtccattgctgatcagctaattgatggcaatccggtccaagcggagtcgtacgattgtgtaaccatctatttctctgacattgtcggcttcacctcactctccgctttgtcctcaccgatgcaggtggaccggaccattatgattgacagattttttttgaaaaatttgaaaacccttttctctgccatcaatgtgaccagctttattttcatgcctctgcagttttctctttccgaaaagtttcaaaaaaactgaaaataaactaaaaaatagttggatgcttttttggcatttatactaataattttcaaaaataaaaggggaaaatcacaataaaaataataagcaatttttgaaaattaaattttaggccgaaagtgggggattattttataatcctcatcccaaaaaaatgttttccattttttgatcaacatatctgatcgctctccattctcatttttttttcatttttctttgaggttgtcacactgctcaacgacttgtatttggcgtttgacggtgttgtggacaatttccaagtgtacaaggttgaaaccatcggtgatgcttacatggttgtttctgggctgcccgaacggaccacggaccatgcgtcacaaattgctcaggtcccaaaaatttgataatttacggttttgaacttcctaatcctcaattttgttttaattcatcaaatcccgcttgtacaatttcattggttcaaaagcttacaaaaacaagcggaatgcgtattttatgaaatttgattcagattatggcatttatgcatctataaaatagggttagccgacatttgcggaccgacttttgcggaccgacatttgcggaccgacatttgcggaccactatttctcgatagaactgtctaa

SEQ ID NO: 79435 - DNA, 220 bp, Heterodera glycines
caggtcattgtgcgtctgctgcaattggtgtgcgacatcaatccggaactgcacacgaaccttcaactccaagtcaaactgttcggcaaagcggcataaactgaacggacggaggagggagttgggaaagaatgttttttgatgtgatcgtttatttaaaagacaacaattagttttatattccatcaaatataagaggttattaaaagtatcgtaaaat

SEQ ID NO: 79436 - DNA, 1882 bp, Heterodera glycines
cgacgtgttcgctttcaagtgaccggaatcttaccaattaggagcttaaaaactaatttcagggcttttacattttcatgccgaaatatttggaattgcaattcggcattccccaatacgaagtcaatcggctaatgggtctgtacaaacgcaaatggactgattgatacttcttataattaagcgataattggagtggccacatttgccgtcggagtaatggtgggcagtttggtgatgcgagtggccaaattgcagggacgaaaagcagccgcttgggtaggcactaattaactcattttaaaattgaatgatcaattgtctgggtttctgatcatttgttagccaattatcacatgtaattattcctcagggtttttgaggtttataccattatgctcattgaatcccgtggctttacttattttatagctaattaattaattccctcgcccgcccctgctgaaggtggcaatgaccggtgccattgcggcatgtttttctttgctcaattcgctggtcggctgcacttccacaatgactgcgttgggcgattcgctgtgagcaatggcagggattgaagtgcctaagcattttgacatttaattggctgtttaagtgttgctaacgcgaatagcaccagcagttgtgccgtggggtgccattgcgaattggcaccgctttacccggtctgtgaccccaacggagccgtgtgagtgatattaaaagaattaattccttaaaaatccgattggatcatgccaattgttaatttgacttgccttctcagctactattctccgtgccatgccggctgtcaacttggtgaaagtgcctttagcattttggaaacgcaaaaaacgcctttgttcgaatcgtgtctatgttcaccgactgaacgcgtgtcgcgagagttttgtcgggaggaaaattgccgatcaaaaatgtacatatccattggatcaaaatgaatgagaatttaaatgaaagcagcattttgtcaggtattggtacttcactaacgtggccatcggcggggtttgtttagcttttcggcattattatattattgtgcccagacttttgtcatttctgatcattttcacagattatcggcggaatgggcgttgtccccggtgtactgatcatgttgaggtaatcacccaatttaaatggcaattcaaaaggttaattaatcataaagatcagtgccaccaaagcatcggagcatttcgctcggcttcaacggatttttggtctctctgctcgcgactttgccgtcgcccatcgcatggggcacaatcattgataacttctgcctgttttggacccaaaagtgcggcgagaaaggcgcctgtgctttgtacgcgacggacggacttcgattttggtaaatgttgttggaaagtgatcggaaggatgccgaatgagttgacagctcaatttgtatgactaaatgagagcacaggttgatcagagaattaacgatcaggctaatcaaattatgccatttcgatcatttaattgaacggcagggatgggatgagagcaatttgagcaatgttccgatagagaagcaagggctgatcagaaacagattctgatcatctgatcactcattcttacataacataagtgctgccctttcctaggcttcactttgcgtacggtgggcttcgcattgtctctctgatcaccgatctgttcgtcatttaccacgcggttggactgaaactgaccgattcggactcacaaaatgccaacgacggagagggaaacggcgaaggcgacgaagaagcgacaaagggcaaaaagagaagcggagggacgacaacgaacaacgaattggagagggaacagacaaaggcatttttggaggaag

SEQ ID NO: 79437 - DNA, 491 bp, Heterodera glycines
atgagtgagggtgtcctcactgggccaattgactttgcaggccttcaaaacgacttgaaaatggcttataacatcacgtgtcttctggtaagaaattcaattacaacatcgtgatcaagtcactcctttagggtagtattcgtcttccacgaaagaaattttgcagccccataggaatttttttctgaaaattatttcagaaaaccctaaaggagtgatctgatcacggtggtaaaattgacgttttagtcagcattaaaagctatgctcatttatttttttcagaatttttcttgcattacaaaaaaagtatatttggtcttataattatgaaacgccgtttggggccactttaggaaaaatttttagatttttttcttttaattgttcaaattttttcatggggctcataacattaatggggcaggaatttaccgtgttcggtcattttgtcaaattctaaaactttgctcaaaatgagaagtatttga

SEQ ID NO: 79438 - DNA, 2775 bp, Heterodera glycines
atggccattggccataatgaattggtgcgggttgccaagaatcggaaactatacaatcactttgacgaggttcaaattgggaacaaccatgacgagttcggcaaatacattgtgttcttgccgaattggttcaatgtctatcagtttatttttgcggatgacaacggcatgccgtttggccgcgagttcaaaagtgccataaagcaaatgaaaaagtaatcatttccataaattcttacacttatctatttcatgaaaaattaattgcaattaaatagcaaatttaaaatgttttaaaattttggcatgcatgaccaatctttgccttaatttctatcaaaatcaaaaacttaatttttcggattcatttaagataaacaccaaaaatttaatttcttccgagaaaggccagcaaaattccgtcattaatatccacaacaaaatattttcagtgccaaaaattgccgaataatcatccccgcaaaacatttttagtgtttttttagaaatcaaaccctattaattagttaattgattaattcttccatatacccatttttaatcttaaacataatgctacttgattaagatgtttggacgaaattgtagaggagcaagaatctccaacacatcgtggcataaaaacaatttgcatattgccaagaaaagtggacagacgatatgattacaagaattgggcaaataaaattgaccaattaaggaatggacaaaacatattcaaatgcaagaaatggacaaaacgccaggaagtggacaaattgaacaaaatattcaaagcaatttttgagggaaaggcaatccccgaaataatatgcgatcaaatcactctaagaaaagggtataaaagaaacaaaaatgggaagacaaacaatgcagaagctacaaagaatggttctgatgcggaaagtgaaaaatcggactcggatactgtacatatgaccccaaaagtggcgactacggctacggtaccgaaatcactgccaccgagaagcgggccaagtccaaaagcaatgattggatttcaatcaagtccaaaaatgccgagaaaattaaatgcgagtgccatcccatcgcatagttccaatgacaattattacggtatgcttggaccactcaaatcaactccaaaatcgtcggcaaaattaaatacaaatgcaaagccatcacaataccgtaacatcaatggtacagttgacgattattattacggtggaaataaggaggacagtgaaactgatatggaagaggctgacccacgcaataagagaacacctccaaaaaagcatagaaaacaagagaagctaagtgattcgcgcagactggcgcaatttcaaagtataaaaggatacggtatccatgatggaagtaataatggaggaaacagtattccaacaaaatctggtagttcttcgacacctatacacaaatcatcaggcaacaatagcccaaaaaaaagtcatagtccaaaccagcacagtctaagcaactcactaaaatacagtagcccaaaaaaggcggcctacagtacagtaaatttacctgtgaatccaccacacaaaaacaacacaaattataatagcctaacaagcgaacaaagaggtcgaaatcttcataacgcaaacaacggagggcatcatagtcataaaaatgaaggttatggtagcccagctggaagtacgaatatgaattcgctgtccaaaagtcgttctgccaacaatagtccaaaagaggcggcctacagtaaccctacatcaaatatacatatgaacaccagtcataaaagcccaaaaagcgagcaaaaaggccgaaatcttcataatccaaacaactcagggcacagtaatcacaacaatgaagggtacattagccctgctatgaaaaaaaatgttaatttaattccaaaatttttctttgacaacaatagccaagaaaaggcggataacagtaaccctgcagcaaatgtacctgtgaacttgaagtccaaaagtttatctgcaaacaatagcccgaaaaaggcggcctacagtaaccctgcagcaaatatacctgtgaacttgaagtccaaaagtttatctgcaaacaatagcccgaaaaaggcggcctacagtaaccctgcagcaaatatacctgtgaacttgaagtccaaaagtttatctgcaaacaatagcccgaaaaaggcggcctacagtaaccctgcagcaaatatacctgtgaacttgaagtccaaaagtttatctgcaaacaatagcccgaaaaaggcggcctacagtaaccctgcagcaaatatacctgtgaacttgaagtccaaaagtttatcagcaaacaatagcccgaaaaaggcggcctacagtaaccctgcagcaaatatacctgtgaacttgaagtccaaaagtttatcagcaaacaatagcccgaaaaaggcggcctacagtaaccctgcagcaaatatacctgtgaactcaatgtccaaaagtttatcagcaaacaatagcccgaaaaaaatggcctacagtaaccctgcagaaaatatacctgtgaactcaatgtcgaaaagtttatcagcaaacaatagcccgaaaaaaatggcctacagtaaccctgcagaaaatatacctgtgaacttgaagtccaaaagtttatctgcaaacaatagcccgaaaaaaatggcctacagtaaccctgcagaaaatatacctgtgaacttgaagtccaaaagtttatcagcaaacaatagcccgaaaaaggcggcctaca

SEQ ID NO: 79439 - DNA, 931 bp, Heterodera glycines
atgggccatttgaatttggacgaagtgttacaattcggaggttcaaaagaggtggtcatttgggataccacttgcattcagcagaaagtgcgccattcaatgaggggtaattttgtcacatcgattagggacttaaaacaaatgtttagaattgcatgctgggaaaatcgaagtttcgaattgttacacaaagcctgccgaattgacgggcgaaccgtgcggaacatcgggtcgacaacgcattgtgactacggtaaatgagaaagagccaatgatactcagcgaggaagacccggaagagttctcgtcagccgacgacagcgaatcggacatggaattcacaccgaggacgacgacagacgaccacggcacggccgaataccttggacggaggcggaaaaagtttttgaagcagcgcaatataaagcagagagtgattgccctgctgcggaagttcaaaccggatgaggtggggtgggcgatagcattcccccaaaattttttgtttttcaaattttactcgaattttcatttaattctttcatctgtttcccgtccatgccaggtaatggcggaagaggaagagggaccgcacacttccggctccattgtgcagccgactgaattggaattgcaagaaatttttgaagaattggagaacatcagcgattcaggacccgaaattgaggatgacaaattaaggtaaacatattttcttgtgatttatttttaaattagaattttcagcatagtaagcaatccccgcccgaagatacgcccttttttcggttcaaaatcggacattatgcctccgataatcgacttgcaaactgaggagggtctgttcctgtctgacgaacttagtgctgatagtgaggcgagtgaatgccgaccgattgcctcacttttggaaacccttttcagattgtga

SEQ ID NO: 79440 - DNA, 1908 bp, Heterodera glycines
atgcaatccgtattaatcttcagcaaaatccgtcgtcttttgactgcgagtttggccacactccgtggaaatgcaccttttacagccgcgtttttactccgtctttttgcttatgcaaattcggatgcagtcggaaaacgcgagaaatctgaaacaagcgatccgaatactgagaaatcgaaggctatacttggaaaaaaacagcaattagtggacacaaacgatgttcgaagtgaagtggttcgaaggaaggtcgtttagtttatccattgtttttttacaattggatgtccgtttaggctgcacttaccttattaaaagctccgtttgtattgaaaaccaaacacaaaaatattcaaacacctgaggaacaatcatccgatgatacgcttgtgttcatgcgaattctcaaaagccttacattttttaatgttcaacttcttagacgtcttcaaatgctcgacgaaaaggtaaccatttttctgtttttcattttacttgcatttggttttagtgctttttgcacggttttgcccaattcgctcttcatttgagccaacgcgaacccggcaatttgcttttcgttagtttgttgcaagaaggcattttccatcggtactttgctaaacatggcgatctttttcatcatgacaatctgagtcgagcaaaggttcatcttgagtttttgtctcattttttaccatattttttaggatgattggatttgtattttggcgcacatttttacggctaaaatattgccattttacgtcaatttacaagggacaaatgagtcaatggtataattaaaaaaatgattgcttttctcatgtattattcataaacagcctgtcttgcctcctcttgacgagtcaatcgaagcacacattgagaagcataatcgggaagtaaatgaactgttattggcatgtcttcagtttgcttccaatgaccgacgattggaagtaccggaagaactttaacatacaaaatttgcgagatgccaaacaccattcattttcagaaccccgttttcgcattgggtggcctttcagcggaatgtctgagcagaagccaaattgactttgtgccggctttcaaaagtgaattcatcttggacgagtgtttgtttcctcttacgcatttgtcacggaaagaccaccgaggagtcaaagtgctaattagaaaggactcccatttaatcataaccaaaatgccattgttgacagattcattacaactcctatgcatatgacttttggaaaaaccccgatgttgacgcattgggtacaagaaacaaactcaccaagggcgaacagtggtatttgatcaacgatttcaacgttagtcgaacattcatgtaacaaaaaaaacagcgcctttttagaaaatgttgactgaaatctcatctggtttggactacatcgcccagtccaaggattcattgtgcaaagtggcgaaggaagtggccgatgagtttgacgtgaaattccgggaggcgtttaagatgaagcgaaggaaggaaaaggaggataaagagaaggaaggcgtaaaggaggaggaggcaggaacacagccaacagctcaggagaagccgaaggaatgaggaaaaagcgaaagagagcgaccgatggacacatttcgcgttaaatgtactcattcaaaaccccaatcaattcatctcttcaatattggcttatttttcgggaaagacttcatctttattctgcggtattattgtgtgtcattgtcttcagaaaatgtgttccttttgttcccagttttgttgtgatgtggtattattattgttgctcgttgaatacattttacgtaagaaattaaaaacatttaaatgcttaattcggtgcagtattttcttttgtccattttactactatgtataataaa

SEQ ID NO: 79441 - DNA, 2242 bp, Heterodera glycines
gtaccaacttttctccgattcgctcgaaggtcaaatgttggtcgacttcacaagagtgccaaaagctaatgtttctgaaacaaaagaaacgacagttcaaaaagaaactgtgaagaaggaaaaggatgctggggtcaagaaaaaggccggaaaaccgggagcaggaggaggaaagggagggtcacaactgagcaaaaaggaccaaattctgaaagaaagtcgcgagaagaaaaacaaagagcaaattgagagcgacagacaaaaaattgaatatgccacaggaataaaggccaatgtgagagaagtgaattcccctttatttggtactgacaaacaaaataactaatttattttattaaggcaatttttgcactcgatgatttgttgcgccgcttggagttggacgagtccaaagcattgtgcatgtatcaaaagatgttgcggtacaacgaaatattttcagaacggttggagaatttcgaaaacatcgacaacaaacggatcgcggctttgggtattggaatttgttaaccgtgtcatattattgtacagtaatttctctgctcttcagaacttgtcgagtcaataaaagtgattctgaccaaatattatgaccatttggacagtcagcagaaggacaaagtttgcgtgcccaatttccttgttaatcttttttctcgttagattcaaaccctttggctttcgttgggttttggagttgctgattcgtcaaaacgacgtgcggataaggcgtacaacttggacattgatcttgtttattaccaactccaatacgggggaagaatgttggaaattttgtcagaccctaaaaaggacgaaagagtcaccggatttttgcccgatgcttggcagcggaaaatgttggatgcggtggaccaaggttgacctaattctaaccaggggcatttattactatgaaaattgtttatcttacaagtgcaaattttttaaatcattttttacctatttaaaaaaggactcacttccgttaagacaaatccgctttgattgttgcgccaacttcggccggtaaaacattcatttcgtactattgcatcgagaaagtgttgcgaaaaagcaacgatgaggtcgttgtttacatttgcccgtcaaaggcacttaccaatcagtacgttggctcagtttatgcgcgttttcgggtaatttctctaaatttacttgggtatttcattttattatataatatttacagtcaaagaacatgtccggtggaaaagttctctatggaatttacaccaacgaaattcgtgggttttatgaaaactggcaaattgactccgcttactttgttcagttaacaacccattgaattgccaagtgctggtcaccaaccccgattgttttgagcaaattctcctttccacaagcgaaagatgccgagaattcgtttcccgaattcgatacgtcattcttgacgaagttcactgtattaagttagtcacataattactgtaattgtattcatttgagttcgtttctttagtcaaaaagacacccaaggcctttctcttggccatatttgggaacacattttcctgttgatccgttgcccttttcttgctctttcggctacgattggtaacatcgaagaattgcgcgattggcttcaagaggccgaacaactcaaaccaattgatggagcaccggcacgaacagtggaattggtaaattataaagcataaaattaattaaattaattttaaaaattttttaaaagataacttatgacgagagatggtcggaattggaaattgcgctacataaaattcgagtaagatttctcaatttttattaaaagttattttgcattaatttttaggagtgtccaaaaggcgtgcaattcgagacggacgaaaccaaatttttcaggggatcgagcgtgacatccaatgaaattgaagacggaaccggtgaggatgcggcaaatgaccgggcgagtgtcgcaagtcgggcgtccaataacaattcgccagtaccaagcgaaatttcgcaacagtcaaagtgacttatgaaaattgagattgggaaactgtgttttatccagagccacttggaatgacgtggttcagtttttcaacccgttctccgtatataaattggaaaaattgcgtatgtttggaattccggctgaccaacgtctcactgctcgtcaagtgcttgaactttaccaaatgatgagcgatgtcgacaaaacagttcg

SEQ ID NO: 79442 - DNA, 805 bp, Heterodera glycines
atgctgagccgcacttggatcgtcgcaatttgtttttatattttctttggcacgattttaccattctctgaagcaattcgtttttatgtggcttctaacgataagaaatgtctgaaggaagaaattcacaaaaatatcgtgttgacgggcgaatatgaattaagcgattctgttgggcacacaacgacagttcatgtcagtgatttaagcagattataacaaattgatattggaatttcaggtcactgatactcgtggtcacactctgtacaagcgtgaaaacttcccagaggcccgtggaaaatttgcatttactgcggacgaatacgacattttcgaaatttgcttccaaatgcatggcccgactcgtaattctttgactgttgctattttcaagtgatgcttttaatttccagaccaacaaaagttaaacagagaagtccatttggtgctaaaacatggagtggaggccaaaaactacgaagacttggccaaagcagaaaaactgaaacccctcgaggtggagctccgtcgtctggaggatttgtcggattcgattgtgcaggactttgcttacatgcgtcagcgggaggaagaaatgcgggacaccaatggtatttacttttcctcccaacataaaaccatcttatttgtctgacaataaacaccattaacattgtcagaatcaaccaacagtcgtgtgctctacctcagcatcttctcaatgttgtgtcttctcgggctcgccacgtggcaggtgatctacctgagaagttacttcaagtcgaagaaactcattgactga

SEQ ID NO: 79443 - DNA, 2773 bp, Heterodera glycines
acgacggagctccacctcgaggggtttcagtttttctgctttggccaagtcttcgtagtttttggcctccactccatgttttagcaccaaatggacttctctgtttaacttttgttggtctggaaattaaaagcatcacttgaaaatagcaacagtcaaagaattacgagtcgggccatgcatttggaagcaaatttcgaaaatgtcgtattcgtccgcagtaaatgcaaattttccacgggcctctgggaagttttcacgcttgtacagagtgtgaccacgagtatcagtgacctgaaattccaatatcaatttgttataatctgcttaaatcactgacatgaactgtcgttgtgtgcccaacagaatcgcttaattcatattcgcccgtcaacacgatatttttgtgaatttcttccttcagacatttcttatcgttagaagccacataaaaacgaattgcttcagagaatggtaaaatcgtgccaaagaaaatataaaaacaaattgcgacgatccaagtgcggctcagcattctgacagaattggaaagacacatgaactagaagaaaaaagtcaaatatctgtgaataaaaaagagaaatgaaaaaggttgtattaaaaaaaatacctacctaatttgttttgtgcaatgctaattgcattatttcagatgcaacgttaacaaaaaaaaattatggaaacgaaatgcaaaagaaaaataaattcaaattttcgagactgtctttactttgagtttggttttcgagaatgcctttactattagtttgagtcccaactcccaacaaacttactttgcatatcaaaaaatcacgccgaaaaattttgatggaattccggctcggataaaatcaaatttaaaagagtaacttggaatggaaatattgaaaatctgttaaagtaaattttcaaaaactttctctgggcgtgctcctttccgcatcgccgatcccagatccttaatttaaatcaaaattaacaacaaaaatctccataaaaattaacgagcagttttccataaaaaagctgaaaacagaacccacgttgccgaaaaatggcctgtggacctgaatgattatgtttttgaaaccacctgattaaccgaaactgaaagtaattggtaaactcatttagcagaatttagaaattgccaaagccacatatgaaaattgatggaagagccgacagaaacgaatgaaaacgctgcgattgatggtgctagcaaaatacttcatttttgtgattttttttaaggtgacctaccgcttgatttggatacaatacgactcattccttgcccttacaccgacattataacaggctttagaataacatcctttattacatcatcagttcgacatttcagaatttgctgatgttgaaattttcctcatctctctcgattcgcttttgcttgagttgtgtgcccatcgttaccacaaatgggtgttgggtggacagaccatcgttctctgtgaacaggttctttctattcgagtattactaataaaaaaaatgtctttgaagattaaacaattcctcggcggattggaagaactcaacgcaaagttcaaattggtgacattcactgaattgacgcctttgttcaaaagcgacacttttctcgccttccttcacccgtttattctttgttggattaccaagagcaaatgggctgaaaatttggagtttttcacttctcctcttgacgagaaatggaatgactatctgcatcagcttacgccatcctttatgcttttgtcattggagaatgccccggacataatcaaagagcccattaattttgctgaccgtttcatttcattaggtccattttttgtctctttaaatcgattgctttctttttagcattttccctgataaacgaagcaataccggtagttttgttcaatggcttcaccatcaactttatatctgttaatgcataccgtttatcaactgttccgctgaatatcgaaggatttagtcagaaaatcagagaaaaatggccagaaacccgaggccgtaagttgctgagtatgcgtaaacttgtctatatttttgtctgttacctttaagttgcttatcagacacaaaattctgatttggtttcatgtcaaaatatcaccgacttttgggctgttgttctgcgcgacgaactcaaagaggccgaaaagaataaagaaaaattggacgaatttcaaaaattctgcaacgctgttcttttgtcggcattaatctgcgaagaattgggagtaaaacgccgttatttggacacggaagaagattataataaggggccttcgccatcggtgaacagttttcgtcgcggattgttggaacgagcccagaaacttttgtcgggcgctgttgaaaaggttgaacaataatccaattccttattttaaaacagtttggtttagcaaatccttttctcacttgacgacatttgggatggccgaatggttttcacttgtttcaagaaaataatgtccggcgaaaaggtgttcgaaatatttttaattaattggttgacattttgttaaagattcttccattacgtcgacaagagaaatttgcacaattgcacaaaagtgtgggacttaccgtggcaattccaactgatcttgaggacaaattacttgacccaatttctccacaaaatttcgaacagcaaagtacaactggtcaatgtattttctacaaagtcgaaaacgaattgcttcgtcaatttattcctgattttctggag

SEQ ID NO: 79444 - DNA, 1428 bp, Heterodera glycines
atgaatttaaacgggccgccgatggtatctgaacaacgcttctcagaacagttcagaaaaatcgcgacgcctctgaacgattttgcttatgaaatttctgccatctcaaagattttgctggatctccagagggatttgacactgagacggtgtgtcgtcagtccggaagaccttttatcaaaaattaccaagtatggacagattttgtctcaataattaagagaataaattattccaatttatttctggattttttttagctgtgaagacgcctggaaacgactcgagacacacaatagacaggtggaaagcatcgtcaaccaaagtctgaaacagttttggcgacgagaaattgaacggattcaaaatcagcaactggcggttcgtgacaaggcacgagaattgattcagcttcggagtttggccaaacgggcattcaaagtctgtccatcgccacctttaaacaaaaaaacacttctttaggtggcacaacaattgaagccgttcgccacgcaaatggcttctcttatttctgttatcgatattcgacgaagctccgactcagtgcttccatcaccgatggaacagatttgcatgcaaatcacaaaaatggaaccggacagtgaaagtcgagtggcagcgatcgagaaagaagaaacattgcggagggaggccaaattggaggaagaaatcgcacaaacggaagaaagggaggcgttaaaagcaagaaaggccctaagggaagtacggcctgcgacgcccaaaatgcgtacttccaatcaacgtgtgaaggagacaaacagagaccgtggagcggacgcactcatcagagaaggcactcattcgtgcctttcctccccttgtccgtcaacaaagagacatcagccgcaagtgaatcggtactcgaggattgaaatataattttctccaaaaaaaaaattttttttttagccatgtgcatcgtaattcggaaagcaaagtttatgaaccattacaaatggacaatatagtcaactcggtaattgcgactctttgtgaaaaggaggaactgccgcgtcagaataccatccaaaagcaaaccaaaacaagcgaaaacactattccatctgaacgagaggacaacataaaaagggaaatggaaactgaaataaccgcggagaaagaaacaaacagtcaaaatgtggaatcagtcaacgcagtggtcacagcgcaaatgacaagggggagggacccggagctgttgcaagcgagggaaaagctgctcgaggcaatcagagagaaagtgaagagaattgaatgacctcgcccattttcactaattatttcgattattctagtcacttttttaaccaaattgttagtttttatagctcaggaagtcacttactcattgctcaagaaataatctgttacatatgcataaataaa

SEQ ID NO: 79445 - DNA, 204 bp, Heterodera glycines
gtttcccgctctttttttagcaatttctctcctcatatggcctggaactgatccaaaaagtgaaattcgattgcaattttaacatcgacttcccttccgaatttgccctctccgtttgtcaaccgttgggcctttccacactgtcattcgccgataattcgagctctcatggcatttttctgaattgtgacccaaattcgcgga

SEQ ID NO: 79446 - DNA, 743 bp, Heterodera glycines
atggaccagcaaagatgcacgcgagcagcagttgttggacaacgaacgttatcatcggcacactcggatgaacacactccgacggcacagccggtaagggagccgagcaggcgcaaaaaaagtgccatccgaacgcggcattttgtgagtgatgaaaaattaatggaaggggtcaagtcgaacatccaaagaaatatgaaaatgccagggggtcgaaaacagaaaaataatgcggatttttctaaaaagaaaaaattaaagtaaaatctaggaatttttgccatattttcgggttttgttgagttaggctaattacctcgagaatttcaaagggaatttaaatttgttggacaaaattaaataacattattattaaaaaaagaatctatgcaaatttaaaaagttttttgacaaattcgtttttcttattgcaaaaaatcaaaaaattcttttaaagaaatttttaccacaaaattttttttgttattctaaaataagtgttttgttccaacatttttttggcagaagcattcccatcgaagagattcagcaaatgaatggcggcacaatagcaaaacattccaacgcctctcttctgacattgtccgtgccgggcacggtgattaaaaaaatcaaaaaatgaattaataaaatatttattacataaaatttacaatatttgaaaatttttattttttcagagttcaatcgtgctgaacgcattcgacatgaacccaaattga

SEQ ID NO: 79447 - DNA, 2184 bp, Heterodera glycines
gttgggttaattttttaatttaaaaacataaataaatttttatttatttttgttgaattaaaataaaaaattaatttcgaaattttcatttttttaattttgaaagctgtcaacacaaacaattggctcaacaccagagaagtgctcaaatattacgtgtacccgaaccgaaccattgacaatgaggacaagctttaccctcccacctattacaaggcattggaaaattaaaataaaatgaaaattaacatatttaaaatagcaaaactttgaattttcggcgacgaaaattttgacgctttctgtctaattacttaattacttctattatcctggactcaatattttttttacttggattttactattgtatttttttttgtctttttggggtttcaattgggaaattctaatattgtttttttagaattcaacccttggaccatggcgattttgttggtcagaccgtaagttttggaaaatttacaaatcaaaattattagatattttttatttagcggtcaccgattttcattgtacatcagtggacccattcaaccatgaagaggacacttcggatgtgaccacatcggtggaacgtaatttggaattttaaattgaaattattaagaaaatttaccgatttttagaaatttttgctgtttttggagtgatatttaattaaaataagaagaaatccgtttcaatttttcatattttgccaaaaagttaaatcgacaaaaattggactaaccagaaaaccagaaaaagtttattacgcaaaatttctacgttttttgaaaatcgcttaattttttactagtaattccacttcgaagtttattcaattttttttgccatttaaaaactgtatccctccaagaaagtttcttcaaagtgtcaggtattggttatctttctacataccttaataaaaatggcatttcccaaatttccatttaaatttttcacattttttcaaaattttttgccatttaaaaatcgttccccctcccgaaaaaaagtttctgttcgtcgtgcggtcccatttatgctgtgcggctgcgcgttggacgtgctcggcctgctgtgcaacacgctgtgccttctgcggtccaacccgtaccaatctctgtttgtcaccgcgttggccaacatttttgccggtaaaaacaataggtttaatttcaatttttgtattctttcttggttactgtaatgaagggcctggtcgacttcaactgtatcatactgtacatggcatcggtgggttgcatttactgaaggattttttctgagcatgaaccgaactaaaaaaattgccaagtctttgaaaattccattgcttatttttcagaaattttttggttcgacccattgagtttgactttaggaggcatcggtcgtattaattgatttttaagggattttttaaaaaattttgatgcattttggcgccaatttcaatgagaaaagctttaccaaattggggtttattgttaggagattttggaatttttgaacgaaggaatatacctattgccttgtaaagtataaaattatttttctattttttgctaacattaattaagctaatgccaaggtaattaaaataaaaattgccttcccaaaaatttcatttttcggtgtccaaagaagttggaaataagctgtacaaagcttctgagttggacaactcattgtttgattacacatatggcttttcattcattttgctgaaggtaaacaaaaactttttttaaaaacaaaattattttaaatgaaatcattttcatgtttttactttatattgtaaaatatttaaatatgtttaaatatataaattttattctattctcttaaatttttccaaataattaaattattttatttttggcaattattttaattttttctataattattatattaatttttttattaattattacaataaataataaaattcattttaaacattttttgaatatttactttaaattgattttgtttttttttcaagatcagctttttgtgcactgaattggctgctcttctgattgtcattgttggaatttcaaagattttaaaacaaaaattaaatgattttcggcaaaaaggtttacatgtcaaagcgtgacgaacgcacatacaatgctcatcggatgaggtcaatgttgcgca

SEQ ID NO: 79448 - DNA, 1827 bp, Heterodera glycines
atgcggagcatcaaagatcaaaatgaaatgataaaatttgatgaatcagtccatattatccaaaacgagaaggtattattgagtaccacggagcgacgaagtctgaagaaacggatcaccgaggcattgaatcgcgggtcttccctttggtatcgattggatgaaggatacatcggaaatttaaacggcttgaatttgatggtgactccggacaggccctttcttgggttaagaccccgagtctcccatcaccaatttgcctttcaaattttgagaatcaaacggacgcagggaagtgcccttggaccaatgttgttagccggtgaattcttttatcctctgggcggagttttttttgatcattaccgggacgaattcaatgattttggcgacttttttgcgggatttatgaaagagaaggaagaaaaggcgggtaatggaattgagagtgcgggcgagcgcggtgcaaatgatagcagtgggctgataaatagaaatgtaagcggaacgggtaaaaggattgaaattctgagccaaaatttgggtttgattataacggaaaaggatgggggtttaaaattaaattatgaaagcaaattgggttcacaaaatgaggaaggaaaggctgtgattaaggttaaaggtcgcggcacaataaagggaagcatttttcttttggtcttgtacctgtgggggtcgatgctaatgagtaacggaggatgggccatggggccagaaaaagaaaggccggtttgtgaaagtgatgagaatagtgagttcgacttctccgaagaaatgcagcagtggcaaagagagttggtgggccatgtggtggacaatgtgagggccaacaatactcaaaacagtgaaagggcatgccaattagagttggaagcaggtccatcaacttcgacggcacattccacaccggcgggtcagcaaataatatgtttgaacactcaaaattcgggttcagaaaagggctttggaggtacagtaattggtgtggaaactgtggcaccaaaggagaatggtacggtagatcagagagtgggtttggttaaaattcgaggtgaaaatgattcaggatcagcaaaggcagtaaaaaggtcacacactgatttgcagccaaaggcaaaggcacaaacgggtttgcctcaaaatgggtttcgatttgatgcccttaaatgggcccaggtgcatcaactcatacccccgcccactgtcttgtaccccaatccacagatattgcgtactgcggtggtggtgctctttaaccagcagagttgttcgagcagttcagttaatggtgtacaattgatgccaaccaatggagaaatgatcgtaactccatgccaacagcagcagccgcaacatcaaagccaaccacaacaccaaaatcatcagcaacagccgcaacaccaaattcaacagcaacaccaccaaatgcatcagaatcaacgccaaagggcaattgaaggggaaagccgattcacaccgcggcgttttggcccgaatcgctctcatccttatggaggccgaacaactgcttcccatccattcattagggaacaacaggaaacacaactccctatcaattggccatggaatccccttccccgaattcaaattccagtcgaacttcgtcgtgtcctcttgcgccgattagcacaggagcgggagcatgcctttggtcttgctggagtcatgcgccaatggaatccaccaatggcccttttgttgctgtcaatggaagctttctacagtactcttttggcatttgtagtgaacgaaggcgagccggggccatcacttccccaactttaa

SEQ ID NO: 79449 - DNA, 117 bp, Heterodera glycines
tttttgttgcattgtggcagccaatttgtgccgtttgccccacggattttgcacaaaacgacggcgccggcgcgaatcgtcttcccacacatcgagtttccagaagatgttcctttt

SEQ ID NO: 79450 - DNA, 1697 bp, Heterodera glycines
accaacagcaacagaagcaattttgaaatgcaattcatttccacccaacaaattaatcagttttatgcggagaaagtgcagatgagaagacacaaaatacagaaagtgatcaattcaattggggagatcgttaaggaagtgctgaaaagcgttgaacaaacggagccgcggttcatttgcacgtttgcgcaaaattcaaacggcaattatgatggggttggtgcaaaagcagataaatataatgatgctaactggctaatgccaaataaatatttaattaattagtcatcaagacagtaacaacccaacactacagttgctggtccattctccgtacgaatttgaggtcattctgtacctcaatcagatgggcgttttcaattttgttgatgacggctcaattcctggctgtgctgtgctgaagctgagcgacggccgtaagcggtccatgtccctgtgggttgagttcataacagcaagcggctatttgtcggcacgaaaaattcgcgcgcgcttccagtcgcttgtggcacaaacggtggaaaaagcgccgttcaacgacaaatgccaagtcgtgcaggacagcagcgatgttaagctgatcatctacggcaaatatttcgttcaggtgaacagataaagtcaaaggagtgatttgtcgagccgagagcgagtcccgaaaaatttctcgaacttatgacaacatacaaactcgagcattataacagatcacatgcgcctttcgttgcagcggcatatggccacggtcggcaagccattggccaagccagcacgtgcaatggccaagcattgaaatggccaaagaaatacgacaggagggcttcgatttgctaagcaaagatttgtgcgccagcagcccatccacaagcagtgcagcaaatgctgctgttcaacaccatcaaaacaacaacaattataacaacagtaacaacaacaaagcacaacagtaccaacagcagcagacaccgcaacagcagacaaatactgtaaatacagtaacaacagcggtgacaacgactacgatgatggagggcgacgcgtggttgatgagcacagtgcaagcggaggacaaactgttacaagcgcacacgaacagggaaaaagtgttttccattctgaaaacattgcgcgacagacacttggacttcagtggatcagcaacaacaaaacagctggtcaaagtgagcagagaagggaagggtcagatcaggtcaaaaagagatgagcaacaatgaatgataggcaaaagattaccaatacaaaccaaagggggaaaggaatgaaccaattttgggtcgagaatttaaattgaaattattggcacaaagcaaataattaataaccattattatgcattatttaacataattgtcaggtgctcgtgctgtatgagtgcgaaaaacattatgccaaccatgaatggaacggtaacatttttaaaccttttgaaaacgtacaggcaaatggtattttcagatttctgtcttggcgaccgaatcattggcattcttctgcaaatggtcaactgtttgcagtgccggcggtgcccccatttttttctgcctcagatggacctgttgaaaaaccggtcgcccaaatcgctagacgaaagtgctcgagccgtgtgggcattggtccggcaactgatgctgaatggcaaagcattggaacagctt

SEQ ID NO: 79451 - DNA, 1952 bp, Heterodera glycines
atgaatcgacggtaaggaatttttttttaattacaaaattttcatttacccatacatttttttacgaatctcagttggctttgtaacgacgtgtggatggacattctcccatcttttaactatgccaaactcggcctcaaaatggcattgctttccgaccgtttcgatgttttggttgacacgcattttgatggaaaaagcgaattgacaatttggagacgtatcagaattcgcaaggacaaaggaccaaaagcgaaactgtctgtacggatcgatggcaaaagggtggaatttccattgccggaccatccgttgcccaacaaaatccgttttaaggaccttcagatttagtaaatcaaaaaatatacagaaaaccaatcttcattttttcactttatcagctacattgaccattctgtgctcgcatttctccgttccaacaagcaaatttgggacagaagtggcatcaaattggatttggttgtgcctttatatatgaccgacgtcaagctcatttgggatgtttttacccgcgaaatttggtcactttttgcgaccaacattcggcatttgagctttcataatgccgatgctttggacaattggcgtcgtcgcacttcgccaacatttctcactgatcttgatgaattggtttcattcacttcctatggactgttacccgatggaattgctgatgatgggccaaatgcaactgctggccaagcgttgtccaaatggttacacactccgagcaaaaatggccaaccgaagcgattgtatcgctataatttgttgggtccacagaatctcgaatgggtcaacaacttcaaagaggtgtgtctagccatattttctataaattgtttttgtttttccaaatttgtttagacatttatcagtgccaccacttctgtcagttacaatattcaattttatcttcgtgtggaaccaatgccaattgaaccatttgaattggtgaacgaagtgacaaatgagaagctgacactgacgaaggatggcactggtgaattcaattggcttttggagagatgcccaattattggggagactgcggcggcggttcagaaacagcagcagaagaaggacgaaaattcggatgccaatttgaacaaagtgttcttccgcctttacgatgacattgggtgagcagaaaggaggcctttttgtatgaaacacggatagggaacggtatcccatgtacagtactttcccagaatcttggcagggccatgggttctgttaagacagaacttcagtccttgttttgtcttttttgctcttgtccatcccgaaaaccctgctggtccgggtttttccaataattacgggctgtactttcgaaaaagttatccgattcaaattgcgcttaatttaggccgctgtctccgccgtcaaagcgacgaaaaattgttctcgattcccggaccaagtgatcagcggaagaagaaaaagtgatcattttgggaaatggccgatcattatcgagttatgatgaattggattgattgatgatgttttgtttgctctttgaattgttcaatttgacgctgacattttttgctattaaaaaaatggaaaatttggcactttttttttactttagataatccgatgttttttctttaggcaactgattttttggtcgtgttttttgtttgtgttcaagtttcaaaaataatttttttagagtaactaaacttgttttgggtctcggttttaaagtctcgggattttatagaggcaagaaaagaacaaataccaagcattcataaaaaaattacaatgaaaaaacacgaaattcaactttgttttccgagtgtatttgagaattattttttccaatagccttaggtaaaaatttaaaaaaaacaattcttagactttaagcttatcaattggtaccaagaaattctcacttgaaaaagaagcaa

SEQ ID NO: 79452 - DNA, 1344 bp, Heterodera glycines
gtgataaaaagcaaaaagcaattaaagaatcatcgtcctcatcttcatcaacaagtattgaaattgaacacattggtctaagcaatcggcaatttgggtgtcaaaacagttcacaaggttgttcaacaagtagagatcctgttatttaccaagcggaaacaagcagggctgataaatcggccgatagtcgacgacgaccaacaaatcaatctgacagccggtataaagaaaatcctggaaaaattcttaccgaaaagcatcgatatagcagccgtcatactgtagggatgcgtgaaaataagccattggtgattcgttctgacagccaggatacagtagcaaatcggcagggacaacaagtgagacaatcaagcagacgcaataatgtaagaattcgtgaaaatgaaagaattccgacaaggcagggcagtgaagatacagtagcaaaccgaacaaatgccggacaccaatcagtacaatctagctaccgtcacagtgtaggaaatatgggaaaacaagtatatgaaaaacggtctgacagtagcgatactgtaacgactccggcaaatgtaagagctggaacaaaatcaaacaggcgtgacaaaattttaaaacaattaaatgaagaaggattcgatagtgaatatgagagccgacctactgtaggaattcgtcaaaataataccgtagataatcatgcgaattttggtgaaagaagtcaatcttctgacaatcggcatccaataggaaatgaattgaacgaacagagcgaagtgttagcagaaatccaaagactagcaattcgatcaggcatttctgatactgtaataaagaaaacaaagacagaaacacggtctggcaggaatttgccaaatgatcgagattctgaaaaaagccgttcgaaaattgaacaaagtgcaccaattaatcattaattactaataataattttaattttaattaggagttaaaaaacaaaaaccaaaagaatgttgttcaatttgcttatcaaaaattggttctaaagcgaaacaaataaaatgccaagttagtttttgaagtaataaataaaatttcaaacaaaaaaactttagcacatctttcatgaaaaatgcattaatagatggtaattaattatttgaattatttgcataattaactttttaattacacacaaggcttcaagaaaatacaacatgcccaatctgccgacaatcattaactgatgatgcgcaatctgtgccaactgtaatttgataaattttaatggaaataaaatctaatcatttcaggatgaaccttcaaatgagtttgatgttgactctttctcatttagttttggtg

SEQ ID NO: 79453 - DNA, 776 bp, Heterodera glycines
atgaaggagagtgggagccatatgaacacttgctaaatggtcttaaaaatattagtttttccaattttatcaccctcagaaaatttaagtttctggaattgatgctcccaatacttctccggaagacatattgaatggtttgggaaattttacgaagattttttaacattaaattttaaatataaattaatcattaggtgaagccacagagaatgaaagaaacggaatattttatggtaattcaaaatttttatcccataaagtaattgttaaaatttaattattaaaatccgtttagctggtgcaccacctctatctaccctgccagctgaccagcgtaaaattaattattagaatatgaatttagaaattgacatgtttttttattttagtacgcctcttggaagcaggtatggtaattaataaaacaattaattaatgcaggtatcaattaagctagcgttggaacgagcgttactgtgcgtgacaataatggacgctttcatactgtacaagttcgacaagtctagaatttcctatttttcctagaattattttgcaaaagatagtttatgattttatatgaccaaatgtttttattgaaaatctagcactgataaacgaaattttgttaattaattcactaattaatgaaaaggctataaattatttgaaatttttcttatgtgtatatcaattaaattgcaaatgaagaacgatgattatcttaaaatgtaattttacattaaactttttttaaatggtctatgaataaa

SEQ ID NO: 79454 - DNA, 533 bp, Heterodera glycines
atgcaaaagggcggcggtgggagcagtaacaatttggaggacattctttcctcggtgttcggcttcacctcctccacaaaggcgtccaatcggtcgttggccgacatggtcaaagagaacgacgcactgctgatggacccactgagtgtgcaggtggagcgttttgggagggaatctgtaaatggaaatttgcatataaattttttgaaaaatgactacttacaaaaatttagtcgtcgaagagtaagaaaaaatatataagtaagtttttggtttcctttttgaaactcaacgcaatttttaaaaatttcccagcaaataaagaacactcagtgctatcaaatgaatagaattcatacaattcgggctactatgaaaggcagagcaggacgttttcccccgaaaataatttttataaaatttgaaaaaaatgaataatttttcagcggttttttggaaaaattcataaaaaataaaaaaaattttcaggaattttcttataaaaattgtttttaagttctttttttattaaa

SEQ ID NO: 79455 - DNA, 309 bp, Heterodera glycines
atgctacagcccgacccctactcccggccgtccatccaggacctctgtgaacaaattgagcaccttgcgctggcgttggacgtgcggctggacgagccggtgctgacttttaccgcggcgccgaccacgacgaccactacgacaagcagtagcagcaacaatggcagaagcaaagttggcgaaagtgcggcggcgaagacggcacggcaaaaaccgccgcaacaacggcacgaccagccgagacagaaacagcatcaaaagcagcaaggcacgaaaaaagatgttgcaaataacacaggcatatattag

SEQ ID NO: 79456 - DNA, 865 bp, Heterodera glycines
atggaattggacggagttttcatggaaaggcacggataccgtgaaccaaacgatgaagacgatggtggggcgagaattgatgaccatccgccacagagttgtcgagaggaaaatcccttccaattattggaatgccaaacagaaaaatatgagagaataaatggagaccaactagtattccgacaacatcaaaaaagggaggaagaaaaagcaccgaaaaacaccgaaaaaacacagcagaaaactgaaaaaattgagagaaggaggtgagaatattggggataaaacagaaaataaactgaaaacgaaggcaccacggacggggttcggaggcacggcacactttgggtgttgacgtgagttggctgaagcgtttggtgaccagcaaacatgagcaaaaagagcaacaacaacaacaaatgggcataaatgaagtcaatgggagcggatgtggagaaggtattgataatatgaatccacatccttacagtacccaactaattaatttgtacattccttttttagttctgttgaatgggcagccccaagcgaattgcaacgggaagtgtccaaaggggtggccatcggcaaatggtggtcttatggtttgtcaacagacaaaccaaaagccactacccatgtacaaattcagaaaaatggcgataactacagcatgaatttctcattacgaaagttgcgattgtttggacgacctcagcaacagcctattgcatcggttgacaatgagttgcaacatcaaagacatacacatgaaaaggaggagacagatcaagaacagttggacgaccaaatcactgcttgtacggaccagcagaatcgacaacatttggcatcaaatggcgcc

SEQ ID NO: 79457 - DNA, 478 bp, Heterodera glycines
atggcggatacgacgaccggtgaacaatttaaaatgcttaatgattttatgagtctaatcgtcgacaattgcttttactttgtgttttcaattcgtatccaaaaatatacgatttgttttgaaatggacagaattatggtgcaaaaaattaaggatggttagttgattggactcataaatgccattgaactcataaaatgccaatgacttataatttgcaacggaattcggtttttcagtcttctcgacgccgcttctcccgggccggcaacagcagaagaaatgaatgaatcaattaattgatgcgattatgtgaccgaaatgatgtttgtggcactttgccatttaaatattgccttgcctaattgtttgtttgtatttgacctttgcttgctcccaaatgtgtccatttccattgtattttatgtatatatgtgaaattgtttgaggtaattaatcgttgataaaatggctaata

SEQ ID NO: 79458 - DNA, 498 bp, Heterodera glycines
atgggaaatgttcagacttcctcaattgccaaccaattgttgccatttgagtcgtatattgtcgagattcccgagctcaaatatgtggcaaggtcgagtaaaacggaaaaacatttatttaatttagccacttcagtgacttactttttaaggtaaagataaaatcaaataaaaaattttcggattcaagccaaggacaaattattggtcgaaataatagctatgatgtgcgaaatttttaacaaaaattcaagaacgggaagaaatgtgtcgaataatgaaacgaaaagtgccaattttccaatttttttcagtttgggcgccacgcggttcatgaaagtggcccgggttgagcacttcagcaagggcccactggtggtcaaagtgttcgtcatcattgaccaacaagtggcggtggagccgtaccgggaccaactgttgcagatcagccgacggctcatcaaacacccaaattttgcaccggtcaaccgagtgttt

SEQ ID NO: 79459 - DNA, 434 bp, Heterodera glycines
atggatttcctggatcttcctgggcctagattcttctggatttttgtccagaaatctcctgacccaggtctaggctttgttaaaaatgttaagcaaattttccaggacccaaatcttacattttcttggcccatcaaaaagcataataatttggcaattttatttgctaatgatgatgatgatgatgatgatggggtttcccaacaacataagaaaaggatgatggttcaaccaataattacattcgtaattactacagcccgtcttcttctttcttccccctataaatttgtgttatcaaatctccgccgtcgtcttcatctttttgataatcatcacacatcaaatcaaatcatcatctttcttaattacaaattcattattctcccctaattacccttacttatctttttgcttaattacatccaattaaa

SEQ ID NO: 79460 - DNA, 257 bp, Heterodera glycines
atgggctacgattatatgaaagttcgccgtcggaacattcgcgcggcgactaacactttgctgctgatcatttccatttacctaatctccaatttgctcagccttttcctttccgtctttgcttttctcaatcccggtccgtcttttcttttttgtctcttcccattgttttgtccctttctttttcaggttttctgcaaaagaattatccgcatcagtacaggtccgttcaagaaatctacaacaaacaaatataa

SEQ ID NO: 79461 - DNA, 420 bp, Heterodera glycines
atgcaatttttgagtatagaatacggtaagtaagatttttggtaagcgctaccgttagaatttttgaattttgggttctattgttaagagatttatgtattatgtatatgaaaaataaaagcggatcacaaaaaataaaattaattaaaaaaaataataaataaataaaattggttacggtaaaaacaaatttaaaacattacagttcaaaggcacgcatcatatcggcagcgggaataattaattaattcggaaaagaaaaaagaggaaaaaagttggacgcagaaatttggactctgaaatttgaatttgaatttcaattaaaatttataatttggcctttgaaattgattttcaaattgatggctttatagaaaaaaaaacggggcagttttttgtcgtaaggaaaatgagaataaa

SEQ ID NO: 79462 - DNA, 340 bp, Heterodera glycines
atgatttctatttttattgttgttgaagaagaagaagaagaagaacacttttttggaggagcagcgccggggggtgagagactgatttttgggaggaaccagttttttgtctttttaatggatcattagtgggcagaggggggggggggggaaattaattaattttatatttgtttgttgtagatttcttgaacggacctgtactgatgcggataattcttttgcagaaaacctgaaaaagaaagggacaaaacaatgggaagagacaaaaaagaaaagacggaccgggattgagaaaagcaaagacggaaaggaaaaggctgagcaaattggagattag

SEQ ID NO: 79463 - DNA, 90 bp, Heterodera glycines
atgagcacaattccgccgttaaaaaacaccaatgtgccgaatggaatgataacaatgagcaaaattgaagaagttgggaagccattcccg

SEQ ID NO: 79464 - DNA, 319 bp, Heterodera glycines
gggtactcaaacaattatggggagcaaaaatccaacgcataattaaagtacaggctatagggaagctattcccgaaggattcggtctccccataaatctgggcgcatcggttcggggggactgccccgaaaacaaaaaaaatcgattttttcaagtgtccgtttggggtactcaaacaattatggggagcaaaaatccaacgcagaattaaagtacaggctatacggaagctattccggaaggattccgactccccataaatctgggcgcatcggctcggcgggactgccccgaaaacaaaaaaatcgactttttcaag

SEQ ID NO: 79465 - DNA, 847 bp, Heterodera glycines
atgtcatcgtttagccatcatcaccaccagcagcagctgcagcagcaccggggctcggccctgtcccttggccatgccatcgccgctccgtcctccgccgaactgatcgtgctcgactcaccaccgccggctcccccaaaaacgccaacgaccacggtgatgatgttcgacagcactgatcatggtggtggtggtgggggcggtcaacgacaacaacagcaacaacagtttgatgtcgttgccagtggttgttgtactgctagcagcgcatcatcttcattcataatcggatcgatggtaagaagcgggagcagtccctttctccgtatcacttatcaccccctccccccccccgccctcctccgaaaaatttttaaaagaaattttctatgttaaaaagttttcacacacacacacaaaattcagcttttgtatcattttcggccgtttaaaaaaatttaaatttagcgagtttgagaaatttactagtcgaaattttaccattgattttgaaaaaaaattatgcatttttacaattatgtgcatagtagtgttttagaaattattttatggtataataaaattttagaaattaccaaatcaaacaataaatagtaatattcaaatcattaaaaaaatttatttatttctttttgataaaaaactatccattgaatggttaattgatacaaaaaaaagtgaaggtcacccattcatcattttgaattccaattcttaattatagaacaaatattacattatttcggtaatgtaattttttaattaatgaattattatattattacattcacaaaaatttttttttgaaaagtggcaaattgaaaaa

SEQ ID NO: 79466 - DNA, 269 bp, Heterodera glycines
atgcaaccgacgaatatgagcaatgttagtgccgcatctgctgcagtgtccaccacgtcggcatcattaaagaccgcctattcggcaataattgatgtgcttgaacttgacgacgtgctaattgacgaaattagcgccgctccaacaagctttggcggtggcacggacggagcgacaaggacggcgttggcaacgccagccggcggtggcacctgcacgacatcggctgatgagcagtcatcgagcagcggcaccaagcaggcccatga

SEQ ID NO: 79467 - DNA, 1863 bp, Heterodera glycines
atggaccaattggcagccggaattcctggtgttgttggctatatggacgacttcatcattgcttcaagcacagtgaacgagcatttttcaacaatttttaaattttttaaacgaattcaagaattcgggttccgaattcaaatggacaaatgcaaatttttagttaaggaaatcaaatttttgggtcaaattgtttcgtccgatggtatccgtcctgatcaaaacagaacacgagcactgcaggaaatgccagcaccgacggacatcacaacactccgatcattcctcggcgcaatcaattactatggaaagtacatcaaaaacatccatcaaatcagagcaccactggatgaattgctcaaacagggagtggaatggcaatggaatgaaaagcaccgcgaagctttcgatcaagcaaaagcaatccttttatccgatttagcattaacgcattatgacccgcatttgccaattattgtcacagctgacgccagcaacaaaggaatcggcgcaacaatttctcaccgttttccggacggaaaagaaaaagtttttcaacatgctgcccgaacattgtcaaagacggaacagaattattcgcaaattgagaaagaaggactgggactcattttcgcaattcaaaaatttcaccaatacatttttggtcgaaaattcattttacgcactgatcaccgtccactgctggggatttttgggtccaaaaacggaatcccgattttttcagcgtctcgtctacagagatgggcactgattctactgaattacgacttcagcttggaattcgttcgcaccgacaacactggacaggcggatgcactgagtcgtttgatcagtgaacagcgcaattccgcagcaagcgaagacatggtcatcgctcagttgtgtgcagaaactgagtcggaagttgagcatcttttgaatgtgcagttggaacatcttccggtgacagtagacgaaattcaaacagcacaacaggacgacgaattgatcagggaagtgatcaaatttactcaaaacaaatggccaaaccatggcattaatcccgaaatcaaaccatttttctcgggaaggcacaaactatcaattgtttcaggatgtttggtgtttaatggtcgatcggttatacccccatcactcaggcaccgcgttttgaaggcacttcacttagcacatccaggaatcgttcgcatgaaaaatctcgcgcgaactcttgtgtactggccttcgatcgattccgacatcgaagaaatcgtgcgaaaatgccgccaatgtcaagaagcagcaaaacaaccgcaaaaacaaccgctacaaccatggccaacaacaacacaagttttccaacgtgttcacattgacttggcaggaccttgtagtgatggaaacacgtatttggtaattgtagactcattttcgaggtggcccgaagtgtttatgcttcgccacacgtcatcacaacatgttattgagcaattacaatggctttttgatcgattcggccttccgaaaacactagtttcggataatggtcctcaattcagttcatcccattttaaagatttttgtgacagtaacggcatttgtcacctcttttcgccaccataccacgcacagtcaaacggagcagccgaaaagtttgttgatttcttcaaaagacagttgaagaaatgcagtggggataaaaattggttgaaacaatcacttttgtcttatcgctccatcccaattgcagttttaaacaatcgatcaccagcagaactgtttctcggccgaccactccggaccaaactttctcttatgaaaccggaacggccgagtccattcttccgaggcccgtatcaataa

SEQ ID NO: 79468 - DNA, 924 bp, Heterodera glycines
atggccatcaatcagcaatttgccgaggctgcgaatgcggcggagcatttgcaaaaacggaatgaagcattggaggagagccttaaatcagccgagaaacggtgtgtgaagggaaagtgaagcaatagcaatacatgacaacaatttaagggcatttgacctagaggaggagaatggaaaagtcaagcaagcaaacaaaagtatgggatatgaattggagcagagccaagcacttgttgtcgaacttaagacatccgttgagacaaaacttgcggaattgaaggtatgacgaattgcaaaataaatactttaatttaaattcaattaatcggtctttctttccagaaaatggattccgtccagcaaagagtcgaaactgaacttagtgacgcactcaacaaattggcacagtcgcaaaacaaagagaagtatttggagcaggacctgaaggaggcgcaattgcaattggaacgtgtaaaagcggaattgggcgaagcgcagaaagaaataacagctaagaaaaacgaatgtactgagaaagcggcggaaatcgacgaacttttgggggttgtggctgagttgaacaaagacaaaattggcgaaaagatcaaagagagagaggaggggaggaggaaaagccagcaaaaaacaaagacagatgaaaagcagcaggacatggaccattctggcagttcagcggcttcttcacctggccaaaacgcctctctgctggaggttgtcgaaatgatcagcaaccataaactctctacaactgaacctttattattgaggaccctgacaatggtgccggatctggcgggagcgcgggatggtcagacttgggcgatgggatggaaatacagggaacagaagcggaaacaaagggaggaaaactgctcgacattttggagttggccaaactga

SEQ ID NO: 79469 - DNA, 134 bp, Heterodera glycines
atggtcggcggtgtgttctgcgcgctgtgcgtcctcgtcgttgtgctgatgcatttctttgtcagcaaattggtcgccacacttgccctgctgttctccgtctcgcacttctccgacgcgttcgcctttaaacg

SEQ ID NO: 79470 - DNA, 2463 bp, Heterodera glycines
atgcattcttcggaattcggaagcgatgtcgacaatcgcacgggccctggtacgcggaagaaatttttcaacaaaaagaacttaggaaatcttataaaaaagttttttgaaaatttttctaaagtttttgatgaattactaagtttttcccaaaaactttcttaaaattcgctaaaaaattatcaatcattatttttgttttcttgaaatttccttataaaaagatttcctagtttttttttgggtcgcaaaattccacaaaattttggaccacaaatgtccgaatatggttcttaaaaaaatatactttttacactgtaacacacaattttccccatcttcagcagttgttgctgttggcactggtccgggttggcagaagcatcaaattgtggtcaacggtgccaaggagaacgcgcggttgacaaccaccggtgccgtcgccgcggtgccgtcggaggacagcagcaacaatgacgacaatggcggtggttttgtggtggtcaactgttcttccggcgttgctgctccgcctgttggcgatgctccgcagcagcgggtaaaaaattaaaaaacaaatttttaaataattcatattgggttttcctaatttaaaaaacaaaaaaattttacaatttttcaacttaaccccccccccccaaaaaaaattaaattttttttctgtgggcgtggaaaaaaaattcttcggcgaaattttggggtgcacccaggaatgtagcgtacccattcggggggagaccccctctgtgtactgattgtgagatatttttttccatgtcgtcccgaaaccgccttgtttattcgtcccaaatttaaagcgccgcattttctctctctctaattgtccactgagaatcttttcttgtcccgaattgatgatgatgatgaatgattgaaccaaaacaaaacataattaggtgattttgttttccgtttctttttttgccaaaataattttaattattaatttttatttttttgctctctctctcctctttttctgtcgctgtttatacaaagaggagtgcaacaaatacaatgcatgttgttcacaaatcatcatcatcatcacaatttgtcttacctgcccatttttggtgtgtggtgaatgaaaaaaaagcacaaatagcgaaaattcattgcattttttctggcatcattgatttaaaaatttgtttgtttattgggtcacgggaatcgtccaaaaaaaaaaaaattttttttctaaaaatttatttgtttttttagcgtcggcgtaacagcaattccgtcctgcgcacttcgcagtcggccgaccgattgtctcgcaccgcacgacgcgcttcgcgtccccggaacacggtaaaaacagttttttttttaaatttttcaattcgattcactgtggatgaagcctgccccgcaagagaaatggtggctgaaagcgggattttttatatacaaatttgtcaaaaattgtcacacttaattggccgactttttttacctagccttaattctaggggaaaaaatgaaatttcaaaaaaaaaaacaaaaaaattttcaaggatcttttcgttttctgcacatggattaaccggaaaacataaaaattgttttttgtgtttttataaattgaacataggcaaatttagcaacaaaaaaaaatgcgtttgatttttattttttgaaaaatcatcatcatcatcattttccagactgttgctgctgctagtggtggtgctgctgctagtgctggtggtggccatcgtcgtcatacgcaaagtgtcgcttcctttgtcaacgcggcgtacgccgccgctgcacaggcggcgaacaacaacacaaacggcacaagtgcaggtggcggcggcagcagcggcaacaataacgcaaacgccaacaacaaccgggacagcatcagcaccacgacggcatcgacggactgtgagtagtatgtcagaaaaggggaacagttttcgaattttgagtttttaggcttgtcttttgttaagttttataaaaaaaatatcttttggtggaattttaagaaccataaaaaatttccttttcttgttgaaaaactaagatttttaccatttttcttaaaaaatattaaaaactataacataactaaattttcgtgaagctactattaaattttatgaaaatttttttttttctaagccttcgagcttttgtttttaggtgggtgggtttgtcaatttgaatttggcacaaaaaataatcgaaaaattgtctcataaaacacaattaaattcaaaaaatatttttttctgaattttatttttaattttttttaatttaaaagttttcgcgggctcacatatttcttttgatgaataacataatggattttcatcatattattcaaaattgtaaatgaaaagttacgaaagacaaccaaacaattggccttgtaaaagaatactacacaataaa

SEQ ID NO: 79471 - DNA, 3181 bp, Heterodera glycines
atgaaaatccgcatttcagagcaaacaaatatcggcaattcgtcaaacgatgtttctggatttgatcaacgcttgaaaaagattgaacaaatgcttggcacaatgttgcaatttgaacgtgccgtgctcgacgttggacaactcgagaaacgcattgaacatattgagaatggtgtggaggcatttgagtcaagaatcaaagcgtgggacttggaaagacaaataatggaacataacccacgacaacaacaacaaatgcatgacaatccaacttttggtcaaattttgtaaaaaaatttatttatttattttgaacagccatatggccttgggcaaaccgaaccaggaaaaaatgtcgccagccgaaatgtcgacggacgaattttttgaccataacttttcgtactcaaccaaataaaatattcttggtttgttcgaaagcatttgaaaaactctatcaacctgcaaattttcaaaattttttattcatgtacaaaaaaatcagagcaaaaagaattcgaaaaactaggtttttgagttccttctggccataacttttttgaaacttcacgaaaattttgaaattgttcggggcactgccgacgaagtttgaatgacatgacataatgccaatcgatttctgttccatttcatgttccttccctcgcccataaatatgctcccattccctcttattaggtcttcctttcattcttttgcatttatatatttgttccccaaatttgttgtgactttcttttccttctccaataaataatatttaattggacttaaacaaatccctcggaccgaacaattggcgcagtcagctaaaaagcaaacgacataaagcgcatttgttattcatttattacatctccaggcgagagtaatattttggatttcgacattcagccgccggtcttcaagtggacgaacacaaatcgtccacatttcgaccgtcaactttcatcgcgtctaaaaaaccaatagaccctaaaagggtgaggttccgctaggcgcggttttcaaacgctgaaaaaactatagaccctaggcgggttgaggttccgcaatacgcggttttcagcgtccattcaacagtcaacgagagcaaccgataaccaccgaccatggcacaacaggcaacattcaacaattgctggacgcaattggtcaactcgtcaccgcacagcagcagcaacaaatcaacaaaccgaatccgaacaataatgttccgattccggtgctgcctgacatttcggtcttcgaaccgaccgacgaaaagggacgtattaccgaatggatcgaaaggttttcatttgctgtggacttttcggcaccaaacgcaaccgacgcagtgaaagtcaaggcattaatgaataaattgtcggaaacggcattcagcgagtattcaaaatcgtgtttgccaggaaaagtgacggacttcgacttcaaccaatcagttgaaaggcttcaaaagctttttgcaaagcctcaatctatattcatcgacagatatgagtgcttaatggccacgaaaaccgaaggagaagattttcgtcaattcgtcaacatacacaaaaggctgttgaacgatttcaagttcacatcacttaaggaggaacaattcaaggttttgatgctcttgacagctctaaagtcgccaaaagacgcaactttacgacagcgaattttgtcaaagctcggcgccgatggagataacgtcagatggcgatgtggatggacaaatcacagccactgggagtgtaagcataagtcagcaaagtgccaaaaatgttcccaaaatggacatttggaaggccaatgcgacaaggtgcaggaatggagacggagaaacaaattgccaattccaaaaaggaaaattggaaatttacgaattggaacgtccatgaaagtgaactccgcttcgcttttcaaaaccgacgtggcggtagatggcaaagacatcaaattcgtactcgacagcggggctgaaataattgtgatcgatgaactatcacatgaagtcatcggcagcccccgactccgcaaatgcaccgaaagtggatgcatgttcgatggaacacaagtcaaattcatcggaaagggagtcgcaaatttcaaattccgcaatatttgcattaaaggcgaatattatgtggcaaaaaggggatcgctaaatttgctaagtgtgcaaatgatggacgcttttggactcctgaacgaactcaaggccaaaattaatgcgccagtgaatttgtgccgagtcggagaagagacaagaggtttcacaaaaactccaaaagcgccactaaattcgacagtcaaagggcacatcgaccatcccaaagcgttattccccgacattttcaaaaacgaattgggccgatgtataaagttcaaggcgcatctgactttaaaagcagacgccgcaccggtctaccgaaaggctcgcccagtcccatacaacgcacaagaagcgattgatggagaattgaagcgatgggagaaaatgggggtgattggaaaagtcgaatacaccgaatgggcagctccgaatgatgaatcgagaaaaatctggtcgatttcaacacatcatggcaattatgaagttaaaagacttcctttttgcgtgaaatcagcgccagccatcttccaatcggtaatggaccaaattttggcagaatttgaattcgccacagcttacttggatgatgtgatcatcgtaagcaaaagcgtcaaagagcacactgatcacttgaagaaagttttggaaaaattccaagaatggggattccggatcaaattggaaaagtgttcgtttttccgagaagagatcaaatatctcggacaaatcatcgacagaaacggacggagaccggacccggagaaaatctcagcaattagcgaaatgcccgcacccacaaatgtgccatcgttgcgttcatacctcggaatggtgaaccactaccagcaattcgtcaaaaacatgcgttttgtacgaaaaccgctagacgatctgctgaagcatgacagcgaatggaagtggagtgagaaatgcaaacaggcattcgacaaaattaaggaaattttgtcatccgatcttctgctaacgcattacgatccaacgaaagaaatcgtggttgcagcagatgcatccgaactcgggattggagcg

SEQ ID NO: 79472 - DNA, 343 bp, Heterodera glycines
aacaacgatgccaagctgactttggatgagttcaaagaaggtaaaaatcggaataaaatttttaaattgaaattttcaatttacaggagccaaggctgatccgagcattgttcatgcgttgagcttatatgaaggcctggccacataaaaaaaacaatctttttttcccatttattgtaattaccaatttttttttacaacccaaaactgatcagaggcaatgaatttttacaaaattttcaaggtattgattggcaaaaaaattcatttgagagagatcattttgtgttgcaaaagcataattaatgtccattcatttacttatataacaattttaatgcga

SEQ ID NO: 79473 - DNA, 2609 bp, Heterodera glycines
atggcttcctccactcattattataaaatggatccatctcgagacaatccggacctgaccgaggagcgtcggaaggccaaatttgacccggaaaaactaggcaattttttctggcaaggccaactgaaacggcggcgccaaatttgtgactatgtgcaggcccagggcactgagttggcaccggcacagcccgtgccgttcatgacccgcatggagaagctggaggacgtggcccgattggttagtgtctctcagaatacttgggcaatgatttgccaaggacaatccttgaaaatcagtaacaaattccaatgaagtccttggaaagatgtttaatccatttttgcaaaaataactaactataaaaaatgattaaatttcgaacaaataaaatttaaattgttttttattcaatttttaaaattttcagtctgttgggatgagaaagcatgccgaaaatgtgatcgatgttggcagtccacaggaacaattttatttcaacaggtaggaaatgagtactggaaaaaattaattaaaaaatcagatttaatcagattttgagaattatttcaattgtgaaatgatatttcaaatgataaaaatgatatagagaattattcaaattgataaaatgataaatcttgggatattatttgaccaaaagatttatttattaatgagtgagtgaattaattattttcgctcatttgctgttaattaattaatttaattatatctttttttcttttgcatatctaatttttgccaatttttgtccataggcataaattttaaggactgctgatcactcaagcaaggacaatccctataaataaggacaaacattcctgatataattcatatttattaaaccattttaagcctgatctgcggttatgacggctctccattccatttgcatttcattatggcactgccagcaatgatcaacaactgtgatgaagaacaggcggccgaatggttgcccaagctgttcaactgtgagatcattgccacttatgtgcagacagaaatgggccatggtaagtggcactgatcagctgagtgatcggcaatcaaaaatttaattttttaatgatttttaaataataagttaacaatgcaatgtttaattgtgattttaaatttacggaacattttatgtcaacaaaatatactgtagcaaatgatcagagttgaaggcaaattagcctgatcattattcagcattctaatttaatttgattagaaaggtccggcttttttatgcgttaaacaattaatattcaaagccgaatagttgatcagaatgtataatatgatcataaaataatattgatcatcttttattaaaaatatatgttttttaataaattttttaataataaatttttaaataactttttttaatataattttaattaaaatactaaaaataaaaaatggtttcaaggcacaaatctgaaggcattggaaacaacagcaacttacgatgcttctcgtcaagaatttgtgttcaattcaccgacaatcacatcaacaaaatggtggccaggcaatcttggcaaaacgtaaacttttgaaatttaaatttaaaactgcctatttttaaaaatttagtgccaattttgctgtcgtaatggcacaactgtacacaaacggtaaatgctacggtgcacatccattctgggtacaattgcgagacattgagacacataaaccattacctggtaaattataattaaaaaaaatattgatttttaaaatttaaaatttttgagtgtaaatttgtatgaaatttaaattaaaataaattaagaataataattatataattaaaggcattactgtgggcgacattgggcccaaatttggcattggttcaaatgataacggttttctacggttcaacaactaccgtataccgcgtatgcacatgttaatgaaacatgccaaggtgcgattttacatatatctgatctgatagttaaaaccaaaaaattcttttataaaaatttaattaaaaaaagtaaatctaagatataatgtaaaccagggatggcattccgaggccacaaaaaatttggtaagtcggaatccaggacccaaaaatttttcggaaatcctaaatctgaagccggaaatcggaattccatgtcatccctgatgtaaccgtatcttttttctcattgtactgttctttttctgccacttgatcttctggtttccgaaaattatttattttcagaattagagttttagaaaaattcattaaagtacattttataggttcttccatctggtgaatatttgccgccaatgcactccaaagttggctatacgtcaatgatgtaaaaaaatttcttaaatttatatttatttattttttaaattttttaaggtacgttcgctcagtgatggtaaggagcttaatcaatttttaaaatatttattttttttgtgcttttttttttgatatttggcaacgcaatttacttggcatgtgccatcacaattgcagttcgttattcatgcattcgacgacagggcgaaattcggccggggtgatttttgaaaaaattaaaatgtttaacttcaaaaattttaaa

SEQ ID NO: 79474 - DNA, 2284 bp, Heterodera glycines
atgggcacaaatgaggggcaagagcagcagcagaaacgggtgggaagaacaaaatttggaagaatatttgtttaaaatgtggcgattcaaattccaaaaaaaaaaacatttggaaaatcaataaacattttcctaataaaaagtgactttattgaaaaaaaattgttgaagaaatcctcaatttggctaaacatttttcgaatgtgttatgccttctaagctcatttcattcagaaagaggctgacgacgccttaccgcactttccaatttcggccgagctgaaggcactgtttggccaaattgaagattatgtggcagaacgtgttgagattgtgccctgctggaagcccttccaaattgactatatccccgcggtcggagaggtcgacccgttcatcaaagtgccaaggcccgaccaagtgagtggcatcagctgaaaagataaaaagattatctggtcagcagcgatcacaattggtctgccgctgacttgagatgggtgcggggcggagatcctgcgccgtcagattttgcgggataaacaatccgcaactgaatttttggaaaaacttatcatatgaatctgctcttttttgaatggctgtgtgttatttaaaaccgggacatagtcaaatgatctgattgtttccgaatttcatgaataaaaatatatccctaagaatatgattacggctatcctaattggacatctgggcaatggacatttcaacagtggacacgccgaaagtgaactcatttggacaaaagtggacaattgggcaatggaaattacgacaaattttgcaataaaaatgatttaataagaagttcaaaatatttaaataaagagaaaagcataattaaactcagaaattctccgaagggattgctcgtaattaatggaaattaaatttaatttgtaataattgggccagaaatccatacaaaaactttttttagtttgcaaattatttttttctcattgtaagtccattgcttagttttcacttctgttcaaataaattcacaataaatgtgcggctccatttgaattgatccattttcaaaaaaatgagtttaaaaaattacgctttctaaagaagaaattttaaaatttttcctaaagtacgaatttttttaatcaaaatttggagttctaagataattgcattctttatggtttttcagtgggataaatactgaaaaccgaaaatttacctatttatcacttcttaatctggaatttttgttgatattccctttttaacttttggctttttattgccaaaaaatagagtccaagtttctaaggttttgatttttagaatgacgaacttttgctgggcttggccgtgctcgatgagcccgccacgcaacagtccgactcggccatcgtcgacctccgactgcaccaaatggcggggaacagtgcggcggacgcgccagtgaaaaagctgtcacgggcagacagaaacgcacatcaaattgtaaatggaaaactcacctaaataattacaaattgggttgctcacgaccttcggggaataaattctcgggaaattgagagggcaagtcgggatcgaggatccgacccgatcaggggatagtcaaaattttacggctctattaattaatttctttttttttctagtccatataattatttattttcccgggaaagataaatgaacaaatcaacaatcatttccaactttatttttcaggatcgctgggtccaaaatgtgaaggaactgaggaggacgaaggcaccaacgcgggtggtctacggaaagccaatgccatccatcgagtcgctgatgcaagaatggccagccgaactggagcaaaagctgaaggagatgaaggtgcaaatagatgccaaatcgtcgttttataaatttattcagctgctcataaatgccaatttggacgccgatttggaggattttgtcgacctttgccttggcctcgtcgacattccgttgcacaaaagtcgactcgagtcgctgcacgttttgttctcgctgtacgccgagttccgcgcctcccaacacttccgcaacatggcaatggacagagacgaagcgggcggagcgaactcagcaaacattgaccaatttgtgatgccggattagagaaggcactgttgagacacatatcaataatgacattgaaattatttactgcaaatcactttaatatttattgtaattattttgcttttaaatcaggaatttcttgggttttttgtccctggtttgactttgcccgttttcgttcaaa

SEQ ID NO: 79475 - DNA, 568 bp, Heterodera glycines
gatcgctgggtccaaaatgtgaaggaactgaggaggacgaaggcaccaacgcgggtggtctacggaaagccaatgccatccatcgagtcgctgatgcaagaatggccagccgaactggagcaaaagctgaaggagatgaaggtgcaaatagatgccaaatcgtcgttttataaatttattcagctgctcataaatgccaatttggacgccgatttggaggattttgtcgacctttgccttggcctcgtcgacattccgttgcacaaaagtcgactcgagtcgctgcacgttttgttctcgctgtacgccgagttccgcgcctcccaacacttccgcaacatggcaatggacagagacgaagcgggcggagcgaactcagcaaacattgaccaatttgtgatgccggattagagaaggcactgttgcgacacatatcaataatgacattaaattatttactgcataaaaatcactttaatatttattgtcttttttaattattttgcttttaaatcaggaatttcttgggttttttgtcccggtttgactttgcccgttttcgttcaaa

SEQ ID NO: 79476 - DNA, 2810 bp, Heterodera glycines
atgatcaacaaccggttgatggtcgcacatgagttggccctgtatcgctttgcgcaccaaattccggtggacgacccggaaagggaggcgaccgtgctgaaacacgtgggtaaccaggccaacgcggccggcatcgacgcggaatttgctgtgaacttcctcctggcacagatggaggccaacaaaatgattcaggtgcacaaatgcatggcaaaagggaatctcgagaaacgtcccacctccgtcgtaacagaaataaacaatggccacagatggaacggaaatattgtttaaaaaggggcattttgcatattttagtgcgtgacccaaccgtaagcagatatttctaggggagaaaattgaatggttttttagagaaaatgaaaaatttcacttcaactgaaaagttaaacaatgcactttttcgttgttttgtatcaaatttgcttaataagttcaaagctttcaaacttttcagcgaggatatatcgaccggtggaattcggatcactctttcgagtcaaaatatgtgccggattttgagaaagaaattcaacctaaattttcttacgcaacgaatgcattgattttggcactgattccattggtcgatgcgggccaccaaatgcacaacgaccaaaactgtgttgagcatgtggaagacgtgttggaatcgatggagcatttgcgagccagcgaattggagccgaacggaaaggaagccatggaaaaagccgtcaaagcaatttgtgacaaaatatcgacacatgagggacaaagcaacgcagaaggcgggatttgttttttgataaaactgatacaagaccagtagagtggtgaagtgccacctttagttcgccgtcgcgatttgcgacagtgcaaatttaaattcgcgaccgcgagatttttctgtctgcgctccattagctatattgaatcaatttttcatttttgtctaaattatcctcatttaggaaaaattcctcaactgggagaatggaaaatttttctcgaaaagcgaaagggccaaaaataaaacccaattaattatttaaaaaattctttggtccattcattcatttagtttagttaagccatttatgtcagcttaattaaatgttctttctattggtgttttaatttagatcaatcaaaatcgaaaaaacggaaacattctgacaatcacaaaatggaagagggaaagcatggggaagaaaaagaaattcgacccacaaaaagaacacggaaagcgaacacagaagaaagcaaatcaccagcagcaggggaaaataggagaaatcatcgcagagaaaactatggttttgtttaattattacatattattttttatttatttaaaaaaatatatttttattcagtggatagtcaaacaacaaaagaacaaacgaagaaagaatcaccgcgaagaagggaaaatgccaaaaacttcgaacataaaaagagtgcccaaaacagaaatgtgaggaaagggaagaagcagtcggaagagagttgggaaggtaagaaaatcgacgaaccgaaattaaatttatttgaaaattatttttatgagaaatgtgaggaaataaatgacaattaaatttaaaatccagatgacatcgaaaaggtaacgaagaaatcaccgcgaaagattgaggaggtttccgacacgagcataatgataacacggggagaaaaaagtcggggaacaaatggcaaggacaaaattacccacgaaaataagaaaaccggaaaagaaagtgacacaaagggtaaagtgtccttttaatttcgattttaattaaattgtataaagtattatttttaatttatcattaatttaagtgaaaagtccgaaaaaatcgccaagaagaatcgaagtttctgatcgtagtgttctgataaaaatggaagatttaataagcgatgaaaaggaacacttaacaagcagagaacgaaatggtaaatcattccagtccgtccgtcaaataacgttaattaagattaattagcccatttttggcatttcaatcaaaaaataataaattttaaattaagtttttggacaaattctcttagaaatttcactcgattattcctcaataaaacatccgtttttaaaatttgtggtttaataactgaacatttcaattaagaaactgatgcctattccaaaacacaagtcaaaaaatcaccattcaaaaacaaagtgacgactgaaaatgaaccacagaacaaatcgaaatcacaagcagaggagcaaaaaagaagtgctgttgctgctattgacaaatcatttgacgtccgatttgattccgaagaagaaaatcctcgaaaagcttccagcaccgaaacgatccgaaatccttcgctgatttcccgggacgcgtcgattccgatgaattcgagaaatctctccgctgttgagcacgaaaatgagcggaaagattcactggttgtccaccgaaataggcgtataaatgacaatgaacgcgcaaaaagcatcggatcggaggaaaatttgcaaaaccttggcctttctcgcgacgataaatccacggcggatgaagcaaatgatcagtcaatgaatgggagttggtcagtggagaaaacgaataaccaaagaaaccgtcatgtgcaacaaaatggagaaagtcggcaaaactcgaacataagcttgcatagtccatcacgactcttgactgggatcagcactgaacacggggaagagcaccggcaggagagcgaagaaaaagcgatggaaagcacgcggaagagcagatttttaatgccaaatgcgagcggagagg

SEQ ID NO: 79477 - DNA, 278 bp, Heterodera glycines
atgatcacactacgaccccgaatttctaaaggctccggaatgcgggaccacccctggaacgaatcgggagacttggtacgaattggctaatttgttattacgattcgcccttcttccgttgtttggctatcattttttttaataaaccatgcactgttaatttatcaatccgaactggtgaggagaatggccttagcttggctacagtaagttgctaccgtaaccaatcatatttcagaattaattttttgttgatttaaaattacaattttatcaaa

SEQ ID NO: 79478 - DNA, 1402 bp, Heterodera glycines
atgagctcaacacaatatttaatattttttcttttgttgtgctgcttaaaaaatatcagtggaattggtttcgatgaatttgcaaaaaatgctggtgcgataaatttagctgatcagtatcttaaaaaagaaataaagacaaaaggagaattattggaaaagcttgcccaaattggagttgaaataagtctaaggacgctggagagacatctttcaaaaataaaaagcaagcgtaaatcagaagacagccaagtcaacaatgaggaagacatggaaaatgcagaaatttcgcaatgtttttcaaaatttgacaataaatttctttttattattggccatggagacgaatatagaaaataccaaaaaacgaacgaaaatgcaaatactgtctatgcctattgtattaagtgtgaaagtttgaagaaatcaaattcggggaggtttttgtgtaatatttttcaatatttaatattttcttaaacagtacaaattattcgaacaatgacacgagttactaagaattttatgtttaaccctcttaatgaagaccaacgccaagaattatgcgaaacgtggttttatacatttagtaaggcgttagtttggtgaaaattattgaataactatagatgaagaccatatagactactcagaaccgtttgaatttgtttcttctgaatatggaccgggtgaggtaacagaaattttaggggatggaaattgtggttggagaagcatctctcttgccttaactggcactgtgtcaaatcactccgagataagaaaggatgtaattgaatatttggaagaaactgtttaccaacattctttttctaatcatcacgataatgaatggtggtgtaagtctgctattttagtttttaacatgtagccaacattttagtgctttttgatagtattgaaaatataagaaaacacatagagaatgctattgctcctgcaataggcgcccatgaaattgaaaaatggatgaataatttggatctagcagcagtcaccaaaatgtttcgaataaatataattgtgtgtgaacgtatacaagaacgaattttccgttggcaagtgtactcaccagatttagaaacatcggttagaaatatttccaatatgcaaattcatataatttttagctttcgaacctccaacaaaaggaatcgactgcatcaatatttttatactttcatgacggtcattatgaactaataagaaaaccacaaaagataaattaattatttttttattttttttcttattataattaaaatttccctttgaaagttgcaaagaaatattgtggcacttattgtggcacttcattttttgactcatgctttatagcaccagtaatatggttttgcaactttaaaaaaggtttaataaa

SEQ ID NO: 79479 - DNA, 1411 bp, Heterodera glycines
tgtccatttgacggatagcggtggtggattcaagaaagtgcaatttagtccattggcacaattccatgccaacaatggatcaaatgaaaccgtagtgaacccttacagaattgaatttcgtctgatggctcgcgatggcggaaattgcgaggatgggtaaaaaaataaactaagaattggataaaatttgaattttttaataaactgagaatctgaattgacagcattctcatctgttacacggccttgcttcaacgaggcaatcatttggagaaaagcggaaattcaaaagtcaaaagaaaatctattattggcgctaaaatggtaaatttgggtaatacctaattaaaattacatattaattccccagggaaattcgattgaaaaagaatgtgtgcaaaagatgccaaaagatggcaacaaaaatgtcacaataatttggcgcgccattaaaattcgcacagtgccaaagcaaaccaaaaatgacaaaggaaaagccatcattttggagtcatcaatttcctcacaaaaacagtgaatatttttaattattttaagcaaaagtgggaaaatgaaaatttttaaatttttgattttcaaaaaaataaatttgtattaagataattttttaaatattttaagatataatttgaatgcaggacaactcaaaatttctgtgctttttgcatcaaatcaaactgctgttcgattcactcgtttttctttggaagaaaatggtgaaaatgaaaaatgttttggtatcagaatttaaaaaaatcattattttatatatataaaatttggcattctcggctttcccaaaatgccattctcagacttcggtggccgtgccatgcaaaatgatttcctccgttcaaatggtctgtcgtttttggcggattatgccgacctttggcttcttggacttgacatgctgccgatggcacaccaaacagaagagcaaagagaacagctgaagatggagctgttcatcagccgcagctccaaatgcctcattgaagcatgggtaaaaagaaaggcaaatcagacaaaaaggacacaatttttggggatttacctatttatctttttatggctatatggaaatagcaactatttttccattttggctatttggtccaattttatgctttgaagtttgtccaaccatcgcattcccttgagccatccgatccgaatttgcaattcgccttttcgttgtgcaaaccaaatcctacggaagaagaatatgaacggtatttgaatatgacattttttgtgacggtctcaatttaagtcttttaaaattatattttatcgttttcaaaattattccaggcttttccccaaaaatgttgacaaatatgtgttcccgactggcggttcatgtgcaggattgagcaatcaaatg

SEQ ID NO: 79480 - DNA, 936 bp, Heterodera glycines
atgattgcctcgttgaagcaaggccgtgtaacagatgagaatgctgtcaattcagattctcagtttattaaaaaattcaaattttatccaattcttagtttatttttttacccatcctcgcaatttccgccatcgcgagccatcagacgaaattcaattctgtaagggttcactacggtttcatttgatccattgttggcatggaattgtgccaatggactaaattgcactttcttgaatccaccaccgctatccgtcaaatggacacttaaattataatttgaaaatgaaattaagaaaaaaatttataatttaaatttaaaaatgaaagtaagaaaaaaatttttacgcatgatcagcagttgttggcaattgacaaatgatgcacattaagagaacgattaaaagagaaattactttgacaattaaaaaagtcatttttagtctaaaacaccaaagaacatagacagaaattaaattaaattaaattaagaataatatttatgtatattttttcctttttataataatatttaatgattaatttttatttatttattttacatttttaagagtttttccgtgtgatatagaaaattgttttggaatatttttatggattctgtcgaacatcagtgaaaaggatggggagaatggaaaacggatgaggatgaatcagcagtttaataaatcgtaagtccccatttgcgcctctacatttgcgcctcgcagtattttacactttttcgcccatttgcaaaaaaaaaataataataatcagaaaatattaaagacattccctacaaacgcttaacaaaaaattatttatcaaactgcctccgaataaactcttttaatttaagtaaatttataaaaattttaacaatttttagcgctttcacgcttttcggtggtgccaataggtgccgccggtga

SEQ ID NO: 79481 - DNA, 440 bp, Heterodera glycines
atgggacggagtaaatgggaaacgccgtgcaattgtaaagccgttcatattcgtcatgacggacaggaacagctccatcaatcagtcaaatttgaccctatcaaacatagtatttggccaattaaattatatttcagttctcgaatggaatggcctggtagctcagatggaaagagaaattttaaattaacaaattttttgaattggatttgaaaaggtcaaagactgtattaagcttcaaagaatttagcatcaaaaattcttatatcatttattgcattttagttgacatatttgggccttttcttatgagtgtattttgtagacgcacgtaacattcttttatttgtctcactttcatactggcaattaattcagttttgtacaaattaatgaggctacttccatatcctttctcattaggaaggcataacattaaa

SEQ ID NO: 79482 - DNA, 798 bp, Heterodera glycines
gaccaggttttcccccgggtcccatcaccggacgtggaggttgtcgtcgacggcgcagccattgttgatgaggaggagcagcaacatgtcgaggaggaggaggagcagcagcaacatgtcgaggaggatcagcaccagcaacaccaacaattgacacattgcgtcccggcaacacagcaccagcaacaaccatcgccgatgctttcagctgccgtccaacaggcgatcagcactttgcaaatgcgcatgccaccactgcccgtcttcccaccattcgcaatgcctttggtacttcctccgctacagttcactttccaaccgtatctgcaacaccggcagcagcagcagcaacagcatcaatttgcgtctccggcactccaaattgtcccgctcgatgatgccccggcgcctcaaccgttgtgcgatgttttgcaaacggtagcctaaacccacttttacctataaatgtaaacccccacccaataagacgccaacgtgttcacgtcgcattcctagagaatgtgtgcgcactgcctacaagcgcctctcggccgaacagatcgcgaccgcccgagcaattctgtttgacaatagaccggacactgccttcagctcggtgtcctcctcctcttccgcttcttcgtccaccacttcgtcccgtcgaagcgaccgtgacaaaaggatgaggcaaattgttgagtattggaagcagaagtgccgcagtgattgccctcattgctgatccctttgttttatcattttcattttttatttatttttcacatttcatataataaa

SEQ ID NO: 79483 - DNA, 1324 bp, Heterodera glycines
gatttgccggtgataaagactttgtaatgatgacaatcaaaaataaatttccgagaacaattattctagaagggttaaaagcagagaaagatagtggaattgaatggaatgttgaacaattaattaagggattagaagagataataaccatgagggaagaagcaatgagatgtacaaaaataacaagagcaattggtggacaacatgaaaactgggatagtgacaaagacaattcaataggccaaaaagcaattggcaaaataatcggtacagaaacaataacagagaatataataaaagagaagaaagaaatcctcaaaataatcaaagagtttttttaacacaagaaataagaaataaacagagcaataggacaaatttgccaaatccaaaatgcgtcttatgtgatggaccacattgggcatctctttgcaggcaaatattaaacagagactctcgaataaaaattatggatgagcaagggagatgccatcgctgtttgaaaaaagggcacgaaattagaaattgtacgggaaaaatgtgctataattgtgaagggaatcacaataagttaatttgtccaagacccattcaaaaagtatcagcaaaccaatacacaagaaaacaaaactcgagaaacgaagggcaaattcaaatttcaaatttagtagcaactgccattagaggaataaatgaaagagaagcattacttatgactatacgcgttaaaatcatagaaggcacaaaatatataaaagttttggtattttttgacaacggaagtcaagtgtctctaattacagatgagctaatcaggaaaatcaacccagcgaaactttgtgaaggaaatttagacattttacccattcgaaaagataacccagtgcgcctaaactcacctaaatatatcataaaacttgaaactttggatggaaaaattgaagaaattgttgtgagccgtatcgattttataacaaagaaaattagaagagcgaataatttctggggaaattgaacttgtcgaggaaaaacctgacattttaatcggaagaagagagttttggagattcttccaaaaagttgaaccattcagagaaggacttgttaaagttcaaacagtttttggaacaataatctgtggggaaatgatttcatcagggccaaaattatgcccgctcacagcaatgatcatagaaaacgaagacaaagagccagaaaaatattgggatttagaaatgattggtgttaaagataatcccgtagaaaaagatgatgatgtagcactaaaaatgttccaagactcagtataccgaaaagatggacg

SEQ ID NO: 79484 - DNA, 319 bp, Heterodera glycines
atgaccgagaaatatttgtatttgattgtagcccaaaaaattgaaagcttcaaaaagtgatatatttcgcagattcactttttactaaaaaaaaaaaatttttttttctaattttatcgagtgggggccgttccgggtacaccccaaaaggtcgccgggacataacgtagccacaaaaaaaaattaaaaattttaagaaaattaaaaattattttagcttttttgaaaatctatgtgttaataaaaactaatttgcttatttttaggaaaaattttaaaaaacttgaaaaagaattttttctttaaatttcttaataaa

SEQ ID NO: 79485 - DNA, 2136 bp, Heterodera glycines
atgattgtacctcttctaatcacttttgttcaaattttaatcactgttgcacctcttctaatcacagttgtacctcttctaatcactgttgtaagaaagagggagagaggagagagagagggaggagagagagagagagaaaaacagagagggagggatggcacaataccaagggaaaaaggaaattttcacataaaaaattttcgcataaaagttttatttaaaaaaatcatcaatttatttttattgcattaataaaaagcatagaaacattttttttaaatttcaaatttaaatatattttttttctgttaggccatgacccatttccctgtttgtgcaccaaatacatgtgcgttggcgtgcccgccgttctgtccatgcttttggcaaatatcaacgcgcactaagcccacgcgacagcaaccgtaaaaaatgggaaattttaatttaaattaaccgtaaaaatgaaaatttatttaatttatgcgtaaaaacgaaatttttatttttaattgaaatgatgaaagaatctcttgaattaatgtgtttaatttggtagcttataatatatcaaaaaatcgtttgacttactcttaaaaattaatcattttatgccattttaattgattgcaattaattcattaattaattagtctgaactaattagcaaactcattaggcggccgtttctgcgcctgaccgtttcaacgccaccaacgccggacaacagccgaggccgaggacaacgagcagtgcaattggtggtggtggtggtactgctgacgaactgcaacaggaggcggaggacaacgaaagtgttttgctgaacggcgccgaatcgccgacccccggcggcggcactttgggctacgcaattttggcggaggactccaaaacgccggccccattctatgaaatgatgagcgaaagtgagctgaatgtaagcgacgggtgccacgttttgtttaaaaacagaacatttgtgcattttagtttacaaaaaaaaaatttttttttgaaaaactaaggagtggggaggggctgttgatttgcattttattggcaaagtttagtgtattttgtggtcaaattattgtaaatattcaatgaaattttaagaccaaacaaaaatttgctgtgaaaatgacaaaattttgagccgaatttcgcaaatagctaatgaacatctgaaatttaatgcaattttcagtgaaaatttgcatcaacttccaaattttgcctatttttttcactttattccgatttttaatgcctttttttggttggaattccaatttgaaattctaattactcaaacttaatattattttgttcaatttaaggccgaacttgcaaagtatggccatggtccgatgggaaaacgtgcggctatccgacttttgaaccgaatttatgaggcaacacacccaggtttagcaaaatttaaaaatggggtacaattttttaatacttttaaatgccactgacaatttttacaatttttttataaaaaagtataaattccataaaaatcgaaaattttttgaaatatttggaaaattttgtaatttttcgaaaatcattttaaatttctctcagaaattgggatttacttcatttcttcgttttctccaccgaaatttttaaaaaacttaaaattttcaaagatttttttttaaaaatatctaaaaaattgtaagaaaattgggaggaattggattttccaaatatttttttaaatttccgttttaggcctaccctctccctaaaaaagttcccattttatttatttttcagtgatttcaagcgacacgccaattccgcggaaagtgcggcgcgcattggcgacggacgacgtcggcggtgacaaaaatggggcggctgaacggcaacgggaacggaggaccaagcaaaaaattggccaaatgttgcggttggccaacaaaaatgccgagacggagacgacagggaattatgccaagcaaaacgacgacggtggcggcgatggatttgccaacaatgccaaagaaaacggtgccggacaaatggcggcggcaacaatatctaaacaacaacaacggcacggacagcagcaacagcggggggcaatggacgcgacggcaacgacggatg

SEQ ID NO: 79486 - DNA, 857 bp, Heterodera glycines
atgatgtttattttctttatttctttttttattattggttttcatcaatttttaattacattttcaattgcaaatccattagtgagttaattaattataattaattaatgaaaaattaattttaataatctatttttattaaccaggacgaggaccaaaggctaattgcagttatgaaaggcgacccgaaaatgcgactaagtgaatattcaacgcaaaaatatgaggcataccttggcattgtgtatttaatgagaaaaaattggaaatgtgacaaaattgcggatgaatttgaagaatatgaacggaaagaatgccaaaaatatcgcaaatatttggacattttgcataaatatttgttcatgggatatgccggaattcccacagtcaagccaaaatttgtttttaaacataaatttgaaattgaaggcccactaatttttgtggtgaattgtttgaccgaaatttcgaaattttattttacaaaagagacaggacaaaattttagatataaattgaacgaatttttcaatggttttcttgaaccaaaattgttgaatgagaagcgattgaattatgagccaaaattgccaatgaatgaaacgattttgcaattggcaattgacacagcgaatgaacggcaaacaaatgaaagtttggatggcattattcaacaaaattgtggagaacaatttgatgaaaatttggaggaaatgttcaaaaaagcggtagaacaggcaaaaaaggacaacccaaagaaagcaaatcaaataaataatgaaaaaaaacaaaaaagaattttgtgttcaaaattagatgatcaatccatatgggtgacacttttaacattcaattaa

SEQ ID NO: 79487 - DNA, 1659 bp, Heterodera glycines
atggcagaagaatattcaaatgctttatttcgagctaaaaaaaaaggaaatattaattgggatgataaaaaaatgatttcttttgggttattcgaaaaagaggaaatgaaaaaatatttgaaaaaaaaatatgaagcccaacttggcgttgtgtatttaatgcgaaagtattggaaatgtgacaaaattgaggagaaatttaaagaaaaatgcaaaacaaatcgaaaacatttgcacattttgtacaattatttattccatctttatgttgaaggtttttattcaatcattatttataaaattaataaatttttaaataatatttaaggtaaaagtggtgaatttgtcaataaattttcggcagttaagccaatgtttttttattattccggagataatcaaaaggagttaatttccgtcgtcgaaactctgagtaaaacttcgcagtgtttttggggaatacacaaattgagcatttccaattcccatgaaatggctttgaaaaacgaggacgatttgatagacgagaaaaattgggaggaacaaaaaaatgttgtggaaaaaattgacggaccaaaaaatgtgcaaaataagcaacagaaaattttaaatttaccaaaagaaaatgaaaaaaatctttggaaagaatttgagcaaaaaatggaagaaatgtcaaaaaatgcaaaagcaaatgtcaaaaaagaaagggcaaatttgaacgacaaagcagcagaattattaaaaaaaggcaaatatgatagcgaaaacgaaaaagtagatctattatatgatgaatataatgccaaatttgaaactttcaaatcgtcgccattttactaaaaaaaatccacgtttttcttgattttcttttcttttcatttcattttcatatttttcaattcattttcatttttctcgcatcaacctttctgtccttttttttcattttacatttttacaatttttctctttttatacatacatacatacatattttgttgcttggtcaaacttttggaaaatatttttgcatttttgtaatttattaattttacaatttttgacccagttaccccgaccgatttgttgatccccagagtactgacaaatgagaaggacgagaaagagaagagagaaagaaaaaatataaaatttgtaactgaaaaaagttaggacactttttaaacttgcaaggactcagttggcccgctcgttggaatttttttttaaagtaaccaaaacgaaaaaaatcttcgaaaaaaatgtatttttataggaaattttttaattacgcctaaaaatctaaaaaaaaatttttttttaaaactctgaaactaaaaagtctaaaatttttatgaattctctttttaacgatttttaaaaaattttctggggggaaaactccgtggggaatgtggagcgtatattctttcgttcatttgggcttataattgaattgatatactattgcgcaaacggtaccattaagccactgcctgtgccaccagtcattaatgttgaagcgggcggaagacgaaatttgaccaaaatgtcttccgcctcggattgccaaccaccgccggcggtggacaacggacgcgcggagacggcatcgaaaaatccaagcggaaattggacaggacgcggctcttaaaatta

SEQ ID NO: 79488 - DNA, 610 bp, Heterodera glycines
aaatcaagtctcaaagccagaatacaagccaaggcaaagccttgcaaaaatcaccacccggactcacattcgttgacccaaaagaattgtaaagaattaaaacctcaaaaataatttatttaaaattaaaggaccctgtcgcaatacaaacgcacagagtttcccgccgcagaacgcccaaaaggattttcccaatactcgtcccaaccagatgaaaaagtcaaatcactaataaataaattataaaattcaataatttcagaagaagcaaccaaagccttggtctaaggcagcgttgggaatgagagtaataaaaaaaattaaaaaataattattaacaaaataaatataggattcattcgatgagtgcgacgatagcgcattcgttggaattgaccaaaaggagcaggtgcaatagcaatatatcctgtaaaaaataataaactatttaggacgaagtccaatttcaatacgaatgcaaatcttggtctaaacgttcgcgtggccaaagagtaaattaccaattaaaatgaattagttaacattaatttaggattcgtttgacgagggtgacgactccgctttttatggtccatcgaccagtaaatga

SEQ ID NO: 79489 - DNA, 699 bp, Heterodera glycines
atgaccatatcaacatacgcttggaattcatgtcacaaaaaagtttttttccgtggaggtatctcactccagttcaatacaatgcgcattttgttcaagtattttggaataattttgataaatattggttttcaaaagggaaatttttttacggatttttttcaaattttataacaatgttttgtgaaatagcccatttgaaatcatttactggtcgatggaccataaaaagcggagtcgtcaccctcgtcaaacgaatcctaaattaatgttaactaattcattttaattggtaatttactctttggccacgcgaacgtttagaccaagatttgcattcgtattgaaattggacttcgtcctaaatagtttattattttttacaggatatattgctattgcacctgctccttttggtcaattccaacgaatgcgctatcgtcgcactcatcgaatgaatcctatatttattttgttaataattattttttaattttttttattactctcattcccaacgctgccttagaccaaggctttggttgcttcttctgaaattattgaattttataatttatttattagtgatttgactttttcatctggttgggacgagtattgggaaaatccttttgggcgttctgcggcgggaaactctgtgcgtttgtattgcgacagggtcctttaattttaaataaa

SEQ ID NO: 79490 - DNA, 120 bp, Heterodera glycines
atgtcgcaatatgttttcaacataggcgatttgtggttcaattcatcaataatctggtattcgctttttttggcgacattttctttgcttggcttcgtaacgatagttgtctgtgttatg

SEQ ID NO: 79491 - DNA, 215 bp, Heterodera glycines
atgacaacagaattagtagacaaggttagttgtttttaatccaatgttttgatttaaaaataaaaaattgaatgccttttcagttttacgacctttataaaaatgccggattggttcccaccgaaattgccatcaatggcattttggctttggtggctttggtgggcgtttgtttgaactcatgcctcatttatgtgacaattaaatcgaagtaa

SEQ ID NO: 79492 - DNA, 764 bp, Heterodera glycines
atgacgttttcattgctggcatattccttttttaatgtgagttattgtttaaaaaagtgtttgtgattaaatagatgtgaatgtgtttttaagttagtttgaaacttctaggaagcttttttatttctccatatttaaaattcgaccctccgatattttttccctatttcggcattcaccgaaaacttcgaaatacagccccaaagatgtttacaaaaatacaccgctaaagatcaaatttaaaaaaaaatattttatatttaaaaaatcggtgctgggtcgttacttaaaaaccatcattatgaaaaattttgtcgaaaaattatttataattttgctcgaaagcaaccaaatttttaattcttgatatcatttgatagccctaagtgttctctatcagtctgcaaaatttcaaaaaatttcgttaagtttcaaaaaagttatagctcggggaactcaaaaaaacgtgattttcgaacatttttggccataactttttttaaacataataaaattttttgaaattttacaggctcataaagaacatttagatctatcgaatgatagcaaggattaaaaatttgggctttttagagcaaagttataagcaaaaattttaattatgatggttttttaagtaacgcccattatgatggtttttaagtaatgacatagcaccaatctgatgagaattaatgaaaggctattaatttgtttaatagataattttatatcaaaaagcatcatgtgggcttttcattaaa

SEQ ID NO: 79493 - DNA, 736 bp, Heterodera glycines
atgttgactccgcatgagttggacgaaaggttgggttgggctccatttgccatgcttggccaaaaaaaagtaaaaagtcatcttcgcccccttatgctaagagcataggttaatccgaaaggcatgacacgccgacgcatcatttaagtgacagctggaacatttgtatatgaatgagcgtaaacatatattattttacttttaataaatttaaagtttcatttatttatttaaattttgaaatagaatcttcaaatgtttatgaaaatcagtgcatttttatgaccattttgaataatgcttttgtggcattaagtggtgtttaattgagttaaatttgcctgttacattatttgaaattgtcaattgtcccacctttcttaagaaatttcagaatttgtatttgtgtaaattctttggcttcgtattttcaccgctgccggcgatgattagtgaacgaattaagcagcactgtgttgacctgaacacctttatgagttcgttcggcgattggactctgaggacggaagtgcaggcaatggaggaaatggaaataattaggaataaaaatttagagagggcctgaaatgttcacgaaaatcatatattaactattaggtttaaagttcttatgatgggagtcttattttggaattttgtaaaaaaaatctcaattagaacaaccctctataaaagtttaaaaatcattattttgatattttcgtaattaaataaa

SEQ ID NO: 79494 - DNA, 1565 bp, Heterodera glycines
ttgtcagttgggccattctcttctcccaccccgccgattttacgcccgtttgcaccaccgaattggcacgtgccgcgcaactcaccgccgaattcgcgcggcgccatgtcaaagtgatcgcactcagttgcgattcgtccggtaaaattcatagacaatttttgaattgtgagtgattaattgcgctgaaaaatgcaaaattagtggttttgagaccgaattaaacgttttaataaaaaggcattcccaaaaagaatcgcatcgcaattggactgaagacatagccgcgtatggcaattcgaaagggaacggaagtgagaagatttcgtcggcaggtcattcatggacgaaacccaactcgtactattatgtagtaaatatagaaacagaaaaaagcgagacagcgttaagtcatcagagaacagagaaaaaaagatactctaaaatagtacgagttgggtttttaccgtcattcaccccccccccccccctcctctcatccatttctccactttcatcaactctctctctctctcttgctctacgtctctctctttcctctctctctctctctccctccctctcccttccctctctctcttccctctctctcttccctctctctctctctccctctcccttccctctctctcttccctctctctctctctactctctcatctcatattccctctcatccactcgcttttcccgctcggccttctttcacccactctctctttctgcttttctcccgctctctccctcgctcattctctctcccctctcctctcgatccttctctcatctattctctcactctcttccccttccctcacatttttatttctgtctaccgttgtccgtctactttaagccgattttccctttccaatcattgctgatcagcagcgtcttttggcaattaaattcggcatgattgacccactaaattccgatttgtccggtgtgcctttaacggtcagagcagtgagttttgaaattgtccaatttggcctttaacgtgccaaattttttatgtttttatcgtcgaccccaaaaagcgtcttcgtctgtctttgctttatccggcaagtaccggacgaaattttgagtaatgaatccctttttacgtcaccactgaaactttatacaaatttagcgaaattttgcgagtgcttgactctcttcagctttctgacaaatttatggtggcaacgccggagggatggaaggtgggcaaaagggttgtaaagcatcaatcagtggcgtcacttttcccttcgcttctttgcgcgtcaattctcctttgtttggcaatttctcttctccttttattcgtcttcgatttgtctttccaatttcggcattattcaaaattggcatttttcccgtcctccgctgattttgccttccttccctttgagccgggctccgcttgtatggtcgaaccacgggtgacggatgcgaaggccaaggaaatgttcgccggcgttgggggcggagtccgaccggtggaattgccctcgggcaaacggtacttacgcgaagtgaacgacccatcg

SEQ ID NO: 79495 - DNA, 442 bp, Heterodera glycines
atgaaacagacgaaggagaaggagcggacaatgagtgacgaagaagacgaagatgaagcatccttttcggaggaggacgaagaaatggacggaccatcgaaacagtcgaaagggaaggaaattgacgatgagacaatggcggagattgagaaatggttgaaggatttggacgtggagaaattaatgagagaatcgtcgacatcaaaaggcacaacgcaatattcaacgccgatgaagcgaaaaaggggcggcaaaaaggtggtgacgacggatgaggacgaagaggaggaacacggcctcaactcgggggaaatggacttcagccaatcgtcgtcggaagaggaaaagtcaaccaaaaggggaaaacgaattttgaaagggaagggaaaagcgaaggacgaggagcagtcatccgccggaaatgaaaagccgaaagcaaaga

SEQ ID NO: 79496 - DNA, 759 bp, Heterodera glycines
atgcgccgaataattgttgatgtgcttttcacaatgatttttctgctgatcagcggactgggcacattaaatgcggttaacccagcagaattggcagcggatgagcacgcagagacgcactcgcccaccactttaggtgagaagcatcagcagcaaatggacatcccccctcttttaaaagtgccaaaagtggaaccaattgagacggcaccggcacaacagtcgagggaatggggaggagaggaacagtgggagcagaaggagcggataccgaaagtggaagtgccaaaagtggagccaagtgatacggcaccggcgcaaccaaagcgaaaagtaccaaaaatggagccatttgatacggcaccggcgcaacagctgagggaaggaagaggggaggggcagtgggagcagcagaaggaacaatcacttggactagcggaagtgccattgacagcgaaaaggcagagaacgccttctgcaaggtatcacagaccagagtttgagttgtcatctgaagaggaaccggacaattcatcggacgaagattggaaggatgcggaggaggaagagtcggacgaattggcatcgctgtcgaaatcgtctgcatcgtatgggttgggagaggacattggcgagggggaggaggaagagaacgaggcgatggaatccaagaaaaaaaggatggcacagacaaagggcaaacaaacggcgccgattgaagtgccatcaaagaccgattcatcgttcgattctgagcaa

SEQ ID NO: 79497 - DNA, 1679 bp, Heterodera glycines
accacaaggacaattggccactaaggacaccagcccgttaattggccaactaaggacaccagcaaggacaattggccaactaaggacaccagcaaggacaattggccaactaaggacaccagcaaggacaattggccaactaaggacaccagcaaggacaattggccaactaaggacaccagcaaggacaattggccaactaaggacaccagcaaggacaattggccaactaaggacaccagcaaggacaattggccaactaaggacaccagcaaggacaattggccaactaaggacaccagcaaggacaattggccaactaaggacaccagcaaggacaattggccaactaaggacaccagcaaggacaattggccaactaaggacaccagcaaggacaattggccaactaaggacaccagcaaggacaattggccaactaaggacaccagcaaggacaattggccaactaaggacaccagcaaggacaattggccaactaaggacaccagcaaggacaattggccaactaaggacaccagcaaggacaattggccaactaaggacacgagcaaggacaattggccaactaaggacaagggcaaggacaattggccaactaaggacaagggaaaggacaattggccaactaaggacacctgcaaggacaattggccaactaaggggggggggcttttaacgcggaacaggacgtttcggtgccagcccaagttttggactacaacttttttcattgttgaccaaatctaacaatcttggtatcattcgaaagcccttcacaagctctattagccttacaaaaaacaaacaaaaattttagcttctaaaaaagttattaggaaaaaacctcaaaattttcgacttttttgcaatttcatgttataacttttttggtaattgtctaatcgcgaagcaatagcttagaaatatcttctaaacatgttaagctttcgaataataccaagattattggatttggttaacaaataaaaaagttatagtccgaaaacttgggctggcgccaaaacggcggcgccaaaacgatacagaccccaaaaatgtgtatgtaaatgtttttatttattcaagggggtagccacagccaaggcactcatccttggcataaaaaataaaattggcatttgaatgaagaaaaattctaagaaaaaacccaggaaaattcttgaaaatctgcaaattagcgctttttcgggttttaattaaatttcaaaaaaaaaaatgaatacggtactaaaatgctatggccagaaaaaaatcattttggtcccgactttttttatagatgaacgaaaatgaattacctaattagcaagttaatagaatttttcaagcgcttttgaacctacaaaaattgttaattgagttcagaaagcaaaatttgtggtcctaccgcccccgcccccttacaaattagctacgcccttgtgttttaattttaatgatcagtgaacgccaaaatggcagaccgatatcggcgcgcgagcccaaaatcgatcagatatagggtgctctctttaccatgcaggcccatcagaaaattttctgaaattaatacacaaatcattgttaattaattctatgttaaaacttgcatatattgaataaaaagtaaagaaaattaaaaaatatcatcagca

SEQ ID NO: 79498 - DNA, 511 bp, Heterodera glycines
atggcccgagtctttgcgagtcgaattggtaagcgaagaaagaggcataaaagtggagcctcgagagtcacaagtctctctcttttcgatttgactccgagagaataaatttcttgaaccaaattaacccaatattgaattaaattaggactgtaattgccaaatggcagaaaaaggaatttaatttgccagtttattaaattaaattttgatttaggattatttgcgtcgaaaattgtcatggacagagagggaggcatgcgaacagatccgcaaacagcttgttcttgacccagcaacaaaacggggaggcgagaaagacaatcggaggaggaggagaaaatgatcagtaaattgatcagcctcaattaaatgtgattcactcgatgatcacctcgacctctgttgttgatcgaagaatcgcattagggaaagcaattaacgggtggatggaggcgggggtttgtattttataaaaaatttccttgtccaaaattttttgaaatggaaa

SEQ ID NO: 79499 - DNA, 275 bp, Heterodera glycines
atgtccctggggaaagcgtcaacaaaaccaaaagacgaaggacttggaaaaaattttaataccacgaagaacagaaatcggtgtggccgtacacccgtaaccaatggcagaagacgcaccacttcggcacggggaagcagtctcgcggcctacatgccgttgagaagcacctgggctccgctttcctccaaagttgtgaagaaaaaaaggcacccgtcgagggcagccaaaagtgcgacttaatagcgaagaattcgtcagtgtcttttccaaaa

SEQ ID NO: 79500 - DNA, 356 bp, Heterodera glycines
atgactgtattaaaaattaatttaatgatttcccttccgttcgtgcttgcgttcgaattgatccccgaacgacatgttcgttgtggatttacgctcatagtaaagcatgcacccgatggtttggctgactttttcggatactccacgagggtgtacgttggactaacagaaaacgaacaataaatttccagaaagctgctcgcgttcgcattgatccccgaacgacatgatcgtcgtggatttgcgtgggaactttcaagcatatacaaagtactatttcataaaaattattaattgtttttaaagttcatggcgttgctgcgcatgttccacgttttttttataaaggaaacaca

SEQ ID NO: 79501 - DNA, 1147 bp, Heterodera glycines
atgaatttagaactccatcctagaaggttcaaacaaagctaaaaacatatatttttttgaacgtttcagcttccatagtcaggaaaaaaatacggatttacatttatttagaacattagttttaacttcaccatttaaatgccataatttcaaaaaacaaacaaacaaaggttctgctgactctgtccaccgagtcggccggcgcacgcgagcatttgcccagcgtgtcctatctgaaggccatcgacctgtggttcggctacatcacaggctttgtgttccttacactgttacaaacgctggtggtgatcgggctggacaagcgggccaatcagttgcgcaagtgggcgacgaagaagcgcattggcaaggcggagctgagccgagaggcacgcgacgcgatggccgaccgggcggcacgttaccacaagctgggacggtacctggacaattggtgggtgggccgactcatgcaaagagtattatgggaaacatccaatagtggtcaatcttttttttcaaattaagcccaattatgaatataccctcactctctcatggccaagaggtcatttcggcacgaaatgagtccgaaaaaatcgacaactaaattttcgcactttattgccataagttttatattgaaacgttttgaaattttttaggctaatattaataaacattttttcttcatttctaccaggaattttaaatatgccagaatttaaaaatgaaaccactgactgtggaataattttgttaattttttaaaataatttcattgtttttcagttgtcgcgtcttctacccgctcagtttttcactgtttttgattttttattattttgtgtttaccgaaggccaacaagatgattgtattgccgacagataataacaataataatcataaattggaattaaatttcaagtgaattaaatgataaatttctcttaaatgacgagagacattttattatttgttttttaattttttgtaatgcgaaatgcaagtaatataacaaattatttttgctcaattttttgcttaaaattatgtcactattcgcgcagatcaggggtggagcgcgaccgtgatctgtggccgcgatccgctgcaatctgggactccgcggcaattttaaataaa

SEQ ID NO: 79502 - DNA, 837 bp, Heterodera glycines
gactacgacatggacatctatttgatcatgggctggcgtgacccgcggctggtgaacaactttggcaagccggtgctggtcaaggaggaggacattctggagaagatttggcgccctgacccattttttgacgcgaaggaggccgaatttcacgaggtcaccttcctgaacttcctgatgcgcatctacaggtccgtcagttacagcagttggcattattacaatcagaaagatatatttatttctaaaattaaaatcaaaatagcaatcaaaaaaaaaggctgttaaacattattaaataagtaaaatgaatttaaaaaatggataatggttcagtgacggactaattttgtacgaaacgcgcatcaaattgaagccggcctgcaatttggtgctatgcaagtacccacatgacaagcagacgtgcgagctgcagataaaatcttgtaattgaaattttctaaattctgaccagttccgacagggtttgaataattttccaacaatgctaagatcttgtcccccctattccactcattctcgaccaatgccaattttagcaaaactctgatcactcctgatcagtctagacgggtgtcaatctttttcaatcagtcccaagatcacagtcaattccaatcagtctcgattattgccaaccttagcttttctaatcacttttgatcagtctcgggtggactaaatgttgttattcaagttgcttatgccgctgaaacggtacgctttgaatggttcacgaatcgactggacgcaattgataaaaacccggacgtgcgacttcccgagctgtacattgaccagtacgagccggcaaaa

SEQ ID NO: 79503 - DNA, 1302 bp, Heterodera glycines
atgttcttatttttaaagatttctgatcgaagctctgccttaattgcgttgatggcccggtaaaatacaaaggtcacctaatatgaaccgtcaattatcgacttcctcaataaaaatgtatttggtaaattcttaccgcttacatctcttatccccttccttcatgtttcatccgactaatcttctacatcttcatagctgagcaaaagtattctccgcgccataggcttgtttaaaaaaaacaaaatttgttagggaaagcatcaaaaaatgactttttacttataatttatttttaccaaattaattgcataataaaaattttggaaaactcttggctcgagaaaaatctgtgatttgtttgactctatctcgaatctcggactgagtcttgggaaagaaacaatttcgttttatattcttcaaaatttattttgtccttaaactctaactaaaacatttatgggaaaaacaaaatttaaaattttggccctgtattttttaccccgttgcattttatatatgtatatggaagtccccattcaaatggaacagagttatttgggactgaattggcgggagggagttttccgttttggcgctgattgtgtggtgccctttacgctgcattggtttttcccttttgctaattgatttattttgcgcagtgattgtaccaaaacaatttactgaatgattacatttgactgatcagccgtcattttgtcacacaattttgtgcacttttctgaaacaattagtgtattttataaatttattcaacaaaaaaaaaaaattcgacgaccatttcatttttgtatcaatcggactttgagtttttcgagtatcataaatgtcagaatcggagcgagttgttttcaatctcagaatcggggttccaagcctaaagaaagtgatatcgtcatccttttggcttttggcacagtttaaaatggcacattttttgttgacactctgtctcactttcgcattgttggcacattgtgtctccgcaaaacggcggcccggcttgcgcacttgggactttgaggcgaagccgggcatggacaattcggtcggcaaagcgaaggaagaacaggatgaagatgaggaaaaggaacgaaaagcggatgatggagtaggggataaagcagtaacagaacagattccgccatccaaaatcagcagcacaacgaggcaagcaaaaatatgaaatattttatttttaaaattatttttttaattttaaatttatttctagtataaaattaaatgagcaactattggaatccatttaataaa

SEQ ID NO: 79504 - DNA, 76 bp, Heterodera glycines
caagcccagtgttagacaaaattgctcataacgccaaatagcgtaattggcgtaaattattgcgcgctaattcaaa

SEQ ID NO: 79505 - DNA, 341 bp, Heterodera glycines
agtcaatataactcttgaaattattgaccgaatcaaacaatcttgatatcattcgaaagctcttcacaggctctattagcctactaaaaattagagaaaatttcgaactataaaaaaagatagaaataaaaaactttgaaaattctgcctttttttgcggttttaaactgacaacttttttgagagctgattaatcactgagaaatagcttataaatatcttctaaacatctagggctttcgaatgataccatgattgtgaagtttggccaacaaagaaaaaagttatagctttttgtacattgctgagacggagttggccagacggagttgacccctacc

SEQ ID NO: 79506 - DNA, 762 bp, Heterodera glycines
taggaatttaaccaattcgattttttcttctttaaagtttctgaacaaacaccaagaagtattcaatttggcgaactttggccaactcaaccaccaaagtgtcgattttgtgctgattgttcaggtttgttcgttgatgattgctattttcatttttttggtgttaggttcacaacagaattgactatttgaattatttggtcggctctctgtcgcgtgccaagggaatcgaacgtgttctgttgattttcagttacgataaacattcagaaccgataaacaaactgatcagaagcattgacttttgcagagtaaaattcaacttaattcgtaaaaaaaattctttgtttttaggtcacgcaaattttctttccttacaatatccaactttttccaaattcgtttcccggccttgggccaaaggattgtccggaaggaaccaaaaagtacttcgatttttaatgattagttgtttatatttggattaagaagggaaggtctcgaatgtgcaaatgcggcatatcccgacacacatggcaattttagactgccgagatttacgcagattaaacaccattggtggtggaaggtcagcgaaagggagttaattcagtaccgaaaaattaacaattaggcgaattacgcatttgatgaaataatgccgaagtatggtttggagaataagacgttgcttttccttgaggaagatcatattgtggcgcctggactttctcctttcgctgaaactgatgacgaagagcg

SEQ ID NO: 79507 - DNA, 952 bp, Heterodera glycines
atgacaaatttaattgaaatgacacttaattttgaatggaaaaaattgctacatgaacaaaataatgggtttatagaaaaggcacgaagaaaacacaaatatttattatttaataattacttgataaaaaaatgttcaaaattaaaaaaaataattaaaataaatttttaataattaatttagtataaatattttgtgttgatcaattgtgtggctgagcaacaaacgcaaatttttgataaattttgtcagttcgttgacgggcgaatccgtcggcaaattgtgtacgatttggacccaaaaagtgggccaaacattggcacacatttgtaccccgacatttaccagcacaactgcgaaatggcaaatgaatttttggcattggcatttatgtaaagaattttatgaatttgataaattattaaatatatctacatataattatttcgatttattttatttttgaaaattatttaataaatttaaggcccaatttttgcaaagtttggcttattggcataagttcgaacgtaaacagtgcacaaatgaacccattgttggcacaatttgacgccacaatcagaaaagattttttgaaattcaatccattggaaaatgccgaggagaatggaggcaaaaataaaagtaacaaaaaattcaaaatgccaaaaatggaagaaataagcgctaaatttgacgaattcaaattggcattcaaatccattctggtcaacaaatgggaaatgtttgaagcgatgtaaaattaatttacataaaacctttttttttgcaaatttttaatgcaaaaattttagagagcccaaagaataagaaaaagccgatgtaaaaatgtgaaagaatcttatttattacaatcattttcactataaaaaattgtaatattttatttttttatgtataaaaattttaatggatattttaacaaattaaa

SEQ ID NO: 79508 - DNA, 1631 bp, Heterodera glycines
  unsure (1)..(1631): unsure at all n locations
atgntaaatgtaattttatattaaatatatttaccttttaattaaacaataaaatgttcagttggaaaattatctggcagaaaaaacatttaaaggcttcgctgaatatgaggagaaaatgaaaaattcattaataaaaattcgtaaaattttcgatgactgggtttgtgaaattaaaaaatatttttaatggaataaaatttattaaatttaattaattaaaaataaatttaatttttgaatttttttttcagtccgaagggcatgccaaactgcttgtttcgggctcatttttgcttggcactcatacaattcgttctgacattgatctgttgtgtattgtgccgggcaaagtgatcaaaaaagtgcatatttttggctatgatacaacaatttgccaacatatggaacacgcgtgttccgatggcacaaattggtcattgtattgtgaactttgttcggttatattttcaataaataaaaaaaaacatttaagttctcaaatagatttctggtcaatttaatattttcttttaaattcagtaaaaagaataataaacaaacaataatttacgtttaagtaatttattaataaaaaaatataaagttaaatattttttagctaactaatttttaacaaaaatactaaaatttttaatgtttcaaaaaataagattcgtagattttttaacaataataaatacatataatgaaatataaattataatttcaaaaataataattttagcttgtatattcttaataaaaagaaacgaaatgaaataatatttataaagttaaataaattgaattaattaatttttaattcaaaaataatttttaaatttgaaagaaatgaaaaaaaaattcaattttttagaatgaatttgtgactgaccttgtcaaatttccacatgctccaattttgttgatcaaattcatctttgatcaagtgccgtacgatgtgacttttgtgattattcccgaacgcaaaatgttgccagcaaaaattgatgacaaaacaatggacgaactgatggcaaaattcaaaaagccaaccgaaaataacacaaaaatgctccgtgtactttcgggtaatatattaattaacttataaaaaaaatgaaaaaaattctcaaaaaatttaccatagagttcattaagggttacgggctgaacatctatctatatctttacggggtacggacatacgggctaaagaacccgtaaaagccgtagctcataaaaactcggaaaaaatatgggctataggtccctaaaatacctccgtatacggaaagatccggtccataatcgatctctaaaatatttttaaaaataattgttttataaaataaaaaaaaattatatttaaaagtaaaatataatatataaattaataaattttaaattttttatttaaatttttttttcactaattatgtatatacttattttaggttatcacgcaacattttacatttttaatttgattttggatggacaaaataaacaagaaatgctgcaaatggatgacggagaaggagaacgccaaaaaattcatcaaaaatttaataaaaatgcaaaaaatttccgaatgctccttttagtgatgaaattatgggcaaaaa

SEQ ID NO: 79509 - DNA, 349 bp, Heterodera glycines
tataacaatgtggatgttgtatgcgatttgccgtggcaattccatcaaattttgtggaaaattctgaatttgaacaacgaagccaatttaatgttggctgaagcagcaaatgaaattgttattgaaaattttgaaaatgaatttaaaaatgtgaaggcccaaattcatttgcaaaattttgcaatggcacttttgactaatggggcaacaattagcggcaaatgggaacaaaatgagtccaaaaagagacaaaaattgttggaagaaataacgggaatgcgttgtggccacatccgttttgacaatttgaaattgcgttggcaaaagatggaagcacaaattcaattgg

SEQ ID NO: 79510 - DNA, 394 bp, Heterodera glycines
atgtctaaaataaatcaatggtcagctgattgcacttttaaaggacatactcatggccaacggatttctttacataaacattttgaaaagtaacatttaaattaatatttcgccaaatgacttctgctgcaattttttcttttctgttccaattctggttaaaaatataattaaaaataatagcggaaatattttcatttttgttgccccaaaatgctttataaattttttttccaattaaatagcaatatttttttgaggcatttaaatgaataaaaaattttcttattcaaaactgacatctatcataattctatgaatttattcaaagaaataataataataatttatcctactgaccaaaacaattgccaattggtaatgattaaataaa

SEQ ID NO: 79511 - DNA, 3171 bp, Heterodera glycines
gtcagtaggataaattattattattatttctttgaataaattcatagaattatgatagatgtcagttttgaataagaaaattttttattcatttaaatgcctcaaaaaaatattgctatttaattggaaaaaaaatttataaagcattttggggcaacaaaaatgaaaatatttccgctattatttttaattatatttttaaccagaattggaacagaaaagaaaaaattgcagcagaagtcatttggcgaaatattaatttaaatgttacttttcaaaatgtttatgtaaagaaatccgttggccatgagtatgtcctttaaaagtgcaatcagctgaccattgatttattttagacattctagaattaaaaataattgttaaaataataactatattaatctaataaattgttgcaataattttggggcctgtctatttttattctcgacgtaagtgccactttctgatgaaaattttcttggaatcaacaaaattaactgatcaagatattattattcaatagctcatagaaatatctttacaagcctgcaaaattttaaaaattttacaaatatgttaaaagtatattttatgtaaaagttttccttcattttatttccggtacagtatatgctgtcctgagagaatatgttaaaacaaaaattttaaatcgacatctaaataaaaaaaaaattttatttgtggattttaatttgtctattcattttcaacaaaatttgttggacttattttctaatatattttcctttaaaagaatggaggaagaaaaaatgtgaagaaaataatgataaaataaaattatgcctctctttcactattcgtgcctataattatttatttattcgacaaaatttagcataaatttttgaaaatatttctgtgctatttaaagaatgatttttttttaaattttattataaataaatatactcccaatattattatttttaaatcatttcaaatataaattgcattttataataaaaagcgaaaaaacatataaataaaatttattttaaacaaattatgtaattattagttgagcataataattttggcaaaaacgatttgggcataaatttgaaaaaaatcattgaccatcaaaattgaagttgttgaacaaattccgaattgatcaatttaaatttattggaaaataaaagtaaaaaaccaaaaaacgacattaaataaagaaaagccattcatttctaaaattctcaaaaatacaatgtttttttgtggcatttttgtcaccttttttgaaatttatgacaattttacaatgtccttttttccgtttatatccaattaaaaagcaataaatttaacaacaaaaaaaacagtgcaaatattgcaaaaaatagaaaaaacttcgataaattattatacaaaattaataattataattctaaacttgagttgcacgggccgggaattttgacaaaaactgggaccggaacttaccgggaccagaaaagtcgggaccgggacctcgattttggtccgggaccgcgagaaaagccgggaccgggaccaaccgggaattttcccaagagaaaaattttttgaaaaaatttgaaaatttgagtacactttgttacgaaaatttctaaattcaaaaatgtacccataaaaatgaaaaaaaactttaaatgaatacaaatccatttttgtaattaaaaactatttttcaaacaaatacatttttttgtttatattaaatttggtccttttttctgataaaattatttttataaattgaaagttccagcatggaatcaacttccaaatttaatcatgtatgtattatatattaattaagacagcacaaatgggttaaaatcggagtaattaaggagaaagtggaaaaattttgaaaaataattaactcattagagaaaaaggctaactccgatttttttgcaaatttcggcataattttgtcgccattctttggttgaatattttgttatttgcctgaattgattattcgctttaatgaattttcgtattcaattttctgtttatcagtttttaatttatttatttctccaaaagcctctcttagaattctctcggaaaattcgattttttgatttaaatatttatttaataattcggtatatttacgacatttgaaaaaaatagcaaacctaaatgattttataaaatttatcaaaaaagttttcatgttaattctaaaaatcgaatgattttattcagccacaaattgttttttccaattggaaatattctgttgagaagtgttcacaatttttgcaatttctttgtcagtcatttttgggttttctttttttgtttgccaataaattttcattttttccattttttcgttctccgttatttgtttcttgctaattccaaattgtttcttccataacatgccttgcgacgcgcgctgtctaccttgaggcaacattggacctcacatcggaatcattcatcaatgttctccgtcgattcataagtcgacgaggaaaacccgacatcatttggagcgacaacgccacgaccttcaaactcgctcagaaaaccctggagcttctcagtgctccgggtccggatcaggaagtacaaaacttcctgactcagaacagaatccagtggcgattcattgcccaaataagtccttgggcaggaggcttttacgagcgcctcgtgaagctagtcaaggactgcttcaaacgaaccttgggtcgaaggatcctttccttcgaccaactcaacacattcgtggcagaagtggaggccaccctcaactacagaccgattaccgcggtctcagacgcagtggatggaccagttccactgcgtcccatcaatctcttacaaccagagattcagatcaattgggaaacaacaacagacccaattgattcagaggaacagttttcctccacacacgaacgtttagcttcccgaatacaagcacttcgggaagccaacgacgttttctgggccaaatggcactctgagtatttgacattactcagagaaagagcccagtgggaccacaaaggcccacgactccaacacttcggagaaccgaaggaagggatggtggtcctaatctctcaggacctcgtccctcgcaatcaatggccaatgggacgaattgttgaaaca

SEQ ID NO: 79512 - DNA, 1626 bp, Heterodera glycines
ccggcgcccactccgtccccgcagcgaaaagtgtccgccgcggccgggacaaatggcggacaaacgcagacgaattgtctgatttgtgccgacaaagccacgggtgggcaaaaatgttctcatttgggtaaaactgccttaaggaaagcattacgggagcatttcttgcgatggatgcaaaggttttgtcctttgcttttcactttctgtcgcttcactttttgcttctcttttttatgtttcttccggcgaaccattcgaaaaaagcacaattacttgtgccgttttagcaaaaattgcgtcgtggacaaaagtgagcatttgcaacataaatcaacatttattagctttttccattctcagaccaacgcaatgcgtgccgacgctgtcgcttcgacaaatgtctgagcaacggaatgcgtccggaagccgtccaattggagagggatcgaattgcggcaacacgacggaatggcaaaattggcaaccaaaacgggcaaaacccaacaacgacagcgacaacagcaaaaacatcaacggtggcgagtgccattggctgttgttttgttgccgacgacgaatttggcacttcgtctgcaattgacaatgaacaaattgtgcaacgattaatggaggcggaacgaatgctaaagggaacgaaagtgacgacaatgagaagggaaaagcagccgcaggggacgacgacgagcagagaaagtggcggggagacgaagtcaaaggacagccaaaggacggcgacgacgggcgacgtgacggattcggtaaggaaagaaagaacggagagagggaatggaaagaacggaccgtttgttggccaagatgcaccagcaactgattttgctcgtccaatgggccaaacatttgcccgaattccgtcgtttgcccctccgttcccaaattgcgctgcttcggcatttctctgcccagcatctcatcctttgtgccgccttccgttcgctcgtccgtgtcgctgcctctgacgccgtttggttggccaacgatcgctgcgttccgcgcgacgcgcccaaaatccctgacataaagtgcgcaatgtttcaaactgtgctcgatcttttgtcttttctgttcagccgagtggtcgcccgcattctcgaccatttgacgagcccaatgcgacggctacgattggaggagtgcgaatttgtggcactcaaagcggtggcctttttcgatccgagttagtcagtcgctcagtgtttacatttgccactcatttcctttcagtggccaaaggcattgatgagtcagcggtcggagcggtggagggaatgcgtcaccacattttggccgccttggagcaccaagtgcagcgcagaagcgaatgtcgggcggcgccgcttcggctgggcaaccttttgctgcttttgcctccgctggtggccatcgcgcgcgatttggtggaggaggcgcagttggccaaactctttggtgagtcattgcggacagacggagggaaacaatcaatggcacttggcattggttgaaggactggccaacgtggacgaattgatggtggaactgttgctgccggaggacgcagagacgcgcagctactcacggctaaggacgagcgtcacctccacc

SEQ ID NO: 79513 - DNA, 258 bp, Heterodera glycines
ccaatggaatgaatcgaacagccgttccggaagagaatggcaaaatggagcacacttttgaacgcatgggcaacattcagtggggcgttggagaattggagtgggaggcatggatgcgccagttggacggagccgtaattaattattatctaataattaaatttaattttttaaattttttccaattccaagggctaccaaactggacacaagtccagattaccgattctgctcgaaccaatgacgaaaaagaaatga

SEQ ID NO: 79514 - DNA, 58 bp, Heterodera glycines; identical to SEQ ID NO: 76953

SEQ ID NO: 79515 - DNA, 1070 bp, Heterodera glycines
atgccattggtgccaattgctgatttgaatggcaccaaaaagtacacggcggaggaggtggaatgccgtaacaaattggccgctctttatcgcctcatcgaccatttccgctggagccagtcaatatacaatcacattacggtaatatttggtgaaatttaaaagttgcgaaaacactaaaaagtttcgtctgcctgggagcgacaatgaaatcctgatcaacccgcttggcatgctatatcgcgagatcactgcgagctcatttgccaagatcagtgttgacggatgcgttattgatccgggatcaacacctttgggtattcaatttttttttcatggactgtgtggagggagcgagggttttagcattagttacatattttacattccattttttggcattttcacaaaatcctgattagaggggcacctagttaaattgcttttttgtggcccctaaagatcagaattcaaaaaatgttttagttacttttcccgagaattttgttaaattttaaatttcaccaaaattgattaatttgaatcaatgaaatttcgatttttatgcatttttccgctaaaaattaataattttttatttttttcttgtaaaataatttttttttatcacatttaaccattatagttttcatattatttaaatttaatgcatttgaagaaaatttggcctcagtttggaaatttcttttaagtctattttcgggattttagtccacttaccttacttacaaatttattatcgagtttcataatatttaaagttacttgagactctcgggttaataaccggtgttttgggggactacattcttagtacattatcatgagaaaattcacttttatcggttttcgattgtttcaaaatttcggcttttaactgcctcaaattatagtgacaaattttgtctcaggcatcaaccaggctggctacgtcctgcacagtgccatccatgcggcgcgtcatgacgtgaactgtgtgctgcacttgcacaccgcgtccgcagccgcagtttcggcaatgaaatgcggacttttgcccatcatccaag

SEQ ID NO: 79516 - DNA, 916 bp, Heterodera glycines
atgatccggtaaaagtgattaattaattcataatttttaatcaattaattaaggtaaaagaagaccattttaatctttatgatttcagctttttttggcctttcgtttcgccggtccgtcggccgatttgattgtgcccgccattgcgctttatttggtttcgttggttggcattctgttgaacggcacagttatggtggtcactgtcaaatccaggcaaatgtcatggcattttcttattttatttataatgatttaaatgataaattaaattaaactttccatttttaattaatttaatttcccatttttcagttccctccgcggctccgccaattttctgatggcattgatttgtatttgtgaattggtccaccaaaatgggaacacttttttcctggttgttgtcatttcgggcactaattttgtcagtgttctcactgctgacttaattatggcggtaaattttgaatttttgaaatttaattttaaatttttcaaaatttaagccttcaatttttgctataaattgtggcttaatggcaatgctttgttctgcggttgatcgacttttatctgttatttcacctctaaagttaggaaagtttataggtttgactcaaaattttaaacataaaaataattaagaaaaaataataaaaattgagaatttatttaataaaaaaagtattatacttcgaaaaaatatgagtgtttttttttaatttttattatttatatttatttttatgtttttagacacatggacattttattacagttcaaatatgtgtatctgttcagttatctgctaatttgcataatttatgcggcatattctttaaattatgtgctcgcaaatgcatttgaaaatgcgggaaagtatggcgcaattaaatttaaataattaattaaa

SEQ ID NO: 79517 - DNA, 510 bp, Heterodera glycines
atgcgagaaggaagtcggatggagtgtgggacaaatttggaaaaaaagctttatgagaagctcaaaagtggggaaatgcccatagctcagtcggtttgagtattttcccacgctgtaagggaaggccgtgggttcgagtcccaccgggcgattaaacttttatgttttttactcttcattttaaggagtttccaaaaaataaaataaattaaatctctaaattaattaatttttatcaattcttttcccttttgggttttacgcatataatcattttcttattgctgtttgaaagagattataatgcgaaaaaattgagaagaaatcattttatttgagagctgaaaagatgttgcttaaatttcacatcacaatgaaaaaaccatttaattaaacaatttgagcgcaatgctttcgaaagtgtcaaatctaatttggcattggcatttttagggctataattaaccaattataggcattcatcactaaattaatgtaatgtctggccaa

SEQ ID NO: 79518 - DNA, 1246 bp, Heterodera glycines
atgttggacggcggatcccaaatttctctgatctcagccaaattcttctcacaaatcatggataaggtaagccaaaaagacgtcatatcccgctttgaaaacaggattatcgccataaatggaaaggaagtgaagtgttttggagttgttgccttacctattcgacgtggaaccttagaaacgaaaatccttatgttcgtcgcacaatcagcttttggatacgatttgcttttcggcacgaatgccttgaaacaattaggctttaaaatgatcgatgaagttagcaacaacatcgtagacttctcacccgcttcaatgctcgagaattctccaatgatcgttttcaaaacatttgttgttgatggccaaaacttggacaagacaccgagaaattttggagggaagagaaagaacacgtcggaatctaaaaacggcactgggaccaagaaaggtaataagggacggcgacaacaaaagcagccagagacggagaagtcatcagttcgaaatgccggagaaagaaggcccttattcaccaaaacatttgtgccccaactgaaacccaaggaaattccaatcaaaaattctgaaaattttggagaaattgaggcgaacaaacagcgagtgagttcggttcaaatgaaagtggcggttccaaacgacaaggcaaagtgcgtatggagaaggaaaaatttgggccagtttcagttagggacaactgaaaatttgggtagggggaaggtgagcccaaaaatggcttcgtcggcaaatgggaggttggatctatgcgatcgccgccctgactcttggtcccaatcgtccttccatcgaggcgatactgacgtcaaatttggccaaagaattttttgtcgcggaggaaagcgccgaaaagaacccgaccgtggaatgttcaaagacggatgctggcacaggcttaactcgcccaccacctatcggatgccgaatgagcataaaaggcaggggacgcctttttcttggagggtcgggatgtgttaatatttgatttttggcgtttaaatttattttaattatattgtcccttcataattttgtctctttgtctgtgattgtactctctcgcctatcgatatttgccactcccttcccagcagaatatgttcccccatcttgccttcagttcattctgttggcagtgcactttcatatttgtattttgttcttattttcctccgactcttctcccattttattgttgcggttttaa

SEQ ID NO: 79519 - DNA, 1293 bp, Heterodera glycines
atgcaaactgatcgatcgccgtctgaagtcgacgagaacgaaattaggcggcgtcttcttcaagtaatgatgagacaaaatggaaatgcagaattgacgagacacggcgaacaggacattggccgcagagaaaacggaaggccaatctctgatgagacccaacgaccaccaattccgcgaatagcacagccatacgccgactcattgcaaatgccaaatgaattccgagagaatgaccgatctcttcaccctgggcttgtatttgatggcatgatggcgcaggcgattcgaagcctggacggattttcatataccatgactctcaacacaattccgactttggatggcagcaaaggctctgattcagtgaacgcctttttcaagcaatttgatattgcgactgaagaatggcctgaggcaaagcgattgcgggcactgcgttcgaaatgttatggcaaagctgagagagctttcaattccgccgttgctgaaaatcgccatgattatcagctgatcagaagagcgatcatccgacaattggacgacacggacgccaaacaattgacggcgtttgaccaactgatgaaaggagtttggcttcggccgaatgaaggcattgatcagcttggcgaacgtgtttcgcgcttggtccgttgtgcatatccggggctcagcgaacagctctacgacgaatattcggccatgcatttcattagggcactccctaactcagaattggcaatgactttggagatgactcgtaaaccgggtgcaacattcgatgagttcatcgcacaagcagcacgagccgaggcagttcaaaatgccgcacgaaattcttggcgacgcagccaaaataacggtttttcttcgacttattggccaagacatggaacatcccaaaatcaacgaatgcacgtcacctgctacaattgcggccgagtcggacacatttctcggaattgtgcgtcggaaccaatgcaaaggatgtaccatcaaaatgatgaaccgccgaaaagggaaaatttatttattggtgccgtaaatttagaacaccggtctgaaatagaacaattcttcggaaaaacaacgaatttgtcggaaaagggtcgatttttggaagaaagcccggcggttggtaaaattttggcgaccaaagtttcggtgtttggacgtaagttggatgccatgctggacggtggatcccaaatttcactgatttcggccaaatttttctctcaaatcatggataaagttagcaaaaaggatgtgatctcccgctacgaaagttaa

SEQ ID NO: 79520 - DNA, 947 bp, Heterodera glycines
atgctcgatgtagtgaacaacaacatcgtacacttcacaccagcttcaaagcccgaaaattcgcctttaatcgttttcaaaacatttgtgtcccatgacaagatcagatacgatagaaaagatgtgatcaaaagtcaaattgttgttgatggccaaaatttggacaaaacaccgcgaaactttggagggaagagaaaggacgagtcgggcccaaaaaatggcactaagacgaagaaacataataagaaacatcggcaacagaagcacacaactgtggagaaaacgacaattcaaaatgccacagagaatttaggagagcggaagaagcagcgacagcggaaggaaaacggcgaaattgcttgggcgataaagcgcgtttggagacggaaaagtttggaccaatttcagttggggacaactgaaaatttggatagggggaaggtgagcccaaaaatggcttcgtcggcaaatgggaggttggatctatgcgatcgccgccctaactcttggtcccaatcgtccttccatcgaggcgagactgacgtaaaatttggccaaagaattttttgtcgcggaggaaagcgccgaaaagaacccgaccgtggaatgttcaaagacggatgctggcacaggcttaactcgcccaccacctatcggatgccgaatgagcataaaaggcaggggacgcctttttcttggagggtcgggatgtgttaatgtttgattattggcattttatttagtaattattttgtcccttcttaatttttgtctcattgtctgtcattgtagtctctcgtctaatctatattttggcactcccttcccagcagaaaatgttccccccgtcttcccatcagttcattctgttggcagtgcgctttcatatttgtattttgttcttattttcctccgactcttcccccattttattgttgcggttttaa

SEQ ID NO: 79521 - DNA, 583 bp, Heterodera glycines
atgaccgaacgcaatttcgagcagattcgcagtcggacaaattcatcgattgtccatgaaggaaatgtccaattcgccaacgaaaacaacggaattgaaatggatgaaaatgaaattagacgccttctgcttcaagtcaagatgcgacaagatggaaatgcagaattggcgagacacggcgaacaggacattggccatagagaaaacggaaggccaatctttaatgaggttcaacaaccactaattccgcggacacagccaaatccccactcactgatacagagtggccaccaaattcaccaacgacaaaactgcagccaaaatattgccacaattaaccatcggccaaacggattcgaagacaacgagcgacccgttccaaatccagggcttatatttgacggcatgatggcacaggccattcgaagcctggatggtttttcatacacaatgacgctgaacacaattccgaatttggacggcagtagaggctctgattcggtgaacgcctttttcaagcaatttgatattgcgactgaagaatggcctgaacagaagcgagttcgggcgctgcgttccaaat

SEQ ID NO: 79522 - DNA, 205 bp, Heterodera glycines
atggccgcagttccacaagcaaatgttgaagatgatggacctgctgctgatgattttggtaaagccgtcaaaacaacaaaaaccaattataattgctttcattttagcagatgaaaacgcagcaccaccacacaacttgttaccatggaatgctggtcaagcagttttactggaagctgaaggcggcggctttataccactctga

SEQ ID NO: 79523 - DNA, 879 bp, Heterodera glycines
atgtcggacacattacagcagaacatggcggagaaaatgcaaggtgggtgggcccagcaacattgacacacccacaaacggacagagaaacaacccgttttttaccctccctcatttttttgggggcggggcggcggggaggggactgatcggactctcaaaacaatggacccctccctaatcgactggttgatcggcacataattaatgaggattatgactgatcggagttagtcaatcgcaaaacaatggacccttccgccgaccgattgatcggcgatttgtatgactgatcggagttaaaaaatctaaacaatggctcttcaattgatcggcgatttgtatgacgactgatcagagtcagtccctaaacaatggacttctcccccccccccccctcgccaaccgattgatcgcggtacaatttaatgattgattgttgttgtccgttttgtgtcttctcgtcttcgccagaccctccctccctccgacacatttgctttgtgtgtgaccatcgcgcttcaatgagaaaacgggtcccccgttgcgcctccgtatccattttcagtattttttgagccgtttagggtaattattggcttaatttgtcgccgatcccccgcccaaatccatctgaacacattgctcggctcggggcattggagggacaattaaaattgtttaattggtttttcctatttgtttttatcgtcccaattctctccttctctcgacgaattttgtccttatcaaagttcaaatttatgaataaaatttttaattgcctataatgccagacaaaaatttattggcttgagccctcattaagagctttcaattatgccaacttttttttcaaaatttttgtcagctaataaa

SEQ ID NO: 79524 - DNA, 1386 bp, Heterodera glycines
  unsure (1)..(1386): unsure at all n locations
atgtctgacaacaaagaagaactcgttcagcgggctaagttggctgagcaagctgagcgctacgatgacatggctcagtcgatgaaaaaggtgggggaaagaaaactaaggaatttctataattttttggttcgcattttgaaggtgacggaattgggtgcggagttgagtaatgaggagcgcaacctgttgtcggttgcatacaaaaatgtggtcggtgcgcgtcgttcctcgtggcgcgttatctcgtccattgaacagaagactgagggctcggagaagaagcagcagatggccaaggagtatcgggagaaggtggagcaggagttgcgagagatctgtcacgacgtgctggtgtgtcgaaaattttataagaaacttggatggtaaattcaccaaattttcaaggatttgctcgacaaatatctgatcccgaagggctggcaacccggaatcnaaaggtgttctacctgaagatgaagggtgactactaccgcntacctggctgaggttgccaccggtgacgaccgaaacgggtgcgtgtgtcgaattgctttatcgcattttaagttacaaattttttttagctgttgtcgagaagtcgcagcagtcgtaccaggaagcgtttgacattgccaaggacaaaatgcagcccacccatcccattcgtcttggtctggcgctgaacttctctgtgttctactatgaaattctgaactcaccggacaaggcgtgccaactcgccaaacaggttgggaagcatcaactttttgcatcgattggcaaaagaaaaaaatcaatgggtttaattaaaaccttaatttgttggatcggttgatttttgggtcattggttcatgttaggtacaacgtatttgttcaaattatttggaatattaataaattcccccaaaaaaagaatattttcgttacgtttttcatttttttgtcaggcgttcgatgatgcgattgctgagctggacacgctcaacgaggactcgtacaaggactccactctgatcatgcaactgttgcgtgacaacttgacgctttggacatccgacacggctggcgatgagcaggaggctggtggtgaggcgggcgaagctggtggcaactgatcgggcggacagacgttgaagaccaagaaaatgccccacgaaattttttccaccgaatcatttaatgacaattatgcttttctcaatatggcacttttgattgggtaaatttttttgaaaaatcgttcaattaaaattaaaattgtcgtttaccagtcactctgaacattaaaaattggcgtttcccagttactccgaaccatcagaaaaccgttgacgttacggtaatactgacttttactggtcccataaaaaaaggaaataaa

SEQ ID NO: 79525 - DNA, 204 bp, Heterodera glycines
atgaaaggaagaaaagagcacagagaaagaggacgtttgtgtaagcaagaagacgcacgaattcccggggagagcgtcgagattggcacacagcagaagcaagcccttcgagcagcggaagtcgtttatgctatgcttatttgcggtaacgaaggcgagaatgttcaactaggggccgtctctcatttaacaccagtgacaagt

SEQ ID NO: 79526 - DNA, 718 bp, Heterodera glycines
atgctaacccttctgttggccatttgtctttctttgggcccatttttggcctatttgtccattgcacttttctctcaccgttttttgatcgtcgatcgttctcgcaatcggccaatttgcacttcgcccggctgtgtccgatgtaatcggaatgcaaatgtgagttttttggctctattgcgctttaggcattcaatcaatgattgtttttaggccatcttggaatattcgaaaaaaagagaatttaatgtttctcattgtaattttttaaaggggtttttagtttacctaatttattttctaatttctaatttaactttatttttagtttctaatttaatttaaaagtttttccccaggaactcgcttccgccatggaccgctttcaaaaggctcgtttcgccgcccgcgcgcaattcgcacgcgttcggagtgcgctcgagcgcgcgcgttgcgcgtcggtcgacgacgcgcacgaacttttctttcgcatgaaatttgagggtgtgcaacgacccgtttggacgcgttcgcaactgccgatggcttttgtcgcaaaaatggaattatttgaacgccaacacgcggccattgcgaaggaatgcgaaagggtcggcatttggcaagccattttcaatggaaattaaaaatagacttgaaattggcgcctatcgaaaccaccagacgccctatgtttagggttttcaattattgaaca

SEQ ID NO: 79527 - DNA, 55 bp, Heterodera glycines
gtttctgctgtgtctgactgttcctctgcttctctgctcactgactgtctgttcg

SEQ ID NO: 79528 - DNA, 418 bp, Heterodera glycines
attacattgcctattagttaataattgtccatcaattaacccaccgatgccttcccccatccgccttttcactcttttctctcttttcctgtttctgcttcttctcctcccatttttgtccttcgccgctttgtccccccgagagaagcgccaattcagcttcaccgatggcttctcaagtggcacaattttgcagccgggcggcggcggacttttgagttggtggcggagatgagccaacggcggaagtgaagcaaaacaatgggaaagattttgggttgtgatttgatttatgacgaatgaatgacccaccgataaaccgacttaccagaccataattcattcattcattcattcattcattatgccgtgccaatatcccccacccatcctttttttgtaaataaaaaatttaatt

SEQ ID NO: 79529 - DNA, 1070 bp, Heterodera glycines
atgctgcagattttgtcacaatttacgctttttctgttattttttaatttaagcgagcaaaataattcggaaacaaagtgtcaaaatggtattagaaaaatttataaaattaaaaaacaaatcagaattttaagactttttccaaatggcacagaaattgcgtgcctcggcaccaccgattgcttatgaaaaaggggcaaattgtgaaacgaaaaatggactctcagcttttgaacaaatgcaatggttcgaaatgaatgtttttggcattttatgctgccaaaatgacaatggaaatggaattttggacgaagaaaaggcagagaaaatttcaaaaattaaaaagaaattttgccgagaaatggaaaatggaaaaagcattggcctaatgatgggaaatattggcgaaccctcgctaaaattggatgagattttggaaattgagccgaaaatttacgaaaagttatgtgattttgctgcaattagcaaaatcgaaggcacaaaaaaagagaatatggaaaatcatattggaaaagttattgagaagatcaaagcttttttcgaagcaattaaaggtaaataagaaatgccgaaacattcatggcactgtttttactccgatgtatccactgattctgtcagatcacttgctaagtctttttgtttttagccaatgccatcgctttttccttcgattcgtccgttggcactgcccattccatcgcttttaaagcgtacgggcgaagaaagcgccgacgcaatcctcgcctcggctgtgtgctgctttatctttgctctgtcattagcctcgtcgttggccttttggatctaatggagctttttcccgtcgccagttgggcgccgggcgccgccttcggcgtcgctgctttgtgtttccttttgatgtgctgcgtatgcgatttgcgaccgaatgaatgagtgaaagagtcgaaagcaaagaaacgcatcattatcattagggtaattagcaaaaaataataatggaataattacgatgcaaaacccaattagtggtatattctcatttcatatgcttatttgggaataaa

SEQ ID NO: 79530 - DNA, 429 bp, Heterodera glycines
atgccttcccccatccgccttttcactcttttctctcttttcctgtttctgcttcttctcctcccatttttgtccttcgccgctttgtccccccgagagaagcgccaattcagcttcaccgatggcttctcaagtggcacaattttgcagccgggcggcggcggacttttgagttggtggcggagatgagccaacggcggaagtgaagcaaaacaatgggaaagattttgggttgtgatttgatttatgacgaatgaatgacccaccgataaaccgacttaccagaccataattcattcattcattcattcattcattcattatgcccccgctccttttattgtaaataaaataaattcagaagcgatcggccttaacgtctctagcagactttgggctcaattttactaatttttaagttcgactcga

SEQ ID NO: 79531 - DNA, 548 bp, Heterodera glycines
acgaatttggaaccgaatgtgccagtcaaacgtgcaaaagaaggagaagccgttgcaaagacgcattttgcacgtggccatgtcaaggggggctgtccaccgggtcccccgggggagcctggcactcccgggcctccgggccctcccggagacccggcgccatgcccgaagcacatgaaaagcgaagcgcaaagcgtcgatggcaaacaactggctaacagaaacaaacgtggggagacggtgctgaatgctgcaaaggaggggaccgaagtgaaacgccaaattgtgcgccatgggttcgtttttgggcaaatcgccgtgggcgaaacagtgccgaaagtgcaaaattgagaccattgttttgtatttggcaacactattttcaaactcattgatgagttaattaatcggtcgggttgaggggtacctaacaaaaatattggaatttaagcattggaccgcccggccccgccggaccgccgggagaagcgggcgaagacggagagccgggcccttgcgaatgttacaaagaccaaaaaagtcaatga

SEQ ID NO: 79532 - DNA, 1648 bp, Heterodera glycines
atggctaatttgctatacattcgcatgaaagccaacgactgtccgttgatcgcttttatccgatccggtgggtgggttttccattgttgaagaagtgctgggttcagtttacaaaaatgcattttgtaaatatgttgttgggtatactgtcggacctactgtatgccggcaaaaaccatagccaggaaaaacatttcggaggggggaccatagatttttttcaaaaatgtcagcacaggagaagcaaaaaaaaaaaaacagggatttgtagtcttttcgtcaaaaaaaaagtgattaatttttgcggttttggtgtcaaaatttcagaaaataaagtaaaatcggcgttgccgataggcgccgcctggaaaaaatttttattttaaatttaatgcattttttatggaaattttgggaggggattagtccccccggcccagggtcagccaccggtcggtctctttgtttttatttttattttccccgctacatattttacaggttgtaccacctcattcatctccgagtcgttcgcccggaaggccaaccttttgggcaacattgaccgttccaattgcgagacaattcccatacctggcaaagtgcttggctggtgagtggtggccaaaaaaaacaaaagttttatgatgcactactacgttttttcaaaaattttccctaaaaatcgctggaaaattttcaaataatttttttttcttgaatttttcatatggaaaagacatttgcgcctttgtccaaagtcgggttcaaattttctttttttcaagccatgatagcctaaacagctttaagcgatagaaagtgattataaaaattaacgttgaatggcgcaaatattggggctcttatttttaagtttttcaaacaaaaaaaatttttttcgaaggcatggcttaaaaaattgggcaattaattctcttattttttgacttaatttctttgcatgttttgcagggccaacgatgttcaaattcgaattgatgagctcaatttgcaatttgtgcaccgtttgggggtgatggcggacaaacatttgccaatgtatgtttggcgtttttttaattttattaaaatcaataattaaaaaatgcccttttttattttttgtttttgaaattcattttttaagatattgcaagaagaagttcgacatgctgtaagttcagacaacaattaatgaatttaacccccaaatttttttttcattttttaattttccaagatttttttttgaaaatttaatgtttttaagacgttttagctcgtcacttcgccatgtctctctcgatgacggcattctccctgaatttccggtcgatgacagtgccatggcgtcggatggccaagcagtggccaaatggctgttcacgcctcatccagacaatgtgccgaactttctctactgcgatgtgaatttgtcgatggatcaatggtggtcaacaatggaacagttcaaagcggtgtggttttcacgcggtgtttttaattcaattttctgtgtattttttgtcccattttcaggcattttccaatgcttcttctccgattgctttccgcattttggttcactttcagccgtcttttccgattgactctattgtgccatttgatcggatcaacgaagtga

SEQ ID NO: 79533 - DNA, 183 bp, Heterodera glycines
attgatttgaagaaaggagctcaaaaaacgcatttctgcattaaaaattttcgattctgatgtcactatcggtcactagaaatcactattttggcgacttcgtcactaaaatagttaaaaatcactattttggcgttttgtcactattttttcactatttcgacattttttggaaaattcctt

SEQ ID NO: 79534 - DNA, 844 bp, Heterodera glycines
atgcaaattgatgaattaattgtgttagaaagcgatgatgaagagaaggaaaagcaaggggaagagagggagatgccggaggaagagagcgcaatgcaagggaaggtgaaggaaaaacaagcggaagagaaggagacacaaggggaaaaggagaagcagcaggaagaaaaggaaacgcaagtggaggagaagaaaatgcagttggatgaggaggaaaagcagcaggaagagaaggaaaagaagcagacagagaaggatgttgaagaaataattatgttggacagcaacgatgatgaagaaatagaaaaggaaggggaagacaaggaaaggcaagaggaagagaaggagacgcaaggagaggagaaggaaaagcgagaggaagagaaggtaacgcaaggcgaggagaaggaaaagcgagaggaagagaaggtaacgcaaggcgaggagaaggaaaagcgagcggaagagaaggagaagcaatcggaagaggaggaaaaaacggataaaatggaaaagcagcaggaagagaaggaaatgcaagttgaagaagtaattatgttggatagcaacgacgatgaagcgatgaaaaagcaaggggaggaaaaggagaagcagttgggagatgaggataagacggaggaagacaaggaaacgcaaggggatgagaagaaaaagcaattagaaaatgacgaaaagcgggacaaagagaaggaaacgcaattggaagataagcaaaagccggaggaggagaaggaaacgcaaggagaggagaaggaaaaggaaaaataattttgttttactgattcatggaattttgatttttcatctgattttttttttcaaa

SEQ ID NO: 79535 - DNA, 2033 bp, Heterodera glycines
atggaaacaactgcactgaatccacggcaatcgtatgttttttttttcaaatttgtggatttaaaattattttaaatttaatttgaattgattttaaatattttgttcattttatatatagcttaatgaatcgtacaataatcatcacgaagaaaagcgtgcgaaggccaatactattgcctgaagcattgactgtgccgccgaacaatagccaaatgatcgatcaaaatgtggagaaaaatttgtaaatttaatttttttaaattaattaaattaattatttaaggcattcaaaaaatggcaaattcatagagaattgcccagattttgttgaatttgaacgcattttgcgtgaaaatttggtggccgatgaaatttcagaacaaattttggagttggccaatcagaaggccaaacaatggaatgaattggtcgaaaaggtaatcaaatttttaggggaaaattaatttttaaaaaattaataaaaataatattttttttaatattaatttttatttttttaattaagtatgagaaagacaaattaatggaacgtcaattttttgaattaaaattgaatgtagcaaatcaaaacagtgaaaaagcaacggaactgttcaaaatatgggccgaaatggaattgttcagtttataatttaaaaaaatatattttttctccatcatttcctcgttaaattaaaaacaataataatttcaaaaattctaaccaaatataaatatttattccaaagatgaatattcataattatttttaattaattatgcgtaattatttttatattttcatttaattaattatgcataatttactttttctatttgcgcattttgttgtcaaaaattgccacccctctccctgccccactgatcagatattgatgccatactcaacgaccgttcggccgattccattcgacagcatttgcaattcccgaattcgccactgtgcgcgaatgatgaagatttgacaaattcggcaaatcacagcgaaactgagtccaaattagtgcgggaaaattacgcgcttaatggagaggttgttggcacttcattcagttcataagctaacaaataagcatggactcattagtatccaaacccattaattcgacttcaacttttttgccaaaggaatgtgttttatttattttaaaaaagcaaaagtttaaaaaagacaaatgtggccaattttaattaaatggacaaaaacgcaagtgggatcagggacaggcgaaacttcgagttcggcaacgaaaatttcggcctttttgtgtttaaaagggaagtacaaaatccggaatatagcaaagtcggggatttacgatttcaatttcgacccaaatgccccccaaaattcaaacagcacatccaatgtttagattaattcgctggaggacaactattccaatttgttcaaattgtacgagaaaatgagactgaactgcgtcgatttgaaggaggtgctcctcgattttgagtccggtgcgggatttttcgggatctcggtcctctataagtttttgggattaatcccgcgggattccatcacgaaaatttgttgaattcccatcccgtccagtgggatctgcaaatttcagatttccgggattcatatccattaaaattaagcattttattttttcaggttcaacaatcgcttaacacccaattggaacaggcggagagaaaatacggcgcattgcataaaatgtacatggaattgttggttgaagcgcagaaaaagttgaaagagtacgcgcatgaattcaattgaaaaatagggctgctgtcaattaatggatatataaaatcgcaaaaaagaatccgtgtgagcaaaaatcccgaaatacgggcattgggacacaagttcccacaaattgagggtcaaaaattttaaaaatctcataaaagcctgtaaatttattatgtgagaaaacaaccgaaaaaaggaagtacatttttttgtctatattataattttttttttaatttgaaaaaatatttcgaataaa

SEQ ID NO: 79536 - DNA, 1069 bp, Heterodera glycines
atgccgtcaacatccatggcacgctgtgacttcatgtcgacaccatcgacatcaaaaagcgccttcgcctttggtctcgatgatggtgagagaaattcaaacaaaaatttagttttttgtcatttcattttcataattttagtccatatgttcgacgagctgcggcggcgccacatttggaccgaggaggaactgcaacgacagcgccggtcaaacgccttcctccggaaacagctcaaggcccagcgcgaccggtcgacgagcctcgagcgttcgtcttcagcatgccgccagcggagagtcctttccgacgtgaccaccaacccgcaggaggacaaaaggctgagcgcggcgaatgatttgctcatcacattggatgcaggcatttcgttcaaagcccgtgaagcgtgaaagcggtcattcaccgaccacggacttgacgtttgagcaccgacgagagcggtgaagcgtctgaaggcggagctgttcgaggttttttgatcaggtggcgacatctacaaaatcctcgaccacgaaaacttcgcttcattcaccgtcccaattccacccggaccattgaaattcttgctaatcgatgctatgaatgatctgcgcaacattttcgtttgtctcgtgccaaaattcttcagcccagtgacctcaaattgacgccgctcgttacccagtccgcccaaagcttcattctcgctgctcacgtcgttccatttgcacgcactcatctctggtggggactgatcagtgaacagggaatggagcatatgcacagaatgtgcaacaatttggtttaatgaataatttttcccattaaaattataaatccaggtcggtcgttatgctcatctcggcactccagagaaggttgttgagaagttggtgaaacacgtgacactgctgaatgcccttcacgatcgaggtgtcgaaaaaaatcaagaaaatggaaacaaatacccaaacttttgatcaaaatttcatttttccaaacattttcaccatttcacatttccactatctgaatattatgttgaacacatcttttccgctttctata

SEQ ID NO: 79537 - DNA, 1066 bp, Heterodera glycines
atgacgaagccacaacaattcactgttgttgtcccttttttgctgctttgcgcgtttttttccataatttgtgaagcggtgaaggacaatgacaagaaccaaaacaatcaaacggcatcacaatcgacaaattcggcaccaccaacagtaatttaccagaatgagccaccagttatccatgttgagcaacaagaattcagtaaaattgttcaagaaacaacaggaaatgcagcagcaagcacaaacaacaaaaagggaggaaaagctgacggtccattatcattatcatcttcagtttttaagcggccggcaccaaagaaattggccgtgttcaagccgcacgaaaccagcagcaggcccatcatcaacttttcaacttcgtcatcatcgactcatttccaaaggggtgaaacaaaatttcaaatgcttgatggtgtggaaaaacggctattgctgccacccaaatggctggataaaatgaatgataaagtactaactgatcatgtgatcgatcagtgaggttttgacaggcgaaagaagtgaagatttttgtctctgagaatgccttttttattggatgagagaatggtgaacaaacagatattttttgggggatctgatgatgattaaaatgatttattttgttgaaactagtcttaatttatctaaccaacttttaaattccgaattttttttgtttattatccattttttggcattttcataaattgtttttttatttgagtggatgttggccaaaaatgtatttttaaaaacaaaaaaaaaaattgaatttcgaaaagaacaaaaatatggacaaaatcttcaaaaatattgtaataaccatagttcttaagtgtgtttgctcgaggctatctgtgtataaaatggagaaatgtcttactttggtcgaatttttttaattttcagacgacggcatccgccctttccgccgggaaaatgtatgtttttatgaaagagaactgttcaaaattatttttttagagaaatagcgaacatcagcagtagttaagcattgttgttttaaaccctcataagcaataaa

SEQ ID NO: 79538 - DNA, 1282 bp, Heterodera glycines
atgtccactggtgtagcggtagtgcgccagtcagcgttttttaacccccaggttggcttcctctacatgcaaattctttttttgctttttatgccaagtaaattatcaaaaattgtttataaaacaaaacttttttttattttttcattcattttatacataaaatactcaataaaaatatttttattcaaatcgacatgatatttaaagcatcattgtacctttatgtttaatgtaatttttaattttaataaaattaaaataaagattttgcttcataaaaaatatttttaatatttaactttgcataaaaagcaaaaataaaaattgtaaaatgtattagcatgcaaaggattcgaacctacgacccacaaaaacttgactaacgcactacctctaaactaatggctactgttgtaaacaacgaaataattactctttttcattaatagtaaaaaactataaacttttggtacatcataaaaaacgaaaccaaaatttaaaattttaaatacgaataacgaaacgaaaattgaaatatttaaatataactttttgacggacgaaaacgaaacatgaaacttaaaaagtgacgaaaaaggggggcgatacgaaacgacaagaaatttcgcacatcactggtcccgattatgccgcgagtcgactccaaagtgggcctccagcatggccaattacgactttgaaatagggtacagcaacggctgacgttctctcgcgcctcattgccaattagccccaccgggggaggaaatttttattatgaacatttgcaccgaaaccgagtgctatatcagcacaattctgcaaaccaagaccatccagcttctagtcactgcagaagaaatcgcagaagctacacaaaaatatgaaattttagcgaaaaccttggcattcggtcgatcgaattagccaaagaacgcagcgattcgggcaccgtgccgtatttaccgaaaagggaatatattgtgggaaggcactcacccgccaacacgtacattggcctggcatcaattcacaaattgaaaggattgtcagtcagggtgaagaaaatcaaatgcctcaaaaagcaccgattcattttggtggactcatactccaaatggccggacgtctaacaaatgaactcaatgacagctgaagcaatcgtctaaaaacactctgtcaatcatctatcgactcgtcattccgaagaaatcttttcggataacgggaaaccaattttcattcgtcagaatttacggcattctgtacggagttcgga

SEQ ID NO: 79539 - DNA, 1601 bp, Heterodera glycines
acgaattgctgccgaagaacagcgaaacaccacaacacgcggattggccaccacacattcgtcgacacagatgcgttcctccactggcgcaactgatcagcaggtgaagcggaaaaaacggaattttaaactcggctaaataaaatgccaatccaaaatggcatttcagctttttctctctcgcgccccctccacggccgattcgagcagttcgtccggcgatccgatcaaacggtaccaccaccagcaacaacaacaacagcagaaggacgactcatcgacaacgccggccacggctgagcatcggtcattggccgttttcgtcgccattcaagactacgtgccggagccaggacaagcgccgggggaggcgctgttgctggagcaaggccaaattgtggaagtgttggacaacaaaaacccggcaaattggctggtcaggaccaaggtgggcactggactacttttgtttggcatattcgccagtttttttcaaaattggtcagaatttaggccaaacccccgctgacgggttgggtgccggggtcgtacttcgagacaccgtcaaaatactacacacagcggaagagcacgcgtgaattgacagcggatgagcaaactttgagtgaacagcaacagacacttctgaagagagagtgaggagggggggggggcaattaattaatggccgctaattattgcctaatttatctttttcattggcagacaagttttccatgatttgcttcgcaccgaagagcaattcactgcccaattgcgcgactgttccaaacactttttggatgctttcgaagcgcccgaggcaccggacgaaattcgcacacatcgaattgccttgaacatgcgcgagctatgcaattttcattcaaagtaatataattagaaatcactcataaaaaattgtattaacccttcctaccgtattctcttttctttcttgtatcgtacccaatgttttttgtcatcgcttttactccgtttgccaattagtgccattttaccacctcccgtattatttttccttcatttcctctcaaatgtttacagtgcgatgctgaatggattacagtattattcggatgactcgggaaaggtcggacagacatttttgcgcttggagcgcgattttgagcaacacgtggcatttctgcgcgagttggacaatgcgcaacgaatcgtcgcagaaaatggcgccgtacaaaaattcctcgaggtaatcatttttataattattcaattagggaaaaatgaatattaaattaaaaattattattctttaaatttacaattaaaaggagtgcaaaggcaacgcgggctccgacgtgaaagagtacagctattatttggaattagtgccgaatcgaatcagacaatacgaagattacttcaaggcaatgcaaaaattcgaatttcgttttcaaattcaaaaattattttttttaaattttatttttgcaggaaatcatcaaatattcgttgcgtgttcagcaacaacagaacgccaaagtgatgcagaaggcattggagctgatccaatcagtgccgaaacgggcgcaggagatggaattcacgaagaatct

SEQ ID NO: 79540 - DNA, 1988 bp, Heterodera glycines
atggtcggggcgtccaatttgggaagcagcggcacacagaacaaaggcggtgggttgggaaaagctaattgtgattagaaatgtgatcatgtgatctggggcatgagcctggtcccaagactcgagacaattgagtccaagagatttggccgcaacattttgatgtcgagagtttaccaaaatccaaatttcgctgcaaatttgctagtccctctaaaagcggactaagccactgatttgatgcactccaattaatttaagcaattaacacctttggaaatctgcaaatgaacggcaccgggccgagcaacggcggcttcttgtccaactcaagctttggccccgacggatcgtcaggcgccggtgtggcggtgtcgggcacgcagatgggcagcaacaaattcatcagcgtcagcgacggcataaattcgaatgatcggcagggatcatccggtatgtgttacgtatttaccgtaccatacttaatctcacagcgtccaatggttacggaaaattggagggcatcggcaatttggcggccaacggctcttcgtttgtgctgagcggataccaaacggacagaggcgcggcacaaattgtggagacggtgggcaaatcgattgccacgaacaacacggcagcagagttacgcattaaaaaccaaggcaccgaagtgatcaatggaacgatgggcacaaacagtgagtgatcagaaaaagtaaggacattggaaggacagtgccaaaaagcgattcggaaactaagggcatggaaagtaaaatgacgaaatatgatcagaaaaactaaaaaggaccaagaaaaaattccaaaatgaagaaaacaaagaaagtgccaaaggtaaggatattaaaaggaactgccgaattattgtttgttagccatcttcctattaaaagtttaagtaatgaattattcaaagtatttctgatcactaattaatcgattgtttctttttgtatttttcgtttgatcattttgccactcttttcttctccttaagcgaccagcaattcgtttggcaaatttctcggccaaagtggttccgtgcaaggcaattcaatgctcaattcgagccgtcccggcggacagaatgccaacgcgaacactgttgcccaagggggtggggcaggtaaaaacaaataccaaacggacgggggcaaacatcaaagaattttcattgaatttcattttatttctaattgtaaggcccatccagcgcaatgacggacacgggactgcttctgaacggcccaagaacagcgtaaaagtactgtagcagtatgaaaatacaggaaaaagggaaataatcaagaaaaatattgtagtcatcagagacaaaagtttgtcaattagtaattagtcgtaattttgcatcattcattatcagacatatgtaaggtcatgaatctggatttcagtactgagtcgggattttcgcattgactaaaaaatgctcaaggaaaaaatttgaaaaataattcaaaaatatgcaaaaaaaaaaaaaaaaatttcccctcctcaccttacaatttatttttaaggaaaacgccagcgggcaacaaacagatgccaaaatcccgattttgccaactgagttccaagcaggatttttcgggaatttcagaaccagaattttcgttataacattgtttgaaattatcggatttggcccatatatggcaagccctagcttatggaaaatggaaaccattccaaggggtccaatttcaagtcacgcttctttggcattaaattgttatcccatgaaaatcctgacagcatgttgcttttttcattctaatttgttcagcaacgaacatccgtggcaatgtgaacgccaccggtgatcagacgtatgtgcaaagtgtgtcaagtgtgtccgatcagaacagacaacaggcgctgttcaactctcagaatggtcagacagccgacaaaattaaataataaaaaaatgcaaattttaa

SEQ ID NO: 79541 - DNA, 1901 bp, Heterodera glycines
atgaacaaacggaccaaaatgaagacaaaaattgcactgatcatttttggcactaccatttgctggctttcggtcagggtcgttttcgtaccgccgttttcgtacgggggacattttcgtacgagttcttgtacaagcgtcagattcaaatagaaaaacttaagaactaataaaaccaaaatttatcattttttgtttcccattcataaaattttgtagaaaattcataactttataataataacaaaatccgggacaaactaggtcgcatctcataatttcggaaaataccagcgagaaaattgttaaggttttcgggattgacattggcattggcataattgtgatcattttgagggacaatattgttattgatatcgttatagcgttggacgagacgaagaatccgtgcgtcggcatcgcgatacttctttttctatgcaccatcatgcaccaatttatggtgctaggtcgtttcttaaaaaccgccacattgggcgtttcttaaaaccgccagggcgtttcttaaaaccgccacattgggcgtttcttaaaaccgccagggcgtttcttaaaaccgccacattgggcgtttcttaaaaccgccacattgggcgtttcttaaaaccgccaactcatatgattatgtatgtatatccgttaaattaaatatacaataatatctattaatttttatttgttgtgcaagtaagtgtcagccggaaatattattagtctagcagtgacagactaaaaatctttattaaattaattcacaattatttacttaatttttatttggttgtaccaataggtgtcagcaggaaatatgaggctggcagttttattacaatttaaatggtataaatagctaaatttctttaacatacatttattataaaaaatattattgccttaattcctttaataaattaatccaatgttattagcatttatattcttttcattcataaatattattaattgtattagctttgatgaatttgtttcaaacaatggcgcaaataactaaaaattaaggcgcagccactatagaatatccagctcagtttaatttcgtttcttctgaatatggaccaggagaagtagaaacaataataggtgatggaaattgtggttggcgtagtatatctctagctctaactggatctgaatggaatcacacagaaattcgaagagatgtgattgagtatttggaagaatcaattaaccaacacacgcatttaaatcataatgaaaatgaatggtggtgtaagtgttaattttttggggtgttgcttaattattaattttaagtgctatttaatagcattgaaaatattagaaaacacatcgagatatcagtttcaccagcagcaggagctcacgaaactgagaaatggatgaacaatttagacttagcatcaaccagcaaattgtttcaattaaatataatagtttgcgaacgtatacaggaaagaattttccgttggcaagtgtatacaccagatttagaaacatcggttagactcttttgattatacaaattcatattaaaaatttagcttacgaatctgagtcaaaaagaaacaacagcatcagtatttttgtattataatgatggacattttgaactgattaaacagccaacaaagataaattaattattttgttttatttctgtgataatctttataaaaattcattcccttttgaaagttgcaaagaaattctgtgggacttattgtggcacctctctattagactcttgtctaatagctcctgtaatctggttttgcaactttcaaaaaagtaacaaattacgaattagcaattttatattcgaaaattttgcagttgataattgttgctataaccacgatgtgtgctacataaataaa

SEQ ID NO: 79542 - DNA, 736 bp, Heterodera glycines
atgtacgatgtccatgtgaagcgcattcacgagtacaagcgacagctgttgaacgcactgcacgtgataacgctgtacaaccgaatcaaggcggacccggcgaagaaagtggtgccgcggacagtgatgttcggaggaaaggtgccaatgggtgctggtggtgatccactaatctgatcagtgatcactcgctatttcaggctgcccccggctatcacatggccaaacagatcatcaagctgatcacttccgttgcctccgttgtgaacaatgacccaattgtgggcgacaaattgaaagtgtgtcgtccttttctgttgattatacttttttccaggtgttttcatttattatttacccccttctgttctcaggtcgtttatttggagaattaccgcgtttcaatggccgaaaaaatcattccggcggcggatttgtcagaacagatttccaccgcgggcacagaggcatcgggaaccgggaacatgaagtaaatatatttccttggagtttttgatgccatttcacacaatgccgcacattgcaactccagattcatgctcaatggctcattgacaattggcactttggacggagcaaatgtggaaatggcggaggaaatgggtgccgaaaatatggtgagggaagacggaaatcgccatatcttggaaataattccttttcagttcatttttggcatgcgagttgaggacgtacaagcacttcagaagaaagg

SEQ ID NO: 79543 - DNA, 488 bp, Heterodera glycines
atggaagccgaccaaattgggaaaagcatcggaagtgatcagtcgaacatccaactgataagacagaacgaaaaactgacacgtgaaaatgtgcagttgaagcagagaaatcaggtgggacaatttaggagattctaggagaattatttcattttaggggggggggattgaacggaataatttatttttcaaaaatcaggaacaacagcaacaaatccaagcactgatcggcgccaatcgggagctaatttgggcgttcaacgaaagtcgaagggaacacgacgaactgatgcagcaattacgggtcatggccaaattggtgaacaacggaagttcaacgcgtcccgcgggggtcgaaaacaccggcgaaacattgcaattcgaacagcaaaaaacgaagagtgttcgcccgaaacaaatcgccaaaaagaatgccaccactgcttctgctgctaacagtggcggaggagggggaggacgacagagaa

SEQ ID NO: 79544 - DNA, 1284 bp, Heterodera glycines
gattggcgttccgtcatcagcagcgttttgcgtaagcaatatgtgctccaactgttcgaggcgctttgccccgaattcaccggctcaaatgtggtggatttggcagtgaaaaatccaagccgtgccgacttcatccaaaagtcgctgaacttcgtcttcgatgccgaaaatgaacttttcggctcttccacttctcgcgactcttattttatggcaatcgctgagaaaatcttcacattgcgcgaggcgaaagaccgtcaaaatttggagaaaagttgccaaaatgggacgactgaacgaattggcgacgcggttcggaggaggacactggcggatgtgctgaagccgaaacacaccaaatcgagggacgaagacattttggacggggacgaaatttgaaggaggacagagtgatcatttgcttttggtattttgagaaaaattgcttaatttgtttgtccgataaaaatggacattgaaatggtatttgatgacaacacaacgatctcttaatttattgtaatggacattttaaccgagaaaataatttctttttcgccataaaatgtgtgtggaaaaagtaaatttgagaaggaatgaaaacagaaaatgtttgttttccgccggtggttcctttccttccgccattttccaccggtttccatccatccgtccgtttctcctcactttccgaaccgcgcaattgcggaccgatccaacggcgccctcttgccgaatctgtcgaatttggggtttcaaatcaacaaaaattggatgccattgctcaccgtgccaacgcggaacggtcgagcggtgcgcgcttaccaaatctgtgggggatacggtggggaattgactgcgttgcgttgccttcctactgtacctggccattgcggaacggtcgagcggcgcgcgttttgcaagactgaaatggggaggacattaattggagaacaattaatgagggtggaggggactgacctttcgaagggatagtcgcccaccctaccgtaatcctccaaaaggccttccatttggggccttaaaaagcgaattttcaaatgggcaaatggcactttcttttcttttttttacccttcggctaacattccgccgccgtattgaaactgcgcattcgttttgctgttcaaaatgacgaaacccaacaaaagggaggcgaggagaatgttggcgacggggaattgggccatttgagaagggaaaggacgaattggagaagaatgaacgaatgggaggaggaggtatctaaaagaagcatttgca

SEQ ID NO: 79545 - DNA, 525 bp, Heterodera glycines
atggcccaattccccgtcgccaacattctcctcgcctcccttttgttgggtttcgtcattttgaacagcaaaacgaatgcgcagtttcaatacggcggcggaatgttagccgaagggtaaaaaaaagaaaagaaagtgccatttgcccatttgaaaattcgctttttaaggccccaaatggaaggccttttggaggattacggtagggtgggcgactatcccttcgaaaggtcagtcccctccaccctcattaattgttctccaattaatgtcctccccatttcagtcttgcaaaacgcgcgccgctcgaccgttccgcaatggccaggtacagtaggaaggcaacgcaacgcagtcaattccccaccgtatcccccacagatttggtaagcgcgcaccgctcgaccgttccgcgttggcacggtgagcaatggcatccaatttttgttgatttgaaaccccaaattcgacagattcggcaagagggcgccgttggatcggtccgcaattgcgcggttcggaaag

SEQ ID NO: 79546 - DNA, 1632 bp, Heterodera glycines
atggcccttctgacgcccgtcaaacgaccaccaccagcagcgggacagtggcagcaacagcagcaagcgcaaccgtcgcctcaagtgctcacacgtggacaaatcgccgcaacacagacagacgacgcaactgtggcagcagcaacagcactggtggttgcgcaacatcagcaacaggaagagcaaccgccgcaagcgactactaccaattcgtcaacgcaaccgccgcaaatgaccaactcgacaacgcaaccgccaaaagtggatgagccgagcatggcgcaacaacagcagcagcaaccgccgcaagcgaccaccatttcgacaacgcaaccgccaaaagtggatgagccgagcatggcgcaacaacagcagcagcaaccgccgcaagcgaccaccatttcgacaacgcaaccgccaaaagtggagccgagcaacgaacggtagagtgattgatgcccgttaattttgatgatgatgccgtccaccgcttttagcagcattttgtaaatgccattttcagacattccggaaagttctttttgacagcttataaccgtgaaaaccgcaaagtttcaaatcgtttttgaattgacggcatttttctggaaaactgaaaatgcggcaaattttcgcatcattttttaatgaatttcagtgaatcgaaaaattacggcaaattttcacatcatttttcattgatttcagtaatctttgcaaaattttcacaccattttcagtgatccgaatgtggtgaacgaccagcaacaacagcagaaacacattttaccgcttcctccacaacagaacgaacaaaacgaagtcaaatcgacgactggtctgacacctgctgaagctgttcggcgttcgcagatctctgcattggtggaaccgaaacaaccacaacaacagcaacaagaaatcaacaacggcgccggcgacgaacatggcggagtgcttcgcaggcaaaaaaaaaaaaaaattcagtaccaatttgtgactcaccattttccccttttcaggtcaatttcggtgctcagtgataattggtacgattgggttgaaggcaatcagacggacaaagctgggtaaactccatgttttaagcaattttgatcgattctttccccacgcacagtttaagcaatcaacaacaaaatgtcatcgtccatcagtcagtcaacagcaccatcaacgcggatgagcatggcatatctgatgaagccagcccggtcgcctcactgtccacaatcgaccttggccgtgtgtacaccactgttggcactgtgatggaatcgctgctggttaactttgcgcacctgtggcaatatcgggtgagcaaccagagcggcaaatataccaattaacacggggacggacgatgaattaatttgtctcccccgcttccgtttttcagcttttccgttttgccttcgtccttctgtccatctacttctgtctgggcttcttggaacagtgtgctgtcgcgatgaccgccgcatgcgtccgctgggcttggccaccggtgcacttcatgctcggttcgtcacggggaacgctgttctatttgactgactggttcgcgtggatggacgacttcttgtcaagttgggtgtgcgacatggccaacag

SEQ ID NO: 79547 - DNA, 440 bp, Heterodera glycines
atgtctgtacattattttagagttgtttgcagtcagttttattcggttggtcaaatgttagaggcgattaagccttttggcccttaatttctacggaaaacttagaaaattcaacataactctccccaaaagacatatttctgtatgcaaaataaacagaaatgtgaaaaaagattagttctttcttatttaacttgttttatcagtttctttttgttagttgttgagatttttcttagttttccaaagtgtctctattttaaattaacacgccaattttggaaaaaaatcgtaaaacttttttcccgcaccatttcggtttctcactttcagaatcttaatattttcagaattgctacgtacagttaaaaattcagctcgatcggttcatgggaagtggtcaaactcccaaaaaacagggtgtctttattttaaattaa

SEQ ID NO: 79548 - DNA, 1055 bp, Heterodera glycines
tatttgacacattattccaattcttataatggacgacgacactccaaaccggaaagcgccgaccatcaagaacaaccgcaggacaaccgtgaagcgcaaatcgtcgacgacgcgaagtgtgcggacaaaccggaaagcgccgaccaccaagaacaaccgcaggacaaccgtgaagcgcaaatcgtcgacgacgcgaagtgtgcggacaaaccggaaagcgccgaccaccaagaacaaccgcagggccaccgtgaagcgaaaatcggcgacgacgcgaagtgtgcggacaaaccggaaagcgccgaccaccaagaacaaccgcagggccaccgtgaagcgcaaatcggcgacgacgcgaagtgtgcggacaaaccggaaagcgccgaccaccaagaacaaccgcaggacaaccgtgaagcgcaaatcgtcgacgacgcgaagtgtgcggacaaaccggaaagcgccgaccaccaagaacaaccgcagggccaccgtgaagcgaaaatcgtcgacgacgcgaagtgtgcggacaaaccggaaagcagacagacgatcaattggtgattcgacagcggtcaattcatcgcgttcgggtcagttctcaaagatccaacttccaaaaataacccagtaaatttaaggaattgaggactcgcttggtgcttctacgaccggcaattcatcgcgttcgggtcagttctcaaagatcccacttccaaaaataacccagtaaatttaaggaagtgaggactcaattggtgcttctacgaccggcaattcatcgcgtttgggtcagttctcaaagatcccacttctaaaaataactcagtaaatttaaggaagtgaggactcgagtggtgcttctacgaccggcaattcatctgccgaatccaatgagtgcaacgactccgaccccagctacgccccgccttctactgaatcggaaagtacggacgacgatgccccaaaattgtgctgccgtgctgaagcaaggaccttgccgaaacgtgaccgctaatgtttcctgtgatcaccctttgtggctgttgtatgta

SEQ ID NO: 79549 - DNA, 425 bp, Heterodera glycines
  unsure (1)..(425): unsure at all n locations
ttttttcgcgttgccttcgtctttctttccatctacttctgctngggcttcttggaacggtgtgctgtagcgatgaccgccgcatgcgtccgctgggcttggccaccggtgcacttcatgctcggctcgtcacggggaacgctgttctatttgactgactggttcgcgtggatggacgacttcttgtcaagttgggtatgcgacatggccaacaggtacagtacagtgtgatggccatacagtcggatgatacagtatcacccctaattttggtccccattttcagatactgtcaccaatacgatgtgatgtgcgattgtcagtgctcctttgtcagccgaacgcagcgggcagctttgctcggtggccgtcgcttctgatggatgtaaagaatttgatagcgatttgtacatatatgtatgtat

SEQ ID NO: 79550 - DNA, 457 bp, Heterodera glycines
tgctaaaaaaataaaatagtgaagctttaaaaattaataaaaaattttaaattcagaattactggagttagcatcatagcagtgcttttccttgtctttttgatgccctcgcaaaatctggttcgcttctgatcagtttataaaaaaaaagttaagcctaaaatttttcgcatatttaaaaagcaattaaaaatttttagattttttattcatctccctttttgatagtgaaagcatctgagtgcctaaaataacttgtaaataaaatttggtgcgtttcagagcagtttgtgaaaaaatatttatgaattaattttgctaaaaaaataaaatagtgaagctttaaaaattaataaaaaattttaaattcagaattactggagttagcatcatagcagtgcttttccttgtctttttgatgccctcgcaaaatctggttcgcttctgatcagtttat

SEQ ID NO: 79551 - DNA, 663 bp, Heterodera glycines
gacatagaaaaactgagagacagtctgaatctgagcgaccaagtgttggtctgtgacaaagacgaggaagtggaggagggcgagcacgaggaggacggcgaagaagcggcgatggacaaagacaacgcgaatgaggacgaagaagaagacggagaggaggatggggaagacgaagaagaaaaggaagaagaagacgtggagaaggaggaggaggaagaagaggaggaaacggaacagcaggtggacagacattgggggaaggggagaagaaacatagggaaaaggaagaagagggcgggaagggaagagaaaactatcactgataaatgctcaaatattcagtcgaccgccaacgacgaagaagaagcagaggaaatgataggcgagggggaagaagacgaagaggaggaacgggagggcgatgaagaggaggaagagacagaacaggcggcagagaagaaggaggccagaaaatacccggaagaggaggaggacgaagatgaattctatttttaatcatttttcatatcctttttgcttctcattttccaattcttttttattatttggacctaaactaatattgtcgctccgttaattgtaagtttttctaagcaattatgcatgttttctaattgttttcgatgaaaatgatttaataaa

SEQ ID NO: 79552 - DNA, 2505 bp, Heterodera glycines
atgatgaaagcgaaggagctaaaagggagacttgagaaatatcaagtaactctccaaagtttcgaattagaaattatttatcggcctggaaaaaagaataaagtggcagattttttgtctcgatataatataccgggaaatgaaaaggatcctgaaccaaaacaggaagaaaattcagatgagtttgaccttcagccaaaaattttaagtgcaaaaaatattaatgaaaatttaattgccgaaaatgatggaattttgaatgaaaatccgaaaataaccttaaaaacagtaattgaggcacaaacaaaggtaaaggaattggccaaaattttctatattttaaaaaccgggaagtgtccaaatgatgttctgaaatggaaaagagttgtttctgattattgcctaataaatggggccatttactttataaaaggtaaagaaaatatggaaagacctaaattaataatccctcattcattacgacaaaaacttttcattattttctattcagaaggccattttggagtcgaaaagacttggcacgaaattaaagagcgattttattgggtcggaatgaaagaagacgtaaaaatgctaatcgaggcatgtgaaaagtgccaaatgaggaaaattcagccagggcaggccaaatcggctccgagtgtccctatcgaaccatcaaatggcccatttcaaagaattcattgcgacttaatgggtcctttaaagagaaccgaaagagggaatttgtatattttcttggccattgatagtttttcaaaatgggtcatggccaaagcaatcccggatcagaaagctaatactgtatcagaaaattttgttgaaatggtggtccatcaacattcaactcctgagattgttgtgactgatcagggaagacagttcacttctggaatttttaatgacttggccaaaatatacggttttgagcatgtcactacaacaccatatcatcagcagtctaatggaatggctgaaggggctatgcgaatcatggctaatattatttctcaaatggtcaatgaaaaagggaataattgggatgaaattctgccgcacgctattttttcatacaatgtttcaatacattcagctaccaaattttcgccattttttatcattaatttacgacagccaaaattgccaactgatcggttacttaaactcccatcccccgatgagcttgtgtccgatatttcggtctatacaagaattcagactgaaaaagcagctaaagcgtgggaaattgtgcgaagtgaaattctaaaagcgcaggaaaggaacaaaaaagagaatgatcgcataaggaaagcgaatgaaagagaatttgaaatcggtgatttgtgttgtttaaaaaagaagttttgggccataaatttgatcagcgttggctgggaccaatgcgttgtgtgggggttgaaaaagaaaagaaaaatgttgttttacagtcaattgatggaagagctaaattaagaaaagtacatcaagaaaaagtgaaacattttaatggaccagcaattcttcctctaaggcagtcagacaaaccattaaattgggaaaagtacgtagatgatccgaatttagaacaggaagaaattgaaggtgaaagttgcgaaagtgactgtgaggaaacgcaagacaatgaaaatacgcagtcaaaaaacaaaatgggattaaaagtttcaaaatatggctttgagagttctgacgatgagaatgattggaatattgttgcgtttgtaagagaaaaccaaaattctgaggatgatgaaggcccggaagttataatggacagaaaccccgaaatcgaaataatgccaattttcacaatactcgaagtccttattgagggttcatttactgaagtatacaccggatggagagaccccgtaacaatctcattaatctcaagcatacctgaaaacctagtaagggaaaattgggaaatttatgttaatggaaatggctcaagatttgttatggcatggatttttggcgaaagttttgaaattttcattgtcaacgaatttgatcaaattatgttgggaattgatgcgcaaatgttgttgggtgaaagatggcgaataaaaactgaaaatgaaattgagacatattgggaaatctacttcgatgaaaatgggcacgaatttgaaattcccagaattcctgaaatccttttttcagaaaaggaaaatttggaaattgggtatgggtcaaactttgcaactctccgaaattcagaagaaatgttaagtgaacagaatgatttagaggaaggaaatgatttttcaagaacagacattaatgtgataaattatgtaaaaccgtttaaaagtttattggatttttcaaacgaaattgatgaagatgaaggaaatgaagaattagtggaaaatgccggagaaagggagagaaatatgaataattctctagaaattttagggagaatggaaaacgaacagttgaatgaaaaagggcggctaa

SEQ ID NO: 79553 - DNA, 1601 bp, Heterodera glycines
atgattaattatataaagttcattaattaccagttgcagaacgtcatatctaatgatgttcatgaattcctcaacttcttttcgatggtaattttaccagtgataattgactggagaagacagctaaaattgtttttacatattccctatataagaaatttatacccatgatccaagcataaaaactaatttaagactttctagcgagttttacaggtcgatcgtggggtctatcgacgtagttttttaagggctataagggaaaaatagtgcggtttcgatcggtttagaactgttcgaactgcattcgaaaaacaagtcaaaaaatcacactttattgaatgtcccatttttgaacgctttttgcatgccttaaaagtggtcaaatcaaaaaacaaatatgtttgtgcacatctacaaactcttggctttcgaatgataccagggttgttttggtccgggtccgggaagtgccctaaaaaaggagctcaagcacttttggtcgggatttcttccaaaaaagaaggaaaaggaaaagggaattaaatggcaatggggcaagtgactcggtggtcaagtggttagtgtgcctgacttttgtgctgcgatggctgagggttcgactcccattaattctgtgttttttatatattacatttttttgtttacctattctatttttaatttgtttaatctatttttatgttttttaattaattaattttttaaaataaaatatattttttacatatctaactattttataaaaaaataaaatatgcacttttggtcgggttttttccaaaaaagaatgaaagggaaaagggaattaaatgagcaggaggcaagcgacccggtagtcaggtggttaaaaaattgattgttttttattttctcttttgttttacgttatgtgttcctcctactaactatgatctttgacctcgtatcttttaccagcttaaaatcaatctctccttcttcacttttccttagtgttttcattattcatttgctgattcacagtataaattttcctaaactgacgataagaccatttttaatccgaaaaatttatattattattttggcaaacacaaaatagcttttaactataatttcttttttcagattaaagttattaccatttttatgcctagaaagagatctttaacgactcggcaagagcgtaaacaaaaacgcgaagccaattctcgtcttcggaacacattgacctcttccgaagcaggggcgtcttcgtcttccaatattgacacaagacaagaagagtccgaaactgcggttttctgtgacctggatcatgacaatttgaacaatacaccggcagaacctctgacaaaatgtgtgtaagaatttggttcgaaaaacattgacttcttccgcagtagggacgtctccgtcttccaatattgacacaagacaagaagagtccgaagttgctgttttctgtgacctggagcaggacaatttgaccacaacgccgatgacaaaaagccgaaaattggatcaaccattttcggcatcaatggctccattcgttcaagctcaaactgggcaagggcgcattgactctttatcaa

SEQ ID NO: 79554 - DNA, 478 bp, Heterodera glycines
atgaacatcattagatatgacgttctgcaactggtaattaatgaactttatataattaatcatttttcaacaaaaaatattcaaaaagcaaattttgtgtatcggaattctgttttttttaaattttaaattaaatagaataacaataaattcgaaagttagatcggtaatattttatgaacaaatttttcagttgactttcggttccatttgcgccaacatcacatttgaaggtgaaaaagcaagaatggagtggtatttggggcgtctttccaaaaatgctcaaatgatactcgacaacgtggagccttccttatgtgtcaggcgaacttgtaagatgattcttttacattaatttaaaagtagtgacaaatttgtagtgacctttatttctacttaaacaatttatcactttttaaaaaattttatatttcctaaaaacctagatcagccctattatggcacctttaaccaatta

SEQ ID NO: 79555 - DNA, 608 bp, Heterodera glycines
atggaccgagggaccggtcccgatgaggatggagctgtaaggaagaagctggctgggcggttaaaacgcggaaagcgggggttgataagatccataaaagaaagggcagatgtgcctcggtagcttaatggtagagctgcccacggaaagggtgcatgagtgggttcgattcccacccgaggtttaacattttgcccatttcttattatatagaccttttggctacgccgcccggctttgctggcccggtcaatctgagcggtttccagctggacgttgagcgcattttcgatgacgagcgggcggaggacgaaagcagtgacgacgacggcggtgccgacgcggttgcacgcaccgttggcggtgcccacattggcacagaaatagggacggcacaacagcaacaattgttggatgtgggcgccatgcttgacgaggcggcggcggcacaaattggcgggctaggcgacaacaatggcagagcggacgctaccgccgccactgttcggcatcaaaaagtggccgtaatcgccgccgagaagggacaccaaaacaggaggcatcctgaacggactgatgctgtcggtgttgacaacgaggaggaggag

SEQ ID NO: 79556 - DNA, 351 bp, Heterodera glycines
atggcaaatttgaaaaaaaagcttggaaaagtttgggccggtaagttggaacaaataacggatgaaattaggttgtttcccgaccttcggtaaaagaaatgttgtggaccgggcacaaatgcccgacaaatttttcaaaaatgacgtggatgaaatttgttgcaagaaagaaaaaagcaacagaaatattttcaccgaatttatttcccgtcacccgccctgcctttcccaccgtatattttccccctgaaaataaaaaaactttcaattaaaaatttttcaaaaaatcgttgaaaattttttatgagaaatcaagaagaaaaaaattgaaaattttcagcatctttttga

SEQ ID NO: 79557 - DNA, 1026 bp, Heterodera glycines
caagcagataaacaaaaatgattcggttatgcttgtttctgatcggttgcacggccagtgttgtttattctgcgacagacagtgcttcttcagcagcggatgcagacaaaaacagcagcagcaaagattttcaaggacaaaaactgtcctggaaggcaagtgcattcattcattaagtgctgctggttcgatcggaacaaaaaggacccaaaatcttcccatttacgaaacttccttgttaattgaatcgggactaaacattgctcctccgtgtttcccagttgcggtcattttcataattaaagtgatcagggctgaagcgcagactaagtccccatgaatttttaaattgggccaggattacagtacaattgtcgttcgggaaaagcgcaatcttgtccttatttaaatatatacagaaaactgtgcaacatttttaaggacgacgatggccttgaggtgaaaatcattcggccaattgcgcaggagaagtgcgctctgaagagtcggccgggcgacacggtcaagcagtactacaaactgactgatccggagggcaaagaaattggatcaaatttcggcgaaaaaccgtaggaaccgctacagtacaccctcagagggttttcactctatttttttctcattccatgggataatgatttaccattttttgaacaggtactcgttcacgctcggcatgcaccaggtcatcgaaggcatggacaggtggtgccaattgaaaatttatgactttttcctgggaggctaataaaatgcatatttttgggataattaatcgttaacattgatccgaaggtgccattgttttgacccggaaatgccattgttttgatcaaactagacattataaattaattcgaatttcaatattttggaaaaatattttgaaataaaaatttaaatattacatttattttaaatttcgtatttgcagagcaatgaccggcatgtgcattggagaaaaacgccgtgtgaccattcctggaaagttgggcttcggcgacg

SEQ ID NO: 79558 - DNA, 715 bp, Heterodera glycines
atgggcatgtcggaagaaattctcacatacaaagacgacatttgtgttttcatgggtgttggttgatccgttgcagtggtggaacaacaatgaaaaaaatttcctaaactttcaatgattgcgcgtcgttatttgtcacccccatgcacaagcatttccagtgaacagctttttagtgtggcaagatacatatatgactaccgtcggtcaagcatttccccagagacggctgaaatgttgatatttttgcataattctattcctgatgtcaatttctcatattaattttcatcagtttttggcttaaaaatatatttgaacacttatttattgttttggaaattttttgaaatttaccgcaaatttgaaatttccgggctctacccgataccatgacttaactggctcagcagatcttgtatgatggaaagttcaattttctgcaatcagtttttgccctaactttcaatttatttaaaatcttttcttttaattatgcagtgcatatttcaaaataaatttagctaatgcaaatgcttattcgtttgccacgaacaggctggatgccaaagaagcgagtgttaagaaaatttatgtaaaatttgaaccaactgcacgtctgaaatttagcgaaaagaaattccacgggcattcttttaaaataagagaacaccaaaatgaaatgcgaaggactgacccacgaaatatgaataaa

SEQ ID NO: 79559 - DNA, 1384 bp, Heterodera glycines
cccagccaatttggcaaatctatctttttaaacgaattaaagaagattcggtcgagtgcttggagtgtaagcaaaaaaacgtgagtaattttgctcttaaattgtcgaatcggagtctcaaagggctcaagatccatctgtttgccaagcacaaagacacgccgtatgcagaaaaatatttaaagctggatgaaggcaagtcaaagaaggatgatccaaaaatcactgattatacaacacggagttcgggtacaagaataaaattgtgattttaattaattaccattttagtcagattatgtgtgatggacaaggacattatcaattttattgcttgttgcaatttgccgttccaaataatcaaccacaaaactttcaaaaaaatgctccgaaatccttcggaaaatttacgcgacgaaagccattaccgaaaaaatgttctgcctaagtttacaaagttgtcaaacaccagatcaagggagaaattgcgaagtttgagcaaatttgttgtacctctgacatttggacttcggatacaacaaaagatgcctttataaggtttttatttgtttagtacaaattaaatattcaaaaatttagcttgactgttgttggtgtcaactcaaaattttcgcgcaaaaaatttacactcgcaattcaaaaatttcatggggcccacacttcggaacgcatctctgaaattttaaaagctcttctcgaaagttggaatgtaaaagaatgctattgttttgtaactgattcggcagcaaatttagttaaggttagtttatgcaacatttcatttcaaatagcattttttagaggcattggatttaattcacattgaacgaatcagctgtgccgctcatgacctcaatttatgtgtaaaggacagcttttcaaaagaaaaagacgaaatggctcaaattttcgaaaaatgtcgaaaaattgttggaactttaaaacattcggcaaaattgatggatgacttgttcaagacgaacttgggttaccgaaagctaaattgcttcaggttgctaactaccgaaagtcaagaagaatgttccattctcaaattaattaaggcaatttggtcttcaatatatatttttatgttttaaaattttcaggaacttctaaacccaccgaagaagtctctttatattattgtaaaaaaacactctccgcccgattccgctcactcgcactttggtctccacttgggaacgaggtgatctttctgtgacaattgatggcgaaatgaaaatactaaacgaagtgagggaaatgcgtaccaggctgattgaggcggttaaaaagcgttttttacaaaaagaaaataggtatatacctacttaaaatactagtaagttttataaataaa

SEQ ID NO: 79560 - DNA, 525 bp, Heterodera glycines
atggatgaaaaggacgtaaaagcggaggagggacaaaaagacaaaagaaagggagcaaaagcatcccttgggggaggggagggggtgcgcaacggaggagggggggggggggacaaatgtgccctttaaaaagggtgttggaccaatgccaagttttaaaaaagcaaaatttcagctgatctctgcccactcggctgtcattttcactgcaaattttttgcaaagtcgcgtcgtcatcaatgacattggcggacaattggccaaactttacgatgcgttggaagtgaaaaaggcggaagagtttgagcaaaggatggaagaattggcaagtgccggggatgagaggagaggtcagtgggccgagtggccaaaaggaaaaaccaaattcaatctttgcagggagaaaaattgccgaacttcgggaagcatttcgcgagtgggagacttttttggcacggcttgacgtcgagttggagcgggtggccgggccaaacatccagacggaactcggcgaaacgggcaggg

SEQ ID NO: 79561 - DNA, 3008 bp, Heterodera glycines
tgtcaatcagttttactagaatatttttgtttatttatcatttcattctgtgttttttttgttttgtttagctgttttcccctgtttttcccgtcgactttctttctccccaatgtgattaattccatttatagacacaataaaaaagcattattattttatcatttatttattttatttttgacaattttattgctgccttttcactcctcttttttgtgcttcatgtgctgatgatatttgtattagttaatgtgtttatttggcccaacaaattaacattctcagctatttatttcaacgctcgcaaaatattatattcaataaaataaaaacaatttttgttatttttatttttgcctccctttccctaaaattttgatttaattaatttattttcattgagttaaacggaaactttaaattatttatttttagatttaaaaatggaaagaatttcactttttgtcaatattgccggcattgtgttcatctttttctgtattggaaggtgatagcgcctataatttaatattaaaaaaacagtaaaactttttttaatggaattaaatatctaaaataattatttttatttatttaataattattttttcttaattaataaattattttgatttaaaaaattaatttaaagtattgtttccattttagtgatgccgtttcaatttcggactgtgccgaacggcgctttcccggctccgaatcatttgtctgtgtgtgcaatcggacattctgcgacctgccaattgggccccatcggctgggcaaaaatgacaacaatgccattgtgtacatttcggacccggccaaattccgtctccatcaacagcaagtgccaattgaggtggaatacagtgaccaaaatcgtcggaaggataagccgcagcgcatttgctcatcggatgacgaaggtatggaaaaaccagcacattttggcagtaataattcagacctggcaaatgccaattaaaagaaattgattaagcgaaccataaacaattaattattatttttttaaaataccttgttgttccgttttgcttacttaattttaacataaaatcatcaatttttctaaaatataagacattttaccggtaatgggaagcaggcatgaaaaacgaataaaaaattgaaaaaaaatgtaagaaatccgctttagcgaattcataagtcccaacgacccttagaaaagtaaataatgatgaagctgttttagctccttataaaatgcaatttttttcaaatttcgaagaaaaaaaatgttggattattttaaatatttttaaaattaaaatgctaaaaaaatttttttaaataagttacttattaataatttttatttcctcaaatgaaaaaaaaaatccaaaaaccatcattatttttcagatgaagggatcgaaattgttgtggatgcctcaaaagagtaccaaacagttcttggctttggcggtgcgttcactgacgcggctggcgtcaatttgaacgcgttgagcaacaccacgcgtgcaacactgttgcgtgcctattttgacaaggacattggtgggtttgtcacaatagaaaccttaaatttaaattggaatttttcataaaattagtgtaattagatttaaactattttgctggttattcttatcagcattcaaaaatatgagaattaatatttcagcgacattttttacgcttttatggaagacataataaaaaaaatagaaaataaaatagaggttagaacggcataaaaattccgacttactaatatttccgaattaaaaatacccaactccatggtaaaaacactgacaggatgtttactgctaagcctaataaaaaaaatttcccaaaaattcacactttaaaatttgttcaaaggcattaagtacacggttggccgtgttgtgatgggtgcttgtgacttctccgtgcgcgaatattcttactgcgacacgccggacgactttgagttgaagacatttgcattaccaaaggaagacacggaatggaaggtattgtaattaaaactattttgttaattaattaaattgattatcaaattgattttgaagatccccaacattcaacaagccattgaaatgagtggtgatcagttacgcttgttctccagtccttggtccgcgcctggttggatgaaaacgaacggacgaatggtcggcgctggacaaatcaagttggtctatattagttacttgaaccgtaattctaaaatttagtatagtaaaagaaattcgttttttttttaaattttgaatctaaattgaaaatctctaattctccttattggaaataaaaaattttttcaatcaaagaaaatgtgaaatattaagtaaagaaagaaagagctaaaatatgattaaacaatttatacaataaattaatttccttaatttaagaaataatttttatttttcccaaaataaaaaatataatttcaattttttgaaaaattttttatttgtgttaatttttgcttttattaatttttaagactgaattttacaaatcaatctaaatgacatttttggtaaaagatcatcacaaagccaaggaaatgttttatatatataaaaaaaaattttcaggggcgaattgcatggtccatactatcgcgcatttgcaaattactttagacggtaacacttgaaaaaacaattgaaaacctttaatttttttaaattttagatttttcgaggaatacaaatcccataacatcaatttttggggactgaccttgaccaatgagcctttgcatggtgcaaagcctggaatggacttgaactcgaccatgcaacggtaaaaatgagcatttgaaatcattaaggggataaatgataattaaaaattggttgaaacaattaaaataattaattaattaaaaattgatttattgaaattgtagattatgggcaaatgaagtacggccccgtactgaaaaaatatgaagtgtcaaaaaattgaccgcaggc

SEQ ID NO: 79562 - DNA, 1263 bp, Heterodera glycines
atggtggcatcgtcggaggaggaaggtgcggaccaaactgacactctttcggcatttggagacgacgaaatgctcatgacagagcttctggacgaagtgccaccctttgacctaattaaccaaggggtaaaaatgcataaagtgatcaaaaattaaattagaaaagtcattaagataggaatattttcatttcctcagttgaaataggaacccaaataaaaaaatgacattaaaattttccttttccataaaatttgggtacgatttgaagtgatcattttgaaaaacctaaaaccgacggcgccgaaatttttgaaattttaaaacgcttatgggagggtcataataagataaaaatggaaataatataatgctgagaaacaattgttttgaagattgttgacaccatacacctcgcaattatggctcgccatggagttttgggcggcaacataagaacagttgacgtgagagtagttgacggacacggcaattgcatctacactccgccacctgcagcgcatgtgccgcaactgttggagcaattcatccaagacgtgaataatgtgattgggcgagcttcgacaggactgatggaggcacgcgttgttgccgcgtgggcgcattaccaattggtaattggggtattacctttaccatttaagacaaaaatttgtttaagtttgcaatatttttggccaattaaaagtttttcattttatttatcaattttgaatcagacttttgtattattaaggctatgctttaattggggttttcgctttgaaatttttgattgttttaccctattttcccactttttggccttttgaaaattaattgaaaaaaagaattattccaatcttaatgatcaaacgcacgcaagtttcctaaaaatgaatctaaaattaaaaaaatgaaatttttctacataaatattattttcggaaaatgaaaaaaataatgcatccacaaaataattttttgatacgtcaaatttttcataccttgttcaaaaaataagtcaattcgtcagtggaaattcgtcagaaaatttttttgagcaatgttcaaaaattcttgcgaaaatgattgttaaatgtaataaatataatttttatagattcttatcatttctagttactttatacttcaattaattgactaaattctttaaaaagattatttcataattattataaaatatcacaaaatattaatcaacatttttagcgacttaaattaattatcacatggttttaa

SEQ ID NO: 79563 - DNA, 481 bp, Heterodera glycines
atgcactggtaagaattgttatgtttatcattttcaaaaaaaattattttttaaaggaatattgaaaaatttgacatatcaaaaaatggggtaaacccaactcatctaaacccaactcacatgcacaaaaaatgccacggccaagaccgcataagtagaaaggccacgacaattactcgttgtgttatggatgagttgggtttggatgagttaggggtgactcaaaaaaatcattttgtggaatcattatttttttttctaaaataatatttatgtataaaaaattcattttttaaattttaatgttcatttttaggaaacttgctgagtttatcggggaagggaccagaaaagtcgggacctggaccaagttacgacagggaccgggaccgcgagaaaaactggtgccgagaccaaccaggattttttccaagaggaaaattttttgaaaaaattctaaaattttaatctaaattcatta

SEQ ID NO: 79564 - DNA, 2524 bp, Heterodera glycines
tttattctcgttgtctgatcacggaggaatggcgtctgaacagtttggcaaatgatcgcttcattgagtactgttgtgagattttgcgctgtgaaatgccaccaaaatgtttggcactcattgacgcggtcaaaacggaagcactcaaaacgttggccagtgtcgtgtttttggaaaaggacaaaaagtgtgtatttctattgccattagtgtactatttcgcatcggcggattgttttcccaccatgaaaaaaatatagaagaaactaaatttaaatttttaaattcgatatttttcgactttttaaattcataaatcgtctccaagaaaagttgaccaaatttcatcccgatatcgacaattttcacccgtcctccctttttagaattcaaatgattgttgaccagcttgaactgcgcacataccatggcttcctgccatcccaaatccgcagttgcattgacagtttgaaggcaggccgtgtggacggcagcggtggcggtgactgttcaattgcatttgtcacttcactgttttcattggtctaccatattgctggctttgaatacggtaaactgttgtatacccgaaaatttaatggaaaaaatttaaaaaaaaaattattttttttgttgttgttgtttaggcggagatgcgctcaatcgctcttcaatgacggctgtactgcttgatgtcgtcaaaaatttctcacttcctgaacagaacatcagctttgtgacccgttcggtacgcatcattgacaatttgacgggcatggacatcaccgagttcaacgcccgaagtggcaccgatgcggtcatcaaacgactgaatgtaagttcaacctttttctccataatccgccgtcgccacccccctctctccccgaattttttttttactaatttttccaaaaatcactaaaaaactaaaatatgccgaagttccattttttccacagcgcttggtgcctttacactggcaaaaaaacttagttacccacattttgttcctttttttagcatgaggtcaacaagtgcaaggagcacattcaaattcgtcagtcttctcaatcccccggcccgttgctttgcaaccagcaacggtcggcgctggtcaagtcgttgctcaactttctgaagcgtgcagtgggcgacgttcatttggcgggccaaatgcgccgaatcatggacaccgacttgcccacgtcgttgatccatgtgtttgagcatccccaatattatgggccgtcgcttttgaattgtgccatctcattggcaacaaattttattttccaagaggtaaaattactattgaaaacttttcaaatggggttgggccaggaaattagtttattaattttttcatggtttggccaaataccgagtttttggccataatatttaataatcaccttgataacagaaggtcattttttatgatacaaccaatttttacgaaaaatgcacattttccgaatttctaaagttaaaaaaagagttaccaataatttatttagataattttcatgcgatttcctacctaattgtttatttgtttagccggctcaattgacaactttgcaaaacaaggggctgaccatggcaataattggactgattttcaatgaaaaagtacgttttttccccgtgttcatgaaatacaacctccccccttctttttttcatttttctctgctttttagttcccaatttcacgtgaattggtctgtgcattgcccaacgtttgctcggcgctgtgcttgaacgagcgtggcctcaacgagttgaaattgttcaacgaaaagaaaccattggagaaaatattccgcatcgttttttcaaacaaattcctccagtcgatgaggaagagaaaaattgaaataagtgagtgatggactgacaaattgcaattaaattaaaaaaaaaaatttttttttttgaatatcaatctgacggcgtaaatttttgtttagttgagacggcacatgtgcttggcacctcatttgatgagctgatccgacaccatccatcgttgcgcaaagatttgatgggcacattggccggggtgagtaatttaaaatggcctgttttgttgaaaattataataattttttaagaaaagtttgtttgattttttgttatgtgggtagcatcttaataacaaaataatttaaataggttttttagaattttaaactaaaaaaggtttaaaattataattaaataaagaaattcttatatattaaaaaaactaattttatctttccaaattatttttaaaggttattcgttttttaattatattcctaaatttatttatccagtatatttcgcaatttcaatcattttgtcatattatcttacaataattaacagatttgtgacgattggttgtcctttgagcaaacgtgtgagaaggagggcaaacagtgtgccatttcatgggctgttggcaaggctgttgttgaggatgagtcggcactgttgttgccgctgggcgacttttccacaatgatgggca

SEQ ID NO: 79565 - DNA, 1779 bp, Heterodera glycines
atgcgttcttacatgcttaaatattttgcaactgatcccaacgcgtgcgccttcatttatgccctttttgatgcgtacaaattaattggaacagaccgattggtgaattttttaaacaccttgaatttgaatatttatcaaaaacaaatattttttgccgcttattaaaatttttgacaatttgaaaaataatattcattttgtttcttaacatccgcacaattttgcttcgcatttgccaggtggtcagttgcaacgcggaacagcagcaggcgacaacttcacaaattgcggaagacacggccaaagtgcgtgaactgttgattgatgatgactcatcatcttcatcaaaccaacatggtgggacaatgccagcaataacaaccgctgcagccggcacagtgccaatgccacaattgatggaaatggacaatggtgccggcacactttatttcggtccaccacaacatcaacaccaaccacaacagcagccccatcggtcggttgattttgccaccaccgctgccaacattttgcggagcaacagcgcaggcagtgccggccgtggtggtctcggtgttggcattggtgtcggtgctggtggcgccattaacatttcaattcttggtggacctactgtcatgatgagaggagcatcgtactcaacaaattctggcactttgtccgcgtccatcagcgatggcattgtggggtcagcaggagggggaagcggtggtggtgggcgcattgctgagcggtccacccattcgattgccattcggacgttgaagcaaatcacggaactgatcacctacattggcaaagcgttttgcaccgtgtcgttgccccgtgtgcgacaacgtgccaacatactaccacaaatggaccaagccacggttcggcaccatgcgcaaaaagtcaccaaaattgtgttcaccggcctgaaacgactgctggaaatggacatgaacaccgataatattgtctacgcatcttccgcctcctcctcctctttgaacaccacgacaatgaacacaattggcctaaggcaaatttggcattttgtttaaaaataattttaaaaatgtttatcattgcatttacagtgcttcttacattcaccattcattgtcaacactgaaaaaattgctggtcgatgatacgcataatttgtcgctgttgttaccatatttttacaagaccgaatgccaccaagccttttttgccctgggcgactatctacggcagaatgttgacaaatgtaattgtttttgccattgtttttttttggtttcaatgacactataattttgtattccccggagaaaaaaaatttaaaaatgcatgttttatagttttttcaattttttagttttttcttaaaaaagttgatcaatttttgaaaaatccctctcggtggaactgttcttgcttatggtctatgccttttgtttcagttgagttgaacacatgcatccaagtttggcttgggatcacccaacgtttggttgctgtccaactgcaagacatgaacacgggcaagagcaacaacgggccacagcagcagcaaaccaagcagcagccgactgttgttgttgaaggatttgagccgaaaaattaccttgccaccttccagaaggcatagttttttaatgcttacaattaatgcaccaattgtttcatcaaaatttttttttcaaaattgctcaaatatcaacaaaaaaaaaactgagttagatggtaccataatcattcgaattcggtcttttgaaactgaaa

SEQ ID NO: 79566 - DNA, 1545 bp, Heterodera glycines
atgcccccgttggttggccaccgggaggaagacgcattcattttgttggaacgcgtgttgtgcgccatgaaagtgctcatccaaggcgaaatggaactgttggagttcaccgaaggcaaggcggagcagtcgcaggaaatcccagtcagcgaaattgacccggcaaaggtgagaaattttggggtgtatgtacatcggcggaagggggttatagcaatacgcgctagcttaatgggtcctcaattttgggaagaaaagtgtgctaaaaaggctggaaaaaaaatttgtgggctggtttttgaatttttaaaatggcaatattaaataattggcacatggttggctcggggttttccgaaattctggtccagatctccaatttttgaaaggatttctcgaaatcgggatgcgaaaaatccggagattgaaatcccgacaatcctatcccctacctgattcccaatctcgaattctggtcccaattttttaaaaattctcgtctctattgtaaaccataccacttatggacgaattcgttcggagaaccagctgccattattcgtcttgcattttagattttcatatgcttccaaatttgaataaaaatgcatttttttagattgaacaacttgttgaggttggttcgtttgttgtttaattttcttccaaatattatttatattttccattgaatgaatgaatggttgttgaaatacagtttttgtccctgttttttagatgggtttttcacaaagtgacgcggttgatgcactcatgcaatattccagcgttcacgaagcagccggtaaaaatttatttatccaataattgtgaatgtgtaatgcgcccaaaatttccaacatttaatttaccaaaattccagaatacattgtgtccatgctggagcgtgtgaccgttccccccaccgtttcacgaccacctgcagcagctgctgtacaagaacacccggccatcactgtgtcatcatcagcaaccgccgcagctcctcctcctccagcaacaactgttgcagcagcgacaactgtggcggcaaatttggttgccgctgcgaccgccgcagcggtctccgctgaaccaaatggaactggtggtagtgctggtactgctagctacgacaacgcactgcaacatcaacaaccgcaacaagtaggcgatgctgctagtggtggttcaacaacaacaaatgcaacaaccccgatggaacaggagcaaccactgcaacaacgagagcgcgaccagcagcaacagttgcagcagctgaccgcatcgctcgctgatgttcatcaacgcaaccaggaggctgccgaggcggtggaacaactgttgcaagcgcttcggggtgagggcgtacaccaccggggagagatgagcggcacattgccaccacctccagcagcggcagcaacagcgatggaacaggacggaaaatcgtttgacgagttgaagccgttgaagcgagaggaattccaggcaattcgaattgatttttgtgaaataactaatggtcgggtcataacataaaaa

SEQ ID NO: 79567 - DNA, 969 bp, Heterodera glycines
gaaatgctcattgaacgggatgcggagccgaagacggcaggccaaaaaggttgcttttaattgtggatgtagggagggaaatcccccggccaaatcggggaagaatccgaaaatcttttttggcaaaaaattttagccattatcatttgttcaaaaatgtttctgcgtcggagagataaaagctggaaatggttgtcgtttgcgtcaagaaaatacaatttttgctattcctgaggctcaaaattttcttcaaaaaaaaaaaatttttttaacccccccccccctcccccatagtaaaacgtgcggtggagacaaccttctacatttcgtttggcctcatctcctgcgccgttctgggcgtgatgacctacctcgtgttcaaggagttcttcgccttcaacacgccccagggcgtttaccgcgatgcggtgaaaagggtgaaggcggacgagcgctgtcgggaaatgttcggcaagcgaatcatgacatttggcgaagagtcgggccggggacggcgacggcacattctccacaacaaatatgtcaaggacgggcaggagcggttgagcgtgatgttccatgttaaggtcggagggtcaacagctcatttcgaccaccaagaaaataatttatagagggtttttcaaagaaaattttaaaaatctgaaaaaaataaaaatatttccaataaatatcttttcaaagaaatttgaaaaataaaaaatacagagcctcaaaatcaggagacaaacccctggtccatactttttcaaagttttgtctctaaaaaataacaaacaacattaaatgccatgaaaatatcaataatgcataattaagggtgacgcgggcattgggaaaacgtacgcggagatttacaagggcgaggacggcaaatgggactatcgctttgtactggtagagagtgacgggtttccgaagaaagccattttcttaattgacaacagg

SEQ ID NO: 79568 - DNA, 1119 bp, Heterodera glycines
atgagcgaatgggagcgtttgtccgagaaattgcgccacccggaaaatccaattgtcttttttgtgggtttttcattttgcctccacttttttcattccaatttcgtcaggacattgcggcaggtggagcacccattggttagaaatgcaaatgcctacgcaaaaataaaacattttttaacgtcacaggtcgtattacgatggaattgtttggggatgtgacgccaaagacggcggaaaactttcgacagctttgcaccggcgaattgtaataaaataaacaaattgccaataaatatgtaaatcaatttaaaaatgcgtaataaaaaatgttttagaaaaaaggacggcgttccaattggctataagaattcgcaattccaccgggttatcaaagtataaaatttttttaaatgttttcgcaataataaacttaaaaattttaggattttatggtgcagggaggtgattttgtcaatgtaaaaagagacgtggcgaaaagtttttccaaccactctgtttttttttcagggtgatggaaccggaatgacgtcaatttatgggccaaaatttgcggacgaaaattttgaagtaaaacattccgagcctggaattctttcaatggtgtgcaaaatttttccaacaaaaattattgaaaatttgtttttttaaggctaatgctggccctgacacaaatggtataaaaaaataatattgctttcttggtaacacaatttgcttcctcaatttttaggctgccaatttttcatcacatgtaacaagtgcgattttcttgatgccaaacatgtcgtttttggtccgtccgttcattgttttacaattaatggggctaggtccgggtttccctggttttcggcactcttttgggaacgaaagtcctaaaaccccatttacaaataaacaatatttgtttttgaatttgaatttgtttcaggacgtgttcttgacgggctgcttactgtgcgaaaaatagaaaatgtattcgaaattcattactttctatcagtcacatttaccatttttttttcattccaggtgcccaccgttcagaacaacaaaccgaaaataccaattgtcattgaacagtgcggcgaatta

SEQ ID NO: 79569 - DNA, 1996 bp, Heterodera glycines
atggcttcaataaatgatttagattatgttcgagattatgattatgtttatgatttagattttgttcaagttgaagaatgtgttgagatcatagaccaagaaaatgaaatagaaattagaaactatgctgtgtttgaggagcacagttatgctaagagaccaagatttgtggatgaaggttccagccaggcatctctgagcttagatattgccattgcaggaccatcacgtatgagtgatagtcaatttgaagaaagaagaagtaatgagtatttgaaaagaaaaagagaacgcgaaagattgagaagagcaaacgagtcacaagaccaaagaattatgcgcttagaacagatgagaaatagaaataatagtcaaagatctgaagaaagtgtgttagagcgacagctacgcttagaacagatgagaattagaaatagcaatataatagcaaatgaaaatgtgatggaaaaacagttgcgcttagaacagaaaagaattagacagagagctattcgacaaggagttattaatgtttatgcagcagggtctaacgagaatgctcatgaacatagccttagcccaatgaatatgagatgtgatttttgtgatgctctgcattttgcagaagagaaagtgcatggtcgcggcaattccttcaaggattgctgtcactatggtaaagtttttgtcccagaaattcctgaacaggattttccggaggaattgagagatttgttcatgaaatttgatgcaagacatgaaaatttttttgagaatattagacatttgaatagcagcgtttcatttgcttcaatgaatccgcttagatatagatacccgaaccgaggaccgtattgctttcgcatttatggtcaagtttatcatagaatgaatttggctttgaacccagaaaatggcgatgaacctgcttatgggcaaattttcatcgtagatactgagcatgcagtgagagcaatgagacatgctaatgtggctattgatccccaattgctgaggactgcttatgaagttattagaaatgtgaatccatttgctgaagcttatgtgatgatgaaagaggaagaaaatgatgaagctgagagagcgagaaatgagaacagagagccaaccgagattaaacttttgtttgagaccggaaggcaattggaccgacgtttggggtacaatgtaccaagagtaaatgaagttgctgcagtttatgtacctggagctgacggtgaagtacctaatgccaagattgttgtgagagaacgtggaaaggaattgaagattttgaattgtactaattcaatggtaactccaatgacttacccgctgttttatccgcgtggtacgcttggctggcaccctgaaatgaagcatagaaatagtaacagaagagtaacgaggttgcagtatgtgtgttacacattagcaattagagaaagagagtttaaccctattttgtacggtggaaaactctttcaacagtattgtgttgatgaatatgttaagattgaaggagatagaatgaactggataaaaagtaatcagaaaaagattttggctgatgcatataagaatgtagacaatatgttaatgagacgagcacaagaaagaggcttgccactgggaaggaaggtcattcttcctccaagtgtgacaaacagccctagatatgttgagaagcatttccaagatgcaatggccgtcgttagacggtttggtaaacctgatatgtttttgaccatgacatgcaacccgcaatggggagagatttcagacaatttgtttcatgaacagacatcaagtgatagacctgatttggttgtcagagtttttaatttaaaagttaaagctattatgaatgagataagcaagaaaaagatctttggtgaagtgattgcatggatgtacccggtagagaaccaaggaaggggactaccgcacattcatttgcttttgacattgacagaacaagacaaattgataaatg

SEQ ID NO: 79570 - DNA, 736 bp, Heterodera glycines
atgagaaccatcatattgaagaaatgctgttggcttacaattggttgtgatttcatctctgaagtgttgaacctgtcggtcggccactcaactttttgctcactttcaagaaattcactacttcaactttggcggccccttttgtaagtgggttgggaagagttgtggtaaatttgccaaatagccaaatatctgataaaacatttgtgttcgttatatgaatttagtgtgacacaattatgtgtgtcatgtttttgataaacattagtgttcgttatttgagtttagtgtgacacaattatgtgtgtcatgtctttgataaaacattagtgttcgttatttgagtttagtgtgacacaattatgtgtgtcatgtctttgataaaacattagtgttcgttatttgagtttagtgtgacacaattatgtgtgtcatgtctttgataaaacattagtgttcgttatttgagtttagtgtgacacaattatgtgtgtcatgtttttgataaaacattagtgtttgttctatgactttagtgcgacacaattatgtgtgtcatgtttttgataagacattagtgtttgttctgtgacttaagtatgagacactaaagtctggcatgacattgataaaacattagtgtttgttttgtgacttaatgtgcttctcaaatttcagaaacccacacaagcgtgaagcaatgaaacatgcacggtctcatcattggactttttaa

SEQ ID NO: 79571 - DNA, 80 bp, Heterodera glycines
cttacaagggaacattccgagctgtgagtgggaaaatgcatataagctatataccattggatagagcggggtcgacttgt

SEQ ID NO: 79572 - DNA, 3280 bp, Heterodera glycines
atgactgtcatcgtatttctgctatgtctcatagagccaatatgccaacttgcattagctgatctccaaggaagtgtttccagaatgggggttcgtgaaaatggcaatttgactaaaaagaaagtgcttcataaagaaaataatattcctgcacttaaaaatgcttcgcttacaagttctaagcatgaggatgatgacttactgagtgaggcactgattaatcttcataaattgaatggtaaccattttttaaaattatttttctccacgattttttagaacaaacacaaaatggaagctggtcagaaaattcggagtaagcattttcgtttaaagtttcattgtttgggataagtttaaagtttcacggaagttgatgggagttttttgagcttttgcaatacaaatggagaaaaaaaggaatttagaaacacttttgttttggtcatttttgagaataagactaaaagtagctttgaaaaaacggaagaaaaatgtcctttaaaggcattttcagggaaaatgaaacttttattcagtaactttttggatcggtataacgtgaatattctttaagaagccgggacctgtggagaatacaagtaccaagtttaggtagacatgaattttcaattgtccacatagttacatgcattatcgtatctttaattcccaccagcatattggcatttgtctttttggtataaatcaaatatagcatagaattgcgatttcatattttgttatttgttgggtcggaattccggtttttgataaaaatcagaattttcacaaatcttttttacattttttaccaatttaaaatgatttatttttatagggtcctttttatgtcattttgactcccaaatgaaactcaaaagcataaaattggtcatttctgggcaaaatttattaataaaatgcaaccaaaaattttcctggccgcgcctacgccgcaaaaaagtgttgtaaataatccctttttcaaaaatgtaataaatgtaaatggacatgaaaaaagtttctgatgaaaatcatttaatattttttaaatattataaaacatttttaaatcatatttatttttaattttttgttaagaatttaaaatttattaattaatttcttcaaaaatttccgacttccgctttccgatttttggggttggaattccgatttccaaaaattttttgggcctcgaaatttcatttccgaaagagttttgacctcagaatgccacaccttgtacaatctgtaacatatggacctttctatttttcccaccgttgcctattaccaacgctggttcccaacttaatgaattttaaatattttatacggcgctgtttgacccttttctacataagtgcaataaatgagtctgagatttgttcaaaattattatgcaagttttttaagtgaaacattgacaacgctgtattcattagtggaaattgaaactaaactgaccaaattcgatgaaaaagctgcaaagactatccaagagctcaataagaaccttatgacgaactccgaaaatgtgatgataggcgaaagtcaaagcttaaaagaactgagtgaagaattgagcaaaactattgacacgatgaaaaataaggaggacaaggcagcaaaagttagcattgatggagtaaacggcactctggtacaaatattgcaaaaggcaaatgtgcacaaaaagtcaataaggttgcaaatatatgtgcaagtgatgaaactgctaaatctaattcacgagagaatcgagcaaagcccggaaaaagacacaatcggaaaagtcatcggaaagagtacagtcgcaaacagcgtgaagactgtaatgccaagtcaattagtgggattaataagggaactttggatacattttttgcaaagaatccgtaaacccgaccaaaataaagctactcaaactaacccaaaggtaatacttataatattttaataaatttaaaatatatacaataaattattattcgaaaattacaattattttagataaaaaaatcaattcagattaaacaaaatgaagtgatcccaaaaaaacaaaagcatgctttgtcaaataaacaaaaacaagagacacaaaagcatctagtttcgcttggcgataaattccgacgacgacgacgttccccactgcccatcgcgataattcgctctctatcattagcctttgctatactttgtatcactgtaattgccttggaacatcataacccatgggccgttgttgtaattgcgtttcttgcactatattcccaacaggaaaatactcgtaactttcccacacaaattgccgatggaattagcaatatcgtgaatcgaatttgtggtacacgtcacacagagggaggtccctgtctcaacggacacaggaacaattacggacacgaatcacatagaaacatctcacaaacagatgtaccgcaagcctattcttgtggcaattacgtacaacacgattggcacaaccttgccccacaagcaaatgagctatgtgcgacggtgcgaaatgccaacccgagtgccagcggtaacccagctaggcgaagcagcaatgataacaacggcagagctgcggctggctcagttcggcagcgattaattacccctgatttaacgcttgaaatcaactaccgggcgccagccaatcggaacaaaaataaaaacaacagtcgcccgggtgttgagccttcccgaagtcgacggcctaatcggttcgctactaattcactggctagcagtgggaacaatcagcagaatgaaaggccgccatcaagaatatcagaaggaagtggcgaggagacggatgacaacaacagcatacgtagtagtaaatgtactgcttgcaagtttgaaaatagcagcagttcagaaaacaacagtcggcctggtcgtgaatcttcccgaagccaatggcctaatcgggtcgctactaattcaatggctagcagtggaaacaatcagcagaatgaaaggccgccatcaagaatatcagaaggaagtggcaaggagaaggatgacaacaacagcatacgtagtaaatgtactgcctgcaagttggaaaatatcagaagcagtagcagttcatcagatatgagaaatgcaaaagccgctgagaaaaatgatgattccaatgatcatgatgatgacaaaggagaaaatgatgaggatgatgacataaaagacagtgatgatgatgatgatgatgctaatgatgatgatgatgaatgtgataatgatgtcaaaaatctca

SEQ ID NO: 79573 - DNA, 1440 bp, Heterodera glycines
atgaccccgcaatatccgcggtgcaactgtctgcaagcaaatgacgcggcgcatcacggtgggctcatgacgaaaatggccgtacgaaaatggcccgtacgaaaacggccgtacgaaaatggccgtacgaaaacggccgtacgaaaacggccgtacgaaaatggcccgtacgaaaacggccgtacgaaaatggccgtacgaaaacggccgtacgaaaatggccgtacgaaaacggccgtacgaaaacggccgtacgaaaatggccgtacgaaaacggccgtacgaaaacggccgtacgaaaatggccgtacgaaaacggccgtacgaaaacggccgtacgaaaatggccgtacgaaaacggcccggcccctcaaattcttcccaaatgcacaaaaaattttcaaaattttctttttagtatttttttgaaacttttcatgacttttttaactttaaaacagggtggccaagtgtgcttatttctaagatttgtgcttattttgaggggtcggatcttagaaagccaaaatgtgcttatttctaagatttgtgcttatttcagcattacgtgcttattttgtgcttatttttgggtttgaaaataaaaatgaaaattttgaatgacagttttgacttatagttttttattgaagcgaatacttgaattaattcgatttttgaaaaaaaaattacatttttattttaatggactgacacgcggaatttgttgcaagtcgaaacagtcaaggcgttggtccaaaccaaagccaattttgatctttcttgcccacaaatgtaccaaatgctcatttccaatcacaaattgttggagaaaatcggcggatggggaaaatacctttgataatcaatttcaattgtttttacgctaataaaatattgttttaagtcgatttttcatggtttttttgcgtttccctcgcgctactattagttttagaaaaaatcttatttttggggtccaaatcttagttttagcctcgtttgtccttattttgaaaaaaaacttggccaccctgtggaaaaagccttttttgtattttttattataactcaagtcctaaactgctgatttcaaccaaaatgcgaaaactaatcattttctattgattctaagtgttcaaagtgattttgtagcatataaaccaaaatttttagaattagtgaatttgatgttttttcatgtgttagagacatgaaaatagtacgccaaaatgagaggaaaagaaatgcaaaattttcatcatcccttaactttaaaataggatagaaattcattaaaaccttatagaacattcgatgcagaatttttttcataggaaaaagcgacatgctaacctggtggtatgtccgaaaaatacgggcccgggcgggctctaattttcccttctaaatttattcgttttccttaaaaacagctta

SEQ ID NO: 79574 - DNA, 2246 bp, Heterodera glycines
atggatgccaaaagcaaatggcctgaagtggtcagaatgcgaacgacaacggcattggcaacgatcgaagcgctaagaattgtcttcacagcgcatggacttcccgagcaaattgtatccgataacggaccgcaatttagctcaaaagaattcggtgattattgtcaatcactcggaattatccatacaacgattgcgccatacaaccccaagtcaaatggagctgctgaaagatttgttcaaaccttcaagcaaggcatgaacaagctcaaaaaagaggggatgaggcaagaaattgcattgtctcaatttctcctgaaataccgtgtcacgccgcacgcagcaacggaattagcgccttcggaaatcctcttcggccgcaggcttcgaactttgttggatttagtaaaacaaacagcggcgaatgattttgaagcggccaaaatgcaaaaaagttcctacacggaacgaatgaaaaggaatttcgaccgtgagacaaatgcgcgaaaaaatttcaaggtgaaccaaagagtttacgcgagaaattatcgcgacggatcaaaatggatccaaggacaaatcacccgacaaattggcacggcaatgttcctcgttcgaacggcgagaggaatttggaagagacactttgatcagttgaaagagaattggaccgaagagccttcggacaatccgagttcagaaagtgcagacaattcggactcggaagacgaagtgccgatcgaagcgatggacgacgagcagcagctgccaccgccggaagaacagccgcaaccggagcagccacaacagcaggccaacgctgaacctcgccgttcaacgcggaagcgcaagaagacgcagatcttcgactcagtcacaacaaaagtaaagcgaataatttgcgctgctttgaaatacaatgtcattcaggtcagtggcgatcacgggcggggattcacaaaaatcaccatttcgttggcccatgcattgcgcccaaattccccttccaacaattttgttgctgctgtttttcccgcaaaagattcacgaaagaatttgaagaatttctgcggatcgttgtgggaacaaattgagcacctcaatgaaattgacgggcgctttttgattttcggaaaattttccaggtttcttggcggagatctgtgttttctatgggcggttggccattgcggttcggcaatgacagcattcccatcccctgtgtgtgactgccgaagagaccatctgatcagttcagcaaaatgccaacttcgaactgtgcaagaattggagaggcaagccgatcagttccagcaactgacccatggcggcgacaaagcaacggcagagactcgggctctgacgaaaggcattgtttgtgcatctctgctgccgtcgatcagttttgagcagatgctgttggccccattccacgtcttccaaggcctcggaaatgctctgatcaaggagttggaagcgggataaaatgccgaaattgctcagcaattcttcagacgaataggggcaaagaggaaagcgttcagaaagcgcgacttaacggggaacagcatccgcaaaatcctcgtccatgccgatcaaatggaggcccttttcgagacggaatgggcgaaaacaattttccaaacaatggcacatttggggaaaatccaaattttcaccaaagtaattggttttcatttttgtggaaataattttttttaatttaaggcccagccattgtctccaggtggcttggatggactggagacggcagtttaccagttcaaggcatttctcgacgaacaaccaatggtgcgaacgcttctttcaaaaaagacaaaggcccatttgctgcttcaccactttgttccgtttgcgcgccaacacggatttttgggccttttggatgagcagggtgggaccatatcatttttgggggttcaattttaaaagttgtgatttttcaggagatgaggcactgcattccgtgtggcggcgacttgagcaactttggaagacgatgccggactctgaacaaatgcgacaacagctggagcatcatttcgtctcgaattggctgctggacaccggcagactcgacgaattgaagctggtgagttgatggaaggggatttaaaattttaatccaactaattaagcgggaggaggaacaacgggagcaagcggaggaagacaaaacgaatgaagaaagtgatcaagatgccgacgtcgatatcgttgactga

SEQ ID NO: 79575 - DNA, 107 bp, Heterodera glycines; identical to SEQ ID NO: 51702

SEQ ID NO: 79576 - DNA, 189 bp, Heterodera glycines
atgcgtctgacgaccaccgccgtcgtcgtgtccgcaactcggcttcgcgatcgccgccccccaccaaacaaaaaaaccaccaccatcaaaacaatggccacggtgacttcgtcaatcaccatcatcatcgtcgataggtattcccacaacagtgtcgcaatgagagaggcactgtgttgtgaagttcag

SEQ ID NO: 79577 - DNA, 61 bp, Heterodera glycines
gataacgaaaaaacagttggaggagaaggcgcagcgattggagcgcgaaatgagcgaattt

SEQ ID NO: 79578 - DNA, 87 bp, Heterodera glycines
tagggagtgatcatcatgtattgcggtccgttttatgaccgaaacaaagggttggacattggcaacaaccatattggctaaaatgca

SEQ ID NO: 79579 - DNA, 357 bp, Heterodera glycines
gtgccgaacacaccgccgcctcttcgctctttctgcccatgaacttctttgctcactctctgatgtattcgtattacgccctcaattctttgggcttcaaattgccccgttggttcgctatgattgtgaccaccgttcagacgacgcaaatgctttttggggtggcaatcactgcgactgtttttaagctgaaagtgttcgacggggcaaggccggcacttttccaagaagcttttgctgagatctgtgctcatttctttgctttaggtgccaacaaagcatgggcaatttgtacttggccattttcctttattcgactttcgccgttcttttcattaaattcttttacgacctgca

SEQ ID NO: 79580 - DNA, 966 bp, Heterodera glycines
atgattattattattttgttcattatttgccccctgaatttgccttttgcctccggccaactttcgacaaaaccgtaaaatttggaatttaattttctaatttgtttttgttttttatagtgttcatctgacgaatggacaaaatggactaacatttgtctcataccgcgcgcctgaacaacgcgagtcaaatgggacggatgaaaaggcattcggaatcgaatttcgccttcccgaaatagccggacactgtgacgatgggtaggaagcagggatgtgccgagccagacaaaatccgattccgattaaatcgccgattccgattatggccaaaaatccgatacggttttaaaaccgattacgattatggcccaaaatccgattaattgcgattccgattacgattccgattttttaaaaataattttttcccaaaaattttattcataatcaaaatcataaatttaaagattgtgatgcaaaaataaaagtttgtccacattctcaggcaataaacgttttcagatctgtcacaatcaacccagcggtggagaatattcccagatatttgacatttttgctaaataacaaaaaacttgattatatcggggagaattaatccggcactgctttgtgagaaaaatttaatttcagtcattatgttaaaataagattaaaacattcgtttcagaaaacattttttttcaaaattcattggtattctcgctaaaaaaattccttcaaaaggtcaattcttaggggtgtaataatcggatttcaaggcaaaatccgattacgattatccgattccgattatggcccaaaatccgattaattgcgattccgattacgattacgattccgattcggcacatccctggtaggaagtaaatcaaaattattaataatattaatattagctaatttttttaaaaatcattcaaggctaaaaaatgaaaaaataaa

SEQ ID NO: 79581 - DNA, 757 bp, Heterodera glycines
atggcattggctgtgcggtgccaatccctcaccctcttttggcactcaaaaatgacactcaaatcggaaaaagagctccactcattgagaaaacttttgaaattaaccaaccaaaaattagtttcagtttttcacacaaattactatatttttggaagcaataaaaatgcttcgttttagcattttttgtcaaaaacttcattcaagaacaagatggaattagaattgttcgatttacttgactttcggaattccgattttttggttttattgcatttttattgagaaatttcaaaaaatctcaaaagagtgaaagaatagtgacaaaacgccaaaatagtgaattttcactatttttgtgacgaagctccaaaatagtatttctagtaacatcagaatcgaaaattttcaacgcagaaatgcgttttttgagctcctttcttcaaaacattgagcaaaaaaaaaaatatagttaaatcaccaaaattagcggccctaataattatccacgaaatatttttagccgttttttctttttaccgtcaatgtccgggtaaattcgtgaaaacatgtgttttaacgtgcggcgtttatctccaaaaaaagggttttggagaacgggtgggggtggggtaggtccgggcggtgccgataggcgccggccgggggggaagatttaaatttgagtgaaattgttaacagattttgtcgaaaaatttgtctaaattttacgattctgagacgtttttttaagaaa

SEQ ID NO: 79582 - DNA, 1024 bp, Heterodera glycines
atgagtgaatttgcttttggtcaattaacttttcttcgtccatttatcattttaattcttttttgtgtcggcgttttatctgatacggaaacgaataagcaaacagaaaattccgctccattaagcaggttattttgatcattaaatttttaatttattttccttttgaaaaggaagaaaaaataaataattatattaattaaaactgctaacaatttagagacaattcggctcatttggctcgtgtgctgcaattacggcaaaaccatgaagtaattacgcaccgaaaaagggacgaaaaaagaacaaatgccaaaacaaataatgggaaggcaaaacggtacaaatgttttttggtcgatgacaacgactcggaggaggtaatgacaaacaattaattattcattaaaaaaagaaaattttaactttaaatgccgatttaaatattcgttactgtgtttagaatttgactcaacaaaaaagttattttgccaaattccaagaacgtcaaaggcttcccactgacattttgggtttgtttcgactaattaatgaaaattattccaatttaaaaatgattaattccgcgtaataatcatgccattttcaggttgggaagaaagcccccgtcgatctgctggagctgctggggcacgatatttgtatttttcaaccaaaggcacaacacccgaaccaataattgaggtaagtttgtggactaattacaacaattaagttataattgctattttaatgataaaagtacattttttaatggattaataaatacacgtaaatatttttgtcataaattgcttctttcaagtacattgacgaggacaatctcaaggaggccgaagttggcaccaccgcaccttttgagggcacggccgaattttcaatcggagcattggcacctcaacggacgacgatgagggcgatggcaccaccgaagcagcagaagttgaacatgcaaacagcaattactgctacaacacctgtggtggttaaatgaaaaaataaa

SEQ ID NO: 79583 - DNA, 1621 bp, Heterodera glycines
atggcaccgccaatcaaaaaaaagcaaaagcattcctccgccgaccatcgcctcatttcttcttctgctgcaacaattggtggaaagcaacagcagcaaacgttgggctcagtgatgtcatcttctggaaaacggcaaagtctccgcgtggccatcaaaaagaattgtcgaactttgaggaaaatgtgtgccgaattttctttccatttctaggccaaataatttttggcattttcagttgggtgtgcaacgatgttttgatggatattctcccattttttgaccgtgcccaacttggtctcaaattggcattgctttcgccccgtttcaatgcgttggtggacaaacatttcgacggcaaaagcgaattgacgctttggaatgagattagcattcataacgaggacaatgaaccagaagcgaaactgtctgtgcagatcgatggcaaatttgtgacatttccgttgccggaccattcgatgcccgacaaaatccgctttgagaaccttaaaatcgagtaaatccaaacaaaattcaaaaaatgctaaatgattcattccctttcagttacattgactattccgtcatcacatttctccgtgccaatcagcaaatttttgacaaaggcaccaatttggatttgtatttgtatttgttttacgcccgtaaagccaagaatgtccagccaatttggaatgtaattgctgatgaaatttggcccatttttgcgccaaccattcgcaatttgaatttttttgatgctcatgatcttgaagagttgattcgccacacttcgccgtcaattctcactgatcacaacatcaattcaatcgattccggcaatttgttgcccgatgtgatcgctgatgatggaccaaatgcaactgctggccaagcgctgtcaaaatggttgaacacgccgagaaaagatagaaagccaaagcaattgagttgtcgtgatgcttcagaaccaccaaatatcaaatggatcaacgggttcaaaaaggtgtgtgaaattcaaattctaagatttcggatttttggtctaaaaaaatggtctaattattttatcacgagaaaaaaaaacttgaaatttttttcgaaaaagaggcgctaccaccggcacttttgcccatattttcaataaaatatttgtattaattgccatttgcttttcattttttccattgtttaggcatttctccgtgccatcaccaccacttctgccaactacataattcgacttgaagactttgaaccggcggagaatgcgccatttgaattgacgaacgaacggaccaacgaaatgctgacattggagaaagaagaaaaggatgatgaagagaacgaagatgatgattatgacattgattattggctgttgaagcgatgcccaattgggaagacaattcaatgggaggacgaaaatttgaacaatgtcagctttcgtttcatacgattgggtgagtggcatggcattagcttttgctataataataatcaattttaattgcacttagccgaatttaggcaattgtctccaccaaaagcgggccaaaagaaagcaacaaatcgtctgaaaatgaaacccgggcccagcggacagcggaagaaaaagtga

SEQ ID NO: 79584 - DNA, 570 bp, Heterodera glycines
atgccaaaatggggagacgacgacggcacaatggacggaccaaaattcgaacaacaatttgaacaatgtcagcatttatttgaatggcgcaaattgcatttggtgagtaaaatttgcgtaaaattattaaaaataattcgaattaaaaaatcattatgtgagggcccttcaattaaaatttaattggaaataaaaaatagattttgacatttctttaggccattgttgtccactccggcgacgcgaaaaagcggcagaaaaaggacgtcgaattgcgcggaagtgaaatttaattgagaaatgatcggcttattggggattattgttgtgaatggacaaattgatcgatctgctaatccattgttgatgatgattctttccgacgaaaatattttttattatttgttttcacttttgacattaaatgaatagggctgctcaaatgagggctgaaatccccagaaaattaaccctcgtatttctccaaaatgctgttcaaattcggatctccgcaagggcgtagcgaagggggcgggggcttaggaggctaaagcccaccgaaaccgaaaa

SEQ ID NO: 79585 - DNA, 856 bp, Heterodera glycines
atgttcaatcgcgctttgttctgttccatggaccgctggtacggactgacattgacgccaattcgtatagtcgaagatgaagcacaacaagcattggatgaggtgggttggctgcttctgcggctctattgcagttcacaggaccataaaaaattttttgaaaatttaatgcaccgtaactttttctaaaagcgtccaaattaaacattcttggtatcattcgacagatctaagcgtcctctatcaatgttcaaaatttcaataaattttgttatgtttaaaaaaagttatgaacagaaaacttcaaaaaactggttttataagtatttttgatcattatttttttgaaccgcaatgaaattttttgaaattttgcaaatactaacagaggcttcttacatctatcgaatgataccaagaatatttaatttgagtgatttttgaaaaagttatggtgctttaaagttttgccaaattgttttttgctaaatctctttttcatggtccgatgaactgcatttagagccgcaattaatacactaattgattcaatgaagcccccatttcatcaacagacagatgaactcgcgactgatgactcgtcgcagggaatgaacgcctctaacggaactgaacgcgatgatgatcaatcgagtgacgtgccgatgtgaccctgatcaatttgctcattatacatacatattgtagaaaaaaataacaatgataataattcggcatttgtcctttcacccccaggcactcctttcggcacttattgtacatttactgaacacactcgccaatttcctcattatataagttcgtcttttgtgcttcttctgtgccagaaaataaa

SEQ ID NO: 79586 - DNA, 1068 bp, Heterodera glycines
atggatgccaaattcaaaaaatgggggccaccacccggctgtagtattgttaccatgaaatgtgtaatcaatgctaattggtcgctcgcgttttccagaaaaaagctgccctctcttctgcgccggcttttgccaaagggttcaatgaatgtgcatgaaaaagtgtggaacgccttcccgtactggaaagaggagctgaccaacccggacttcatgaaggacaactttctgatccggatggaaacaatgcttttgagcgatcgtggcaacacaaaaaacgtatgtttgatggagaggatcaatcatcatcatccatcaccaaattgtcgattatttttcgcgtgagcccgagtttttggacaataacttttttcattgtcaaccaaatccaattcaatgttggtatcattcgaaagctgaccatgtttagaattgtatctatgcaattgcttggcgattcgacaattgccaaaaaaaaaatgcaaaaagtcgaattaaaaaaattcttaattacttttttgcagaccataaaatcttttgctttttatcaagctaatagaacatgtgaagggctttcgaatgacaccaagattgttggatttggttgacaatgaaaaaagttatacatttagttcaaaaactcgggcccgcgcgaaaacggctcgcacaaaaacggtctgtcttgtccgcaattttttcaaaatttttcaggcgttcggtctgacgaaggaagcgctgaatgaatgcaagaagatggtacgcattgacatcgccaacgacacagagtttctgagtgcagaggacattcaagaagacagcataccgtccacgttccgttcggtgtgcacaggccgtggtccgttgacgggacagtggcagaccaactgcgagccgttcatgtgcgcttacaaattggtgaccgtcaagttcaaatggctcggcttccaaaccgtggtggagtctttcatccaaaaggtgtgatgagctgatgagagagattcatttgtcgtccaccaatttccaaacgaatgcaccccaaaatttcgccggataaatttaaaaaataaa

SEQ ID NO: 79587 - DNA, 1812 bp, Heterodera glycines
atggcattcggaggccccaaaaaatttgggaaatcggaaaccgaaattccgaggcccaaatacttctcggaagtcggaaatctaaattctgactctaaaaatatcggaaatcgtaagtcggaattccgtgccatccctgatacctaccgtatttactcgcgattagagcccccgggggctctattgttcaacccccctccgaaatggggccatatccgcttttccacctactatgatctgcatacactcagtttgaggatataattttaaagatttacgtttcttaattatgaatgaaataagttaaaaaaattttccggttttcgtttcgtttcgtacgaaaatggttattttttcgttttcgtgcagccctgccacggtgctatgtcgttataaaaaaagccatcaaaaaaggcgctaaaaatatgcatacatttaaaaattcataaaaaatttatagaatagaattcatgcgagcttttcagaatatattaagaaggtgtaattttcccggcgccgcctgcctaaaaattgcgaaataatgcgaaaaatggtaaaataggagcgaaaatttgaaaatcagtgcgttttttcaatgaaattaaaataaaatcgatgaaaataacttattgagaaaattaattacaaaggaattaaatttcattcttttttcgaagcaaaaaaataattggggtttctacagaaaattctttttttttcagttttttgttagtttgtattcttaattattttttcatatctttgatgaacctattcaatgttaagattttaatggttaaaaaattgaatgtcaatctttgtgactagtaattttttcgaattttcaattagttatttttgtcgatggcttatagttttagtaaaacttattgataatagtggaatttttatgaatataatatttttgacagcgcggcgcaaaagtccatttttgctgggcggcgcaaatggagcggcgcaaatatccgcggcgcaagtgtctcatcacgttcagaatatattaagaaggtgtaatacacatgtaaataaaatttgatgcgtttcagagcactttctgaaaaaatatttatgaataattttgcaaaaaataaaataaaataacgaacctcccttaataatttttctgcgcctaacaactaaggtactcacttggccgcttcgcggccccccatgaggaaagggacagaaataaaaccgtaatataaaaatttaatattatgatcaatataattaactgaatgatcttctgtcaaatgactcagctgatgaacatcatggaggactacttcaagtaatccataccaaggacggtatgaaattattttttggtttttttcccattttcaaattcctcccaatgtttttcagtgataaattcattaaaaataccatttaaatttgtaaataatgtttgccatatttaatccttccctttggtgttcaggtggagtcccagttgccggagaagacggagtacgtgatcaaatgtgacatgagtgcgctgcaacgcctcctctacaaacacttgcggaagggacgactgctcattgacagcaaacatgtcagtgaacaattacacgactttttcaatttaattgcattttttcatacaaattttttttcatccttggtgacgggggcgtacatttatgtatttccaattatttaccacctctattgtatttatttgatcgaccacttttgatgttatatatttatttgagtaattaaaacgatttaatttatgttttttgtatatatagtattccacgtaaattacgtcattttgca

SEQ ID NO: 79588 - DNA, 837 bp, Heterodera glycines
aatgtgattccaacttcttcagccagtgaacagatgcaacgaaatctctttgaaatcctctcacaaaatgaatcatttgcattccagcaaattgctggtcaaactcatttttaaatgctttcaaatattatttcatttgccctttttactcattcaaataatttgttcaacaaattctacgaatctctcttctttttctgttcacttgccttcaatttttttttactcaaattttatgattattttccatttcaatttgttactcactcaatttttgttattttttagtccatttttgaaatcattcgcaaatcccaaaagaatatttttttattcatatgcctatcatttgtctttttacaagcaataatacaaaatttgtttgacaattcaattaatcttttgtccattttatgttcagtcggcggcacttgcgagtcgggaaaatgtcctcacgtacaaaactattttaaaactccattattaatcccaaatcctcacataatagcttaaaaaaatgatatttcattggttttttaaaatacatatttatgaaagagatgggaatcttctgagttttcaggaatttaagttattcatcctgtttaactttttttttctaaactcaaaaaattctcggtcgaacggtttcggttaaaaaaccgaagaaaaattttcggtataccgtttcggtttcggtttttttgaatttttttattttttcccaaaaaaaaacaacaaaccatttttatcaatagaaaaagcgaaagatcacctctgagtaaaatggggggggggcggaagtttgggcactaaattaaggatttaaaaaataaa

SEQ ID NO: 79589 - DNA, 2049 bp, Heterodera glycines
atgcacaccacacgcatcgtgatgtcatcaaacttggacaaaaaccttgagaacattcgtcgaattgaccaattcgccagcaaagtgatcggatattccacccacgcggcactgttcaatttcaggttttacatttacatttttgtaaaaaattttctcatattttttgaatggctccgcactttactaaatgagtggaaaattgcggcacaaatgcaaaacttcaataccggataggaaaaaagaaattgcgctttacttttcttgattgattgttacccctaaaaatttttttatcaatttatcgcaaattttcaaaaattccattgccctcactccatgtttttagcaccgagcagaacaaatggctgaagacggaggtggacggcccgctgttcatctacgaacggcttgaccaaccgctgtactcgttggttgtcgtcaatcgccagtcgccccaaaattttgtggagccaatcacggacgggttgaagttgagctatcacccgccttacatttttgtgcatcgcgaagatggtaagaaaaaacaaatttacagcgaaatcctcaaaattgggtgggagggggttggggcaaaaaaatttcaaacattttggatgagggcatcgggggccaggatttcagcccccccccccccccttcggcgactaactttttttcggcgcattttttattggaacagcgggggccagcggtgttgattaaataccgccgggaaattttaaattgatttttcctcaatttttaacagattttgctggtagccaaaaaaaaaattttttttttttgcgcataatttgaccgtattttcgcacgttttcaggctatattcacagtctctgggtgttcggcgaagacgaatgcaaacgagttagtgcatttcattctcggttcatttatgtgcgaaaaatgggtgaccaacgtgcttttcaatgcccaatctttcatttttccccactcattttcagtccccataaccgggcaaaaaaaaaaaaaaaatttttttttgtaaccctatgattttttctgtaactgcccctcaaatttgtttttgacctttagagagtgtaatttttaaattgttataaaacaagcaaacaaataaaatatggccgttccaggctgtttcattaaaaaaaaaatttttttcaaaaaacccaaacaaatttttttttttttgccaggcgtttgacactctgacgaaattgagcatggcgcagaagatgataagtgccggtgccaccaccagcagccccaaaaataacatctccaacaacaacgacaacggtgccgtcgccgctttcgctgccgcaacgccgccgacgaaaattgtcgctgccgccaaaccgtcaacgccgccaccgtcgcagcagcagcagcagcaggcgatccgtgtcagtagcattactgctaccatccgtggtagccacatcaaatcaaacaaggcccaccacgtcggtggcatgacgaccacctgtaagaatttttcggggcggagggaggggtgtggagtaaagttgtgtactccacacgacggttcaaattttctaaaatcaattcttttaaatttcctagtggtaaattgttgggatgcctccgcttgtcactgtgacctcgaaattactgatggccaatgtttgactgtcctttacagaggtattttgtgtaaatataatttcgtcatatataataatataatgtctttttttcagaaggagcagctggttaccgttccgtcttcgctaaacatccgatttttctgaacaaaaaacacggcattttttactttgaaattttgataaaaagtctgcatgagcgactgcttatgggttttacggctaaaaagaaggggattatatgtgaacgggatgcggttttcatgctgtcttcacgcggcacacaacggcgaaacgaaatcgtttcgcagcatgaaaacagtgctttttatgttggcgattttgtctgttgtggcattaatttggcaaccaaccagtttctgtgcaccaaaaatggcgctatcttgggtta

SEQ ID NO: 79590 - DNA, 219 bp, Heterodera glycines
taaaaaaaataatttttaaaattaaaattcttgccacaaaattacctttttgagaaaattttttcatttcttaggagtgctttttgaaattttttttgtcgattcttaggggtgtattttttgaaaaaatttttaggtcgattcttaggggtgtattttttggttttattgcatttttgttaaagaattttccaaaaaatgtcgaaatagtgacaaaat

SEQ ID NO: 79591 - DNA, 1090 bp, Heterodera glycines
atggcaagtggtcgtaaacatatgaccatgactgtattttctgggggtttgtgatctttttaataatggtggagggttcggtgaagaggtcaatgaaaaggttctcacacttgcgtccataccatttggagacatcggttagatgctttatactttttacaaatttaaaatatttaatttggtttagtcggcgtaagcattccgttggacaatgaaacgggcaaacacagaagttttgggtaagttgattcattttaagttgaatgttagtctttgctttttgagatttgtcgaatttgaacttccggaggatgcagcggcagcaattgacaatatgaacgactcggaaatttatgggaaaacaatcagagtgaattttgcacgccctccaaaagtgaatgagcgaagtcaacgaccaatttgggcggatgacgagtggttgaagcagtacggccatgggagtggacagggcgaaccaggagaatgccaaaagtttatttgggcatcaaaattggaataaggttggcattttgactctattgcagcagtttacaccgaccataaatcatttttaaaatatataatccgaattaaatattcgagtccttaattagtctgttaaacttcaaatgatttcgttttgtttcaaaaaggttatgactagaaaacgcaaaaacacttctcaacattttagtccgcaaattttgaatcttgaatgattttttcatctttcctagactatgttttcaacaaagattctttggctctaatgcactttatgagtccaatcaattgacaatcccgggtttttatacaataactttttccatgttcgaacaaaccctatctttttggtatcattcgaaagcacacagtctgacgaagctaaaatatataaaattgcagcgttcaggcaattaccaaaaaagattaacacaaatttcgacgacattcaagactgctttttgttaaaatatgaacacatatttaaccggaaataatgaaaggtgtgtgcttgatcagactttatcttctctatttgttacactatcgattgcttatagaaaattgcataagatatatacaatta

SEQ ID NO: 79592 - DNA, 401 bp, Heterodera glycines
atgcaaacatttttttcgcagaaccattttgctgctgaaggaatacaaatgcaaaaatggcggacagtgcgacgtcgaaaaaggcaaaaaatactataaaaaataaaacatttagtgctttcgaagtcatcaatattttaaatttggttcattttgggcgaagtcattaataattttctataattttccatttgatggttttttgagtaacgatcctgcccaatccagcgatccgataggcttcgggaaaaattttataatgaaatactgcaggttgttagcccttatatttttactgcaaaaatgaaaacgatgaacgcagttacaaaattaacattttcccaaatttattattttacatttcttcacaaattcaatcaaaaagacaaataagaaataaa

SEQ ID NO: 79593 - DNA, 1356 bp, Heterodera glycines
atggccgaacttaaagctattattagccgcttaactgctattgaaaaattaatttcaaccaacaacaacaacaccttggcaaccgaaatgactgcgcagttcagcgccattgcggaacgcctgggtgaaattgagcgcaaaattaacaacaatggcattgtcagcgcggaggagatagaacgaaaaaggagccttgtgctcatcggtcttccggaatcggaggaggaagtgccatcactgcgtgcgaaggatgacgcgaaaacggtggaggaagtgttggaccggctggacgtggaagtgtgcccgcaaatggtctacaggatgggcaggaggattgacgagaagaggaaaggaccgcgcttggtgaaggtggtcctgccggcttcaaccttccaacgttttgcgctgatgcagtgggggcgtcgtcggacggagctgaagaagagacctggatgggagcgtcttctggtcaggccatccctgacgaaggaggagttggaaattgagcgggaacagcgccaaaagaagtggatggaatttggaaagaagaaaacgggggaaaacatcacgacgcgacgcggaggcaatgaaaaaaacttttgaggtcacctccttttttaaattgttatatttcaatgtacgaagtttggcgaacaaattggacaagttaaggtttttgttattagaaaataggtttaaaatcattgctgtatctgagagttggttgagtaacaaaatagaaaacccccaaattttggaaaatctcccctattctataataagatcagatagacttaacaaaaaaggtggcggggttgctttcataatatcgaatttaattccttttgaaattatcaaaactacaaaaaacaaaaattccgatattctttgtgttgacctattttcacctcttaaccacacaaaaatacgttttattttggtctatagacccacctcccatgaaaaacaagaagatttcgaaaaattggtcgaacaactctctgttttagtctcggcttctgaaaaatgcattttgttgggtgattttaattttcctcttttaaaagcaaaagacttagcatccaacattttgaaaaaagaaacaatcaccttgaatcacttttcatttcatttttagagggatataaattaagactaatggtcaactcccctacacggggaaacaatttattagatttattatttacaaacaacgaaaatctattgaataatgttatagttgaacccccatttggtaatagtgaccataatgcaattcaattcagcataaatttacaggttaatagtaatgcttcaaaaaaattttataacttcaaaaaagcaaattatttggaa

SEQ ID NO: 79594 - DNA, 1407 bp, Heterodera glycines
atgactgcccaaattccagaaatatggaaaaagtcaattatttgccctgtcccaaaaattcaaaatccggtaaacccagtcgactttcgtccgatttctctgctatgttctgtttccaaaattttggaagaaaatatagcaggaaaaataaaaaattttgttgaaaaaaataatttgttaccaaattgccaacatggttttcgtaaagcacattctgttaccactcaacttcttgaagtggtggatgattttagttttgctttagaaaataaaaaatcaattgatgtaatttattttgatttggctaaagcattcgacacggttccacataaccggctaatatctaagctaaaaagcattggtataaataattccttattaaaatggattcaaaattacttagaaaaccgaaagtttttcgtcaaaatcgggtctgatttctctgacgaatatccctgtctcagtggtgtgccgcaaggctcaatattgggaccactgttatttcttatttacatttacgatttaccaaaattctgcgaaactgaaaatgttaaaattaaactatttgccgatgatcttaaggcctatcatgttctttcaaatatttccttttctccactccaaaattttattaacaaatttaatcgatactgtaaattaaacggccttaaaatcgcttcaaataaatgtttaactttacatttaggacacaaaaaccaaaaaataaattattttattgatgactttccaattcctaaaaatcccggaaacgaaccagtcagagaccttggcatttattttactaatgatttgaaatgggcacaacatattgaaattatctcgaaaaaagcattacgatctgcttttgctatattaaagtcaatcaaaactggtgatacgaaaatacttgtaaatttgtttaatatttattgcagaccaattttagaattcggatctccaattttcaatccttatttaaaaaaggatatagaaaaattggagaatgttcaaaaaacttttttgagagtaatatttagacgtaacaattatgctgctgatttacctaattatgctgaattgttaaacatttatgatcaaaagtcgcttgagagtcgtaggttaaaaatagacttaaaactttttcatgaaataattttaggtaaaataaatttacaaaataacgaatccttttctttttccaaaaaccctgtaaaaaatgaattcattataagaacagcttattgctcaaccaatgctagatacaattcgttctttattcgaacctctcgtctctatagacttttacctaaagagacgagattactaaatccaaatgagtttgccaaacttcttgaaagatctgatcttaatttgttgatttctttgccaccccaactccaaaagtga

SEQ ID NO: 79595 - DNA, 1132 bp, Heterodera glycines
atggcttccaacaacaaaaattctctgttgctttttctgctcctcatcgtcgcattgcttctcaactatggcttttgtcatcagcaacaagacaacgacagcagcaggtgctgtgattttgatgagcagcaattttgaaatccgaaaaattaaaatacatgcactcccactcaaaaaaatgaaaattaaacacaaaaatccaaggcatggatggggtggaaagcgaccgcaattcgcatgtctcggcgaatatttttttgctccatacgtgtccagggattgcatcattttcgaaatagaaatcccaatttttgtggggtaacctattccaaatacgctacttttttcccatttttgtgcatgtttccgaaaatttgtcggtgtttgaatacgatccccctaattctcaaatttgctgatgataaattcaacttaatgttttccccacattttcagtccaattgagcaagtggacgatggggacgatgacaataaccatggcaaccactctgctatgttcgttttggctgttttgtttctttccatttcattcatcgagaatttgcttagaatagatccttaattttttcggaattggtgtcccgacggaaaaaatatgctgatcacgaatccgagctgggattttgcaaaatcattggttttgctatgcttttcatcatgtaattgtttaatttttatttccttttccttgtcgggacaccaattccgaaggattaccctttcgtttcatgcatctaaagtacaataaaatttgaccagggttgcgacaaaaccggttaattcatttttcagttggtggaccgtgtttcttctgtcagtcggctgtgccatcatttgtgctgtcttaatcaaggggcagagcgagcccgctgagcagaacgccaacaatgaccaaaacgaaggtcagggagacggagaaattgctggcggaggtgttaacctcgacgatattgacatggatttcattgacggagaaattgattaccaagccacttgggggcataacccttttgagcatggaggcggcaatttgttgcagaacctgcaagagcaaaacattgacgagcaagaggaggagaaaggtgagcacttgaagggcttcggagtttaa

SEQ ID NO: 79596 - DNA, 312 bp, Heterodera glycines
atggccgtaactgaagctgagttattttgtgcgctgccgacgactactccggagcaattacacgcgtttggcaattgtaagtttagaagaatgctgtacgactcttaatagacattttctgagtaaaattttagaatatcatttaagactgatcaaaaaaatactctttactttttcattgatttaaaaaaaatctatcttattattttttagttttgagacagtttagccaacatctgcacgatgagcacggcttcactgactagggcaattggtataatcaaaattttttatgggattatttccattgta

SEQ ID NO: 79597 - DNA, 1108 bp, Heterodera glycines
atggcgatggatggcacacccactttcttatctaaccttaattatcggcaattcacattcttatcgaatcgtgggcggatttttggcgccagtgccctccaaaaacactccgcatcccaaagtagttaaagataaatttgtaatttggtttacaacaatagtgttcattaaccattttagcaacatttaatgatgcagaaggtcgaaaggtcgaaccaaagagtcaatcaattaacaaatagattaaataagttctgtcatcaatttacaattaaaaaatacacccagaaaaacataaaggaaagcaaaaatatttggttatttaattgctaaaattcttaaaatatttggttatttaattgctaaaattcttgaaataaattccctgaagcactcatcattaaaagtattgattatctttttcaaaaccgttgcatattttgatcaaaaattcaaatgcgcaaaaggacaaaggaataaaaaattaaatttaattttaaaaaatgacgcatttctagctttatatgttttatcattggacgtattgacatttgataaactttatgtattgcaaagagtcgggattgtttttgcaaaaagagaagaacggaagaaaagagagactgacaggcgacgtacgacggcacaaagcgctgggcaatggcaccgccgagggatgaaagagggatgcgcgataaaaatattttgtgatgagataattatgaacggaaggaaaatttctgtgatggcacattagagtgggagagaagcataaggcacaaataattaagtaattgttatgatagtaatgaaaaaatgggagacgaaacggaatggcaaaactgtcaaagactgtgcaccaaatttgtttccgataaaacaatttcaaaaccaaaacttacactcgtgcacagtccattagacaatcggcaaatacattttgtgaaggggatcaaatggaatctggaaatgactctgtcttagattttcataatctgccccccccctccccttttctcttattccccacaaaaatcagttgaattctccaaaaagcacttttcactcctacaaaaatgtatcataaaaaaattgtttcaaaaataaa

SEQ ID NO: 79598 - DNA, 384 bp, Heterodera glycines
atgcatgccaaattcgtgcaaattgttgccattgcgtgccaatggccagaagcgacgttgaccgatttgaacattctcaaactcagtgaggagaaatgaaaattaaaaaaagaaaattatttttttcttttttagcctttaatttataaaattatttattcatttttattttagttttgaagagcatatgtagccaggttcgttttgtaacccaatggatgattgagaaaaaagttgatttttatccgtgctgaatcgtttagtaatagacatttatgaatattaattatcatcttaacttttttcaggggtaatgaaattttttttaatttgtgcgttaattgagaaacataagagctattaaatggcccaaattgtatttaa

SEQ ID NO: 79599 - DNA, 771 bp, Heterodera glycines
atggggaggaaaagcagaggaaaaaagggcaaaagagaaggcgacgaagagaaagaagaaaaaggagtggaagaagaggaagaaaagagagaagaggaaaaggaaggggaagaagaagaagcagcgaaaggagtgcgagaggcagtaaaagaggacagcgaagagagagagggtggaaaagaggaaaaggaaacggaacgtgaggaggaagaagagggagaagggacaaaagaaaaagatggcattggcacagaaagaaccgaagcaacagctgaaaatcagagggggaaaataaggggagacattaaacaatcagtgatcagagtaattgctgatcaatgccaaagggctaatgggagggaataatgcgaccgaacacactgctgctgcttgaccccattccttctcaaaacaagagtcggcattatgccgtctcatcgcgtcgttcgtctcgtcattttgccaaagttccgtctccccccccccccttttctcttttcattgcgtcctcaccacgtgagtttgtttttcctctccccaatttcgccgttcacttttcagcttttcactgcatgcagtattttggcagggcaattttctccgttggttaatcgaattttttcggggtaaaggcaattgcccctcgagaaaaagggaaaaagggggggggggagacaaaatgagagaaaatgaggagaaatcgaaagtgcaaaaaatataaattattatttaaaagagttaatatgaaatatttactgaaagaaaaataaa

SEQ ID NO: 79600 - DNA, 806 bp, Heterodera glycines
atgccccgctttgaattgcagaatatttgtgcgcttcaaagtcaacatcagttgcgacatttgccgaagagtgaagcgaacgacggaggaaaggaagcggcggaagtgccaatcattgtctacgaagagagtgacaacgagacggagcagcacacgcaccaccaccagcagcagcagcagaagacggtgggccaaccgccgcggacggccgtcgaccgacgcgaggcggcgcgcattgcgtgttgggcgagtccggagctgagttgtgaaggactgtcgctgaaagtgcgcgagacgcagccgcgggggacgacggagggtggggaagcgaggccggaggtcaaagagcggacggagcaatccgagggaaaagcaaaagcccaatttgaggtgtgtgccgcggtgcagacggactgctgctcgtcccccacctcctccacgctttcctcctccgccgttctgctcgtccccgactgtcccgtgccatcgcttccgttgggccccgccctttgcgacggcaccgcccctccggcgctcccttcgcttttcgctccctcccaaaagcctttccttcgccgcgcttccgcgttggcctcactgctcgacccgataaatattggcagcggagaaaagacggaggagcagccgaaacagcggacggagaaggacaatttggggggagagaaagggacgacgcggcgacaacagccgatgatgtcatcgcaagcgaaatggagacacgcggtgcgcaaattgcaaatgaacaagtgagcggaggatggaaaacggacggagagagcaattag

SEQ ID NO: 79601 - DNA, 453 bp, Heterodera glycines
gtgcaaaaggcattggacgcgttggtcgaggggaaactgatcagcgaaattgaacgcgtgggaggcgcgggctttaaagtgttgcgctgtttggagggggccactgcttacgtttttgcctcgaggggctgcaaaaaatgggacaccgccgcacccgaggctttgttactcgctgctggtacatttagaaattatttttcacaacaatctgcacttttcggtggaactttatcggatatgtccggccgactgattaattacggcccctccgtacagttgataaacagcgggggagtgctcgcgaccgccccgggcgtcgaccaccaagtaagtgaaaaggaaacattggggttattagttgttgattttccattcattttcatttctaagagtttcgttgccgccatcccccaacttgtgaaggaatcgctgccagaaacagaaattgttggt

SEQ ID NO: 79602 - DNA, 559 bp, Heterodera glycines
atgggcgaagatctgaaaaggatgacaccgattgggaggacaccacgtctggacaccgcacctgtgcaaccgccacaccgaaatgccctcaccacaggtgacgaaatcgctggacatcgccacgtgggaacagccgtgagggaccccgtcaagggacaactgcgaatggccaaggaaagggacagaacgttacacaaaagaaaaggccaattcattggccaccgaccgaatggacgggctgcgttggctgagcatttccatcaaattcaattggcaacggccacactttgagctgcgcgtcttggccaaccgtgacaaagtgcaaaccgtcagatgcatcaacagagagaccgttgatggggccggaatgtgcctggaggacgtgcaaacagcggcgagtggccaaatgccacactcggacttggccatcacgcgcaccggacagaacggtggacagacgggtgggatgtttgaccaacaaattgacctgcgaacgtatggattaaacaatttgaaaatatacgaagaaatgtaggtaaatggggataccgaaatgcca

SEQ ID NO: 79603 - DNA, 1204 bp, Heterodera glycines
atgataaaagagcttcgagatgaagtgttcggaaagatcgacgagcttcgagatgaaatgaaccaaaaatttggccaaatcaacacgagattggaccgaacagaccaacgactcgaccaaatggacaaacgactcgaccgaatggaccaacgactcgaccaatttgaggtaattttgacagatctaagcttagttgtcggtagttctgcttttgggcttacatttattgttgctgggtttgtttatggacccattgtactttatttctcaatgtttggacagaccatacatttaatctcattgaaacccaattcggggcaggcgcttttggttagcggcgttcgttccccaaaaaatgaccaggattcagtatcgcgtttgaataatttccctcccctccactgatcagcagtatggccctgtgccgccaccgatgccgcttcagtccggccactacagtggtattgaggtatattcccaaattttaattttcgggaggaaacgacgcagaccgcaggttgggaaaacgaactgctccgcttgttttttggcgttttgtcggggccaaaatttgaaaatgcaattccttgaattacaaatacacaattcacagtctacctccgagttttccgagttgcgccagattgggacttctgccgcatttgacacccgccaaaacaccggcagcgaattgcaacgccgccctccatttcttcaccacgtgtccgagaccggcaaccctgtgccaatattggtgcggagcttaactaaaaacctttcctattgataaatttttcaaaaattttcagactaggctgattaactataaatttttgtgatatcagactttcagagttcgatcgggctcaacgctctgttcactcctctttcccatttttattttggcaactgtgttccgtcaatgacgtcgccgatctgcccaaaggacaaagtatatatttggtcgctggtttaattcactacggcttaggcttaattgggccgccccccactctccgtaccccatattcagtttttcaaaaaaaaaaaaaatcaaaatggcgtctattttacaaaatttgtagccgataaattactgtttttgccatttggtcactatttttcaaaaatgataaaatgtgggtatcgcagctttacgttgtacaggtcaggcagtgccgtcaggcaccgtcgggaaaattaa

SEQ ID NO: 79604 - DNA, 1190 bp, Heterodera glycines
atgaaggccaattaccaagtgtccgaattggtcaaatgcgatagtttttccgagttgttaaacagtctcaccaagttcaccctggaatgtctgtccatgtcccatttcttcacaaccaacagcatttactacttgatctctttctggagcaaactcgccggttccctcggttacgcccgtgtcgacgtcgaattggtcatcagttttcttttattttgttcaatttccgttttttcagatttccctttgcattcccaaagtttgcactgctttcattcagtcgagaatcgcattgtgtgaaagtgttgttaggtcagtgaccgttttctcatcccatgcatttatttgcctttcctttttcagacagggcgtcgaagacccattggacgacatgggctcagtgaagcaactcatggaattgtttaccattctgtcgcggaaggactacaagcaaacggtgaaggaattgctggtcaggttcgatgagagtcttggcattcttttcacgcagggcatttctgaagaggttcaaaatgtagaacgaattttggaaatggtttgaagttaaactttttaaggagcaaattatcgcccggaaaaggctgatttggctgattacaatgatggccgctggaataaacgggaaggcgtcttccaacagcagcgaattggacgacgacctttacgacggggaagttgccgcgcgcgtttggaaggtttgtgccggcgtacctaaccattgcaaaagtcaattgacattttgcagacaatgcaattgacaaacggacgattggaacggcaacatccaagcgttatggacatccaattggagttcgcttacatttatctgatggacgaatttcgcaaggcttacatttccgaccaagtgatgcgtgatagtcaagtgtacgaaaagttggcggaactcggcataacggacgactccgaagtgttacgactttatgcccagaaaatgttgggggatttgttgtgcataatgagtgattaacatgcacttttgccttcttagaatcgtcaatttgacttactggggaaaggacgagaagatcctttcgtccactctctctcttctgaatgatctcaccgtcggatacgcaaatgtgcgcagacttttgaagacgaaggaaatccaagaactgctccgaaaccatgctgtgacttgttcctga

SEQ ID NO: 79605 - DNA, 976 bp, Heterodera glycines
atgaagcgaaccaacgcatcaaacatcactccgcctcgcgcaaaacgttcaatggcacctgcactggacctggacccaaacactgttgcactcgcagagcaagaacgacaacgcactttggtgttcattggcctcccggaaagcaatgctattcgcccatcggaacgtgttcaggaagacagggaagccgccacaaaaatcctggaccatcttgaagttgaggcccaaccaaccgccgtctttcgactcggacgttacgacccgcagcgaacaacacgcccgctcaaggtggtcatgccaacaaccacacaccaacacatggcactcggaggatggaagcgcgagcgtgctcgactccgttctctacaaaacctgaaccgcctgttcgtccgcccagcgctgaccaaagaacaactcaaggaagaatatgaagcgcgcttccgaaaacgtcaacaaaaccctgctcccgtggcaacagcaatgcaacctcgccagacaaatgttccgactcccgtcaaagaaaatggaccaaatcagaaggaggccagcgacgacatttccaaaccgccggaagtttttgaccaaacaatcctcgtatgttatgaagcattaaaatcattaccaccaaacgacaaaattgttcaccaaattcaatcactcgaaaaacaataccctcgtcttttcaataaatagttctgtcagacctccaaacatttcctcaaaaaaaatacatttattccagtacttcacatttctcaccaaaatttttcctcaaaaaaaaaaaaaaaatttttttttttctcctacaaccctaaaaaaaaaacaaccacttttccctttgttggaggtctgacttttctaatttctgcttctccattcaaaatttcaattcttttatcactgctttccatttcacctcatttccgccaaaagtgtaagtggcacatgtccttcttttggttatttttatttttga

SEQ ID NO: 79606 - DNA, 1405 bp, Heterodera glycines
atggcatttttcaacaatggcactttgttgtgctactcactaagagactataacaacaattcagttggtaaaatcgttttggttttttaatggctaaagagcttttaaaatctattaaattagagagttgaatttttaaaaatgccggcagctgatgggcgttgaaaattgattgaccggtggtaggtagagccggccctttttcaaaaacccaagtttttgggtgcccccagtccacgttatttcaacaagaaatcacggggcggattgcgatacgcttttgccactttaagtgtaaattaattgaaatttcatttttaaatatttatgttcaaatataaaaatttacaaaaattgcttattaattttcaagtaaataattttttttatgattatcaaataattttgcctttcatttcaccatacaatttattaaactgttaattaaatttaatgtcaaatgctggcaatgaaaacatcgaatagtgcggttagtttttttaaaatttgattttcgatagttttaataacttatcaatagaaagagaagctaattagctaattacttattattaattttgttatttaaaaatatttatagtttttctttatgtgttaagtagaattgggattttaattaagggaaaaattgatttaattggcaagaggtttcgtcagcataataaaatttaatgaaaatatttatttttctttgggaatttgtaggaactttttttttgtaaaatcaatagagtcactataatttttacaataaaataaatatacaaatttttgtttaagaaaacatttaattattttaatgaattgtttaaaaatgaaattattgcaataattctttttaattatatttttggtcgcccaaattactcaaatcgaaacagaaatgaaaaagttggaacaaaagtcatttgaagaaatatttggagaaaaatgggaagaaaaaggagaagaaagattggaagaaaaaagagaaataattaaaaaatattatcaaataaatgataaaattaacccaaatagaaagaaaatacccagaaaataatgcaataaaattgaaagaaaaatagcgaaaaaattgggaacaaatcgaacttatattcaacaatggattaaagaatttggtcttcagaaacaaatactaaaagctacaaatcaaaacatgatgaacaaaagttagaaattgttcaaaagtttattgcaatgaaaaatgaatataagcaaaaaagaaaatattcaagaaaagaatggaaccaaaattatgcagaaatttgtaagaaaattggagttggctatgaaacaattaaaaaatggaagaaacaatttgggatttgccgaaaaataaacacggagaaacaaaatggataaaatgaaattttattggaga

SEQ ID NO: 79607 - DNA, 219 bp, Heterodera glycines
atgtttgctacaccggaatttatggatgccgaagacagtttgatggagatgaaatcgaatcagttcaaaatggacaaaaatgagttcattgccgcggagaaattgatcgacaaggtaagcaaaataacattttaatgatataatgaaaaatgaaattgcttacatttttaggactactacagggactttggcgatatctttgacccggatgtgaagtaa

SEQ ID NO: 79608 - DNA, 1373 bp, Heterodera glycines
tttcgttcaacgccgtctcaaactgttctcaaagcttggatctgctgatgacagtgccttggtcaaacaacaatttgctcaacttccccatcggaatgccttcgtccaatgtctgttcatccgagcttcctgtttcatggagcgcaattgggacggggaccaattggactcggtcagggattgcctcgccattcttctcttctgcccttcgcacaaaaaggcccattctttgctcattaaatgcttgatctctctaaaacaactgccggtaagcattttcaaatcccaaaaagtgacacccaaagaattgggttttgtcgttttttagttggccaatgaatgttttgaacactactgcactttgcaccattttgacgatgagcacacaactgaattgaaacaattgttgggcgacaaaaagcaagaggaaggtaatgaatgggggggattgaattgaaaagatttaatttgtaaaaattggatttgctgccgaatctcttataatccaaaaaagggaaaggaataatttacaggggaaaagctgtggaccccggagtacacaacccaccatcgtgactatgtgcagcgttacaccggccatttgaacataaacacggacatcaaagagtccaattggtttggccccgacgaccaattcattgtggcgggcagcgattgcggctcattgttcatttgggaacggaacagtcagtgcatcgtcaatgcactcaaggtcattttgactgacttggtacttgaaaaatctcactaacaaattttctatgaattagaaaaatcgcactaaattttgtggagaattcaaagaattaggaccccctctcctcacccgaaataagtgtaaaacaattcttaatggtttgtttgacgcgtttagggcgaccattacacagtgaactgttgccaaccacaccctctccgatgcctaatcgcaagttctggcattgacgacgtgatccgtttttgggagcccgcatcggttagaaagggacaataccatttaatatttattcgtcaattaactttagtcgtttcagttttttgaacttttcgttaaataaatgaaaagaatttagggataaatacgtggggagggggggggaacgattgggggaaaatgttcttctaaattcatttgaagaatttttgttgagggtataaactgtagacggactcagcaaacgcactaaatattcgagaaaagggcgtgatttcagactcaactgaaaaaggcaactgatgcgaatttcccagaggacgcggaagatagaaacatcaccgaactgtacgaactgatgagacaaaaccgtcgtgccagaacaccggaattggtatgggagcaactgctcaattcg

SEQ ID NO: 79609 - DNA, 403 bp, Heterodera glycines
atgtccatcgttgccgcttctgtgctggtgatcgtcacgcaatgctgcggctgcgggaaggtgaggccggcatttttgaaatttaacatttgagtctaatgaattttccacttttcagaaagatgctgccgaacaacagatggcgccgactggggaccaaatgcagcagggaagcgtggcaaagcagggctcacaaatgggacagagtgcggcacaaggcggcgcctccaagatgggacagagtgcggcgcaaggctccaccatggcaaattcgcagatgcccggcttgtcgacctacgcaggtgggagagaagggcgtcgattttacttgctttttaaactaaatctttcaattttaggcgttgcacaatcgccaactccaattgaagtctcggcctgggcg

SEQ ID NO: 79610 - DNA, 492 bp, Heterodera glycines
atgaccactccagcaaacgcggcgagggcccggagtgccaaggcgaagctgcgcgatgccaagcggaggagggcggcagttggacgcgcaggatacgtaagttgaacaaacccccaatccaaaaaaacaaacaatgaaatttcccaaatttcagacaagaaaagcgcagcggggcgagcgatgtgccatctgcatgaccaacgtgagcgccatcacgcggacgacgctcggctgcacccatccgttccatcgccgctgcttgtatcgctggatccgctaccacaccaattgccccgtgtgccgctacaacttcacccgcactattccgcgccgtaactaaccgctgtaagatgccatgtgttgtgatcgccatacgatgtcatttgttgtgatcatatttgtatcccattgttaggttatgcgtatgtatttgtacaatggaatgtatgttcttatatgtattctgtatgtatatataatactcgtcagtaa

SEQ ID NO: 79611 - DNA, 709 bp, Heterodera glycines
atggtggtgctgctgctggtagtggtgtctgctgctgcttccgccgctgccgccctttttgctgtcactgtgacgtgtctccgctcggctgtgagttctgcttgcggtggacaacgagtgcccgtttttgttgcttttgtgctcgtgatggctctgctgatccctgctactcctgcaattgttgttgaaataattgttttatcgcagaaatggccaaccatatccaatcccgaaaatacacacaaaggtgagccaaaaggatgcttactacaaattatttgatgacgaaaatgtcacttttaacaatggtgcatgccgtataggtaattaggactcccaattctgctgatttatcagcattttttcttttcaaggtgtcaaagctggtttttgaaaattttcagttgggagcccttcgtataacacacaaatagaagagatagaaaagatcaactttaacacaaacaattttcaatacaataccagctaactaactgtaagtgatggctattttcgctaaatccgccgactcgtcaactaaccgtttccgagaggacgtaaatttgttacaacttgaaatttgagttcgctttgattctttgtccctgaaaacatcaaaaacataaagaagtcagagtagatcaaacgaacgagaaaagaaactcattcaatcaaactaacaatcagattttgctttgttgttaataaa

SEQ ID NO: 79612 - DNA, 960 bp, Heterodera glycines
atggtcgcgaaccctccgccaccaccaccaccgccgccaattccatcgttcagcggcgataccaccactgcatttcttgctgcaaccggcgcgcctgtcgttgcaccaccgccgccgtcgacgcctccgcctccaccgcccccagagaatgaacatgctggggagaataaaggtttgacgcgccatgcaaaaagggggggggggcagagaaaacaaaaacgattacattattaatttcattttagtgggttccgctggctcaccgccgccgcctcctcctccagtgcccgttcctccgccaaaacgttgcagaccgctgtaagtgtgccaagttcttgattttccaatggcacttgtcaatctatgctaaactggtattattgttctaacagttcggtatatgccaggaatatcggttagcaaaaaacctgactctcttgtccaactttttgtcgtaaatcgtccgcctgaattattaaagcattgagccctctctttttctatggaaccccacttttctttttgctcgaccctttttgtttagtgtgctgaaacctcgcgatttgccaacaatctccgagggctggggcatcggaagtgcggataaattccgcattatcgaacaagtgggcgagggcacgtacggccaagtctacaaggccagcgatggacaaaccgggcgaatggtggcgctgaagaaggtgcgcttggagaacgaaaaggagggttttccgatcaccgccgtgcgtgagatcaaaatcctgcggcaattggaccatccgaacattgtcaaattgttggacattgtcaccgatcggacggggccggcaagtgcagaacagtcgccgcagcagcagtcgccgagcatcggcggcgatttgtccgcacaacgcaagcgacgctcgtccacgctgaccaacagcagcactagcgggggtcaaccagcaggtggtggaggtg

SEQ ID NO: 79613 - DNA, 1069 bp, Heterodera glycines
atgccaaaatccgagcgaaaaattggcacggacaataatggacatcaccaaaacaaaatggatgaaattaaacaggaggatgaggaggaggagaaggaggacaatgtaagggatgaaaaattatacaatattaaaaatgtgtgcattttaagacaattaattatcaaaaagggcacgaaaatgggaaagcaaattttacaccaaaatcttatggaaaaatccttgaacaaaaaatgttatttaaatttatttaaaaaaattttggtcactattttatcacttttttgccatttttcgtcactatttagttaacaagggatttttcgtaacttaaaatccacgccttactcaatgaatgttaattattgcagctcgatctgttgaaggcaaaaattttgtctgattttaacaaattggacaatgggaagaggaaatttacgagcggtgctacgctgggatatgtgacaccggtgagtgtagtgaaaagaatttactaagcgattaaaacttataaaaagatgtaacacgaaaaccgcaaaaaatcagaatttttgcatatttttatttatgattatatctatgatttttgaaaagccaataaagcttgttgcgagctttcgaatgataccaagtttgttggtcaacaaagaaaaaagttatggtgctttaaacttagctcaaaatccgattgtgtccggcctaattccgaaccttggataatttcgaacaaaaaatcaaacttaattttcctcttttcgcgtttttggtctaaaatcggtttaaaagatatttattgaagcttctcaatttttcgagttttaaaccggtttaaatgcttttccgcgcccaattttgagctgttctatcgttctcagcgcctaagaaaacctataaaagtgtttatgcgacttttcgttggtaccgtattcgtcaatttttccttttttagtttatttccttacatttaaaccggttttgaaccaaaaatgcgaaactagaaaaattttaaatttcatatttttgttcggattcggaattcgaattgtgtcgaaatggctatcagaataaa

SEQ ID NO: 79614 - DNA, 458 bp, Heterodera glycines
atgtcgcctctccgttttatcattgcctttcttttggtcgttttgtgcgctttttccgcactgataaccgcgcaagaagagagagttgacaatgaacctgctgctctgcgcgccagacgtgagtttttattaagcaattattaattaattacatgccaaatttaaatggacaaacattttaatttaaatcattcgaaaaaaggctttttgaaaattgaaatgaaattcaatttaaaagtgccaacatttcagaatatttatgtaaataattcttttgtctgtttaggcggaatgtacggttcgccgtacggcggcggaatgggcggcggcggaccatggggaggaaatttcggaaagaaatgagaagggagcaaaatgtggggatcaagacgaacagaacaagccatttgattgaatatttgtgaaaatagtaaatataacaattagaaagaaataaa

SEQ ID NO: 79615 - DNA, 667 bp, Heterodera glycines
atgctgaagcggaagcgttatttgccaattgatagttatttggaagcgcttacaattccgttagaacggaaacaaaagcgagaccaattctaccaaaatattcgctcgttctacaaaaggaaatggtgactatttgtgcaaaatagcattgttaattttctgtatttcatctcaggggcttcgatttcaaggcgccttcagcgaacggacaggagctcgacctttttgagatgtacgaagcggtcacttttctcggcggctggcaaaaagtgacagcactgaacagatggagcgaaggtggccactttacacaaatctttctgctgattttgacatttttggtcgatgttcggccaactaataataatttattttactacaaaagcattttttgccccgagtaaattcagccgttagcatttgccaattttagtgctgcaactgctaaagattgatgaaaatattcaaatggctgagcacgccgttcaattcctttacatgcgctttctcagcaaatttgaacagagcgaagcgggcaacgacatcagcgaagagcacgaagcggaactgatcagcggacgcaccaatcgtttcaaaacgtttgcctccctctcacaagcgaactgtgcagagccacccttttctgcaccaaaaggtcggaaaatga

SEQ ID NO: 79616 - DNA, 268 bp, Heterodera glycines
cgtgttttttgccatcgctttctgtggccaatccgtcggtcaaattaggcattattttgggctttgtctttcttccctttccctttgcttattttaccgttttcagctcatccccgatgttgtgaaggcgcgtttggccgggtctctgctcttccatctgatcgaatatccctctctgatcgattccctttctgaccgtgggaatgatcaggcaaaacggaattggccattccaattggacttaaatattcagaaattcgctggctag

SEQ ID NO: 79617 - DNA, 1086 bp, Heterodera glycines
atgtcgataggcatcaggtatggcacggaaagacttccgatttccgacatttttggggtcggaattccgacttcccaaaatttttggggcctcggaatgccatccctgataaggaccgccggaccccctgttcctagttttttgaaaaattgcaccgcaaaaaagtgggtttgaaaagaaaaaaatagttaaatttatgaaccgttaataatttgatttccgatcaactttttaccgtcggatccaatcgaaaaatcttagtcgacccatcagccccttttaatgcatcccgccagcccctaaaaatttatttttcagcattttttgatttttggaaattttttgaatttaattgaaattttttcgaattttccaaaatcccgcaatcccacgcgggattacgggattttggaaattttaaaaaaatttagaattaaattttgaaaatctccaaaaaactaaatatacctggccattttaaaaaagaaattttttagaggctggcggtatacgtgaaaaggggttaatgggttgatcaagatttttaatggtcagagggttggagatagattagccgacaaattgttaatgggatcaatctataaatttaacgatttccctatttattatatttttgaagaattttttatattattttcataaaacttttatgcaactttttcaggcaaacattaatttctggtgattacttactgatcaacgatcagccaaaaaagatcttttacccaaaattgattttatttattgacattatttggcttggcttcatttttaaatgctaaaatggcagtggcattggtgaatttccaaaaaaatattggctaatcttctccaaaccgaggccccaccaatgataacaaaactagtgattcagaaaagttttatattaattaaaattgaattattattaattgggtatccctttattattaatttttcaaatggattagacttggattttccgttaaactgcgcacaaaattggatgtagcaattctaagtcgctagggcacttatgcatattatactgatggcgcgatttggattaaccggaaagggaataaa

SEQ ID NO: 79618 - DNA, 68 bp, Heterodera glycines; identical to SEQ ID NO: 70099

SEQ ID NO: 79619 - DNA, 85 bp, Heterodera glycines
caccacgccgaacccaaacgccagcgctttgccggccgctgctgcgatggcagccgctgcaatcacagcaaagattcaggcgcag

SEQ ID NO: 79620 - DNA, 2172 bp, Heterodera glycines
ttcttttttaaatgaccaggtatatttagttttttagattttcaaaatttaattctaaattttttcgaaatttctaaaatcccgcaatcccgcgcgggatcccgcaaattttaaatgcggaatttatacctgcgggatcccgtcccgcaaaaattttcagtaccaatcccgcagcgggatccgcaaatttgaaatttccggtctctattaattactgaaatttctttgtcaaatgaagtttaaaaaatattatttgatttgctgtcgaattaaaattatgtatacttttatttaaatacttgtatttacaaagtacaaatttttcgtgaaattttattttttttgaaaaattaagaaaattttctatacccggttttaccgggtacccggtgtagaatgttgtaccgaacccggcttttcaatacccggacccgatttttgcccaaatacccgttcccgtctaaccctactctgttcaatatcttgtgactcagttgaccagtcccaaataaacatagacatgcatataaatggtgtgcagttggagaggaaaatcgattccttttttctgaggcatagaaagtattgaagacaaaaaaatgtacatgtcccaaatgtattactaaaaacggatgggatacaagcaggacacagattatcgcaatgctatttgcaacaatttcagcaagcaacttttgttttaataagtgtctgtcggcattttgttaaaatggatgtttacgcgagttatgtgactcaacagaatgggatgaagcagcaaccgcaacaaaatggtaccagcaaattaaaataaatagccaataattgtcacatatttttagcccattatgcgacgagcactccgccatccgtcgattctccgtccgcagccccaaccaccaaatttgtcgctatgcctttgcttcaacaaaccgcccgagtcagtggcataaataattttcttttgcatacaaataatttaaggtttttgttgggcctgggcagcagaaagaagcacaactgatcggacttgggcttaggaaattgcgcacttatgaaaaggaggacttggaacgggcgaagcgttacgcgatggaccaatccgtgaaatatgtgatgctgaaacagcgcgaggcacaccaacagcaggtgatgtgtgatcggacgatgagcccgaccaaaactgacaatgaatgggcattcgttggcattgtgttttgggaattgagtcggtcgaccgttgtgacctggcattatccctccgaccgttgtccaaatgggaaatgaatgctttgtttcccaaagtcattatttgttgcccctcccttcagaatggactccgcaaatggtaagactgacccgctgcagacgaaccattctttcatttgcttaaccattcatttttcaccttttctcccattaagaaggaaattactaaaagggagtgtgatgggacaattcacacaaacaaacaaacacagaaaatcagcagaaattttgtgctctttgtccgacgattgtgcgttattaatgctgtcccccaatttcagcaacaaaagtctccctctacacacaggcgctgtccatcatgtccagggtgtacatcgggtcaatcaacttcgacataggcgaagagcacctgcgccaagtgtttgcaccgtacgggcccatcaaactgatcaacatgtgccgggatccgtccaccggggtgacgggccgaccctcggggaggaacacttggattgtttgtttcgttttttcagaatcacaagggctttgcatttgtcgagtatgaggtgcctgaagcggctcaactcgcacaggaacacatgaacggcaaaatgatgggcggtcggacgataaaagtgtcaccggtgagtcaatcattcaaagagtgcaaaacggaaatgaacttggggtttaacagagggactcccaattttatgagaccgccgaatatatgaaaagaaatacgaaggcacgattaattttgatggttttttgagtaatgtcataacatcatctcaacagattatctgacagaagattaacttctgatcaatgtggaaagaaatagtgttaagaaacgcagaaaattggacagggattaaagaaatggaaaaaagtgattaatgaagagtggaattgccggagacaggtgctagtgcattt

SEQ ID NO: 79621 - DNA, 1585 bp, Heterodera glycines
atgagtggtgaatcgaaagaaaaacaaccggcacagaaaaacccaaaagctgagactggtaaaaaattcactaaaaaaattcattaaatttaaataaattttagaaaacattacactccataaaaataataaaaacttttcaaaacttttctgaaaatacaaagcaaattttttctttttgaacattagattcataaaaataacaaaatttactaaaatttcggatctatgagccctgccgttctgtctgttatcaaacagcagcactcaaattacccttactcgtccggcggagtcgaacccacggcactttcaattccttggtgggctctaaccgactgagctacgggcccaaggagattattattccattcctatatcttggatgctctcattttcaatcattttttggcaatggcaaatacattttgccaaccaaaaaaataacgacacatttttcataaaataaattgaaaattttcagcatcgaccaaattgccactggattatgacttgcatcgtgtggctgcaaaagcggctggcaatgtgtacgcgtggcttccggccgacaaacagcccaaaaagcttgcggacatcaaaccggcggcaccggcggcaccattgccgccagccgattatgacgtggagcgggtggcagcaaaagcggcggaaagcgtttacagttggttgccaaaggagctacagcccgaaatgatgactggtaatgcagcaaatttagaatgcatttctccaattttttggtattaatcgatttccagggggccaaacaattttaatgtccaaattaggagacaaatcctccaatatatttccagaattaaatttttgatcaaattaagagtgaaatgaaccaatcgatttctaggccaaacaatttttgtgccaaattaggagacaaacctctaaaataatttttggggccattcaattttcgtgccaaattatgagacaaatcctccaatctctttataggctaatcagttttttcatcaaactacgagactaatcctccaatctatttcgagacgcatcagttttcctaggcactaagccatttttgcgctcaaaaccaatttttgggcgctagctaacccacttgcctgaaataatttggaaaattccatctaaacaaacggaaatattctaatttaaataaaattttaaaacaatttattatttcagaggatgaacgtgttgaatttacagctgaagttttccaggacatttgaatgtcatcgaatcattttttggtcttcaaatgattcagtttagcgaaggatgacattttattttttattcatttttgtaattgttcaacaattttataagatataaaaaaaggtattttgtttgatattcttttgtgggtcaaattgtacaaaatattttttttgtgctagaaactctctctgattgataagaaaataagtaaaaatgttatttttggacttttgaatgcgagaatatagtcgcaaaaaaagtaaagacctaaaaatccgttccatgaaatatggactaaaaagctcaaaaatagccaaatatggaccaaaataatgactaaaaa

SEQ ID NO: 79622 - DNA, 1187 bp, Heterodera glycines
atgaaagaattaatagggtcatatttttatggtcatccaaaaaatgtaaggacatttaaatgcataaaaattgttcaaacttaaattaattcactccgtgcttgatacgaaaagatagcccaaagattactctattgttctgctaaagaaaattccttaataaaaatgcaataaacccaaaaaatacacccctaagaatcgacctaaaaaaatttcaaaaaatatacccctaataatcgatctaaaaaattttttgaaaaattttctcaaaaattcatccccaaaaattttttttcttgacaaaatttttgatttaaaaagttaaatatttgctaagaaaatattctcatttgcaactgcattcagtaaatatcaaaatttttttcctcaatttttggctgaaaattatatcactatgcccgaaccccgaccccgaacgattttgtcaaccccgaccccgaacttgctgaccacgacaaccccgaaccccgacttttccaaccccgacggtcgggggcccaaccctacttttacataatattttttctgcgcatataggaaaaatgggctcaagaacagcatttcttctacgttaaatgcacatatataaccagggttcgcagatctgaggctttagcctcattttgtggttttttgataggtcaatgaggctaaattttcaaaatgaggctttgaggctttttgtggttttttgagaaattttgagtctttttgaggcttttggggaaaatcctcagaatcttttaaattttgataaattggcataatgtttggcaatttaaagaattttttaaatgaaaatatgctaaaaatatggtcaaaattcttaatttttcccccggcggcgcctatcggcaccgccggaccgtaaaaatccttaatttacaagcaaaaatttgctcaaaatcgcaaaatttggtcatttttcggacaaaatctgttaacaaatcgcattgaaaattacaaaatttttcccggcggcgcctatcggcaccgccggccccccgtgcgctccaaaagttttttgggaaaagcgccgcaaaaaaatcaacttcggtttttcatgcttagaatttcaaaaaatgtttatttcgaaccaaaaattgctcaaattgatcatggacaatcaaaaatataacatttgaacattttaaacgtggttttga

SEQ ID NO: 79623 - DNA, 188 bp, Heterodera glycines
ctggaaaatttgccaggaactgatggatcacttgcggggaaatttcgtgcagtgcgattgcgctttgtgctaaggagaactgattttgagatcgacttttgccacattggatgattttttgtgaagttatttgccaaataatggcgtttatttatttatcgtattgttcaaaatacaattttaaacat

SEQ ID NO: 79624 - DNA, 2750 bp, Heterodera glycines
atgtggcaacttgtggatctggaggaggaggagcggaagcggcaaaaacgcgagcggaaggagcggaagcgggcacggaaggaggcgaaacgtgcgcgaaaagaggcggcggaagcggacgaagggaccgcagaggtggaaatgagagacaaaataaagttgaaaatggcacttggtagattcgaaaatttggcacacaccgaaaaaaaaaattatttacaaaaatttcagacagaaaaacagctgcgcaaacgactgaaaaagaagagtaaaaagcggaaaaaggacaagcaagtttcgcatgagtctttgactccgccgccgacgccagcggaggaaacggcgaaagacaccgccggggcgagccgagcggcggaaaggttcgacatttctttattagtggctatatttcactcataaaaggtgaaactccaaggattttttgtttttatttttgacacaaatcggcagccattatgacaaacagcttttccaatttggtgccataaggatgtcagttctgggcaacgttcgccaaaacccgttttatttcactctttaaaatgctttttcacaacaaaaattgattggttcctctggtgactcaaacaccatttaaatatattcatgtcagcagaacagcttttgtcgccgcgccgaataacgccgccccgcgtcggaccgccgcctcctcagcgacttcgcgctcggtcgctgacatccgcagagacgaggatgccgtcaagcgtcgctcgccgtccattcgtcgaccggcgcctgagcgaattcgacgcccctaccggccgctgcctccgcgtcgcgttagcccacagccgcgcatgccggtgcgacgaaaacgaccgctgctgccctcaaagtcgcagacaatgacccatcgacgtcgcgttgtccgccgctcgttgctgacgccgtcaccaccgcctgctgcacgcccacgcggcgatactctgcggccgttatgcgcgcgctcactgagcccaccaacgccgctaccgccagcgcgtgtgacgcaaatagagcgggcagtttccgtgtcatccgctggtgcgtcgtcggtttcacgcggcagaagcaggtctcgaaggtgcttttgcctagctaatatgccctatttcggcttgggaatttagggaccttttttgccatacaattttcaaaaaataaaaactatttaattttaggtcctccgccgcgtcgtcgacacggcgctcacgttgccgtgggtccagtggcagcggaagcagcagcgcttcctcctcgtccagttcttcttcctccacacgctcgcggcgttcgtccgctgccagcagagcgggacagagcagtgacggcagccgaacgtacagctgtaagttaatggacataaaggggaccattaattgttcagagagataattccctttaagccgacgatagcgataatgagccgaaaaaacgacggactgtccgatcgtacgggcctgatgccaggtgttttgcaatgtttaatttcactttttgacaagccaatttttttagaacatttcctaatttccactgctttcagctcgtggcgaatgtatgagaaggcacgggcagaatttttgcaaaagaaattggcagcgggtggacaggcgagaatttcttgtttgattaagtgacaaaacccatgtgcatttggggagaaaaaagaaccgaatgtgactcattatttgaatcttttttagctgcctgcgcatgtgcgcgacccgaaactcatctccaccctccggcgtccgtacattccaggagcaggacggcgcagcacatacggcttggcaaggacgatcaatggggaaacaacgtctgggacaacgacagcaacaactacgaccattttgggactacgcggacgcgggtcagtgtttaagtcaataagagacattaaaaaccggggggggggcatggatgtggaatttgggacaaaaattttcattcattgtcagtaaaacattcaaatttacagccgtcttcgcggccgtggtggccgagtgaacctccgtttctttactcagcgaccaaaggccgattatttggacaatcgtggacaaattgacaagcgaaaactgttggagattgccaccgaaaatgccaccaaattagccatggtctgacaaaaaaaaaaaaaaaaaaaaactttcattgtaaataatgtcaatttaggaaggaaaattacccaagggggccgaattggtggacacaattaaaatcaaatcagtggaacagttggcaagtatgttagaccataaataaaaaataataatggagtagagacgtatacagaaaaaacctctgtttattaaaaaatccaaaataaaaaaaagaagagaaaaaaataaaaaaaactcgtccgacggtgccgagagggaggcaccgcccgggaaatggaaaatctcggatttatttcttaagaaatatgctaaaaattttagcaccattaattaaatttagcagtaaataaattggtcctttcagcgctctgtaagcaggtggcggatgaggaggccgcccgtccagtgcccttcaccaaatggatcaacccgaacttcccacttggcgtcgccggaggcgcaccacccaagcgaatgcatcgcgccggagggcccgtgggcgatgacgatgactatttgctgttacaaaaagtgtccagcggcagcgaagaggaaggcgacgaggaggagcgattccagcgtaagaagacggcattttga

SEQ ID NO: 79625 - DNA, 848 bp, Heterodera glycines
tcgtcccgtttctcgcgccttttgttctccggccaccgcactttgctttggctcttcggctgctccctctacgccctctattgggccgtgttcgtcaaacccaccgtttacagcagtgtttacttcggctggttcttttttcccattcgtcggctatcgccccgataatcaacacgaggtaaacggacggacaaaagtcgaaaatatgctcgagattgctcttcctttctcatgaatttgataagtctcgacaaaggcctaaaagtgccatctaaaaaggcatttcccttaagttacagttcgctgttcaactgcacactttccacgacattttggtggcgtttctgtgcccgggcatttatctgatctttgccctcgttctttgcgcttcgagttacgattttaacacaatgcaaaaaaaggtgttgatgggtcacagaaattaaaataaataaattaataattgggattgtttccgacctttctgcaagtgtttttggtctctctgatcaacactttgaccggcagtctctacgtgtacatgcaacacaacgacttgcgccagcaatggatgctcactctcgccgaatttgcttggtatgtaaacccaagtgtcttttcaaatttgctaaatcctaattaacttttcaggtttcatgcccacggtccgtccgttttgtcggcttttctttttgaattttaatttttttccacttttcccaaggatttcctccggtcatttatttggcactgaacaaaaccatccgcaaggacagctgctcattgttcatgaaagtgttccagcggcaccgtatcagctcggtgggcgttgttgccgtgtccgcccc

SEQ ID NO: 79626 - DNA, 787 bp, Heterodera glycines
atgtcgccccgttttgggtccaccagtgacatgacagccgagccaatgccgagcagtgcccgctgcaactcgctgatggcaatcagcaacgaagaggacgccgacggggagtcatcgatggcaccgatgtggtcgaacatttgttgggagaagtctaaagaatggggagatgagggcaaggtcgacgcaaatttgagtctattcggtcacaaatttcattaaatcatcacccttttttatttgctgtatttggcgttgtccccctcctcctccgctggcacttccatctccaacaccgccgtcccctttttgatcgcctctcctttcgatgccaaaatctcttcgatgttctttttgccgtccaaatcgctgaaccagcccaaattgtccgcaataatatggtgatttctgcagtgatcgcatcggatcagcacaacgccgttttcataagctgaacgcgagaattgcttaggcccctaaatttggggataatcgaaagggtttgcttatataaagcaaaagccatgcctgtctcgtggaacagactttacacgtaaaaatgattgccaattgcgatttgattcggccgatttcctcctttttcgtctcaattgaagagcaaaaattgcggaaggccgaaaaacttatcaaattttgactatgaattaaaagcggcgacacagaagcaacttgtttggtgtaatttgtaaaaagaagtttataacaacgttgcgatttttgaagtaattgaatggtaaaacgcataaattgtcttgaaacaaataaa

SEQ ID NO: 79627 - DNA, 435 bp, Heterodera glycines
atgtggcagaagaaggccaccacaactcttaagccacgggagaaagccaaagagaaagtgcgaaaaaggtaattatcgtaattagttgaaatgttgttattacatgctaaacgattgccagtgcatttggcactaattaattatcaattgagttaatataaaatattctaaaaatatttgagtaattcttacaaatttttttagctgttaggcgtaaatgtaaaagaaaaatgacgacgcattgtttaattgcccattgcttttcccattggcacgcattctctccaatttggacaatttgctttttcttcaaatacaaaaaggaccaccccacgcattattaaaaatggtttttgccgtccctcccccctccctttctcattttttcccataaactattaaataatcaaaataatttatagaaagaaaatttag

SEQ ID NO: 79628 - DNA, 1204 bp, Heterodera glycines
atggagacaaaagaccaagtggccattcacgaggcgatggagcagcagaccatctccatcaccaaggcgggcattaaggcgactctgaatgcgcgttgctccatcctcgcggcggccaatcccatcggtggcaaatatgaccggtcgcagccgttgcgcaacaacattgctctgtccgcaccgatcatgtcccgcttcgacctgttctttgtcctgctggacaccaacgataatccggtcggtcattttgaaattttcaagtaatttttggccgatggctttaggtggtcgattataacattgcttgtcgtattttggaaaaccatcgtcgggcactgcaccatgaacggtcgaagaaagcggtgtacacaacggacgaaattcgcaaatacataatgttcgcaagatgcttcagaccacacgtgggaataggacaatgataaatttggcttattccggaacagtgctttgattttgttatttttgtcgcgtctttcagctttccgctgaagctgaacgagcattgaaaagtgcgtatttgcgcttgcgcatcaacgacgacggcaacggcacgcgcgtgacagtgcgacaactcgagtcgctggtccgtctttccgaggcgtacgctcgtctaaaatgcgaagcggaggtgcggagagtggggcaaaagagcatttaagcaattaaaaataaacatttatttgaggtgaccgaagagcacgtgaaaaaggcgtacgaattgctctccaaaacgattgtgccgatcagtgcgccgcagatcagcttggacgaggaggacgatgtgccattttaaaattggttgtgcaagcgcataaaccccaaaattcaggctgattttaatgttgcgccccaaccgatggcggacattaccaaccaaacgcagcaggacgaagaacaacaccaaatggacatagacaccacccaatttatgggcgaaaaagacactgaaactgaacagcttggacgacaacgacggactgcgagcgacacagcaaaatcagccggcgctccctctgtctgtgccctttccgttgacggcggcagcgagggactaaaattgtcacatgaccagtacatgcgcattgcgaatatgctggtggtacatatgcgggaggaggaggagcgcaacggggacgagccggaatggccgggcacacgacagtcgcaattggccgaatggtaa

SEQ ID NO: 79629 - DNA, 2056 bp, Heterodera glycines
atgatgttcctgatccgtcactttctcccatgtcattacaatgcggacgaagacgatgccgaatttgaggagggtgccctcgttgagtattgccgatcaaaagttgttcgaccgtcagccgtgctcaaacaaccgccattggttgttcggcgtccttcttccgcggtcaaaggaacacaaaatttgtttcaaaacggttaaaaagcgtttagaaatgaaactatttttataattacagaaaagccgaattcgaaagagaaaacaaacagcagcagaaacaacgaccaatttggaagaaaaacatttgagggcgaacttcgaaacggatggtttatcgatgagaagcaaaaacgacaacagaacgctcgaaggaacacggcaattgaagaagggcaacagccagcgaaggtgggcaaaagccaaccgacgagtggggggaccattcatttgccattaccacacactttcaatcgatgtttattttattttgtcgggtcgaatcgactgacttttgccgataattttgaagcgcattttaagccttacgcttttccaaacatcaaagccattcattggtggaacagagccaattcaatggaaaagtcatatggacataagaaatgagcgaattgaatttggggcagaggccgttgaggaagggagggcagtggcggtgcgaagcatggaattgccaggggacggcgggggaagggaagggacggttccttccgtctgttagtcctctcatttattcagtccttgggactcatttctttgtcagttcgttcttcctctgctttttgaggaatgggcttttggttagtttctgtcaatttttgtcattttgtttgggggggggcttaagcctcgtttcttctcacccttggcattgtttggtgagtgttccaatttttaaactcccaaattggcatggctgtcttttccatcatcggcttcttcttcatctcatcattcattccgtttctctttgtccgttctttttttcactgtttccttagctttcccttcgccgaaatgaatggcaatgccaaaatgtgtgtgtgttagaagaaatgtttgggatttggagcggatgcagaaggtggaatgggggtgaaattggctctttgccccttcggcttttcctttgcttctcggcttttccccctcccccccccactccctttctctctctctctctccctttctctctctccccactccctttctctctctccctctttttctccccctccctttctctctctctctctttctctctctctctctctttctctctttctctctctccctctttttctccccctccctttctctctctctcttctgccgctgttcttcctttttcactccataagtccacatttcttcctttaatctcaattcataatataatagttcttcattttttctcatagttcaaatggactctcaaatattaattttccaaaattgaaagtgtctattttaagtagaaaattccgctcttttccatccaatttaaaattccaataagcataaaatgtgctgttgactgccaatttggcgcaacagaggagactaatttagcgaaaattgcggcttcaatggccattcacacataaaaaaaaattcattttcgggcccaacattaatacataaattgactaaaatggcccttagttttaaatgcgattttggatttgaatgaatttttctgaccttcactaacaaattttatgatttggcgtcgcagatttcaacaggttttacagagattcaactaatcttaatgaatgtttgttgggtttccattcgcttttcttccttttttcccatgtcccccaattcatttccctttccttttcagatcgtttttggtggcaattctacggaaaagaatcgctggcgttcaaacagcagcaccggggctggcatcgcggaacgttccttgttgtcaagcgccggtgacattgcacgtggcagacaaatggcacatgtcattgacattgaggtggaagaagaaaaggggaaggaaacaccacaaaaggagtga

SEQ ID NO: 79630 - DNA, 443 bp, Heterodera glycines
aaaaatcgtgtcatcattttcactgtaattgtcgaactgatttttggagtgtttccatgcttcgtttcaattttgtacaatcaggtaaatcacattttttattaaaagttaaatcaaaatggacaattaacagaaaaattcttaaaaattttattttaataaatattaattttttaaatgtttttttacaaattattcaaagtgaacgtcgtcagttgctttaggtattaaatttgccaattggagccccaaactctggtctgaaaggtgaaattgcgatcacctgttgtgcattcgatggcgcaatgtgtggcatactgtatatgtccgttttactcaagcgtagccatggttcatctaccgttgctaatgccgttactactgtaccaggagcatccaaaaacttgcagaaagcccatgagaatttgccaaaaatctcatga

SEQ ID NO: 79631 - DNA, 311 bp, Heterodera glycines
ttcggcccggatgtgatcgaatgtcggcactgtgcctaccggcgatgggccgatgcgccagggaaaccgaccaacgcgctgaggagccacctgaaaagtaccatatgaatgtgctggcgcggtaccgtacagccataccggagagggacggtgggcatagcaaaactaatgacgaagaaagtagccaaaatggtgggatggacaacaacgacgacgatgaccaacaacgaataatgccaatgccaacagaggagggggcgggacgagaagggggcggagctcaaagcagcagaagcacggacatcgaatga

SEQ ID NO: 79632 - DNA, 1010 bp, Heterodera glycines
atgcaactaaaaggtattgacttaagtttttgtaccttaagacgctacgtgtcaagactaactattgtttctgcgcatacaaataaaaatgatgcttcaaactcgaatgcttcaagccatgaaatgccaaaacatgaacttagatttgaaaagtgcttttcaaaaactttaagaaaaaatgtttttataattggaaatgaatctgcttggagaaaatatgttcaaacaaatgagaataatgaagacatatatatttcttgttcaaaatgtcgttattttcgcgaacaagaaaaaaatgttaatgtcaaatcgatcgtcgcatcagctgttctgcgacagggaacacaacttgttatgttgcagtcaaaccataatgctaactgtaagcccgaaaaattagagaaactggaagcagaacaggttgatagagaacaaagaagagaaaattataaatgtgagtcagaaggcaagattatttggcgcaaaggtttgggaaaagcacgagaatccgacttaaaaacagatattgatccgttagatgaaaattcgatttcgagtaattatccctcttgggtatcagttcgacgtgcttacaatcgtaggagacaacaattacaaggcacagattcgaataatccgtttgatgttcctgaacggttacaattaacaaaattaggatcactcaaacttctgatgggaaaaacaattactgaaacagaatggatgatctatagaaatcgagaaattggaactttgctttttgcatctaaaattcaactagaggctgctagatattgtaaaataatggtagcagacgctacatttgagttagcacctagaggatttagacaaatatggcttaaacatctcaatttgggctgagcgggcgtggcgttgtcggtttccttcatggtctaaaaattttatttagataaatagtcattttttctaaccggtaaaacaaatctcctctaaatttggagtgcgccaaatttgttcgattttggaaa

SEQ ID NO: 79633 - DNA, 210 bp, Heterodera glycines
atgcatccaatcaaaaaatttatatttttgtatcttatactttaccaaagtgtgaaaatcgaacaaaaaccggtacaccgtcgtgctatcctctctgtcttagcaattggaggtattgtcgctcttgttttggtaccaattgtggtcggatcggcggtggttggatatttgatatcctatagcatacatggcgttaatggaaaatgttag

SEQ ID NO: 79634 - DNA, 1354 bp, Heterodera glycines
atggctctgcttaatttatgcattttaagtttatcttgttcatgttcggtgtgtattaattgtttatccaatttatccaatagtaacacttcactgctatatctaatataataataattttattttttacatgcgtaccagatccttttcgaaatggtttatcatgacaaaaggctgctcaagtttatgcttttctattcggcataaaaaattaaaatctttaaattccctcatttttatcgaaatatagcaaatttaattaaaatgaattattaaaatagtttcacattttatatcaaatatcaatttcgacttcaagtacgaaacttgaatgaaattatatatatgttatattgacaaggcaactcatccttaaaaccaatttctcgggaacggctgggcaaaccgggctgaaattttgcaccgaggggtagctcgagacggggcatccgggaaaaatacgaattttccgatccggtggccaactgagtaccggggaccgatttcctgttttttcgtgcagttcggggcccataacttttcttccgaaacataaatcaaaaagtttccgctggtaggaacctaagttgaagtgttgtctaattttcaaaaaaaattccaggcctctacctataataggaagggctgcagaaattggcaacttttcagtaccaactttgtccacttcagtaccgggcgaataactcattagcgtttgaactgagcggggggtggccagcggacttattgtagagttttgtaagcccgattttttcaaatttaaaaaattcgaaaattttcaaaatttctcgagctaggccccctaagaggtttttgggtttttgaattttatgattttttgccgatttttccggggaaaacggagaccactttcaagcaaccgtttttcgagctctatcgattggtaagtttttgaaaaaaattcggtttttttccggaaatagaaaaaatttttggcctgagcgggacatttgagtcccgggcctataactcgtcagggatcggttttagccaaaaattgccttagaacatttttgtagagcattttaaatgctatcgaatggtgtactataagtctggaaaatttcaaaatttttcgagctaggccccctagaaattttcaaatttttttttgtgggccaaaatgggggtgaaaattttttttctggggtattttgaggtgctgaatacgaatataatgtttattttaagttttggaaattttagaattttttaaaaattcgaaaatatttttcaattttttgacccttgggattttgggctaatatttgaaaattcataacaatgtgttgtattggccaattttaatgaa

SEQ ID NO: 79635 - DNA, 707 bp, Heterodera glycines
atgggcgatgacgacgacaacatagatgataatgacggcaatatggatgataacgatgacgatgatttaggcatagatatggatgcaataattagagaattggagatggaagagggaaaggatggagaagacgaaggtttagggctagattatgacgaagatgacctagagggttctgatgatgatcctgcagagaaagaggatgaaccaaaaccaaatgtattagttgcttgcactttaacttttataccaatttattaagaaagcgagagctcctccaaaaaccaaaaccaataaaacaacttcaaaggtgaaacatgaaaactctaaattttattaattaatttccagatagcggccaagaaaggcaaaaagaaggttttggaaagtgaagacgatgacgaagatgacctagagggttctgatgatgatcctgtagagaaggaggatgaacctaaaccaaaggcattagttatttttattttaacttttaaacaaatttattaagaaagtgagagctcctccaaaaaccaaaaccaataaaacaacgtcaaaggtgaaacatgaaaatctaagtttttattaataatttccagatagcggctaagaaaggcaaaaagaaggtttcggaaagtgaagatgactttgaagaggattgggattcgggcgatgattactgggtattggcttggaagaaaagacaataa

SEQ ID NO: 79636 - DNA, 906 bp, Heterodera glycines
atgaaaaaacaattgcacaaattaagaaatgaacaagagtcaaaaattatttcccaggggcaaaattcagttaacaaatgtattagaaataaattatcaaaagttaatgaaattcctacgttaattgatagtgctggaaatatgttttccagtaatgagcaaaaatgcgaaatattagcagaaatatttcaaaaatcttttttagaaaattcagttgttaatggttcactgactcaatcaacacagaataagattaaactttctgacattgaattgaatgctggcataatttggaatatattaagaaagctccccaggcgaaattccacttcaccggataacattccttacattttattaaaaaattgtgctgagccaattacaaaaatattagctgacatatttcgacttgctttggattccggtcaaattccggaaatatggcgaacatcattagtggtaccaattttcaaaaaaggcgaaaaaactgatccattaaattacaggccggtgtcattaaccagcactgtctgtagagtttttgaacgaattttaagtagcaaaattttagaatttctgaacggtataagattttttgataaagaacaatttgggtttttaaaaaataggtcgactacaacccaaatattaaaaacaatggacgatatatataattctctacaaaaggatcaacaaattgacattatctatattgattttgtcaaggcgtttgattctgttctaattgatttattacttcaaaaaatcaaaaagattggaattgaaggaaaatttcataattttttaactatctttttaaaaaatcggagttttaaggttaaattggcgaagaattgtcagacagtttcagaatattttcaggagtgccccagggaagtgtcttag

SEQ ID NO: 79637 - DNA, 1050 bp, Heterodera glycines
atggccaacaaagtgtacgtgaagaaaggcatcagagtgaagaacgcgttcaaaaagaaaattgaggaaaactacggtggacggatggaaacggtggactttgaggacatcgaagggacggcggaggtgggaaattgttttattggcatagtgccaaatcagtcccgaaaaatttttcatatgaaaatttcgagctaaaaaattttactttcataattttacgtgaatcatgtaaagcgctacttaaaatcgttcattttttgaaatttattataaacacagggcgggctttttgtttgtaaaaaacaattttgatagtgtcaagtcgggaaaagcgttcccgggcgttttctgggtctctctctgatcacgaatctgacaccattcatttcgatcaattcaaatctctggccgaattcgaatagaaaagcaaaatttttatcgcttttttgcctcagaaaatcaacaatttcgtggaggaagcgacccatgagaaaatcagcgatttgatcgcgcccgacgctcttgacaaggagagttggtaaaagttttaatttttgtttctttaactctatgacttttcaaaagtgttaatctaatacatagaaatacttttggttggcacacgcaaaaaagtcgccggacaaaacatcgtcgcaaaataactatcaaaaaaacaaaacaaaaccgtggtttactgagaaataaaatttcccttaaatttttttgtttccttgaaattctaaaaaaaaagaatttgtttacttacaattatgcttatcctggtaactcttcggcggcaattttcaaaaattacgaacatttttttattctttgccggcgattttgatggaagaagtaaaaaacaaattgtaattgtctgaaaatgctttctttctttcagcttggtgctgatcaacgcgctctacttcaaaggcgcatgggcgaacaaattcaacaaaaaattcaccaaaaaggcgacattttatgtggacgcgaacaccaaaaaagaggtggcggaaacaaacacattttaataattaggaaaaa

SEQ ID NO: 79638 - DNA, 910 bp, Heterodera glycines
atgatgcatggttcgttctgtgcaaatgtgactttcaaagggaactctacagaaatccaatggtttcaaaaagagattttactgatcgctgttcagatcatggatcacgcgaaaaaatatgtggaaaatgaattggtgagccatttttaacctttactaattgacaatttatgataattttaataacaaaaaaaaatcagtttgtagttataaacagggatgcaaaaaatattcacaaaaatgaccaaaatatgcacctaaatatgcaaataaaattgtcaaatatgtacaaaaacttcaaaattagggggtgaacaaaaatttatttctcataaattttatcggttatttttgtaattgcaaatcaaaaatttctcaagattctcggcagtgaaactcactgttgacccactcgcgcatccatatttggaaataattttaggcctaatcaattttttttcttaagggatattcaaatcggtaaatttttgacgaaaaatggcaaaatatgtatgaaatatgcagaacaacccaatgcatttgcatattttttgtatccctggttataaatgccaaaaacatcattactataaatattaaatactcaaaaaatgataatgttaaaaaatgttttttaaatgtattgaataatgtttgcagaaaataattataaatgttaattatatgataattgtttaacaaaaaacaaaatttcttagtcacaaaaacgggcacggatttaatcaatgaaattgcagtaaaaaaaatctgaacttttctgacatatgctgtaataataaaaaaagaataaatattttttttcattatgcattttgaaattattaaaaatttattacaggaaaaaacatttccgctgattgaaattggattggtcgaaagtaaaaattga

SEQ ID NO: 79639 - DNA, 564 bp, Heterodera glycines
atggccacattgtggaattggtcttcgttcgtgagcggaaaatgccgtcgttcaaaacggtccagaacaacagacattttgccaatgtcgaagtattgtctaaattaaatgccatattaataataaatatttacaatattaagttatggatcgaaaaatgcaataaataaatatgttaaatgaaaatatgcgataaaaactgccaaaatatatggatctaagcccccaaaaatacgataaaagagataaacataataataataatcgagcaaaaatagcaaaaaaaatttccccccccccctcatatactgaaggtatttcgccaaaaactgtctgcggatggtttgagcatcctgatccaagcggaaaagccaatcgtaggcatcgatagctctgccttggtcgacgtaagtgtcgaagcgggttatcacaacatggacaccgttgtagtccaaaacggcaaaacaattctcaggggaacagcgcagtgtgaagtcggtatcattttgcaaatttgtcgacacaaagccttgccgataatatctgcgtaaacacccaaataaa

SEQ ID NO: 79640 - DNA, 688 bp, Heterodera glycines
atggcgaaaatgaaattgatttttaatgtgaatacaaatgacgacagaaaatctaaaatcaattttgaccaattttgcatattaaaaatgtgaattttgatgatcaggaaaaattatatatgttgttttttatttatatttttaaatttaaaagaaaaatttaaatctcggataattcactcccgcacatttggacggaaattggacactaaaaattagacattaatggaaaattggacattatttgatataaataaataaatggagcatattaaaataatatcttttagccaaaccaaaatttttgtttattaatttttaatttattatatttttataagcgtatattgttattattattttaccatcgctataagaaagccatcacttatcattcataaagaaaaaagttttcttttagatagagttcccatttttcgtgcattttttggcacatgacaaatcattgtgcctattgaatgcttgatcaacagaaatcattaattcattaatccatttttcgcgcgaaaagtcaacttgttcctgcatttttgctaattctaaaggctctaaaatcaaatccaaatttgaatggatgcgcgagtgggtcaacagtgagcttcactgccgaaaaccttgagaaattttgatttgcaattgcaaaaacaaccgataaaatttatgagga

SEQ ID NO: 79641 - DNA, 678 bp, Heterodera glycines
atggaggcaatcataaaacatgtccaatatgccgccgtggtaagaccttaatgaatttataatttcaataaatattaccgatttatttttccgattatgcaaattaatgcttgatctcgttttgtggcatttcggaattgtttatcggtaaagataatttaaatatgggtaaattattttaaaaacgatcgtgaaacttgtcatgaattggcggcctatgcaaataaattcgtcctccattttctttaaatcaagaaatggcaacacaaaatgtaccggaacagcaaaacaatggcacggcgaatgggcctaattgatggatggattaaggagatgggacggatgaacggattgacaaagtgtttgattgtgttggcgttttgttttacgccaattattttttggcaatttttttcgttttttaccgtccatggatcagatgctcaccaaactttgcagagatacttaagtcaagagaattaacctatgattaatttatcttcccatttattttgcttaaaaattttataacatttttaattgtgccctattattttaggtttttttaatgaaaatgtaattcctcaaatttttcaagtagtgatcggcagaagcgtaccatattttggaatttttaattattatgcacttgaaaattatgggtgcaaattaattaaa

SEQ ID NO: 79642 - DNA, 199 bp, Heterodera glycines
atgccaaaaatacattttatggccattgatcagcaacgtgttgattgcgcaatttgtctcgatcaaattcctttggagacatttgtcagaccgttgccgtgtaacgtaagataaaatcatataattaaatacatgaaattaatgacgctattttcagcacattttccacaaccagtgcattgaaaactggtatttttaa

SEQ ID NO: 79643 - DNA, 588 bp, Heterodera glycines
gaatacaattgttcggatgaaaccgaatacaactttgtcaaaaatgcttggattgaaattaatcaaaacgatccggcactgagccaattgttagaggcattatttgctacggtcatttcggcaaataaagctttggaatacggtaaaaaataattcgcaggccgaaatttcggaaattttcagacgatgctaacaaaatatctgcgcagcttaatgaactcaaacagagtttggcatatgccgtgtttttcatggcaaagcgtggccaaattccactggaaagcccacgagaggagaaggaaagggagccaaaagaaattttaattggcctaattgacatttataatgagtgtcaattggacgctgataaggtgctaaaaagttgtggagaatgtgggaaaaaaggaaaagaagaaaaatggcaaaaaggaaaagaaaaatatggcaaaaaagaacgacgctttcttgaatttgttgcgcattcattggaaatgaaatgggacgcaaatgcattttcagcaggtggtcagcagcagcaggacgacgatgatggtaattatatgcatttttaaatgattttcaattaaa

SEQ ID NO: 79644 - DNA, 918 bp, Heterodera glycines
atgccacaaatacattttatggccattgatcagcaacgtgttgattgcgcaatttgtctcgatcaaattcctttggagacatttgtcagaccgttgccgtgtaacgtaagataaaatcatataattaaatacatgaaattaatgacgctattttcagcacattttccacaaccagtgcattgaaaactggtatttttaaggcttttcgggtctatgttttcatacatgtgcatatatgaagaaaaatctttttatattggggtgttgtataagttctgtcaccccgaccaaaaatttcattcaaaaatttataaaaaatcaaataataactcaaaattaatcaaaatatgcccaattattctccacaatcttctcccatttttgagaatttaaaaatgatctgtcgattaaattcaagatagttaaactcaaataaactgatcggtctacttaaaaaagtcgccaaattcaaccactgatttcttggccaagaaaaggataaaggtacaaaacaaattatggttttgtagagcaaagttgggactatttgacaagctgaaaaagagtcaccaagaccgacgggttatttttttaaattgtcctgtctgaaaatgggtgctcaaaagtgccaagattcagcacccactttgtacaacattgttctgaaaggacctaataaaatgaaattgatgttttcatgggcaaaccaaacccggagaatccgaatatcgcctcagatttagtcagttgctgttctatgaccctgtactgcttcaacttcttgtcaacgacatggagcagtacaatgccagagaaaattcagagatcaaatctgaggccagatttggattctccggacttgatttggccataaaaactgcttttaataaattccaactgatcaaagcaaagttttga

SEQ ID NO: 79645 - DNA, 574 bp, Heterodera glycines
atgcctgacgcggaaaaaattttgcaacaattggagcaccatttcgtcaacaattggctgctggacaccggaaggattgacgaattgaagcgggtttgttttttcaaaaggtttgccttttctgaattctcatctttagaattatgaagaaaggaagggcgaggatgacacggatgaagaagtggcggaagaaattgatgacgaatgccaaattgatgtaatttaacaaatttggattaaaggatgattttcaaaaaaaagtgaagaaacaaaatgttttatcatttttgtttatttttcagaatatttatttgtcattttacaagtcttcttttgcttaaaattagagtgccacgggaccgggaatttttgccaaaaccgggaccgggacttgccgggacctgagaagccgggaccgggacctagatttttttcgggaccgggaccgcaagaaaaaccgggaaccgggaaattttaaaaattcaaaaaaattttaaaaatttaaaaaaaaattcaaattttaatttatatcaagtgaaaataatacaaattatttggttttttatttaataaa

SEQ ID NO: 79646 - DNA, 1029 bp, Heterodera glycines
atgaattttgatgaacacgggcaaatcaacgtaatgagcagcgagcacgcctactttatgctgaaggcggcgcatttcggcgacatggcctcgttccatcacatccgccatgcgccaacgccggcggcggcaaaacggcttggccgtcacatcatgccgtttgtcgagcaacaatggcacgtcgtccgcttcgaattgatgtgccgtgcgctgcgtgccaagttcgccgttgagcacttgcgcagtgcccttcgaacgacgggctacggccaattggtggaggcgtccagagatgagtattgggccgctggacgcgagatgcacgacgtcggtttaacggctacggccaattggctcgggcagaacgctcttggtggagccctcatgataatccgggaggaagtgcgcacacacccaccgacaccgaacaacctggtgcggcattatgtcgtcgcgcaagcttcggctgaggactacgtcattgtggcggcagcctttgatcatgagcccttctttgttcgcgttggaaacgacatgctgcagggcctgggtttgcagcgcaatctcgccgttggagacacgctagttctggttggctactactggagagcagctttcgaacaagtagcgcagattggtcatccaacgttgccgggctggctccatcagggccaaattgtgcgtcaagcggaggcgcagtcggtacagaatgtcgtcttggtgccatctttcgtcatgccaggagtgatcagggccatcaacaacggcagacatcagggccatcgcattgtttgctcggtgaatgtcctggtacacggtcgcatccatactctaacgaagcgaaacatgaacgaaggcgtaattgagcttttggaagagggccaaaatgtgcaactgcatgtgatggaggtgccggcaggctggtggtgtgctcgaaattacatcctccctccaaatgcgcttcttggcactgggatggaatggcagtcgaacggaggggaagtctttcccctgtggttggagctttga

SEQ ID NO: 79647 - DNA, 982 bp, Heterodera glycines
atggcacccgattttgacccgtccacaatacccaaatcattgccaattaccaataatgggccacctttaattgctgtattatggaccaatgattgggatgctcaacgccgtcgggttctcattagggaaacaaatggtatactatacaaaatttattttaaaaaatggaataatttaaattttgcactttacagaggagacaattttggcaatggcacaaaatgaagtgaatattcaatttcgatatggcaaagagtttgagccaaagtcaatggtgattattacatggatggattcttctgttactgatgaagacgatgaaaatgaggtgatcaatttaaactagagctcggcataaaatcgtggatctcgacctggatttaatggttaagctctagacgtggatttcctggccaaaaaccgaagaaaaccaagatccaggaaaatccagacttgtcatggcctggatccaggtcgattcaatgttttttgacaacatgaaataaaaaaaagtaacacaaaataataaattcgaaaataatacctggaatttttagtttttcatgatttcggcagttttaggaaacgatccatcaccggtttttttcatatttgagttggacctagacccaggaaaatccaggcatggatccaccaggttcaggccgagctctaatttaaatacaattgattaagtcatggagaaaatacaatttattaaagtgttaaaatattttcaaaaaaatttctatttattaaaaataaaaaaaatttgtaagcgttttttatcgcttggaatctggtgacaacggccgtaaattcccccttattttgtttcaaaattttttgaaaaacaccatatttccgatgtttacagctttccgatgcagatgtgttattccaacttgccttaattgttgggaacaatgcatgttttgcgcacaatattttcagcaaattgccgaagagcgtaatggcaatg

SEQ ID NO: 79648 - DNA, 2980 bp, Heterodera glycines
atgcaaaatttttttctctatcggtatgcaaaatttggtgcaacttgtatgcatagaaaaaaagttatatggagagaagtaaatgttgttttttacataattaaaaagaagagatagtacgccaaagtgagagaaattacaaagaaaaagagaaacgacgagatagtactaggcttttctctgcacagtggggcgtacccatagtgctgttggttcatcaaaatcttataaaatttcacttttgtacaagtcccttccgtttatttacctctaccatttttcattattattctcctgtttattttaaaaatttgctgcctcctaaaatgttgtcctcctcttcttcatcgtcctcttcatcattgtcagactttccgcctaataacaacgaacaagaaaacagttcccagcagaagaatgccaacaacgaattgcttgggaaagaggtgccaaaaataattaaatggaggggagggggaagaaatttttttgcgttttctgtacccctccgaaaccggttgaaaacttttcaaactctgacaaaaaattatccaaaggatgtttttcctgtccattcaactacacatctatctttggccagaaatttgccgaaaatatgcctttttggcgtaaaattttgaaaatttaatgccaatggcgccaaaaaatccttgccgggaaagatttcgaaatctgttggccacatttaatgctgaaaacgcgtctttgtccgtgcatttattaatgttttttttccattttttctccaattttttttcctgaaattgcaatttttgcaacttttctcaggtcaaatgcgagtgcgaaggtggccaatgcgtcactgttcgtgtccaattactgctccaatgcaatgctttccgaaagacagtgaaagttagtgccaatgaatgaacaactaattagcaaaaagtttggttggattggattaagaatttctttttttagcagtttataaatggggtaaaaatgaaaaagttgctctatttatgacaatcgcctagatcattggtcctgaaattttttctttaaatttttttctgaaaattcttataacacttatctaggggtgttttgaggcgctgagcacgaatcctgcctccatttagacctatttataacaccggacccgaattcgaacattttaatttttttttataaccaaaaatcatcgattgccttatttattgcggttgcatcaaggactaaaaaagcctgggttttcaaattactttaagtctcagcttttctaatacttggcaatgtttttttctttaatttttgactaatagacaaccttttggactaccaaattgtgtcaacaaatgcaaaatatttgactattttcccacttggacttgggttccggcgtttgaccttgattttatgcacaaaaatccaggaaaagaaaatccagtctaaaaacctattctattttttttacaatttatatgaaaatctaaatcatgtttttcaaaaaaaaaattcgtttttttaaattttcggaggggggcaaataaaaatgacctggatttagggcccaattctttataatgcaacaaattcttccgtttgtttccttttcgaattacaattgctttgttttcttcagattttgggccttttgcccgaggcattgccggacgaatttgtgttcccagtgagaagcatttcggtgcacacctttgaaaagatggtccaatggatggagcatcgcgatggtgggtacccacccctggaggggaaaataagattaaaattcccgaaattttttaaagaaaatgggcatttttttaaatttatacaaaaaaagaatgggtagcccacgggacgacttgaaggaaaatttgtgtcaaagggtggcaaccgaaaaaacgaacttttttgcattaacgttaatttttcatgccatttttaccaccattcttatttttttaacattttgtttttttcaggaaagccagagccaatcgttgaaagggtttgtggaatatgcaaaaatacatttgaaaatttaagaaaaaaaaacttttgtttttgcttttcgaatttttagccaaaaataacttaagaaaatcgtaacaattccgaacctcgaattcgaattccagcagaaatctcaaatttaattaaaacatggaaattattactgaaaattctctatagcaatgaataagcactaagcaaatctcaattcgaaaatgtgaatttcgaaaaatcaacttttaaatttttcgttcgaattcggtcttatgggtactgaattagccgaaattgactcattatcaccaaaacaccccggggagctttacttttcatgtctttaaaaaaatttgtcctgaaaagagtccacaatagactggtattaccatgaaattttgtttaaattcgaattaaattaaaaagtatttatttccccgtttattttttgcaggaccctctcaccggcacccaaaaatggcaagtgttcgacgagtttgacaaatcctttttcaaggtcgtcgattttgcattaaaaaatgccacttttcgccctaatttccaaattcagattgagttcgctgagttgaaaatgcttttgaatgcgagtcatttcctggacctcaattccctggtaaataataaatccccactcgtcgtgtccctcaaacaaattttacaaaagaaaaaaaaattttggaaattttttcgtaagaaaatttggcgctatttaaaaagagtacccttttgaaattttttttcacttttttttggtcaatttttttttttttgtttttttgacacataatgctaatattaagtattaacagcataattatggcgaataaaaaatatattcacgatttttttgtcaatttttaactagcgctaaattttcttttaaaatgtttttttcagtttattaaatagtatgcaatacgttccatgttaaaaaaacaaattctgcataaaaaataaa

SEQ ID NO: 79649 - DNA, 321 bp, Heterodera glycines
atggccaaggcgaaacacgcccgatgggccaagaaaagtgagtttttccattggtttatcgtaaaatctctaattttccaatttttagccgctccccagcccgacaccgatgccgaaatgccacaaagggccgtcgacatcagaggcaacggcgcaggacaacgacggacaaccatcatcaactccaacaccggtgacaccgctggaaatggacgtgccgtcggtggagatgatgggaatcggtgtgtcattcccttcaacgcctgccgacgaagaccaacaaattcaaccaatgccgtcaacatccacggcacgctgtga

SEQ ID NO: 79650 - DNA, 1016 bp, Heterodera glycines
  unsure (1)..(1016): unsure at all n locations
atgcgcaacatgatggcatccgtgtaagtaaatttatttataattctaaaaataatggaaaattaattacgttttttataaattataatttattttgaaattttaagagtgatattttattttaaaataaaaattaaaatacgcatttcattaattagccttttgactcatgcattcattgtgattgccgacaccgctcctgtgcaaaaaacaatgattgagcagtttattgccggtatgtgaaataaaaataaatttcgaaattgataatttaatttataaaaaacgtcattttcaatttggttaaaaagctctttaaaatttgtcatctttaattaaatttaatttaaattatgaaaatttaaattaagaaattttttaacttgcagagattggctcctcaattagtggcgtcaacgagactgaatttgcacgagcggctggacttggacagcacagtgccgaaaaacgcgagtctgacaccattggggatgaactgccgaaagtgatgaaaaagggctcttcgctggaagatcagcttgaagagcttgggcaagacgatgaggaggaggatgaggaggaggacgaagaagagagttaaacactccaaaattaattaagcctataaatctaattacggtaatttccgttttttagaaagcaattaaggattccaattacgcattttctcagatggaaatttatcgtaattacataaagctcctattgattaagcattaatttttgtatcagataattatttagttgagtttatgggccgtaagaagcgagagaatgccgacgatgccaccgttaaaaacatcacactgatgaaccaagaaattttgaaggcgatgatgaaaatctaccaanaaattattnnnaanntctnaaatanacaaaaattttccaatttnctnattnnnatttnnanaaatnaattaatntnnntttccnaaattttaaatnataatttaaattcttagatgtaactgtttcaaacaagaaaaaataaa

SEQ ID NO: 79651 - DNA, 165 bp, Heterodera glycines
atgcattgttttgaaggcaaaaagtaaatcttttttataaattaccatacattccagtggattattccgcctggacatctttcctattcattttcgggttttaataaataaaatattatgaattgtagcaaatttaaatgaaattccacaactctttcaaattaa

SEQ ID NO: 79652 - DNA, 1783 bp, Heterodera glycines
atggtcttcagttttgccacttcgtatgggggttttcaatgctccgttttagaaaatgccgactccgacgaggtctttccgtcctcctccgatgccgtcgatgggttgtcgtcggctgctcaaacagtcgcttcgttgcgcgacagagttttttccgccatttccgaaacttatggacagtggtcgcaaacaataggagcttatttccaagaggacgatttggaggaggacgatgacacggaggactacgaaccgccggttctgctgaagcagccggtccgcgtcggaccccaattccaagttggtggtgtggtggagaggagggggtattatttggacagaaatcggctctattgcattcacataaccataaatgatttggcaactttaatgcgcaccattttttagaagcatccaaatttaacatttttggtaccattctatagcctcaagtcatctactaatctgataattttcgttctttgccaaaaagatggtcaaaaatgttaagaaaaaaaaaagttttttgaagtttactggtcataacttttttgaaatataacgaaattctttgaattttataggctaatagagaaggcttattgtttgagctaaaaaattcttataactttgctctaaagcaaccagactttttttaacccttgatatttctctactagcctgcaaaattccaaagaaaatttgtttactttcaataaagttatgtccaaaaatgttcgagaaacaaggtttttttattagttttagtcctatcttttttaaaagttaatgttttgttgctgtggaataaagttgtacagctaacaaataagttaccccctaaatctggaattatatgatttcttttttttcttccattttcttttataggtcactgaacttccgaatcaatcgatggaaacccaaccattggacgagttgtccgagaaactttggtgcccgtcgactgatcgttgtccaaatgcatttatagacgcttatctgactaacttcgcgcaaataaaggccgtgaagaagccgtgccggaatccttctgcgccaccgacgactccgctcgctgatgttcggccagcaaatgtgccggatgacgaagacgcacttttggcattaatgaaagtcagacaaaaatggctaattgtaagaaaacctattttttatatttaagcacaattatgatccaaaggcagcaaaagacagttttatgtgttccgacaaaacttcacaggctttcgagagtgccaatgcgccgaaacgaacgcagccgacgcggccattggtgtggacggacgaggagtgcgagcagttcgagagggggatgaacaaacactacaagtgcttttggaaaatccaacgtgattttgtatggttttgattttaaacagtcgaacatgaaaaataaaaagatggtgggcttgggagaaataattctacaaattttgttttaaatctaagaaaatttcaagcatagggcgggctctatttgattttgctccaaccctaattactttggtgcttttttaaattaggcataaattagcatttagtttactatttatattaatttaattttactcaaattgtccatttttgaaaacggcaatgagtgttttttacattttaatcggttcttttttagctgccgtgtcggacagtgggcgaattggtcacattttactacagttggaagaaatcggagcgctacgatttgtggaaagcggaaaaatgccggagagagcagcaagtggacgcgagaacaacgtaa

SEQ ID NO: 79653 - DNA, 58 bp, Heterodera glycines
atggctgatgccgatgctcaaagtgactatgaggaggaagaagaagatgacgacgaag

SEQ ID NO: 79654 - DNA, 1361 bp, Heterodera glycines
atgcgtgtgagttacgaatcgatgcatgccgaggcatttttgacggcattggtaaacacgcggcagaccggacgaagttatgtgggagagttcgaagttgccaattactccaatcatgccaatgatatgtgagcagaaaacagggggaaagggcgacggaacgctttttaggtattttttcattgggttgcaccaaattccgatggaccgactcgacctgcgattgatggattggtattacccgcaaatgatcaaaaacttcgtgaaaggaaaagcgcccgacattggcaagtaaagagaaaaaaaagaggataaaatttcattttaatagggtggaaaccccaaaattggaacggacgcaattactttcgcatcactttcaatgtcagcgacaacggcactctgacggattggccacacggagtggacggataccaggcaattaaggagcacgaaaacgcaatatgaaattggcaccaacgaattttcaaaacttaatatttcattccgtcggaggtgccaattgaccgttcccttttcgtcccgcggatccatcggatgaaaagggaattgacccgactttgacgtcccattttcagtaaatgcttaataactctgtgcttcaggacgtggctgggcttgacttttggcttcacgaactgccccttgtggaacagaacgcaacgcgagagacggaggaggaaaaggaggaggaggagcagacttggcaaagtgtgtttgtgccgagaagatggcaggaggacgggaaaagaacggagcggtggaacgagagcatgaaccactctcgacttgccatgtccgccctgatggcccatggcacattcatggcgaaaccgttgcccgaccaaatggtcggcatgccaatggacgacgatggcacggaaggagcggatgaggaaaagggcacaagtgacaatggcaaattgctatctggtggtggcgaattgcgcagagtttggaccgccttttggctcgcattgtccgccattgttctgcttgcagttgcggtaatgactcatcaattaacacttatttcttttaattaattgaaaattgctaaaaatggcgtaactttttcagtttttatttttctttgttttttttttgttaatttattttcttcttcatttgtcagttgcttctgttaatggtcaaaaggcgcagaaattatccttatgcatattcttccaacaattccaccggggacagcgaattttgcacggaaaagtcgcgaatttatgtggcaaatgatacgaacgcaatgcgatactcgtaaatgatgaatcaattaacaaatggaaaaggcatttcggatgttttaaaaatatttattaaataaa

SEQ ID NO: 79655 - DNA, 380 bp, Heterodera glycines
atgatgctaggacgaagtgacaaaagtatcaatgttcgtaatatttaaatttaattatgattttaattttatttacagacagaaaatgattttcgattaattggcgttttcaatggaattgctattcgaatttaaacatagtaagctctaaaatgcccgggcacggcctccacagacagtcgaccaaaagtgatgacagaccttccattcggaagcgtagccattgccagacccagtcgttgaacttgggcagataaagcgtcaattttggcataaagaccgctcagatttggtgtcagatgattctcgaattctgttgccgacatttgccaattggggtataaattccggtcacttagtaagttaattccgggaataaa

SEQ ID NO: 79656 - DNA, 125 bp, Heterodera glycines
atgtcggcaacagaattcgagaatcatctgacaccaaatctgagcggtctttatgccaaaattgacgctttatctgcccaagttcaacgactgggtctggcaatggctacgcttccgaatggaag

SEQ ID NO: 79657 - DNA, 631 bp, Heterodera glycines
atgactttggtgtcgggatttgtcgaggcatttgaatttgtaagttggcccaaaatatttttggaaccatgaacatgtcgaactcgcccagcatttgtcgtgcgtttcacagcatctgatttgggagtggaaatggacgtcaattggacgatacagagttatttttttcaaaaaaaaatattttgaaaaatttaaactgatttaaaaattccaaaacttgtcaatttcgtcaacggtttcacccgacccgccgacaccgcacctaaaaaacattagaaagatgatgatgatattataattaatagttgaaattaaaataattttaactttttttaaggtttaagaaggtcacaattattaattgatattacaattaaggctctattgcactctttatgagtccaaccaattaaccaaacctggtttttaatcattcgaaagcacaaagtctaaagaactaaaatatataaaatctctgcgtttaggcaattaccaaaatttgattaattaattaattaattgttgattattttcgtctgtaactttctttaaatgttagcattcccttactttctctcgtattattaccttatttcagactttgtgctttctaatgattccaaaaacatag

SEQ ID NO: 79658 - DNA, 606 bp, Heterodera glycines
atgtttaagctgggcttcggcttaatctcaaatttggcatccacctgcacagtgttggactcgctttgctgtgccatttatttcacgctggcgtttgtgccgcccggctggcttaaaaggaatgcaaatgccactgccattggtggcaccacaaatgctcaacttagagaaccaaatcaacagcagcagaatcggactcatcgaatcccttctttcaacaacacagtagggccgggaacaaatcagccgaaccgatactgtaacggaatggtaccagttgttacggtaggagcaagaatttgaagaagagagtctcagcagatgagtaattgatcattcttcgaaaaaaattaattattttcttttgcaatttttcggaaaaagaacaaaaacttaccttttcaaaaaaattaaacaattcatttatgtttattaattaaaaattctattgttttccttttagaatcattttacactataaaaactattaattaaaattttattagttaaatccaaatgaacacttaaattatttcaacttgttgggtaagcaatttttaaaacataccgaataatttcattgtaacacgccaatggggtaaaaaa

SEQ ID NO: 79659 - DNA, 537 bp, Heterodera glycines
atgccaatgtttgtcataagaatctcgaaatcattgacgacaaaagttggactgtccatcacaagggaaaggattatggtattttcgaaatttgttattaatcattttttttcctcaaaagattggtcttccgtctttgcaaaacatccgattttgctggataataattcgtccaacattttttactatgaaatttcggtaaaaaataaaaaagggtaagaaactttatttttgagaccaaattatcagaaaattaaattattattataattattaatacttaatcctttattattaatttttcagttgggtcttcttcggattcgccttcaaacagcatataaaattggattggataattgaaaatattggcacttatgcatatgaaaatgatggcgaaatttggattaataaacaaagaaagggaataaatgccgaacattctaacggtgttggtgataccgtaggaattggcgtcaattcgccactcgcagatcatttcacaaaaaatgaacttcgtttgggttggtaaataaa

SEQ ID NO: 79660 - DNA, 692 bp, Heterodera glycines
atgtcaatttcgaacaattcaataaatgatggagatgatttgacgccagcagaaaatgagggtaaatgtttagaaaagggaaaattgtagaaaaattgaaatttagaatgtgaaattaaataaataaaattcaacatttaattactgtatttattgaattagagcccccaggggcgctattgttcagcccccctcaaaaaggggccttgattttaggaggacactaactcagagggtggctataattcaggggggggggggctctaattcagtaaattcggtttatattttcagaagtgaatggcgatgcaattagtttggacaacgatggtcaattcgatgggaaaaacagcaaattgatcactgatcgacaacagcttaaggtgaggggaaggaaaagttgaaacaatttggagaaatatttgaatttaatggaacaaaagtacttttgttgtaatttaaattcaggaatttcgtgaaaagattgccaaaatggaaatggaattgaaaatggccaaattggaactcgaaaatgtgaggagttttgccataaaatttggaaaaagaacaaaagttaaaacagcagcaggaactgatgggcgagcagaaggaatttgaggaaaaaactgaattggagaaacagcaacacgaaactacgaccaagggcgaggaagttttaagcgaataataaa

SEQ ID NO: 79661 - DNA, 856 bp, Heterodera glycines
atgagcagccgtcgtccatcacccaaagcatcgacaagtagagctcgatcagagcatgaagtaattgaaatcccgggctttttgcaaatttccaacccaaaaattttttgacattaaatattataatatttcaattctaaatttgtactcaaattttcttgtaattattattttttcagcgcgctcgttctcgctcccgacatgaacgaaggggaatgtttgaaattgttcggcaaggaatgtggtcaaaaattgtcgtcactttgcgaagtatgctgccatcgccaccaatattggaacgtgaatcggtctctaatttggcatttaaaattgaaataaaaaatggatttgataatttaggtttatgacaatcacgcgcaaccatttcgtggaatggccttgattataaataattacatcttccccgatgacagacgagaaggaacaaacgttgatagtgtcaacttgcaggaattatttcagcaattcggctacagagttcaaatttaagaaattaattccaatgatttataatagatttttattattttagttttttttcaacgcatgtggaggacgtaagtgaaagcaaataaatcaaattatttcatttttgagttgttttttaagcaaatgaagaatatggagcctataccggaagcaggacccttgcaaaaccggcaaccggacaaagcagtgatagtgctgactctactgttgggtaaattggactaagtttgagtttgcggtgtagcccctctattgaatcagtcccccgccctccccctgatcagttccctttgattttttaaatccaagttagaaatttttcaaaaaagcttcgattttattttaa

SEQ ID NO: 79662 - DNA, 1220 bp, Heterodera glycines
attctgcatatttctatgagcagccgtcgtccatcacccaaagcatcgacaagtagagctcgatcagagcatgaagtaattgaaatcccgggctttttgcaaatttccaacccaaaaattttttgacattaaatattataatatttcaattctaaatttgtactcaaattttcttgtaattattattttttcagcgcgctcgttctcgctcccgacatgaacgaaggggaatgtttgaaattgttcggcaaggaatgtggtcaaaaattgtcgtcactttgcgaagtatgctgccatcgccaccaatattggaacgtgaatcggtctctaatttggcatttaaaattgaaataaaaaatggatttgataatttaggtttatgacaatcacgcgcaaccatttcgtggaatggccttgattataaataattacatcttccccgatgacagacgagaaggaacaaacgttgatagtgtcaacttgcaggaattatttcagcaattcggctacagagttcaaatttaagaaattaattccaatgatttataatagatttttattattttagttttttttcaacgcatgtggaagacgtaagtgaaagcaaataaatcaaaattatttcatttttgagttgttttttaagcaaatgaagaatatggagcctataccggaagcaggacccttgcaaaaccggcaaccggacaaagcagtgatagtgctgactctactgttgggtaaattggactaagtttgagtttgcggtgtagcccctctattgaatcagtcccccgccctccccctgatcagttccctttgattttttaaatccaagttagaaatttttcaaaaaagcttcgattttattttaaataaattaaagtcaaggttttttggaaaatttgagaaattatttcttcataaaatttataaattcgctgaaattttgccctttcaaaatctttttttgctgatgttgctttattaggctacagagttcaaatttaagaaattaattccaatgatttataatagatttttattattttagttttttttcaacgcatgtggaggacgtaagtgaaagcaaataaatcaaaattatttcatttttgagttgttttttaagcaaatgaagaatatggagcctataccggaagcaggacccttgcaaaaccggcaaccggacaaagcagtgatagtgctgactctactgttgg

SEQ ID NO: 79663 - DNA, 667 bp, Heterodera glycines
atgaagcgctcaaaaagaaattcgtcaaatacaaaaacgaaaaaaccccgaatttctaaaaactttgatcaccatgaaggaattaaaccatgcattaaaaaaatcgaagaatatacaactaatagtaagaagtttcgattattgcggtcaaaatcaaagtttgtagtggaaaatatagagaaatgcccaaacccaacaatagaattagaaaattgtataaagacatcaattgatgaagccattgctgacgctaaaaggaaattgggtggagcagacaaagctggagttataatttcatcagaaatgttagagcaaggtgatatcattgtaccaataagaccaattaattcaaatattgcagaagcagtctttaaccaatttattaaagtggaacaaagtttatcaacaaaaaatattaatctttatggatcaccatttataattactgtaactgtcctgaacattaatgatttgagaaaaaataaataaatatataatcttaattttattactattcgaaattattattattatttttttgtttatctaaaagtctttgtagtgtttatgaattaaaaaatttttaatttaaaaatttttttttaactaaattaagtcgccagaatatgagtagttaattatttttaaaatataatttgtaaataaa

SEQ ID NO: 79664 - DNA, 350 bp, Heterodera glycines
  unsure (1)..(350): unsure at all n locations
atgtcaggcgagggatctgacttcaacccagcttttttcacggtggaggaaaatgctcaataccaaaccattctcgagcgtttgcgttcttttgaagctgcagtttgcagccaatttcgaaagcttgaaagttctctgaatggaagtgaacgagccacaaaggaccaattgagccgtctcgagtcatcgctacaaaatttggacgagaatgaagagatggatgaattcgagactaaggagaaaattttcaaattggaagagaaactggaggagacacataacaaattcgaagttcttanagctaatgtgtctgaaaacttaaaggaatgttttgagaaattgatactcag

SEQ ID NO: 79665 - DNA, 474 bp, Heterodera glycines
atggcaaatccgacggttcagcaattgatggacatggttaagcaactgcttgaagcacaacaaaatgcgccgcaagcaggccagcaaccctccaatgtgccgtctctaccgaatgtggaaaacttcgaattcggagagcaaagcaccgacatcgaggactggctgcagcaattcgactttgctcttgactgtgccgcaccaaatttgcaggatgtgctgaaggtgaagcttctcatgacgaagctcagcaaggaagcgtttgccgaatacaaaaagtcctgcatgccgaaaaatgtgacagacttcgacttcgcgaagactgtggagcagctgaagagtttgtttgccaggcctcagtccatttggattgacagatatgactgcctgcgtgcatccaaactggaagacaaggaattcagagcatttgtgaaccgacacaaaaggctgttaagggatttcaactcaagaagctga

SEQ ID NO: 79666 - DNA, 102 bp, Heterodera glycines; identical to SEQ ID NO: 51410

SEQ ID NO: 79667 - DNA, 606 bp, Heterodera glycines
gtcggaataaaacatcattcccctgcttgtctactgtttgtcccaatttctattttgccaaaattttttgccgggccgaatttgcctctgtttggtcccgacaagtggtgcaacggccgggaacctctgcactgatgaatgcttgtgatcagcgggtggcagacgctggtacaagggcgacaggacggagaagtcagtctggtcaactgatcgctgtccaccgccgcggagcggatcttcacaagcaacaagggatcagcctggtcaactgatcacctcacagattttacgattaaccaaaatcaaccgcccgcctttctcagcacagacaacccggaatgaggcataataaataaaacaacaacatacaggcagacttgcagcaactgaaccccccgacaactttgctgtggggagtgtcgcgactcacgtcacgagaaataaaatggaaatgataaattttataagcatgatgcaatttcattaaaaatgggaaaaaccttaatttaattagaaatgttccccctcttcgtcgttctattcaaaaaatatttgtttgtttacattcaattcttattcatttctcacacaaaaatgtattaatca

SEQ ID NO: 79668 - DNA, 576 bp, Heterodera glycines
atgctaaataatggtaaattcgttttttcttttcatatttttctctaaaattaataatttcatattttattataaattttttttcccgccttcccacccccctcttgcaaaaaatgaaaatttctgggtttttaattaggtgtccataatttaagccgttttaacattgttcacaggaaaaccgggctctgccaccattgaagcaatgctaattgacttcaaattgacggaaacgagtttgaccacgccgctgcccggtgttcagctgcattggatccatttcaaccatgccgtgatgctgggcaaatacaatttggccatgtccttcgtcacttgcattattatgctgttcaccattgtcagcttcctttattggtggtacgcactgatgttgtccgtccgcatggccagcaattacggcgaattcctcggatgggccacagtttcaatggcactcgttttttacatccttttctttatggcattcgtattattgtagggcctcgcgctttcgggacgagaaaatgtcggagccatgcttttttcggggtcagctattatcagggttgggctaga

SEQ ID NO: 79669 - DNA, 1214 bp, Heterodera glycines
ttacaaattaatttgttcaatatacacacataaacgatggagcttggtgatatggttttggcaattttggagttgatctgttgcttcttcgtgccggtattccaattgaactatataattatttggcaattttacgattaagggacgaaatattaacattaaaccgcgtgaataaattgcgtctccgttggttaaatctgagatatttttttaggggtccggattcaattccattagcatctgtaaaatatttgaaaaattacgctttatcttttggtagctttgtgttttcaatattttgcccttgctatttgttttttttttgtaacggtcttcgtttttttaaattgtatcaacaattaaaacggttgctttgagcaaagttatgccaaatattttttccgaaaaattaattagcaaattagccacaatcaggccagtaatcggaggggggcggcagttgcccccgccacgaaatgaaaattaaaatttttaaagaaaaaataggtaaattttttaaaatttgtctaattttcttaacaaatgtgaccaaattttataaattttccacgggtatcaattttcttcctttttttttttccaaaattttgtctcgaagtggccaaaatttgacgaaaatggctaaaaaaatttcccatgtttttcccacgcagcaaaatataggaaaaagtacgctggaaaatatttttgggtcttcgggtgccctttcccgaaagttttgtacgggcctctgcccacaataacatatttttgtctgtaaaagtgccttgttgctttccatttactagcatattaatccattaattcagcccattgccattctgctgaagtcgggcgagtgcaaccaacaagtgctgatttcggtcgttctttggtacacaaataaaaaattttttaaaatatattattattttttaatttgtttttatttaattcagcattttgttgtggatccctgccgtcatccatgccatttggtactgtttcattcgctgaatgccatggcgaacaatggcattgaaatgattcgattggaccgtttcttattcataaaaaactattccgattttgggatttgttacatatccaattctcatcattttcaccttttctcatcaacatttcaaaaataaaatcgatcatggttgtaaaatttcaaatacaaaattaaaagaaaagtaaatttcaacccg

SEQ ID NO: 79670 - DNA, 340 bp, Heterodera glycines
atggaaatccagcacttgaacaacattttttctcttttcctcataaaaatgcacattctttggcgtgtatgtcggtgtcgggagccctaccctaattgatcgtgtattaaattagactaagcactttgatggactaattggcaatgctgtccttgttaccacacctttttgaatgttttttaatttttcagtcaaaaataagagtttttctagagttgagcacgaatctagcacctcattttggccttccggattttggcccctgattcgaaccaaaagccgaaaacccaatttttactaattcgtttttatggaacctgaaccggttaaactgagtgaa

SEQ ID NO: 79671 - DNA, 1532 bp, Heterodera glycines
atggaggaggaccgagccaagaacacggacatcaagtttgagcggctcgtcgaagaatgccgctccattttgtcgctcaggagtgccgccgctgcactcgaacatcctggtcacgggtggcaggctaattcaattttagttaagccgcagcgtgagaaggagcgacaaggacgacagcgacagttcagtaattctcgcactcagggcatttcaatgaaggacggacgcacagtcaatcagcaaacggccgccagtcatcaaagccgcgtctgccttttccatgcaaaacgtgtggaggaaatcattggaacaacgagtgcaaaagcaagcgtgaaagtcatcggaacaacgaaagtgacaacaaactatggcaaaagtgctacaactgtgatcgagtcggacattttgcacgatagtgccgaagcaaaaagcagaccaacaacaacgactcgatgttcgtcatgaatgtgtccgacgacactgacggatggatcacagtggattgcctgatcaacggcaggcaggtttcattggtggcagacacagccgcctgaaaaaccatcattcaaacgcccatttgggagaaattgggaaaacccaaatttaaaagggcaaaactttaggaaaatatattcagggcataatttcgagttaattggtttatttgattgtacagttgagttcgcaggcattaaattggagttggaatgttttgtggcaccaacgggagcactcaatctctttggtctcccatggattcgtgcatttgaattggcactgcaacgtccaatcgccacaacacttcaaattgtccaaccagaaccagcattcatggccatggcttcatccgcagacctggacatcgtcacggaattggaccgtttgttggcaattgaggccattaaacagattgattacagccgttgggcagctccgattgtggcagtcaaaaagaagtcaggtgacgtccgagtctgcatcgacttctcaacagggctcaacgacgcgcttgaactcaaccgacacccgttgccacggcagtagtaagtactgccacaccttagcagtctgacgctaattagatgtgacagctggcggggaagggtgtcaattagtcactaattgggggggatactaattggtcagcggtcaagagggcactaattggtcagccgtagcgtgtggggtggggtgtaaattaattagggaaacccaaacctattgaacggtttcaaattgtcacgtaactttttttgatgagcgaaaaaatttgattgatttaaaaagtgacagccgagggggagggggaatttgattggtcagcgaagtgacagatgagggaaaaattcaaatttctgatgggcggggggacgtgaattttgattgatcaacatatgacagtttttgatattattaaattattcaaatgaagtgaaataatttgttttgcactcggtctttatcaaacttgttatgaaggtgcaaatttgcaatttgttgacgatttcgcgcaatgtttcgaccgaaattaa

SEQ ID NO: 79672 - DNA, 408 bp, Heterodera glycines
atggcaccacgtgatgactccagtaacaataacaataatggtcagccgtcaatccaatttgatcaacaagttcgccaggaccctggtctaaatgctgtttttgactttgttcgggaacagggcgcgcgggtaatttgtcacagcaaattaattttttcattttttgattaattttgtttagcatggcattttcaacacacccgccgaaatcgtcaatgttcttcagcaaatggcacagcatcgactgaatgagcgcagagcggggaataattgagagaatgaagttgagagaaaatgaagagcgaaagttgagaacaaattgatgaaacaatacaaagatgatgggaattctgaattattattatttttttttcttacatgatttaatttattgacaatgctaaaaca

SEQ ID NO: 79673 - DNA, 660 bp, Heterodera glycines
aaacaaaaaaatcgattttttcaagtgtccgtttggggtactcaaacaattatggggagcaaaaatccaacgcagaattaaagtacaggctatagggaagctattccggaaggattcggtctccccataaatctgggcgcatcggttcggggggactgccccgaaaacaaaaaaatcgattttttcaagtgtccgtttggggtactcaaacaattatggggagcaaaaatccaacgcagaattaaagtacaggctatagggaagctattcccgaaggattcggtctccccataaatctgggcgcatcggttcggggggactgccccgaaaacaaaaaaatcgattttttcaagtgtccgtttggggtactcaaacaattatggggagcaaaaatccaacgcagaattaaagtacaggctatagggaagctattcccgaaggattcggtctccccataaatctgggcgcatcggttcggggggactgccccgaaaacaaaaaaatcgattttttcaagtgtccgtttggggtactcaaacaattatggggagcaaaaatccaacgcagaattaaagtacaggctatagggaagctattcccgaaggattcggtctccccataaatctgggcgcatcggttcggggggactgccccgaaaac

SEQ ID NO: 79674 - DNA, 1543 bp, Heterodera glycines
atgtgggtcaaatatttttctggggtattttgatgtgctgagcacgaatctgatgttcattttcagtttaggaaattttggaattttttaaaaattcgaaaatatttttcaattttttaacccttgggattttgggttaatatttgaaaattcataactaacctcagggtaagtcaattttaatacaacaaagctttaaaaatagcaaaaaatcaggagaattttatggcttttatttagattctctatcatgaatataaaaaaagttattccagaagttctagaaaatttcgaattttcagaaaaaaattctgaacacggttctgaaaagttattttggaaaagtaaaataatacaaaaatccgcaattttttgctctattttataaattttattttagctttttatcacttttttgaaaaaagttatagaaataaaagtgattttgggaatcgggaccaaaggggtgagtataggatttttgagttgaaaaattttttcaccaaaaatcttcaaaaaacatgtcattagggctattttatgacgctgatcacgaatacgtgatcagattttacttttgacatcgttaagacctcagaatccctgtgtgattggggattctgaggcatcattttgaagggggagggggcaggttcgaagccgggcggtgtacattatttttctaccatttttttcgtgtttttcaattttattcatttaaaatattttttgagttaataaataaaaaattatattttatttaatttttttttgataaataaattttataagttttaattaattatttttttaattgatagaatttcatgtatctgttgtacctttttaatcacttttgtacctcttttatcaaatttgtacctcttctaatcactgttctatttcttctaatcactgttgtgcctcttctaatcactgttgtacctcttctaatctctgttgtacctcttcatatcactgttgtacctcttctaatcactgttgtacctcttctaatcactgttataactcttttaatcactgttgtgcctcttctaatcactgttgtacctcttctaatctctgttgtacctcttcatatcactgttgtacctcttctaatcactgttgtacctcttctaatcactgttgtaactcttttaatcactgttgtactaatcactgttatcttctaatcgcttttgtacatcttctaatcactgttgtagctcttttaatcacttttacacctcttctaatcatttttgtaactcttctaatctctgttgtttttttggcccttgggaatttgggcgaatatttgaaaaatctcaaggggtattttaaattatttaatttttttatttaaattgttttattaatttattttaaattattttctgatgaataactgttttatttacttcttttaatcactgttgtgcctcttttaatcccttttatatctcttaatccctgtgtgattgctcgtctgagttcaactaaattttaaaaacgggcgcgaagcgcccgcccaagccca

SEQ ID NO: 79675 - DNA, 1902 bp, Heterodera glycines
atgttccccgatgacgatgggtacgaatcggaagatgatgaaattctcttgccacctccgccgatccccccgcaacttggccaccctccaccaaatgtgccggtaatttcggtctcgcttttcgttgcttttctcaaatttccgagtggttttttcaggcagttcgtgtccagccaatgcatgttgggcagcagcggctgccgctgagagacttgccacaattcgaggaccatctgcaaaatgtgccggtaattttgggtcgattttcgctgcgttttctcaaatttctgcgtgtttttttcaggctgttcgggtccaaccgatgcaacaaccattgccgctgagagacctgccgcaaattttccaccctccaccaaatgtgccggtaattttgggtctttctttcgattgctttttctcaattcccgagtgcatttttcaggcaattcgtgttcaaccaatgcagcaacccgtaccaatgagagccgtgccacaattcctccaccctccgccaaatgcgccggtaatcttgagtctcgttttcggttgctttttcaaaatcccgagtgcattgtttttcaggaaattggtgtgggaccaattcatgatgggcaacaaccactaccactaagagcgttgccacaattcgcccaacctccaccaaatgtgccggtaattttggctcgtttttttgttgtttttttaattcccgaatgcttttttcaggccgttcgtgtccaaccagttcaacaaccgataccactgagagacgtgccgctatttggcaacccaccaccaaatgtgccggtaattttggctcgcttttgttactttttttcaagatcccgaatgcaggtaattcgtgcccaaccgatgcctcaaccgttgccgctgagagacatgccgcaaattcaccatccaccgcgaaatgtgacttcaatttggatcaaattgtggttgctttttcccagtctctgggtgtttcttcagggaattcatgttcgacaaattcaacgggaatacgccgtaccgcaatttgcccatccgccgccaaacttgccgtatcatccaccagaaaacgttccggtagttgggtcttgtttttcgtgcgtttctcatattttcggatgcttattcaggcaatccaaccacggcaacgaccgcgccagctgagagacgtgccactattcgaccacccgctgccaaacggacaggtaatttcagaccctgtcttctacctaacaccgaaacatcttttctaagcaaatgcatcccaaccccccgagagtgctggaagtgatccgacggctgggcgagtggagaggaagaccaagggacccaagacgtccgcttcaatgaatgaatggaatttggataaaatttgttgtttttaaattttttgtaatgataagggttaaatcccgttacctaaattgtttgaaaattattaaaattttaagaaattagatgctaaacctaacctttgacaaagattatgaaaaaatgaaaagaaatgacgaaatttttggaatgttccttctttttattatctatggatttttttcatgtgcattattttggtgctagtaagatattgccgaatgaattaattggttttttctcttcattttaaaacatttcacgtccccatgccctgcccacttcccgcggaattgatcaaggaaataattgacgctctcccccctccaaaaacacatcggcttttgcgcgtaaattttgttttggcatactttgttaaatgtcggttttattccatgatgagaagattgtttcgcccagagcatatatcaataccaatggcccgaagaactggaatttatttctttttcgatgttcatactccccctatttattttccactataccaataataacatttaa

SEQ ID NO: 79676 - DNA, 80 bp, Heterodera glycines
cccggtgtgcccagccgttcccgagaaatcggttttagagatgagttgccttgtcaatataacatatatataactagcgg

SEQ ID NO: 79677 - DNA, 1708 bp, Heterodera glycines
atgacaacaaatagctgtgttttttaccagcacgacctccaaaagcagaagcccaacgaactggtggcctatgtggcacgtgccgtttgcctgtacaccgacattttcaatcgcatgacggaggaggaacgacaaagtttgaacgaaaccatggcctatgaagaatcgctgaccggacagaagaacattgaactggttggccagaagttggacgcacaagttgagaagaaagtgaagagtctgatcgccgatcagcacatcatagaatatccgactgatcagcggacggtgctgaacatgccgacactacacgagtttttacggttggagcagggcgagtcgtcggcaatgggcgagaaaaaaggtgccattgttgctctacccggcagtttggatgaggtgcgcgaggggctgatgaaagggaaaattctggaaaatttttgcaaattttcaacaaattcattaaaattccaaacttattcattggcgttgcgttataccaagtgaaaaaaactgaaaatggcaaattaatttgagagaaaagcaaaactgttttttttatatttttgaatttgcactaaaaaacatatacatagaaatgtgggaagtgtgtgccgggcccgagaaatgagggaaattgtccgaattttggtcctgtgatttcccgaaatttgttttaattattccaaattctctttaagcgccctcccctctcgtgcttccatgcccttcctctttttatttcctattcttttcctttaaataaatttattgctgtacatatgggtaaaatggaaatataaaatttgtgagatgagaaattaattagatcgatcgcccaaagcgcttaaagaatgcctggggaaaaaatgccacttttgtcgggtcccggggaaaataaaacggtgggaagggaattcggagtgccttttgtacgtgaaaaatatccgtaagtggcggaagggagtggaatatgaaaagagggatcggataggagggagattgagcgggagacaaggtgggaaagggaaaatgtggttcgccgaattgagtcccggggtttgagtaaattggaacgggcttgtggattacaatatacatttaaattcacatttatattcagatggctcaaacactgatagaggcggaacagccatgggatgacggcactgatcagtttcagggatttagtctgcttcaaagacggccaacattggaagatatgttcagcagatcaccattgacaccgatcatcgaaagcagcagtgaactgaggctgcgatcggaatcagagaactctgatcagatgtacagtttggaatttcacgccttgccaagcccacagtggaatgacaagattgtgatcggtgatcagaaaggagacacgatggtgatcagtgatcagaaaatgagccaaaaagctgatcagaagcattctcccagcaaattaactgatcaggagcattcacccagcaaattggtactggtaaatgatcaaaaattgaagcaggaagctgggcatgcaagaagaaacagcactggtagcatccatagaggtcaaaagaaggaaaaggaagctgatcatccgtcatcaagcagagcaacaagcattgatcaacggccggcgcttcaataccatccagcggctgatctttatcaccaacgggcagcttcggcaactgataagagcgacggacaattatggtga

SEQ ID NO: 79678 - DNA, 119 bp, Heterodera glycines
atggctaaaaatggcttcgtctttgagtcctggccaactcagtcccacccattcataacccaccccgccgtcgcttattgtcaattgttgtctgctcgcgctacccggcgacaacagct

SEQ ID NO: 79679 - DNA, 928 bp, Heterodera glycines
atgtcagcctttcaaatcgtgcaatcgggcgaaaaaccggtaggttgggttccaccacataccaatgttcgaagcgggcctctgcctccgctttccgacacactcctttttattattacgcaatgataatggattctttttaaataaatagaaaattttaattttgaacaacaattataactattttctttacaacgaaaagataaatattaaggctattatttagtaaacttcaaaatttaaaattctttattggttttatttaccatattaatcttatgggaagcatttttgaattgcttagcttgcaaatattttagatattattctcaataagctaatttttattatgcaaggccgaataaaatctttaaaaaaggtttatattcaattaataattaggtaaataaagtttcaattccaaatgaattgaaatttaaaaaatatcatcaacaagcgtattatgatgatatcggttagccgacattaaatttttctaatatgaacttgtgcatcaactcgaaagtagaaatccttattttttagaatattaatttgtcatcgataaatttgtagatatttatttttaattttagatctatagttttggagcagctatggacgatgtggcgcttaagagcatgtttgcattcgtgggtggtgattaagttaattttatcttatataaaaaattaattttattctaacaaaacaacttaaataagtgtatttgtgggaataatatttctatcaattttattatattattaatcataaataactgatttttcgtagcaagtaaaaataatacaatcattggtaaaaacatttagttgaatttaaaattgttggactaaatttattaaatagaacagagttttcaaatatttgattatctattcattttttatcatagatgggcaataaa

SEQ ID NO: 79680 - DNA, 2630 bp, Heterodera glycines
atgaactgctcgctctccgtggcagcagttactccaacccgacgcggacaagtcaaacggtcggaacaacacaagtatactgcttgatctccgtgtcagcagtacttcacgtggaggtggttgtggtattttaatcaaaaatgagatagccttttttgtaaaattttctggtacaaaatttaattgtgaaattttaattattcaattacaaaatctgaaatcaataagatttgcattgatttaccggcctcccaaaaccactttaaaacaaacaaaagaactttttaaatttatacaaacattttggtgtgaaaattataatcttaggagatctaaatttgtcaaatcgagaattggtatggaggcaaggccaaccacacgctataaatcatattggtgaaatattttgcgacttttttaataaatttacatttataaatgccacgaatgagcccactaggggtaaatcatggttggatttgatcttatcagcaaatgataaaattgtaaaacattgtactgttgaaggtggcatattttcatcagatcatttagcacagctttttgtgctgagtgttccagaaataagagcaaagcctaaagaaatttgcctaagacggtttactccgtctaatgtatcacatttaaatgctgtaatttctgctagattaagttctctttctctttcacattttagtataaatgaaaaatgctgtgccttcaatagcgccttgttgaatgccttgaacgagtgtattccaataaaaaaattactaaaaaaagatttagctccaaaatatccacaacatttattggcatccattaaagaaaaggcaaaattatatagacagtgtaaaattgatccaacaaaaaaagcactttatgatagcattactttacatataaaaatccaaaccaaaaaaatacataatttaattgaacataaggctatttcaaagggaaaaaattcaatttttaaatacattcaaaaacacaatgtcaatccctttgaaataccaaatttagtttttgaaaataaatgctatcatgaaagtgaagagaaatcggaattatttgccattttatttgcaaattcatttaataactccgaagttgtcctaaacgatttaagtttggacaactcctatggtaatattcaatgctttatatcggacataaattttaacatcattgagactcaaacactgttaagaaaattgccaaataaaaatggaacttctccggataacatttcttataaagtcctaaaaaattgccatttttcattggcaactgttattactgagttgtttagactatcattagacagtggttctcttccaaacatttggaaggaatcaattgtctttcctctttttaaaaagggggataaattcaatcctgaaaattatagacctatttctttaacctgctcactatgcagagttatggaaagaattctcagcaaaaatatttacaattttctattaaaaaataataaaatttcagagtcccaatttggttttattagaaataggtcaacaacaaatcaattaataacagttgtcgaagattggtatgaagcaattattaatggaaaaaaagttgactgtatttatattgactttcaaaaagcatttgactcggtacctcataatttgcttttatataaattggaaaaaattggtatacggggtaaattgctgaattggataaaagcatttttaatgaacaggacttttcgcgttaaaataggggattctttatcctctattaaaaaagttggctctggcgtcccccaaggctctgtcttgggtcctttattattccttatatatattaacgaccttcctgatgtcataccatcaggagtgaatattaaattatatgctgatgatgttaaaatctatatttgttataaagcaagaacagaaacggaaattatgcataaagcattgcataatttattcgaatgggcaaataaatggcaaataaaagtttcaattcaaaaaacttttgtactttatttgggttcaaaaaacccaaaagaaacttataaatttgatgggaatacaataaatgctgtggatacaattagggatttaggagtaaacattgataacaaattacaattttccgatcatattaatcatataacaaggaatgcgtatttacgtatgcgttccttgttccgaataattaaatccaaatcatctaagatttggattacgttatataaaacttatattaggcctttattggaatacgctccggaggtttggaatccgtctcttcaaaaaaatattaaaaaaatcgaaaagtgtcaaaaatatttcaccaaaagagtattttttaaatgcagccttccgccaattccataccaaaatcgattagaatacctgcaactgccaacacttgagaaaaggcgaaagctatttgatctgttcatggcgcataaaattgtttatggccgaacagatctagatatattaaaaattttcaaaccttctgaacgctttaatgtccccttttataggtttaacacaaaatataaattaggcaaaaaatttattccctttgcggggagggctacaaaattgtggaatcagctggataaagaaatcattaaa

SEQ ID NO: 79681 - DNA, 564 bp, Heterodera glycines
atgccgagtttaaataaattaacattttatgaatctgaaatggtactcgtcaatgtgttttgtgctcaactattagactgtcccgtcaagtcactgcgcgaccgaattaaccaccccgaagatcgtgtaaatgcaatgaacggattgatggggaagaaagttcgaacaacctacaaagatcgcaatgggatgcacaagaccttttttgtcggcggtatcacggagcgcggtgcagctttcgttccggcttatggcaatctacgggcaccatacaacgtaaatgtggcagcttatttttatgcacggcatcgcataaagctccatttcccttacgtgccttgcgtaattgaacgcttttccgggagaggtgaggaccgtttctacacaatggagttgctgggaattgtggatgacgaaaacaaagggagattgtttggacgaatgtttatggaaattggtgaagaagcagatgatgatgataatgacgaggatgtttcaacatcctttgactcaacactacgatttgatatgggacgcgatgagtgttcccaattatggcgatga

SEQ ID NO: 79682 - DNA, 2618 bp, Heterodera glycines
atgccctgcgcattggctcagctggtgccatcctacggattggacgtcgaagacaaaccctttttcccgcatttggccaaccgtccggagaactacggtcaacacatctacccaacccctgacgactatttggccaacggaatgatgccagagaagcgacgacaattcgatcattggttcgagcagcaccgcgaagagccttttcaactcgatgaagcactagcgaggtaaaacatttttaaattaaaatatttattttggactttttcagttattgtacgaatgacgttgaaattctaatggcagctctcgtcgcattccgccgcgagttttttgatgtgtcgaagcggaacgaatatgtcgacggaatcgacgaccgggaaaaccacgatgggattgatgttctacgggaatgcatgactgttgccggtgcgtgcatgaagcacttcaggttgaaccatctgccggcggagcaccttgccattgtccctgaaaagggctatgacaacacccagaaccagagcaagctggctctccgctttcttttctggtatgctgaggaaaacaacgtacaagtgcagacagcctactcacctgatggagaaaaaaagattgcaaactacactgtggacggttggattgaggcagaagggtgtgtaattgaagtgaatggtaatttttctatatttttaagcaatttaaaaaaaagttgtttgcaggttgtgtttggcacggctgtagaaaatgctttccctctgacaacatgatgttgcccaacgggaaaactgctggagaacaaagggagcgcgatgccaagcggttacagttcttgaggactcaagtgacacgagttgatgtcttctgggagtgcgagattcaacgaatgttggacagaagcagggaaatgcggaaaaaatttgcagaatatgtggatggtggaccgttggtgatccgtgacgcgttcaccggcgggcggacgggaccactaaagctcttccacaaggcaggcgcagaccaaaaaatttcctacttcgactttacttcactctacccatacataaagtttgtcatttttacataattgtgttacaatttttaatttccagtttcacaacccgttatccagtgggccacccgaaggttcacgtgttgaacgaggatgttaattggacgagcccagcacacaacaccttccctttggcactgattaaatgctgggtgattccgccacgaaagtgcaccattccggttctgcctgtgaaagttggtgaacgtttatgctttccattgtgcatgaagtgcgcgaaagactaccctactggaggagttgacgacgaatatcactgcagacataatgaccaacaacgcggatgggtcagcaccagcacttcaattgagctcaacgcagcgcttgaagagggctaccgcgtcacgaaagtgttccgggtgttggagtacgagcagagtgatgacaagctatttcgtccatacatcgctgagtttatggcgcagaaaatccaggccagcgggtttgacagcagcatcaaaggggacgccgaaaaggagcaacaattcgtcagagaatgttatgagcagtttgggataagcattgatccgtcaaaaatggctgtcaataagggaaagcggtctattgcaaagctatgtctaaataatttatgtgggtttttctaatcaaacgtcaataataatgaaataaatattaagggggtcgcttctctttgcgcaactttggactttcgcagacgttgatcacagatgacccagttgcgttcagagaacacttggacaaccgatcggtcgatgtgacggcaatcgacgaacttgttttggaccatatcttacatagctatgaaaataagaaggagtgggtagaggagcacgactgctccaacataggtatgggaaaaagattccaatgaaatataaaaaatatgaaaattgcagtgatttctctttggacgacctcggctgcgcggctcctcctcctaaaggcgatgcaaaaggtggcacgaacacctggttgcgtgcttttatacactggtaaatttattatcatttctaggtaaaaataacatattgatcaacaatttagacacggattcattgatctttgtgcacccaaagaacgcctgtccactcaaaactggcccacatttgggtcagtttaccgatgagtatccgcaacacgaaattgtggagtactgcagcggtggtgcaaaacaagtaattaatttttaaaatgctaatcaatatgctaatatatttttatttagtacggattgaagttgaggcgcttaaatgcacctgctgctgcggtgttagagtatgtgctgaaggtgcgcgggatgacactcaactacgatgtcatcaataatcaacacctacggtatgaaactttcaagcaacaagtgttggacttcgccgctactggtgactatgagccgatcatagtcacctacccaaacttcctgcggcctagcatcagagaaggaggaaaagtgaccagtggcccaatgcagaaatgttataggccctacgttggaaagggaattgttaagtcagattttaatgttttaaactttggtcacaccttgtaa

SEQ ID NO: 79683 - DNA, 502 bp, Heterodera glycines
  unsure (1)..(502): unsure at all n locations
atggaaaaccaaaaggaggcgaaaggaacaaatcggaggtatctgaaaaaatcaaacataaacaattttaaaataaaataaaagacccaaaggttggccattctttgtgaagataatccgccgagtggccaaattaatgccacaaccgacgaaatcgccacgagaaaagttcggcattccaaaattctttgacccattggtccaaaattggccatcgctttggtatgcacaactgtccgaattttggccaacattttcgcccaatggcatcgctttggtggcaaatccaattgagcaaagactanattaaaatataaatcaaatcgaacttaatttttttttgtaattntaccttttacagcttttaattttgatttcaaaatagaaaatgccagattcggtgaacaanattgggtgtttagcgaacacagaacgatgaccttattatttatatttttataaaatatttattattanaaaaatattttacattaaaaataaa

SEQ ID NO: 79684 - DNA, 743 bp, Heterodera glycines
atacctccgatttgttcctttcgcctccttttggttttccattgtttccgttcatttctttgaatgattctggcgattttattgagacaaattttgggccacaattcaaattcgaccccgcaaaagtaaagagaacaaaattatttaatcaaataatttgaattaatcttaaggtgattctcaattttccacgacaaaattattgggatgccaatgtttgtgatgagaatctccaaatcattggcaacaaaagtttgactgtccatcacaagggaactacttctggtatttgtttttaaatttataaatcccatttttttcttcataagattattatcattccgtcttcgctaaatatccgattgcgctgaacaagtctttgtctgactttttttactatgaaatttcaattatgaaaaaaggaaaaagcgagtaagcgaatttgatattttgaaacatttataattataaaaagaataagagaaatattttattatttatttcttctttattcagttgggtcatgttcggatttgcagtcaaacagcagcagacaaaattggatgaattaattcatcttgaaaagggcacttatgcattttacaattatggctatttatgtattaacggaggaataaagggaagaaatgccaaatattcctacggtgttggcgataccgttggaattggcgtcaatttggccactcgaaagatcattttcaccaaaaatgggcttcgtttgg

SEQ ID NO: 79685 - DNA, 178 bp, Heterodera glycines
atgaatgagaaaatggacaaattccaattggaaatcggcaaattgaaccaaaatgttagttttaattttttttttttttttaatattttaacaaaagatttattaagtatattaaaattttaagtttcagattatcgaaaataaatttaaagtgaatgagaatcgccgggaaattcag

SEQ ID NO: 79686 - DNA, 508 bp, Heterodera glycines
atggccgataattttggatggaaagtgggaaaagtgttcaaaaggcgcaacgggaataagcaattggctgaaagatgtgttggcacagacggcacgaagggatggcacgcgctaatgatcgaacagaagaaaaatgggctgatccttgagtcctcttttgggtgagtgatttaatttaaaattaaaaagcaaatttaattttagaaaggatttatccgtggaaataggcccaaaattttttgtgcacggctccgactttttggacattaacatcacaaagggtacagttctacaacaaattaaatttaattgatcgagtcattagcgttaatgagttcctcttccgctaaattggccgagttccaaaatgctcttccgttcggtgtttttttgaatgatttcgacggcgcagcgcttggaattgtcgcatttgaaattcattgtgccattggaacaaatgacgtgaacacttgcaaaacgatggtaaagtgaaatttaaaaaattaaa

SEQ ID NO: 79687 - DNA, 131 bp, Heterodera glycines
tgttgaagaaaatatgtagcccaaattcaaaagccgaaaaagaattaaaaaaagaaaaaactacaaatatgaaaaggatttgcaacaaaattccggcacttctccacttctcccaagtttggcatttcttt

SEQ ID NO: 79688 - DNA, 189 bp, Heterodera glycines
atgaatttaatttgcttttcgttcttttttgttgttctggcgacaaatgccatcggtgaagggtaattaaatgaattaaaatcaattttcaaatgctttctgttctttagacttgccgaggacaaatggaaaaagtgcgaattgaatggaaacggaatgatcagaatgggaaagaaagccaaaaagtaa

SEQ ID NO: 79689 - DNA, 62 bp, Heterodera glycines
tttaaaataggttaattctcttcctttcagtatccctgcaaagtttggtgcgcttctgatca

SEQ ID NO: 79690 - DNA, 3476 bp, Heterodera glycines
  unsure (1)..(3476): unsure at all n locations
cccttgcttatttatccttgtctgaaatccgttaattccccaattattattattattattgtaattattactcaaatgtgccgagctcttatcctttcggggtcccctgattcatttgccaggttataatgaatatttacaaatttaaaaaaaaacccgttccaatttttaaaatatgcattttaggtacccaaaatgggcacaaaccttcngaaaatgaacttagttttgaattcaaaacgcgcatgcccaatgcattactgctgtatacagatgatggcaagtttaaatgataaaacaaacagaaattattacaataatttttgataaatatttttatcaatttttaataaataaactttatttgcaaagttcgtttaattttcaaaaagccttataaagttaaaaaatatataagaaaaaaattggaaaattttgtagtgaaaatgaaattttcttatttaaatgttctaagatttttttgaaaattggaatatttttcaaaaagttttaatgatattttgttattaaaaaatgttctgatatttttttttgcacatttttaagttggaattttttaaattttcatttttcaaaaaattggggtgaaaaactgaaaatttggcaaggatacaatttttcccaactgatttttttccactattttcacaagcccctctaatggggtgacacaaaaaaaatatttcaaaaataaaaattaatttttaaatttcttctatctcaggcactgttcaacaaaattttttcacaatttcgttgcttgacgggcatatccaagtcgaatttcgtctgggcgagcaacaattcgaaatgccggaacgacgtccggttatccaaatcggatttgtcaatgccgcacgggtggacgacggaaagtggcatcggttcagctttttccaggtgttttttttgaatcaaataaatgaaaaatcgtttaattttaactttttctcaaaatttaggcctgggaaaatgtgagggttcaacttgacgaggaaaaggcgttccgtgtgctgagccaacgcacttttgcgctgggaaacattagaacaaattcggatgttttcgttggtggaattccgaaggttggatgagctcgttaaaaatttattattgccttttaaaataaatttttataaaaattttattataaaatgtcattcgctaattaatggaactgggatttttactaattggcgcgacaagacccgagcacttaaaacatatcgcccgccacacatttcagggttttagcacatatttcgctggtgcacctttaaaaaaaatttttttttgttaaaaaatgcattaaaaaattcgtcaatgcaaaatttttaaattttcttgatgagatgacgaaataaaacatttttaaacattaattttccatcccatagggttttgttaaaaaatttttggattttccaatttgctatatttttccaatttttgaaaaaattttgccacacataatttttcgatgatcagaagcgcaccaaactttgcagggatactgaaaggaagagaattaacctattttaaactaaatcatcccataatctgaaaatatattcaacgcttattattttaaaagaattttttcaaaatggcacttaggtatatttattaaatgcaaaaacaaacaatttcaggaaattgaaaagctcagctcaccacttcgacggcattctcagcattttgcgggtgcaatacgaagtcttgtttatcgactgttcccacagggtcagaagaaattaatattccgaaaaaaacaataattaatcactaattattgttggataataggtttatttttaaaaacgagaattatgagtagggattatttccaaataaacttctttacggaataatgaagttagagatattcaggattgaagaatttcccaaatacggcagcactcctatttatggttaagccccgaccctcgtggagtcgaaaagtcttagttcggggatgaaattgcccgacaaaatttgtcggggatgggtggagaaattacaaaaatatcggggagcaaatgttcataaaaatattacagaaatttttaaaaagtaaaaaattcttagtaactcattcaaaaacattttcattcggtttgacatgaaacagcagatgagattcataattcctcgtatcggatcggtgcttaatcctactcctaattaccatgatcaagacttctgatcaaactcaaacataggaaaattctggtaagaccattgattccctgtccaatcacgattaaattaattgataatattgcatagaataaattgcccttaattaattataggtgtttcaaatcctcaattgatggattcaatgggcacacgaaaaactgataaggattattgccagccgacattcacctcattggcatcatctggtttggctgctgttgttgcggccagccgaatggccaaattggcacaaagtgccaccaccaccgacactgccccaggagtttattgtcagaatgatggccgatgttacagtgcaaacaatggggcccgatgtgactgtacggatagtgattatgaagggagacggtgtgaaaccagttcagttttttgttgttttgcttaattgtttnaaaataatatataaaattataaaatcaaaataaaaataatatttatantaataataattttaaaaaattanaaattaaattttaaatattatttattcctaattttgcgtttcttctagaaaagcccagcacggaggtttcttttttcggcaacgaatggttgggttacgatctgcgcaaagaaccgtctacggtagacgaaattgctaccggtagaaaaatgaaaatttaaattatttatttttaaaattttttttattatttttaaaatagtttctttggatggggatgaggaggatgaaccacaagcggtgtggagtttacgccagatgtttaacatcacatttcgaacaaattattctaatgctctgttgttgttggcaggcgatggacgggtgagaatttttttttattcgaataaaaattttgtttttaattaatatgttttttttaaatatattttttctctttttaaaatttagaatagatttaatcaaaaaacatttattataattttaaatttattacccattactaatagcttttattttaatttggtttcatttaattttagaatatttatctttgaaattaaatttaaatttaattgcaattgaaattaaaataatatttaattttttaattgaattaattttttactcattttacaaaattattttctaatgaatataatttgttgttcaaaaaatttaaaactaattctgatcagagtcatgtggagcttttcgtggaaaagggtgtgattttggcacgctcccaactggccggaagcgaaaaacggatgatcagagtgcaggaccgtgccttacggcgtgtcca

SEQ ID NO: 79691 - DNA, 1519 bp, Heterodera glycines
tgtggtttatcggttgtaattcctaaatattttgccacatgtacatatcattttcttcatttttattttcagatggcagagaaacaagaagctaaaagaaagaatgatcaggagcgataccgacggcggacggagcaatctgtcagcccaggtcgctcacccgtcccagacggaagtgcagatgggaatggagaggcatcggcatctctccggggcaccaccaccccaagtttaagtgctttgcaaataagcacacctgcttcttccattggaagtaaaaaaaggggaagacccttgaaagcaggagcgaagccaattttggcaacgcaagaaactgtgtcctcaattgacacacctcgaactgctgtcacccaaagtgaccaaggttcgccgtgcaaaaaaaggggaaaggtcaccgagtgtgacaaacccacgtttgcaaatgaagctattgcttcaacgcctgtttcgactcaaagtcgtggagggcgaccagttaagcaactgggagggcatgccggtaaaggaagaggcaaaaccaacgagtctatgaccaaaagctctgaaatggaccaaagtgtggaaaacgctctaagtccggcaccctcgcacattgtgtctaaaaaaattgacttcagcactgtgccaattaatttcgccacatcgcgaaattttgcctgtaaaatttggagatgggcagcaattggcctttacgagcgtgatggcgaaacagcacttggcccacgctctggcccaagattcattgagacctgttggaacaggccaaatgaatggctaaatgacagctttattgttgcctatttagcttacattgcaagtatttcacaacgaaaaacagtagttgtggattctttggcatcgagaactgatatttctcgattttccaacgtgaagaattacactttcggctatgatccgaatgctgttcctgaagttgtgcttatgccgcttcacttcccaaatcattggactctcatcgtctacgatgttgcacatggtgcatacttccttgactcgctgcatatgagcagcttgagtgatgagagaatggcactcatccagtcaataattgctgagatagtgcccgggaatgcgtcattcgctgttgaatacgtgcagcaattgacaaagcaaaatgatggtaacagctgcgggtacttcgtgtgcctgtatgctgaatcctggctgatgaacaaccgtacatttgttctgccggatttgaacatcaattatgaaaaaaagcgcattttatggcacattaacgagctatatggctctgataatgtgccatatcatccaagggaaggggtgccaactccttgcccaattgtctatcggcatacggatgaagcgcagtcgacatccaaggccgctgagctaatggaagttgatgaacatgatgatataatgatcatcgaaccacagacaagtggacaggcagttgatgccattctcacccaagcccaagtggccggtgaaaaccaagctgacatgcttg

SEQ ID NO: 79692 - DNA, 1047 bp, Heterodera glycines
atgctttttcaagaggaagcggccgcgaaacaaaccaaaggcgagaagggcggcaagaagaagggcaagggcggctccttccaaaccatttccatgatctaccgcgactcgctgaacaatctgatgactgtgagttcctttcgcatttgcactgcttgtcttactgtagctttacactacacaaaatgcacttttacggtacgccctaatccaaaaaaaaacacattggaccgtttaacacagaaaaaccataaaatgattgagtcggaggaatctccgaattggaaatattatttaaccgatctttgaaatcattataaataaataagtttaataattgttgctttagatgctcaaccaaacacatccgcacttcattcgctgtatcattccaaatgagaagaaacaagcagggctaattggtgggaaaagccctttaataaaatattattcatttaaaaagcattgctttaatggaaaaagaataattagcaaaaaaatattcttaaaaatatataaaattccctatttttactgatttagcttatataaaaaaaatgttaacgttagatgctgcacttgtgctcaaccaattgacttgcaacggcgtgctcgagggcattcgaatttgccgcaagggctttcccaaccgaacccaacatgtgccaaagacaataatcattaaatgaattgaaaaatgattaatattttccaattttcagcccgattttgtgcagcgttacgcacttttggcagcagcggaggcagccaaagacgggaaaacgaacccaaaaacggcatccaccaatatgctggcacggctggtcaagcagggcgacttgggaccggaccaattcaaaattgggcacacaaaggtgagatggacaacccacactaatgggctcattaacgaaattaattcttttgacccacttgttcaggtgtttttccgtgccggtgttgtggcacacatcgaagacctgcgcgatgctcggctgtcccaattggtcacggctttcaggcggtgtgccgatggcattgtgccag

SEQ ID NO: 79693 - DNA, 338 bp, Heterodera glycines
atgacgaatgaccatttacacagagtcccgaaaatgaactcctttatcaaaaaggtgccgtgtgtggcaaaaaagttttttgtaagaagtaaacggaaagaaggaggagggtcgagtccactccacaatattaatgtttttatttatttttctttaaaaataaaatgattatttttgaaaatatttttgaagctttattaattgattttttttttgcagccgaattggatgaccttgacgagaagcttttctaagcgaaaaagataagccacaatgcactataaaaaaattgtgggccttgaaacttttatttttgaatagcgaaaagttgtaataaa

SEQ ID NO: 79694 - DNA, 1305 bp, Heterodera glycines
atggcactcatccagtcaataattgctgagatagtgcccgggaatgcgtcattcgctgttgaatacgtgcagaaattgacaaagcaaaatgatggtaacagctgcgggtacttcgtgtgcctgtatgctgaatcctggctgatgaacaaccgtacatttgttctgccggatttgaacatcaattatgagaagaagcgcattttatggcacataaatgagctttatggctcagatattgtgccgtttcatccaagggaaggtgtttcaacatctttcgctgttgtgtctcatcacaatggggatgtagcgcaaacttcctccaaggtcataatgccaatggaagtggatgattcaccagtgcttccttcctcggaagatactgctgttcttgcgcaagcaccagtgatcggcgaaaatcaagctgacacccacggtgttgttgcggacacaattgtccagcaagaaccaatcgcgcaggctgatgatgtaattttcatcagacctaagacgccaccaaggcgatcaatgcgcgttcaaaaaaggctttcagcttctgttagccgttcgccttcaccggcgccgaaacgccccccgccagcaaattcgctgggagtcgcaacgccgatcacacggcgttgctctgcatttcacaaggggtggcaatgcgctgcagcagcagccaaacatttcccggaatattgtgactccgggaaactcggtgacaaaaaatgcgccgattgcggtgcgcatctcttctcacatgaagacagtaccatttgctgccggaagggaagagttgtgctgccaatgcttaacccgcatcctgatgagctcaaagagctgattgtggggaataagcaatcccgtgaagggaaagaatttgtgcgacacatgtcgcgttataacaacctgttccaatttgcgagcgtttccgctggcaacaaaccaagccctgctggcggtccgatggccgttattcttaacggagaattccatcgccgcataagcagcatgcaggctggcacaactcagattcctggctttggccagttgtacattctggacccagtcgaggctatggaacagcgtcgaaacaaccccaggtttactggggagaaaatcacaaacgaagatgagtttgtgcagggtcaccagctaaatgagcagactcttgagatcttagaacaaatgatccaagtgcatcatcctgctgcgcaggcatataagcaggcgcgtgagcagctcactgagcttctccaacaacaaactccggaagagcttcgcttatgtcgcatgactttgtga

SEQ ID NO: 79695 - DNA, 591 bp, Heterodera glycines
atcgaatgcacaggatggaagtgcgcaacacggtgaagtcgcatttgtgcgatgatgggacgagctcgggcatcagcactgtgccttccgactactataccaaataatttgttaaaatgttttgtgttaggataaataaaattgtcttgtcttctgccgtttttatacttacatagttttactcgcgggggaagtttggacatcaaatcaaggattaaaagaaattgtgaaaaaattatgtaatttaaaagcttaggtcgctgatcacaaatccggcatccattcggccaactccgaaactcggacacaaattcgaacatttaaagtgggcaataattggagattaaatttcacttcaaaaaaaaagatgagaaatgagggacggacgacgcttcgtatgaaaaatctgagcaaaaggggcggaagacgaaaaacggacgcatttgtcacttgcgagaaattggactatttctcgagaatcgcctttcccggtcattttgggattaaatatgcgagggatatgtgatcactgatcagtccgattcagcaatttacacgctgttcaatgtggtctactggacttattacatg

SEQ ID NO: 79696 - DNA, 1094 bp, Heterodera glycines
atgtctgaccaatctgcccaatgttatgaaaaaaagaaacaaatttcggctccaaaaaatttgctcgacgtggaggaaagtgaggtaaaaatttggagttgatgacttttcattcgaaataataacttaaatttgtctttaattacaaaaacatgttttccagtggttttcggggtcgccgctgatcattaatttgaactctatttgacgaatttccaaaccattaacccaaaattcgtacaaaaagtcggaaattcaaaattttctaattcacttttattttcgaattcgcatccagggttcgaatgaggctaaaatgccgaaaaaaggtgcgaaaaatttcaaaaaggtactatttgcaactagcgcaaaatgttcgaattttgggctaggggttcggaaattggggaaactatagaaatgataaatgataaaaaaaatatatattttatttgaaatttatttttcatacatttccagagaaaatttttaacttaattttgtttcaccaaaatataatgaaatctaaaattttttgttcttaaattgctccgtgcgtataatttcttcttctaaattgccaaaaaaaaaccattttcattttaagcagataacttattcatattttatctatttttttaatctatgaattttttttttaatttactatgaaattttctctttttctcatgtaaattgaacataattctttccattttatgacttttacatcattgcacatcattaagttatcgctttttgacatttcccaccaattcctttaatggatttggcgaaatgttttggcctttgagcccatccgattggaacggatccgcgcaatggcggcgaaaatggcacaacgctaatgcattttggaggggaaatgcccggggggaagggtgggtaaagtgcaaattgctcctaattagggcttctcctgggacatctctccatgccaacatggcattgctttattgcataagccgaaagcttttcctaaaatgtaaatgggattttttgaatgtgacagtttccttcccccaggggaccaactaaaggaaaattgtaaaattgaaatttttaaaaataaa

SEQ ID NO: 79697 - DNA, 155 bp, Heterodera glycines
atgattgcacgtaattgccgaaaaaattcgagaccaatttccgaatgttgaccgactaattgcaaaacgaaagccgtctttgtcaaagcgccttaccgagtcaaaaaatttggaaatgtatttcatatgcaatttcaaccaacaaatttgaagaa

SEQ ID NO: 79698 - DNA, 671 bp, Heterodera glycines
caccaccaacagtcccagggcaatctgatgagcggcggtgtactccttccgccaggtgcccatccgccccatttctcttccggcgcattccctcccctttcttcggcgggtcagcagctttcatttcccatggaatcagcaacacatcaacaacaacaagtactgcccctccaccattcacaacagcaacaacaacaacagcagccggcggcattgatcggaatgtttcagaggcaaagtcgcgaggacgaggggcagcaacagcagcaccaatcacgacaaaaccaagctgggcaaatgcagcaacaaatcaaccaacagcaagtggaacaaatgggcaccgctggaagcaacacaaccgcaaaccaacagcaacaggtcgtttggcgttgctttccgttcgcatgtctttttcgttcgctcagcagtccacgcctgcccccttgtccgtgtcgtctgtctcttctgctgccctctctccccatttgatggttccgttttcctgcccgtccacttcttccccagttgatccttccactccactgcaattcatttcccatcatccacaacaccaaggcgttccgccgccgcctccctaccaaatgcatccgatggccatgtcggaagcacccgttgggcccagtaagttttcttgctcatcccgtctctga

SEQ ID NO: 79699 - DNA, 521 bp, Heterodera glycines
atgcgctgctccgatcgctccatttgggttctgagtgttctgctcggagttctggtgctcggctcacagacggcgcccattttcctactgaattgggttctgatcagagagccgcgtccgttgaatatcactcggcttggcggccccgtggccggcgttgacgaccagggaccactggtaagagagggaaaggaaaagcttaatttaaacaaactcttaacacaattgaaataatgaaattccggatgattttttcctttttttgccttaggaaattccgttcgaatacaatgccggatactttggcatgtgccggcaacgattgccattgaacctgagcagcgccgaagaggcaattgcggcacaagtcgaccaattggtgcccattttggcaccggacatgtgagaaaggcgaagcgggaaatactaattaaaatcacaaattattaaaattatcgaattcatttcaggtgcgtttggaactccatttacaccgggggagaagaaatcggagaatttag

SEQ ID NO: 79700 - DNA, 662 bp, Heterodera glycines
cttgtggacaaggacgagcagaaggcgcgcgcggctgtccaacgcgagttggcgctgctgcgccgtgcagtcgcccaactgaacgagggccgtcgcatcaaggacattggcgatctgcgcgagcgcatgctggacgctcagcgtccgttgccgtggcgagcgatggccgacgcgcgcgaagtgcacgagttccgctcggtgcaacaaaacttctactcggacaggaaggaggagctgctgcgcgagatgtaccagctgcagggtgaataattaaattgggagcaggtcgcccccccccccctccccccgatttttttttaatttccaaacagaaattttccaaaaaaaaattcttaaataatttcttactgttactaagaaaagtgcaagaaaaaaaaatttcagcgatttttttgttgagctactaagttttttcaaaaaattccaaaaaatcgctgaaaatttttaccgggggggaggacggcgggggatgaagtacaccttttgcttgaaatagtcaatctcccctattttagctagtaatgctttcgattaaaaatgggaattttcaggcaaaatgggcatgtttctgctgggccgtgaccgtgcgttccgttcctattactacatgaacaccgccttcatcattctgtgcccgcgcc

SEQ ID NO: 79701 - DNA, 204 bp, Heterodera glycines
atgccttttcgtgccataacgtccacaaaaggagaggtaaaacaaaacaggggaaaataaatggaaattttgttaaaataaatttttaaggtgtgcctgttccctgaaacgatgtcttcacgcttgtgcaaaaaaatcggcttaacttttggcgaaaaattatcaatgagcgaaacgtccgaaacgaacagagtaaggcattaa

SEQ ID NO: 79702 - DNA, 818 bp, Heterodera glycines
atgggggtctgggtgagaaaagagaagggaattggtgagaaggagaaatttttgagaaaaaaattaaattatttatttgtttattgcttttgtttacatcgttatgtggtctagtggctacaccttctgcttttcatgatttttcgctttggttcaattccccactaagacagcatatttttcttatttcctttataatttttatgtaatgaaattttaattaataaaaaaatattccaagtttatttttatttaatttttaaacaggctaaaaaatcacaaattaaccaaatattggtcattttttgacaaattctgttaacatatttcactcaaaatttaaaaatttttccagcggcgcctatcggcaccgccggaccctgccgccccctcaccaatgttaccaaaagttttttggaaaacagcgccacaaaaacagcgattaaaagcaaaaaatttaagaaattttaatttattaaaaaatccagaattttgggaatcagaaaattccaatatcaaccccgccccagaaattaaaatttttaaacgttttccatcgaataatggaaaaatttttcgatttactcctcccaaacgaaaatttaaaaatttttatgggtacattttagaaaataggcaatttttcataacaaagtgcactcaaattttcaagttttttttcaaaaaaatttttcttgggaaattcccggttcaagaaagagggcccaatttcaaggacgtccttgccattcaaggacgaatgagaaccctgcataatagaaagtccatttatattcaactcaacaatttgtaataaa

SEQ ID NO: 79703 - DNA, 196 bp, Heterodera glycines
tttcccggcggcgcctaccggcaccgcctgctccctcttcccaaaaagttttttggaaaaagcgcgcctcaaaaaagctttttattgatttttaaaatttggaatagaattttacaaaaaaaaatgatttttgctttatgattttgactattaaaaaagttgtagaaaaaatttcgctttcgcgtttcgcaatttc

SEQ ID NO: 79704 - DNA, 705 bp, Heterodera glycines
atgccaatgtgccaacattttgtgccgacaaaattggcacaatttggagaaaaagtgtgggtgtgcaaatggtggaaaaagcggcgggccggcgcgacggcaaaacggcgcgggacaattgccataatttggggttggcagcgaaatttttgccatcgccatttgaacgaacgaacgatggatgaaagaattaacataattaatctaccaatttgagagattagtttttcaaaaacggattggtaaaaattggaaaaaagtttacacgaaaacgggtgtcggacgcgattatcggcatttcccctttcgcgtaaaaagccaaaaacggcaaaatgtgcaaaaaagaatcgccaattttaattaggattttggaaaaaaggaggtttccctccatgaattaaagttatttgaaaaatggactaatattatacgaacatttaaatttgttttttattatttattttttaatcaaatttcccttaattgggtgggaataaaaataattaacagaaaataattgatgctcaatgatcgatcaaacacttcttgccacactcaatcagtttcagacgtttagtttacgttcggcagcggctaaaaacgaaaaaaattataaaactttgcttaattaaaaatttaaattttcagttttaggcattctttttttccatttattttttgccctattttaaattaaaattttaa

SEQ ID NO: 79705 - DNA, 1035 bp, Heterodera glycines
atgctttgcgactgtatgattcagggcgtttcgtatgtgggcgaattttcttacttttccgtggacccgatagaaagaccgaaaaaaaaggtgtgtcgaatggtattatgtacggtcgattatagtccgatgttatattgacctctcccatttttgacaaaaatattttttgttcatggtaaataagccctttttccaacaaaataagcttttgaactttttagcgaaaaaattgagctaacatttgtattttgaccgggctaaatcgggcttaaattttgccagtgaaactgtcaaaaattggaaaaatttaaaattattttggcaaaatgtctttttcaaagtgtgaagttagaactgaaggaatttttgaaaatttgtacagtttcaacagattaaaatttttcacggcgatgactaacggtaaaatttgatccaaattagtaattttttgttaaaatctcttaaaatgggtaaaatacagaaaattcaaaattttatcgcccatcactaaaaatcattattcttttaaaaattgaataaattggaaaatttgaaaaaagtcgatttacatcactttacctaattataagctaaaataaaagactaccaatttttatgttattgatcaaaattcaacaaatttttaaaaatgtccgggcccgccagggcgccctacagtacggtctctggtccgagtattgcctgcacgaaaaaaagcttggctaatttttaaccattcgggtcaagccggttattacattttataaaaaataatttaataaattttagccaaacttgtctggtttttacaaagaagaaattaaaacagctgctatgcgagaattatgcaatttgctgcacatttcatcaatggagccaatgatggaaaaactaaaaaaagtgagggcattttaatttggaaatgcttgctcagagatgtgccgtatagtgactaccgttgccattaagtagaattttttttctaaaagagaccccaaaaatctatttaaaaacaacataaacagaaattca

SEQ ID NO: 79706 - DNA, 813 bp, Heterodera glycines
ttttcttttttcagttgccatttccttccgtcgtcgtctttttcgtatttacgccttcattcttccgtccgaatctgaccaagtgaatgctcggaatcagtttttagtgtaattccctttcagtttggttcgtcccatcctgttttggagtgcgacctgaacaaaacctgcggcgcaaagtgctgctcgcaaccgttgatctttcccggcctcatcagtttcgaatcatccactttttcctattttggaataacgcagcaggtccttcctaccggtacccaatgcacttcatccctttctatccgatttcaggcgccttcttacatttgggtgacttcttcgccggacgatgagtctgaaaaggaccaaatttgtgccacaactctctcaaattggtcgaaactggctctctaattcccacttttaccccttttttccctttcagccatcaaatccagaacacatgcgtcagtgtgtgtcagctgtctgggctgtgcgtctctgtgggtgccgatggtcgaatggcatgttcgcttaacgggaggatggcaccgaatgggcagggaggtggtgctttcaacttttttgtttctttaaaatgtttaatgaccaataaataactgacagatggtgaaaatctcatgcagggccgtacacttttgcacttgataatgcatgacaaatcaattgcagaaagcgaagacaataataaggcaaacaaaaaaacgacaattatcgtaaactgtttaaatgaaaatgatatttttacagaatttttgcttctcacacgacgagtgttgtacttatcggagg

SEQ ID NO: 79707 - DNA, 534 bp, Heterodera glycines
ttcattggacaattttcaaattgcaaaaagtagagaaattagtgaaaatcaaacggagagggaatttacgactccgcaagtaacaaatgggtcgacgggggaggagaagaagcgcaatgagaggagaaaagaagcagacaaagcaccggaccaacgatcgaagaaagggcacgacgaggaagccaatgctaacgaagtgcactccaccaccggtgcccagccgcccacattcacaaggcgacatgacgaggaggccaatgccaacgaagggcactccgccgccggtgcccagacactccctttcacagtcagtgcccgactgcccatattcacagctcggactttcacttatgaagtggatgttgcgcctgctgttgcggaacgatttgaaagtgctcaggtcagaatgaaatgtcttttacatctgattacgcattttttgttgtgctttctcttaggttgttgacatctacaacagtttaccaccaccaatggatccacgaatgaagcgagaaaatgcgaatggcatttcag

SEQ ID NO: 79708 - DNA, 1485 bp, Heterodera glycines
atgttctcagtgtggggaaccgggccacagaaaaggcacaaaaaagtgccccctttacgggaggggttctctgaccccggtcgttcaggagaacgtcccgaaattggagaagcgtggccgaggtgtgcctcggcttcagatcgccgcgagaaagccatctccggtttcgccatctccggtttcggaggtggcaaccacggaatcaagcctcccgggtcttcacacctccggcagcgcggagacaaaaccgaaaaaaggttttgcgcgccccaatttgactgaaatgaccgaattatccaatcgatcagtcttagtgaaaccggacctctccggttttaccaggatctccacggaagggagagctggcacgagtgggtacggagtgccgggcgccactttttccatcgtggaggcagtgcgggcactgcaatcaacagtggacactttggccacaacagtccgtggaagagctgcgggtgttggaggtgcgtgggtgccaatttctcccgttaaaaaggagagaatggacactcctcctccctttttgactggggggaacaccgaaccactggggcgaagaaagaggtgctgctgccgttgccacaatcactcgtcatcgccatcttcctcatcagatgagccgaagaaacgccgacaccgcaagcattgacggcccccggaatttgtcgccaaagcgaccaaaaattgattaaccgatcaattttgttttgaaataatatttatttgtgatgattcatcccctctcccgcctcctccggggttcgcttataaaaggcagccctaacattcattcaaaaaatgtaaatgaataagcagttaatcgatattgttaagcaaaatttgtcccttttttcccattgcatttttatgttttaaatttaattttcaaataaatttggattagaatttccctttttgtaagggaattaaggaaagattctttttccttaaaaagcctttttggtttggtcgaacttctgtcttttctggacagaaattcttaaaacttccccagtcgttgggaagagcaaatttttgcggcctatttgtcgacaattatgtttgcctcgattttgaaagaaaactcatttggccattgacttttggactttttaagccatattgggccttcccaccataatggatgtgataataattcttcaggggtacatcctctacttccaacatctgctgggttttcttctgtgggtacggctatccgacatttgcggatttaacatttgcggacccgacatttgcggacccgacatttgcggaacccgacatttgcggactcgacacttgcgggcccgacaattgcggataaccccgacatttgcggacccgacatttgcggaacccgacatttgcggacccgacaattgcggataaccccgacatttgcggacccgacacttgcggacccgacaattgcggactcgacacttgggaatcaccttttta

SEQ ID NO: 79709 - DNA, 5532 bp, Heterodera glycines
gttgaagtaccatcagtatatttccaaaactcccgtggccaaattttttggagatccattagcttgcccagtatcttggcaggcattccaagcaaacatgggcgaaaagccgatatctgatgctcaaaaatgcacatatttacttttaagtctaaaaggaaaagcggcacgttcaatgaaaggctaccaaccaactgcagaaaattataattggtagtaaacgctctaaagcgattatttggcaatgaaaaagtgataaaggaggcactccaaaatgaattattgaatttgccacaggccaatgaatcagctttctcacttcgagtatgcttagaagatatagaaagagtcgtcagacaattaaataatttaggatttgtgggagacaaagattttgtgatgatgacaattaaaaataaatttccaagaacaattatcttagaagcattaaaggcagaaaaagatagtgccatagaatggaatgtcgaacaattgattaatacgatagaaatcatcagagagtttttttggcgcaagaaacgcgaaataaaccaaatggtcggtcaaatccgtttgatcctaaatgttttttatgtgacgggccgcattgggcctcaaattgtaaacagataatgaacagagaaacccgaataaaaataatggaggattaggcacgttgtcatcgttgcttgaaaaaaggacatgaaatacgaaattgtacgggaaaaatgtgttacaattgcgacggaaaccataacaaattaatttgttcaaaacccattcaaaaagtagcagcaaatcgcttcataaatagctcaagaaacgaaagacaagcgcagatttcaagtttaatagcaactgccatcggagaaatgggcagtgaaaaggaagcattactaatgacaatacgcgtgaaaattataaatggaacaaaatatttaagaattctagtattttttgacaacggaagtcaaatctctttaattacggatgaattgattaagaaaattaacccagaaaaaattagtgaaggaaacttagaaatattacctattcgaaaagacaatccggtacgcctaaactcacctaaatacgtaataaaattagagagattggatggcaaatgtgaagaaatcattgtaagccgtattgattttataacaaagaaaataaaaagagctaacattatttcaggaaaagttgagtttgtcgaagaaagacctgacattttgatcggaataagagaattttggagattctttcaaaaagttgaaccattcagtgaaggactcgttaaagtagaaacagtttttggaacaataatttgtggcgaaacagttacaaaagggaaaaatatatgccccctaactgcaatgattatagaaaaagaagacaaggagcccgaaaaattatggaatttagaaatgattggaattaaggacaatcctatagaaaaggatgatgaagttgcactcaaaatgttcaaagaatccgtgtacagaaaagacggacgttatgtagtcagctggccatggaaaagtccaattgatgaattaccaacaaacttcggtctggcataccgaagaatgattggaataattgaaaaattaaagaaatcaaaagaatttttaaaacaatacgatgaaattttcaaagagcaattaaaagaagatattgtggaagaaactgaaataaaaggtcacaatgaacacttcttaccttacctcaccattgtgtattagttgaagaaaaaaagacaagagtagtatatgatgcgtcggcaaaaataaagggcaaaaaatcattaaatgacatgctatttagagggccaatttatatgccagaattaccaggcttattaatgaggtcaagactacctagaattgctctttggggtgatattcaaagagccttttggacgttggaattacaagaaaatgatagaaattatgctaaattcctatgggtcagagatgtcgaaaaaccaatctctaaagacaatttatgcgtttttcgatttaaaagagtaccatttggtgttatatcatcaccatttttattgggggcaacggtgagacatcacttagaaaacgaaccctcagatttggcaaaagaagtcaaaaataatacatttgttgataatgtttttgtgggatgcaataattttgaggaagcaattgaaaaatataaaaatttaaaagaactatttaaaaaggcacgaatgaatataagagaattcatatcaaactctgaaaaagtaaacaaagaaatacccaaaaatgatcgtttaatcaaggaaaacccgaaggtactcggtgtgaattgggaaataaataccgacaaatatattataaagtttccaaaaattatcgacaatgaaaatttgagcagaagaaaagttttaaaagaattaaactcagtttttgacccttgcggttggttagctccgtgtttattacctgctaaattattcttccaaagtttgtgggaagaagatcgaaaatgggacgaccaaatatcagaagaaaaacaaagtgaatggaaattaattaccaagtcattgaaaaatatggtaatcaaatgcaatcgcagaattgtgccagagaaatatgaaaaagcagatttacatgtttttgttgatgcctctaaagatgcatatgcggcatgcgtttatttgaaaatcgaatcatatacaaaccaaattaatttgctatatgcgagaagcagattaaaaccaagaaaagtgcaaatcactattccaagaatggaattattgggagtattattaggcactagagcaattaagtacgtggaaaaggagttaaaaatagaaataaaagaaaagattttatggtgcgactcaaaaccagtattattctggattaaatcaaaggatgatcagccaagatttgtagaaaacagactaagagaaattcgagaataccaagatttagaattccgatatgtacccaccgtggcgcgacgtttgcggatttgacatttgcggacccgacatttgcggacccgacatttgcggacccgacaattgcggataaccccgacatttgcggacccgacacttgcggacccgacatttgcggacccgacatttgcggaacccgacatttgcggactcgacacttgcggacccgacaattgcggataaccccgacatttgcggacccgacacttgcggacccgacatttgcggacccgacatttgcggaacccgacatttgcggactcgacacttgcggacccgacaattgcggataaccccgacatttgcggacccgacacttgcggacccgacaattgcggactcgacacttgggaatcacctttttaataaaatcgtgttaaaataattagaaaaatcatttttgaattcaaaaaaaaattattttttaattaaattaatttaatatggacttttcaaggcaacaaagtcgttgattctttatttgaaaaaaagaaaatgcctttcccaagggccaacgggaaaatgtagttaattactccacatcgggcccatcccaattttcaaaatcatttcgcatcagtcggtattgcaacgatctcagcaaaaaactttatttacctctttcaaaatctaacataacactgttaggggcaataccaagtgaagcatccaaggcctatttttaatagcaaatttaaattaaaattgaatgttaattattgcatggtcagattaaaatacaaacaataagtacctgaagaactcggatataagtatcttcggctttatttgccataagtgcaaacacagctgggacactgctatggtcaatcaagcaattaatcgtatagacttgtagaaaatttcgcgatgcgactgtcaaaaaaactcataaacaaatatttgcaattttacttcagctttaaaactaattcaggacgagttactacctttgaaggtgccatcagaagcccaatcacggtaagttcttaaacggcgaaggccaccggcgcctttgctttccgaaagatgtgccagccgcacgcgccgtttgtttttcactttgccaaaacagccggcgcctttgctttccgaaagatgtgccagccgcacgcgccgtttgtttttcactttgccaaaacagccggcgcctttgctttccgaaagatgtgccagccgcacgcgccgtttgtttttcactttgccaaaacagccggcgcctttgctttccgaaagatgtgccagccgcacgcgccgtttgtttttcacttcagcattactttaaattcttaattcttacacaacacaaaaagtattttgacgatgacataaaatgaaaacgttttttctatttttacattcctcttttcgataattttttgatgcattaaataaatattttaatgcagaatgatggtaaacaaatttattaaactatttgttttgcttcttctgatctctcccaccaatgaaaagccgcatcagaaaagagccttagtgacaattgcattgattggcgccttagcacaattgaaggcgtatttattagcgcacaccggagttatattaacagcatcaatgataacagcatttacaacattgtctctcgctgtatatgttaagctcaaacgtgagatattgtttttaaatatttagaacttatttattttctaaattatagattgcagatgtggcgatctgttaaaagatttctttcccataaccttcgtcctgaactcgtacgagttctctgtgtcagtggaggaatttacacccgacaacatttttgaaaaaatttcaaaagctaggccggaatgttcagcaattttgctttggtttgttttaaattggtttaaattattatagaaagatataataaattcagcttctccttcggaaacgactcgaaagattaaaaaaagtgatgaagacatggggcttcttttactttatgcaacccgaagccaaggacggctggaaatcttcgactgcccctgattcaggaggctggaaatcttcgactgcctctgtttcattttttatgatatttcccgttggcccttgggaaaggcattttctttttttcaaataaagaatcaacgactttgttgccttgaaaagtccatattaaattaatttaattaaaaaataatttttttttgaattcaaaaatgatttttctaattattttaacacgattttattaaaaaggtgattcccaagtgtcgagtccgcaattgtcgggtccgcaagtgtcgggtccgcaaatgtcggggttatccgcaattgtcgggtccgcaaatgtcgggttccgcaaatgtcgggtccgcaaatgtcggggttatccgcaattgtcgggcccgcaagtgtcgagtccgcaaatgtcgggttccgcaaatgtcgggtccgcaaatgtcgggtccgcaaatgttaaatccgcaaatgtcggatagccgtacccacagaagaaaacccagcagatgttggaagtagaggatgtacccctgaagaattattatcacatccattatggtgggaaggcccaatat

SEQ ID NO: 79710 - DNA, 880 bp, Heterodera glycines
  unsure (1)..(880): unsure at all n locations
atgtgtcaccgacggncaaccattcgaaaactggatcgaccagttcaagaaggtcggaccgggaatggccaccaccttttctttcttcgtgcatcttcgcgggttttatatgttggtctagatctttgaggcagagacattgattgaaatattagagcccgacctgggacctggatccagtcctggattttcctggatccaggttccaaaccccaattttggcaaattccttttcctggaccaggattttcttggaattttgtccagaaatccaggtccaaccaacatggaattcaggtccagaactttttttttaaatgtcgagctctaataaatatagtcatttgtggtttttgggatcatccaaccaacaccgccgatttgcccccaaaatccataaaaaaattgtttatttataggcatttctcagtgccaccactccttctggcagttacaacatttatttttacttggaagaacaaacaattgaaccgttcgaactggtgaacgaacagaccggggaaaagttggcactgcaacaagtggcacaccaaacttacaattggctgctgaagcgccgcccggaaatttttgttggggaggcggtgccggttcagtgggagtacgaaatagtgaaccgtttgaacactgtccagattcaattgcctaacgacgaggagtgccttgggtgattttaagcggattttcttagggatttgcatttttcttttttacattttttatggtttaaacccatttttgaaaaatccgcattcgattggctgactacaaaaaaaaactgcccttgggtgatttttcaccggattttttccttttggttttcgcccttctgatgacttttttattttttatgaataaa

SEQ ID NO: 79711 - DNA, 90 bp, Heterodera glycines
ggattatttttcaaaacacctcgtagactgggggataattggagactgcgggattaatagagactgggctataattagagcatatacggt

SEQ ID NO: 79712 - DNA, 587 bp, Heterodera glycines
atgctaatggccatggaaaaagtgcatttggtaattacaacggacggaaaggtggggagggagggacatggtcaactcaatgaaaacctgttaatttgtaaaatatgcaggagtttgtcacgcgtcggcatttggtcaccgaatgtgccaacgaatgtttggcctccggcggtcgcattgcgttgacggaattggctgcccaactcagcgtcgacttggaccacattcagacggcggtcaaccaattgttggcaatgaatcggcactaccgaatgaccgaagacgaaaataccgtcgaagacatttcgacgcccgccgaattcgtcgtctgtgccggggaactcatccaccggtcattttttgagcataatttcctttgaatttattaagctttagtgaatttatcaacgatttgtgctttcgtcttaatgcacgtctcacggaatttggccaaatgtcactgtttcaactgaccaaacaatgggaagtgcgttaagggaatggcactcatgaagaatgattagtccgataaaattccccctccccccggcatagcaatagcactcaattgatttacgaaaaaaaaa

SEQ ID NO: 79713 - DNA, 968 bp, Heterodera glycines
atgacgacaacaacaacgacgaccactaccaccaccagcagcacgccaacgacgccaaaggggacgacgacggaaaattggagcgaatcattagcggctgctgttggcggaaagaccacacttgtgctgatcatcgttgggtgcgtttgtccttgtttaccatcattcattggggaccgaccatgacgaaggcgtgtttttttgaatgtcgacaatggcacaaaattctggcatttttgggtcgtttggggaccaattctgacgaatgagtgtttggagtgccggcactgggacgaaattccggcattttgggttgttgggggatcgaccctgacgaatgagtgtttttgggatgtcggcaatggcacgaaattctggcatttttggaccctgggatttcatcatcatcacagcagataaaaagcagtagtaatttcacatttttccccatttgttttttcagcgcactgattgcaatcattgtcctgctcgtggttgttgtgtgctgctgctgctgcaaaaaacgcaaacgccgccgccgccacacttctgccgacgacgacaacgacaaggaggacaacaaaaagcgcaaacgtcgccaccacacttctgctgacgacaagaaggaggaggaccactaccacattgaccagcacaataagaaggagggggagcagcacggaaaggaggacaacaaatcgccgatacaaagcgaactgaaagtgtcgacgatttccgccgtgccaagcgactacaacacgaacaaacggctgggcgcaacagaattggacgtggaagcggaagaggtgccgaagacgaagccggttcccaaaaagtcgaagtcagaaggaggcacaaagcgcaaactgtccaatttcttttggtccaccggcaccaccgagaagcgaccgagcgcggcggaacatggcgtggaagtgccggaaacgattcgtgatgatgaagattga

SEQ ID NO: 79714 - DNA, 1552 bp, Heterodera glycines
atggcacggcacatttggcccctgttgaggaacggacttcgcacgctggtcagcctgaagcgcaaacaactggcactgatgcgcaaacacgtgtcgccaaccgtcctcttcgactgtccgaaccttgtcgaaatcatcaccccgattttgcccgaacgtccgactgttgacaacaccaaatatgctgctgacacctcggcccgtgacctgtacatgtggctgcacatgccgcgccctgacggtcgtccgttggtgttcaaattgaccaaatggagcaaaggatgggaccaattcgtcaacgatttgtgctcggtgggatttgtggtggatcaatcgatggggacggatttttcaatttttcactgaccttttttgggtttttattgcagttcacacgacgataaaataattggacaattttaataataactttttctataagcatcaaaattaaacattcttggtatcattcgatagcccaaagtgtcctttattagcctgcaaaatttcaaagaatttcattatatttcaaaaaagttgtaaccagaaaacttcaaaaaaatgaattttctgtacatttttgaccattactttttgaattttgaatgaattttttaaaatcaacttaggactaatagaggactctttggactatcaaatgataccaagaatgttgaatttgaatgcttctagaaaaagttatgctgtattaaaactgtcaaatgtttttatgaccgtatgaactgcaacagagtcccttttttgatcattattctgcaactgatctgatcgcatttccccttctttttaacacagtcattcactgcagcgtccgtcccggtcaaatacatggtgctcacttcgttcgaattcaactacaccaggagtgaaaaaatggtcaacattcggacggcggaaaagctgacgctgatgagcaatgtgcatccaaatccaaatccagctgtgggtggcgtggtgtccttcgtgaagattctgcgctgtccggcggacttcagtgacgctgccatggtctcctggttgcgcgtgtcgcgcgtgaacagcgaacgtctcacgaattgggtgaccattggcttctcggatgacgaaattgggtatggggacgagtcgccaacaaatttaatgttcggctttttcttacgcttttcctccgttttcagaccgttgcctggctgagaagaactgagaaggattttcaaactgcagatcaacagcagcagcagcagcagcagcagatgagccctaagcacaatggacaatcggatggaattatataatctgatcattatcgtttcataaattgtatttatccgatcaaatgactgattttgtcactgatttcactgtgtatattctgtatgtacatattgtatttgtcttgtataagggaagtaaagcgtcgctgaatgttgtattttgtgcctcgatttttgaaattagacaatttttccattttgaaaacagtacaatttcgtcggtatttttcttttttgtgtgaatctcttttatagccctcccccacccctccattaaa

SEQ ID NO: 79715 - DNA, 972 bp, Heterodera glycines
atggcgcgtgctgcacgcagcaacgtcacccggagcacggacggcgtatcgccgtcatcggggcaacaacctaaacaccttctgaacgatgacgaacggttgatccattaccaacaggagttcaaacggttcaaaaaattgctggaggatgagcaggagcgtccagcgcctgttcgtctcacccaactgcccaccgacgaagcctcgaaggggctgctgcgcgatgcactttccgaggcggcgcgaacaattcaacaacaacaacaacctcaaccaaaacagccggcgccgcaccaacaacaacagcagtcgtcgcactctgattcgtctacaatgaggcagcctccacgtcgcagacaacgaccagccaaaaggtcaccccgtacgacatcagtctctacggatggcgccgaagctagccgcttcccgtcatcgtcgtctgccgcctccttgttgacacgcactgataatggaggaagaggaggagctgagacgactgagcgtgaagacagctccaacgacgaccgaccccaaaatatggcggcagttggccccgcaaggaaaggacagcgggaagaagcggacgtgcaactgcatccatcaacatcgacagcagcagcagcagtcttacgtgacactgagcagaggaaacgacaagccattgactatgcgttacgcaacgcgggcacgctgggcatcggagatggacagcaggtgtaccggctgatgcaaggcgcgtaccgtccgatcaagaacagcgatttggatgctttactcacttttcattttgctgagcccaaaccggagaaggcaccgcctgggtacaaaacatttattggcaatgctcggaaagacccgcgcatggtacggatgctgttcggcaacagcggcgcggaaagcggaaagaaaaagaagaagatgggtggtggcggctgcttgctccaccgctgctacacttttgcatgcatttaa

SEQ ID NO: 79716 - DNA, 483 bp, Heterodera glycines
atgtcgaagctgggcagcgatggtaatgatgaacatggcggtgtcaaccttggtggtggagatggtggtgatgatgggcaagcgttgccaaccgaggatgacgggctgggcggtgctcatctccctcccctattgttcatcgatgaggaggaggaggaggagagccccgagtcgcgcgctggggatgacgtgaaccgagtcggtaacggtcagatttacactgaaaaagtgaagcaggaaggggaggaggaatcagacgacggcaacgctgacatggattctgtcagccatgacacgtacagaagcagcagcagtagcagcaccatgagttcgtcgttgttcttgctgcatgactgtcatatgcgccaccactaccaccacgacaacaacaactgcaacagcccgccacgaaaacaagcggcgacagagctgctcaagcttccgctcatcgactatttgtgtgggctgaacaacgggtgcagt

SEQ ID NO: 79717 - DNA, 417 bp, Heterodera glycines
atgcgccccaacgatgtcaacttttcaaatgcgcaaaaggtgtggaagcgactgtacggacaccctgctcttcaaaagcggacgccacgcttccgtaacgaccagtttgtacgcatgagcagagagaaggggcaatttgagaagggatatttgccaaattacggggacgaaatcctggagattgacgaggtgttgaaagcggtgcgcccgattctgtacaaactgagggatgaacacggggagaaattcaagggcagcttctatgatcaggagctggcgcgcgtcagaaaggatgcagagacgagctaccgcatcgagaaggtttacagaaagagaaaactgtcgtatgggtccaccgagatgcttgtgaaatttataggatatcccaatcgggaatggattaatgagtctcagctt

SEQ ID NO: 79718 - DNA, 626 bp, Heterodera glycines
atggaagaagccaatgaaaaaaagcacgttcccgaggaatacaagcatctgctcaaatttacgtaggttttgtttccaaatttttaaggagaatctttacctacttttcaaatgtatttatttttaaattaattatttttggtttaaatttggtattctaatttaaatgcatttttgaacatttttccttgcttagatatccggattcggttaaaaaacctgaggaatatctcggcggaggttttgtcgccatggaaatggatgcgaaaaataagaaagcaaaagttaacttttatgccgctggacacattcatccaacggagcaaaaatttgtggaaaaagaaaaatttgtggaaggatcgaaattcaaatacaacgtggaattgtagtagagaacgaaaaaagggggaagaacaagaacatagaaatttagatcagtacatccaattagaaaaaaaacgtcgtattaccgtaacccattatgtaaacgcaaccatttatttgaaaaaaattttttaaagaaataatctctcattcgattaacaaaatctaagtttaaactattaatgtaacgacatttgactgtttaaatggggagaatttcaattgatccctttttaattaaa

SEQ ID NO: 79719 - DNA, 855 bp, Heterodera glycines
atggctcaaaatcgcaaaatttgtcattttttcgtcgcccgggggaggtacttccccaagccgaaatccttggaccttccctgctccccgccctcccactgggaattcggaaaatgaaaaataataaaaaataaagaattttttacaaaataccttatcaaatatgttaaattccttttttcccgggatgcctctcggcacaacaacttgctcttgagctgctggctgttagcagattctgcttgttggcaaaatctctaattattttttaataattcttaggtgcttcatggggccataaaataaaatatgttcaggaattcattgctcctaatccgccatgacgggctaatatgaaaaaagtttagaattttttgaacatttttggtaatgtcggaacaaaagatgtgccctggtacaccgttgcgggcaatcgggattatcatcatttggatggatacgacccaattgcgcctcaaattgaaattataggcgaaaaatggtgaataacggactaataaataaatagtcaaaaatgctaaattaaaaaaaagaaaaaacaattacctaataaatttaaaatataaatattcaaattaacatttttatgaaaaatgcccaattttccgtttttcttttaggacttttcccgccccttattacaccgtgcattacaattttggcataaatttggaaaaaagtgttcgttttgtgatggttgacacagtcattttatgcggcagaaatcggaaaatgtttaaagatgagaaaacttttaccgaagaaatcaaagagaaatcggaaaaacacttcgaatggctggaaaatgaattgaaactggcaaatgaaaagtga

SEQ ID NO: 79720 - DNA, 1518 bp, Heterodera glycines
  unsure (1)..(1518): unsure at all n locations
atgcgcgagttgcagacgcgcatcaacgccaccatcgtggaagtgcaaaaggtgacggccaacccacgcgcggacctcagtttgggccgaatcggacgatgagagagacgacgacaaagggggaaacagcgggggggggggggggatttgatataaacgcccattttcgatgcattttcaaattaggaaatcaaattgaagacggaggattttcacccaattttccattgtcttattgttttttccatatttattatgctttttcaataaataaaatattaatattattactccattcttttgcctctgttcgttctcacttcgaatatntaatttatttttcaacgattgttggttttttcatgtttttaatcctttaaatggggcgtcgtctgcccaatgttttggttaccggaacgccggggaccggtaaattcatttattttatacactgataataaaaaattttaatctgcgggaaaatcgacgttggccaaaaaagttgcacaaaatgttggcatggagcatatcgacaccgcatcgattataaagtgaggccaaaaagtttttcattttttactttgcagaggcaaaaaactgttggaattaaaaatttatctttaaaaatttcaaaccataaggaaaaattttcggttttcatccctccgtttgttggtcataaataagtagttttttttcgattattgaccaataccaaattactctataataacggcttcaatgggtttagggaacgcgaattttatgcggaatacgacgcccaattggacacccacgtgctcaacgaggacgcactccttgaccatttggaagtaaacacaacaacagtcacatcaaactcaaatagttttgaccgctttcattgctttaaaatacgataaaatttaaattgtaattattcattggcttttcaggaacgctttggctctgacgcgggcggcctaattttggactatcactgtgccgaaatgttcccaaagcgatggtaaggaaaagaaacaacagaaaacacattgtttcatgccctccccctcccaatttgccgtaggttcgacctcgtcattgtcctccgttgtgccactgactcgctgttcgatcggctgaccgaacggggctattcggagaggaaaagacgcgagaatttggaggccgaaattttcggcatcatcgcagaggaggcaaagtgggcatttaattagggctgattttttttcaaaattgtcctaaaatatacagttccccttacctgcttcctctcttttgttagaaatggaatggctacggaaaaaacttagtaattcattgtaaaattttgaaaaaaatgaaatttctcatatttctgcctctccttgagcatatatgactctcgttatgcttttaattatatccaaaattaaaactttttccagtgccagttatgacgagtcggtcgtgcacgagttggagaacagcacagccgaacaattggaggccaacgttcggacgatcaccaatttg

SEQ ID NO: 79721 - DNA, 1505 bp, Heterodera glycines
  unsure (1)..(1505): unsure at all n locations
aggaaaaatttcaagagctaaacagagtgtttaaggaaattaaatggagaaccaaaattggacaataacaattccgccgatttaaaaaaccaaaatatgattggacgaataaatgcgcaaaataagaaatttaaaaaaataataaatcgaatttcggcatagaattgagaagataaagaaataatggcagacaaaaaagtgtgttgctgctgctcacattcagcagaaacaggaagactcgcgcgtcgtccgctcgtcactgcgactattgccaaaatcgatctgatcaggaaattctgaaataggagaaatccattaagagttcagttcaatggatagataggtctctttagagaagggccaatattataaaacagaggttctattttctttcccaccatcgctctacccccggcgcaccccaaaacgtaccccaaaacgtcgccgcaaaaagtatagaaaaagtacaagaacaatttggctacatgtcgtttcaatatatgtcatttcaatactcagtgaaaatgtgtcatttaaatactaattgtaagtcgtttcaatatatgtcatttcaatactgtcgtttcgattcgtttcgtcgctcaattataacgtcctttcgtgactgccttatgttaaccgaaaattttaatataggatattcttcataacaatggttaccggtgtaaataacaaaaaatgataaatttggaatttgggacaaaggtgagaaattatgggtttcttggatttcccgaagtttgggtcttatatcagacatagcaataaatgaaaaaattcaaaagttaaaatgaatgaaatgagaaaacataaaagaaatgttaataggtatgtcaaatccaataaaaatatcttgaaaggacttagtattgaaatgacatatattgaaacgacttagtattgaaatgacatatattgaaaggacttagtattgaaatggcatatattgaaatgacgtatattgaaacgaaatgcaccggggacaaatgcgtaatgacttttttgtatatcgatcaaattatataattccgtatcgatctacctaaatgtgctctttataagcgattaatatagcagaaagttaagcttgaaaactaaaaaagtctcaattttgtatattttcgggaacaatttcttacccaattcattgttgtttttgtccccaccactattttttttagctttaaggccgcaacattttcctgggcgacgatgtgttcctcaattacaactgttgcgtgttggacgtttgtcgggtggacattggggacaaatcgatggttgggccctttacgcggctgaccacccccgggaccgagcagtgcgggaccagggctgggaatacggaagaccggtgcgcattgggcgaggcgtgtgggtcggaggcggagcggtgattttgcccggcgtgacggtcggcgacggcgcaatcattgggtgggngtgtgtaaacaaattggcaaaaaaggcaatgactgactgat

SEQ ID NO: 79722 - DNA, 103 bp, Heterodera glycines
actaatcagatccaagttggtccatcgccgccagtaatcgttaggccaagcggacagagccatccggtgggcacttcccacatgaatttgtttgccgatctcg

SEQ ID NO: 79723 - DNA, 297 bp, Heterodera glycines
aaaggtaccgcggcgattgtttgaaccaggccatctgcaaatgctcatgcgaggcggacccatcaaaaccggcaaaaaatgtgtgcacaaagtccaactgcgactgcttgcgcatcaaggagtcgtgctcaaaggcgtgccaaatttaatttaaattattgccaaatttaatttaaattatttaaaaataattttttaaatttttttcagttatgcgcctgtaaacaaatttgcaagaacaaagagccgccaaaacgggcggcaaaagtgaacaaaccggcacaggggtgtgctttt

SEQ ID NO: 79724 - DNA, 2610 bp, Heterodera glycines
ttgcaaatgcggcggagattgtgccaacggagcatcaaaattccatgtgcctaaacatgttcagaattgtttcctggaacataaacatgagagcaggtcaattgggaataattatttattttttaattcaaaaaattatattttagacagcaagtttttaaattccaaaaaaaataaaagaattttttcaaaaatattttgtgattttctctaaaaaggaaaactttttgaatttcaaaatgaaaagaatttttccacctggaaatttaatttaaaaaattataccccataaaagtggcctaattgtgacactaattggcgacggttacatttatcgtggcgactttttccatgactcaaagaatgagccgcatgtggaggagcaattagttgccgcaatttatgatctgatctccaagtacaaagtgagtagaaaatagtattagaagtcattaatatttaaaaaaaatttttctattaaattttgcccaaattttcaataaaattaattaccttttttgtgctacagtaattttcattttttttttacattttaattgccggaatttaattttgatttcaactgctaatcacccatcactcattactcaaatgttgatgtaaaattaattacaattttttatttttttgtaattttaatagtatagtttgatctatttttttaattttaatttgcatggccaacctatttttttacattttaattgcctgtcatcaattaattttttttaactgatacttccatccacaaattgaggttgattatttttactcgagttttgggtgtaaaataagctatcattttttggtattatgtgtatactaaaattttgtccatttttttatttattttaattttcaatggccaacctatttttatggcattaattgcctgaatttacttttaatttatcccataaattgaggttgatctgtacgaaattgtcatttttgtgtccaagagtccatgctttcaccaggattgtgagcccaaatgtgaggtggtggacgaatgcaaatgcaataaaggtgtttttttatatttattgactattttatgccttggaaaattcaaaaatacttcaagataaatttttaaaaaaactttttgcccgaattttatttttgatatattttcattttaatatgcccttgaaaaaacaatttcctgaaaaaaattcgagaaatttttcgcccccaatattaaatcattcaattttttggcgtttttaggattttttcaaaaatcttaagttttttagggtggtttttttttgtgttttttttgtctttaggtcagtgtatttttgcgaaattttttttgttgaaaaagccaacctaaaatcaattaagattttaatgaaaattaatttaaaaaaaacaattttacctaaattatttttcaagcttgtgctaaactgttgggattgcttttgtcaaaggtgcgcaaggagttgagcaaagtggatgtgcgaatgacagtcaaatttctgtgagttttaccatattccctaaaacagagccccgggggttttatttttcaaaatcttggaatggtggctttatttcatggggaactgtaattaagcatatacgagacatgtttgtatgattagttaaatatgagcattttaaaaattaaaatggatttgaaatcccaaaaatttcgaaaatccaaatttgcatgcctgtgcgaaatcctctacatattagctaaagataagcaaaaaacaaaaaaaaaaactaaaaacttatttaacatgcaaatttcacttttctaaattcccacgcattcctaattatcatttttttgacctaaaagagatggtttaaaaaaagttctaaatggctgaaataggcttataaataggatttaaatgctaaaaaaaaataatcacataatttaatttaattttaaataattcttttgtaaaggtatccgcatttgaaccgtggtgatctgtacaccaaacagggcattttgtccatgttacagtcaggcatcaaagtggaaccactgttgttgaaggtggtttttgaaaaattttttgggaagttcttgatgtcatatttttgtaaatttaatacattaattgtctgcaaatcttgtaatagatggtcattttatgtttttttttttttgaaaaaaattacattttttttgtatttgtccaaatctttgttatttaaaaaattaaaaaataaatcgaaaacttggaaaattgcaaatataatttttttgggttttcagctttttcttgcaaattttcattttaaaaatttaacgaaaaaataagttttttaattaaaaaattacaaaattcattgtacgaactgtcattgctcctccctcccggttatggggctaaaaaagttttttttttcaaatttttaaatttcaattaattacactaattaatcacataaattaattaaaggattggagtgccgtcatggattgggcaccacatccagaacataagggcgaatatttgcaggtagtgtataactatctatctattcttgtatttgttgtaattacattcattcatcattattcaaataggggtatttaaaaattctataaaa

SEQ ID NO: 79725 - DNA, 1278 bp, Heterodera glycines
atgtctgaaaaagcgcggcaaatctcaaaagatttgggtgagttttaaaaaggaaagtgcgtagcaatggcatttttatatcgaactcattctccgcccctttggccatcggtgcgaattcggcacaactttttcattctcagcaaaaattgttagccatggcatttatttgtggcattcttcctgcgaattttgaggactttcccgcaaaatgtgaaacggagtctcttctccccccccccctttcattcccttcggcagaaatccctcgagggcatttgccgagaaaaataaaattgggggtataaattaaaaagacattgtgagcacattctcaaataatgtcaaaacagcttccttaaaattttattttcaaatatttatcctgcttttccttctgttttctaatgaaatcaatgccaaaagctttgaagaatcttctgccattttttgcctgttttgaccaattatcctcaaaaagggaatttattttcaatttatgccttctctccgtgtcccttggcttcgccggaataataaacattggttggttggccaagccaaagacagtggccacaaattgggactttgccgcactcccattgagttagcttcgtcttttgttttctctgccgtccactcattcgtatcgattgccattgttttaaagaaagtttaaattaaaattcgggtttcttaatttggctcatttttgtatttttgagaatttcaaactttgactcggcttagttcactcattggccagatgagatggacttggacgagttgcgacgccagcaatttgccatccgaagtttcaccgaatcggtggacgacgaagagacggaatggccattgccaccaacaaatttaatgatgaggagaggggaagaagtgcagttgggacgggatggaagggaagaagaggaggaggaggaggaggaagaagaaaaggaagagaatgcgtggcggaggaggaggaggccaagcccggcgcacagcgacgagtgcggcacaatgcgcgagagcagcacggcagacacaattgtggaagtggtgggcgaacatcgacaagcccaaaacagcaggacacgctcatattcagctcaatcccaactcggccagcacctcaaaatgggccccccaaatggacccgtcaatgggcgaaacgcaaaaatatgtgatgagagtgccgggccccgagttggtggaccaagaattcgaactgcacaaaagtttaatggacaattcggtggaggaagaaattggggaggatga

SEQ ID NO: 79726 - DNA, 1083 bp, Heterodera glycines
atgacaagtgaaggcggcgccatcgtcgaattatacgccggcgccgaacgcatggaaagcggcgaccaagtttggcgtgagctgaaaaaaaaggcgcctaaaacggctgaactgctcgaagacgcgtgggcacagatcaaaaaacggtgggcaaaattcaacggaatgctaaacgacgaggcgaagcagtacatggagaaggtgaagcgtgggaacagaacatttatttgagttaaatattcatttatacataaataggtgaaatacagcggttggcattggtttgttcgccaagttgtgggcccatttgtacgccttcccaacgacgcgaaaacgaatctgacgctgagtttgttcgacgcgtatccgttgatgaacacagtgatgagcaaattaatggccaaccgaacattcttggattgggctggagaatggtacaaaaatgcggaacagcaaattcagacaatggaaaagggtaattaattaatgaacaaatagaaagaataataattggggagggggggggggtgcgaaggagtaataatcagagagggaaagatggagagagagagagagagaggataaagcatagatcggagagggaaggaatggaaggaatgataaagaagcgattagagaggaaggaaggtaaagataatgcagggtagaagagggggaggggggggggaaaatatatgtaaatcaaaaataattacagaaaaaaatgccacgaaagaggagctgaatgaggatggcataatggcacagatgaaagaaatgtttaagcagatgaatctcggaaatttgaacgatttaatgggaggaatgggtgaagaagaagaggaagaaatgagagaaggtgaagaacaattggaagaagaggaggaggaagagaaagaggaagaagatgaaaaggcagctgagaaagaaggagagggcgaagaagaaaaggaagagggagagggacagtgcagcaaaagcaatgaaagcaatgaagaaggaggacaatgtatggcaaaagaaggcgaagagaacgcagaaaagtcagagacgaagatgaaagaggacagagatgaattgtga

SEQ ID NO: 79727 - DNA, 548 bp, Heterodera glycines
atcaacggatacgcgtcgaacaaactcagcgtcagattcgttttcgcgtcgttgggaaggcgtacaaatgggcccacaacttggcgaacaaaccaatgccaaccgctgtatttcacctatttatgtataaatgaatatttaactcaaataaatgttctgttcccacgcttcaccttctccatgtactgcttcgcctcgtcgtttagcattccgttgaattttgcccaccgttttttgatctgtgcccacgcgtcttcgagcagttcagccgttttaggcgccttttttttcagctcacgccaaacttggtcgccgctttccatgcgttcggcgccggcgtataattcgacgatggcgccgccttcacttgtcattgctttgatcagtttgagtaacaaatctttgggcaatagagctggaaaagatgtttcgccaaaaccagtaaagacattcgtttaacacctcgaaaatgtcagggagccaattagcgataaatgtgtcacattttcgggctaaataaatcagccaaaataccctcctctcctaaa

SEQ ID NO: 79728 - DNA, 669 bp, Heterodera glycines
atggaatttgtgccatttttattatttatttttctgtttctgctcgcaattccgccaattcgttgtgatgaaattccgttggatgggcccgaccccgaggtggacgagcacatccgaaagcaattccaaagccacgcggacgcattctcagcggggattaaggacggatgggcagaagagatacaaaagcaaatgggtgagaatttagtcaaaaattagcattccctcctatttatgtaaaataattcaaatattgcaatttaggagaggagggtaatttggctgatctaattaagcccgaaaatgtgacacaatttatcgctaattggctccctgaacattttcgaggtgttaaacgaattgtctttcctggttttggcgaaacaattttttccagctctattgcccaaagatttgttactcaaactgatcaaagcaatgacaagtgaaggcggcgccatcgccgaattatacgccggcgccgaacgcatggaaagcggcgaccaagtttggcgtgagctgaaaaaaaaggcgcctaaaacggctgaactgctcgaagacgcgtgggcacagatcaaaaaacggtgggcaaaattcaacggaatgctaaacgacgaggcgaagcagtacatggagaaggtgaagcgtgggaacagaacatttatttga

SEQ ID NO: 79729 - DNA, 783 bp, Heterodera glycines
atcaacggatacgcgtcgaacaaactcagcgtcagattcgttttcgcgtcgttgggaaggcgtacaaatgggcccacaacttggcgaacaaaccaatgccaaccgctgtctttcacctatttatatatttaactcaaataaatgttctgttcccacgcttcaccttctccatgtactgcttcgcctcgtcgtttagcattccgttgaattttgcccaccgttttttgatctgtgcccacgcgtcttcgagcagttcagccgttttaggcgccttttttttcagctcacgccaaacttggtcgccgctttccatgcgttcggcgccggcgtataattcggcgatggcgccgccttcacttgtcattgctttgatcagtttgagtaacaaatctttgggcaatagagctggaaaaaattgtttcgccaaaaccaggaaagacaattcgtttaacacctcgaaaatgttcagggagccaattagcgataaattgtgtcacattttcgggcttaattagatcagccaaattaccctcctctcctaaattgcaatatttgaattattttacataaataggagggaatgctaatttttgactaaattctcacccatttgcttttgtatctcttctgcccatccgtccttaatccccgctgagaatgcgtccgcgtggctttggaattgctttcggatgtgctcgtccacctcggggtcgggcccatccaacggaatttcatcacaacgaattggcggaattgcgagcagaaacagaaaaataaataata

SEQ ID NO: 79730 - DNA, 1626 bp, Heterodera glycines
ttcatttgggccggttgttctgacaacattcgctttgggaatcaagtgaaccgaggatttttcattctgtaaaaattccaccgtttttttagtttacgcgtaaatttattgacactgccgaaaaaaagcgaagcgatgcgcggtaaaattgaaaaataattttaaaatatttaaaatgcaaaatttttaaaattatttggccagtgacattcgctgtcaccaaactgaacaaagtttgaagaaagaatgaaaggaatgagaatgacctttcacacgccatctcccatttttgtgtgtcgacgattattcttttattcattcgaccaaaaatggggataaatcaaacaaatgggggacaatttatgaaaaacggaaaaagggggggggggggggtactgtggtaaaaacgaatggagatactgtaggaaatgatacaaaatggggagaattatgtacataaacgagaggattattcttctacgaagggggagtactgtaaaaggggtaagggtgagatactgtataaaaatgatcatttattaggaattagccaaggatcaattaaaatttagttttatttacttttagctcattgatgaacctgcacaataatcgcgtgggacggcgccttttggccacaaatatgcgcaaaaagtgcaaatgccacggcgtcagcgggtttgaagaatgttttattactttaatgaggctatttgagtagtttagttcatgcgtgacaaaaacatgttggaaaacggtgccgacgatggaagaatttgcggcacttttgaaacagaaatacacaaatgccaaacaagtgaacaaagagaaagggttgggaatgatgaagttgccatggggaggggtgattaagcctgggattgtttggcattttgaaatgccatcccccactaatcgactcaatattcattcattttcggcactttttcttccccaattgcgccaccatttgtcatccgtttcacaggtggcattggccctggacagtgcccttctcgtgttgggtttgcctccgcccgaccccctccccgctgccacttccgtccgctccgatcgctttgcctcctccgcccagtcgtatcagccccatcattttccgccccctcaacccagcagaactgacctcgtttatctggcaaaatttgaacattttctcatcgcatcatttcaattgttttcaggttcgttcgcctgattattgttcgctttacgcagaaaatggacagaaaacaatcagtgggacaagcggcagagaatggcaatttaccattattcttttttggcacttttatgtcggttttcttttgacagtttttcacaaatcgaatgccaacagttgtgctgtggcagggggtgggaaacgcggcacgaaatccgacaggagccgtgccgatgcaaatttgtgtggtgttgcgatgtgaaatgtatgcgatgacatgggaattaaaacggggaggggggggggggtgagacgaacccatcgaattccgtcgcaattttaagtatttaattaaaatatttaaaaatgaatttcattttaatttaaaaatcggtttctctacaggtgatatttgccgccgtgaagttgaacgtcggttttgcaga

SEQ ID NO: 79731 - DNA, 127 bp, Heterodera glycines
atggccgctcaattagcctcggctctatcctcgcccgactattacaattgccaaatgcagccgggattgacacggcgccaacgcgacatttgcgtccgacatccgtccgccatgcgatcaattagcg

SEQ ID NO: 79732 - DNA, 408 bp, Heterodera glycines
atgagttttcgggacatttcgccaatttcttcgccactttcgaattggtctccgctgccgcttacttttatgttctccgtttgggccatctgctgctcgttgtccgtcacttcccaactgttcgacaccggcaccttcagatacatgcccaagcacagcttcggctccctttacgacggtggacggccgcatttgccgaggagtgccagcacattttttgccaggtaattaacggcggatggcacacaaaaagcaacggattatttaaattgaatacactcttcaaaacgcaataattatttgatcattttcagtcatttcgacgaccgcacagccaacggtctgatggatgcgatgccggactatttgcgcaccacgggcggtgccactgcgccccatttgtccggg

SEQ ID NO: 79733 - DNA, 423 bp, Heterodera glycines
atgccaaatgcttccgatttacgcattttgggcaatttaaacgaagtgcttacgttaatgaatggttataccctcgcctcattacgaatatcgtccatttgtgagttttaaatgaaatgccattaaaataatgagttggctaatcgcactgctttggtgaccattaaagcgaactgatttaatgggacactaatcggaatgtgcacaattcaattgaacggcactttgggtgacaaaccgactgaagcatttcgaagaacaccaaaaattttatttctcgggtaattaaatttcattctatgaaactttattatttttttataaattttaaactgtttaaatgaatttttaggtgatttaatttaatttaatttcgaacaagccaaaggcacaaagagcctaatccttaagtttataaagaaa

SEQ ID NO: 79734 - DNA, 138 bp, Heterodera glycines
atgcaacgggcgatgagcaatttggctgtggcggtggcaacggccgccgagccgtcgctgaaggcgcgtcatttggaagcagttcggatgttttttgatcggattgccgacgaaagcggttgccaacccgaacagaaa

SEQ ID NO: 79735 - DNA, 551 bp, Heterodera glycines
ggatcccatctccgaagttcagttggccgctctccgcgtgctgatggcactgacgcgccaccaatgggcgtatgcccatttttgtgccataactgagtgagtggggttttttgcccacctttagttacaggcccgtaaccagaaaaagattttttgttttgtgtaatttcctaaatttttggtgtcgatggcaaaacgggaaattattagccattttcgccaaattttggccatttttaagacaaagttagggctttgatctattcgcaattataaattttttaactatcgcttttcaaaatgtttctgttgccaatttcaaaccccttttccctccatttcttttcagtttcgtcaatttgctggtcgaccgttccgtcaatttcgacgccgacgcgatgcagctcaaatacgcgctcatttgtcgcttggttgaggccgcgccgtccgcgctgaacgacggacagatggaaatgctgcgcgactattgcacgaaagggcctttttggggggcgccggtggtggaagtcgcgacggaagaggcggcataa

SEQ ID NO: 79736 - DNA, 759 bp, Heterodera glycines
atgaggcccccaaaacgtgccccgttaaagaaaaaggattccacagtaaattgcacttttccaatttttcaaaaaatccaatcatttagcaaatttcatccgttcccgatggcttgggtgagatcttcagccgctacatgttcaacatcggcaagattgagcagagagttcgcagcgaaccgagcaatgggatcgtgatcaactgtgccaccggcgaggtgaacaaaaaaagttgggaaatcggcgtaataaaaggggcggatttataacaaaaaaaacggatttgaaaaatcataaaacccccaaatgggattccgtccgattgattccattcagcaggtctcggatgcgaaaaaattttttgggcagaatttcaaaatttggattcaaaagtcaaattcccgaatgtgattccgatgacttttgaactcagacacggaaagaaaattttttttttcatttttgttatccataggccaaccaactatttcagtacgaattcgaccccgagttgtgcaccgcccgctcggatgaggaattggtggaaacggtgcgccgtttggagcgccaaccgaagtttggccgttcagtgttctcatcggtggcgccggacccgggccaaaagaacaaagcattgcaggcccagtggcgcgaattcaacaaggttggttaatttcacgtgatgggtgagggtggacacaaaagttagcattttcttagagttaggaaaacccaacggggggaggccttgaaaataaa

SEQ ID NO: 79737 - DNA, 742 bp, Heterodera glycines
  unsure (1)..(742): unsure at all n locations
atcaaaaattatttttttcattttaaggcatcttaaaattgttgatcactggcgcaagcgaatcaatcacagatgaagcggcaaaatgnccagcaaagagccgggctttctctattacactgccggtcctaaaaaaattttaattgcaaaaaaagttttccgcttttcataaaggtgttcatccgcatgacgcaaaagatttcgatgacggacgaacgttggatttccttcgctctcatttgaccacaaattcgcaatgtgtcgcggtcggcgaatgcgggttggacttcaacagaaatttctcgccacgggaccagcaacttcgggttttcgaggcccaggtttttttttttggcgtttttaaatgcaatttcatacacacaaattccagtgttttccattcttttaaattttttatattcaaaaatcgtgaaaatgtttttccgtggggctttgacattcattttatccaattcccaactgatttcaaaacaaacatcgaaaaattatttttcctttttgttagtgctatttttgtttgcgttggcttttccaggtccaattggcatgtgagcttggcaaaccgttgtttgtccatgaacgtgaagcgcaccaagaaatggtggccattttaagtcgccacagcaaatcgttgccgcccaccgttatccattgtttcactgggacagaaatggaggccaagcagtacatggacatgggactgtacatcggactaacgggt

SEQ ID NO: 79738 - DNA, 421 bp, Heterodera glycines
atgccaaaaattattaaagttactaaggattttcctgtttgccagagaaaggaattcagaaccgaacctgaaaactctcttgatgaaatagattatcatcagcagaatttaacaagtttcgcaccgcttcgcattgcaataaaaatttcagatttgtatgaggccaactatcggcccacttgcccaaacggtggccaagcacttcaaatgcaaacgcgaggagtgccaatgactctgatcggtaaaaaatgcgcggacaatttttgcccgaccggcacaaaatgcgtggagaaggaagtgtacgcgcactgctgctaaaacagcattgattggctaattaatgaaaggaaaataataattaatttgtttttttttaaattccaaatttttgtttcaaagataaaatgatcacagcaaatta

SEQ ID NO: 79739 - DNA, 142 bp, Heterodera glycines
tggacctcgccggttgtgcggggatgcgcctgccggcaacggataagcagggtcacacaatcatttgcgccggggctggctacccatcgcctaccgcggcatgtccgtccggctatcggtgcacaatgttggcgcacatggg

SEQ ID NO: 79740 - DNA, 727 bp, Heterodera glycines
atgaagaaatatattttgtttttgaagcgagcacttttgaaggagcgcatttccggtgccaaagacggaatgggaaagtatggcatgaaggcattttccgacgatggcgcattggttgggtttgagatgttagaattggaaaacatggtaattatatgaattaattttaatacatttaataagaggtattattaacaacatgaaaaggggaattgctcacctaccaaaataaaaacgaagaatgaaattccaaaattcgagagcgatttatattagagctgagcgggaccgggtcgggaattcccggtttttcaagtcccggtcccggcgggactaattaagcactggtaacatgggggtctgggtgagaaattagagaaggaaattgatggagaaggagaaattttaagaaaaaaaattaaattatttatttcatttaaagcatttattaaaatttattattttttctttttttaaacagcctaaaaccgcaaatttaaccaaagctttgatcaaaaagcaatttaaaagcaaaaaaatttaagagattgtcaatttattaaacaatagaaaaattctcatcgaatcttttggaattttaaaataataggcagctttaacgaaaattgttgaattatttaaaaaaattccagaaattttgtgactcagaaattcaaagcttttaccggtacctttgaaaaattggtacttttttaaaatcaataaa

SEQ ID NO: 79741 - DNA, 276 bp, Heterodera glycines
atgcttcgatttcggccaaaagagttcgatcaccgccattcgagcagccgatcagttggcctttcaacgcgtccgcaacattttgggcatccgagaaaggaactgatcaaacagcaaaatgtgagagaatatcacattgatcagctgctgcttgatcaacaacacgctgtagctgatcaccagccgcaacagcaaccgttggcggtgatggagcaaggcgaatcatcggcaattaaagaaattgttgctgttggagaagacggagcagggaaaaag

SEQ ID NO: 79742 - DNA, 682 bp, Heterodera glycines
gctccgtcttctccaacagcaacaatttctttaattgccgatgattcgccttgctccatcaccgccaacggttgctgttgcggctggtgatcagctacagcgtgttgttgatcaagcagcagctgatcaatgtgatattctctcacattttgctgtttgatcagttcctttctcggatgcccaaaatgttgcggacgcgttgaaaggccaactgatcggctgctcgaatggcggtgatcgaactcttttggccgaaatcgaagcatcccttgccactcattctgctggtaataaccaattaatggacaattgcctaataattatttatttatttttaaatcattttaaatatctcttcccccttttagatgagtgtgcccttagcctcggcttcgtccgtgccatgttcgccattgccgcctctgcttcttctcatgccagcaacaacagcgaatggcagacattgagtgggcagtttggtcagaaagtcactgagattgactcgaaatgtgcagagtttggcattagcattggccaagtgccaatcaacggtcccaagggtaaagtcaattaagaaaggaataatcaaatccatttaatctcttaaggtgtccatgttcaaaatgtgcccaactcggaaagtgtgatttctatgcctggattggccggctcacacacccaa

SEQ ID NO: 79743 - DNA, 1430 bp, Heterodera glycines
atggtcacgcaaatctttcacattcgaagccaacatcttgaacaattggacggagtgaaggaaggggaccaaaaagagcaggagcttagtgaatttatgcgttccatttgcaactttcttagcactgttagtgaaatgccatcaaacggatttcataacaatgccactaattcaatcccttttagctgactaacgaaatgaccattatgcaacggataagtacggacactttgcgttcattcattgattcacttctttcgttggtcagcgatcagcgtcttaaaatacttaacaaacaggtgattttttaaaattgatttggcttttttttaatgtttcaatcattttttataggtattccgttctctcaacattattgtgattcgactgtgcgaattcacaaatccgaatgtgtgttttgtggcgctgatgaaattggtcatgaaataccaggcctctgatcctggcggtcaattgtcatcgttggtccgcaaatgtctcaccaaattcactgacgcaattgttgagccgaccaggattgaaaaagtttattaaatagtttttttttgtaaacaaaagttttctttttaggttgacattctgactgtgctgcacccaatccacgagtattattcgcgtttttatgttgccgatggacaaaccaaccaaatttctgacacagtgaaggacacgtccaaattgttgtgcatttttttacagcgtttggtcatcaaccaaaaatatgcggtacgtttgtcacttttagggaaaaacactgtaaattttattaagaattttattaacttttggtttaaaaagaggtttttattttattttttcctattattttcgactaaaaatttttaatttttttgtaggggtgtgcatatactatacttattgcagcctttctaaatggattttgctttttgttagatgctcaactatctgtatccgtttcccgaaagttcccaattggtgagttatgtgcggcgatgtatccgaacggtgggccgaaaagcgatggaagagaaacggcaggacggtggcgcaggcggagctgcccaaaatcagaataatcaaccaaaaatgggcggtgatgatgaactgtcgtcaatattcagccgaatttctggcgacattttcaatggggtgaatgaaaatgaatttttatgtgaaaaatttaaacaaaaatagcaaacaaaaaacggaaaatttgattgcaggctgtcgaggacttgtacaacttcatggacatccatcctgaccaaaatttaaaatttgaacaactgatggctcggtgcgaatacgcttccattgttcggcgcgcatttgtcgaaattcgtcaaactcgtcttaatcgggagccattgaaaccggggtaaagataccattttaaaatttaattttaaatacttagatacaataaa

SEQ ID NO: 79744 - DNA, 924 bp, Heterodera glycines
atgaatatttttaaggcaatgtttttattgacggagcagttatcgattgtgccggagaagggatatgagcggtgtgatcgcgccagtgtgatggcaataaagtatttggagtggcggagcaagcgggatggaattgagatacggcacgcggggaacggacgggaggtcaaaattgggaattacaaattggatggatttattacgaatgtgggagggcgcgacaaatgcattgaagttatgggatgctatatacatggatgtatgaactgttatgacccggcagcggaactgattggaggaaggtcggcccaggaattgaatgatgagacgcaggagagattgacggagctgcggaagactttggacgtcgaagaagtttgggtaagtttatttgacatttacatttttattgtgaatttttagggctgtcaaattgagaaggagctgaaaaaggatgaagagatgcgggacttcttcgacgacagagggaatgagaaagggccgattgatccgcggatggcttatgcgggagggaggactgggccgatgaaattgtatgcaaaatcggatgagaagaaaaaaattagtgtttatgatattgtgagtctgtatccgtcagtgaattacggtacagcttacccaattggattgccgcagattattataccgaagagcgatgagattgatgttaattggacgagaccagaggatttgaagtataagggattgtataaagtgagggtcaacccgccgaaggggttgcggattccggttttgcagctgaagtgtgatgaacgattattgtttccgctatgttggagatgtgcgtcaaaatttaagaaggagactacgagatgtaactacaagtgcccacatgatgaggcacagcggagacacgtggcgacatatactagcgttgaattg

SEQ ID NO: 79745 - DNA, 1533 bp, Heterodera glycines
atgaacaatattatgagacagagggacgcagctattgagcttttacataattgtggaattgatattaacgaatatagctatggtgtggagcaattgccgaatgttcagaaatattgggtgggtttaaaaacggtgaaaaacatagaaatgaccaatttttcaggatgagatttaccccggaaagtaccgggttgttgcgtttgagaagtcagctgatccgcggaaatcgatctgtgttttgtggaaggcccctatgggacgagagaaggtcgtaccgatatttttggagaatggtcactgggatggtctgaagaattacgtctgtttttttaatcgtgggagaaaattttgtattgattgtgagtgcttttttgacaaggatgtcaaacatactttcgagtgccgggcaaggtgttattattgcaatagagtggggggaatgccatgtgaaaaggagagtggagtgaagattgaatgcccaaagtgtcaccgttacttttacaattgggagtgttataattatcatcagggacatcagacttgcaaattatggaagcgttgtgtgatctgtgataagacatatttatttaacacgaagaagggacatgaatgcggtgagacttattgccagctttgtagtgtgagccatgaccccaagcgggggtgttatattatgccgatcgaggagaaggaggaaaaagatgtctacagaattgtagtttgggtaagttctacaaataaaatcaacaaaaataagtctttaactccaggattcggagacttcgcaggattctatttacaagggggaccagaaggagcatgttattaattatatttcggtgagagtgacgtgtacggaatgctgtgatgacaaaaacaggacgaattgcaaaatttgtggggaggagaggatcaaggattggagcgaggtggaggagggacatgagccgaccaaggattttgtggagtggattttaacggcctttacaaattatgatacgtacatatttgcacataacgccggacgttttgacggtaatttcaaaatttaatttttaaatcctaaatttttaggtcattttgtttttaattacctctgccgtaccgggaagaacccgctaccgctcatcaatggattgaaaatttatgaatttaaagtgcaaaactcgaagaaacattcaaagctgatttggagagactcatgtttattgatgccggtgaagcttgagtcgctgaaggcgacatttaatttagactgtgaggacaagccctttttcccctattattacaacaagaaagaaaattatggaatacgattggaacatctgccaccgatggaggactattcgccgggatctatgaacaaggataaatttataaaattcgaaaaatggtaagaaaagaaggataaaattaacaataaataattttttcaggtacaacgaaaacaaggagacacctttttatttggatgatgaattgaaaaaattattgccgaaacgacacggagattttattgctgtcaattattga

SEQ ID NO: 79746 - DNA, 1532 bp, Heterodera glycines
atgggcgagaaccgttcatcaagcattagcagcatcaacagcaacttaattgatccaattaacagcaatttgagtgatctatccgattatgatgaccagccaatgttgatcccaaatgaatgggcaattaacatgctaatgtaattgggggatggattatttgatgaaaatgcttataaaatgaaatggaaatttacattgtttgagtaaaagcaaggttcacgttaactaaaaataagtaggatatgagtgttttaatatggagtcttccaatttttaaaacagtttgtgtccggcaatgccgatagcttcgccggaggaaattttgctgatttttaatagattttttcaccaaaagaggaaactttttaagaatttctgagctaaattttgagaaaatgatataaaaatgatagcaaatagtataaaacattcatattttggcattttttttttactcaaaagccatcaaaattcctaaaaatttattcaaaaaaacaaaatttcaatttttgagtctttttcatttataaggtaggaattgattaaaaaattgattttaatacatttgaaattgtttctaatattatcaacacagggacaattcgccttttgtgaatccttcgcaaagtttgaaacaaaatcaattcagttctaataatgaaaattttccgtcatcatcatcatcattatcattaccatcatcttcagaggcaccaaatattttgtatgaaaatgctaatgaaaataaaaatgaattgggatttttaaatgcaaattggccagttgtgcagcaaaaaacggccgataaaaacaatgattatgaaattcaaaaagaaaaacggcagaaattggaggagttacaaatggggaacggcgcattggacgagcagcaaattgaagcacagcgaggcttaaaacttttgtgtaatcaatttaataaaattaattattttttaatcatcttaaaggttaaaaaacaattatgcctccgggataattctggaaattttggccctgaaataattttttatgaattttttttttctattatttgttacaaatatttatttatttattttgaactctttatttttaagcaaataatttttgccttggatttactaattaggctttcggatttaaaatgaaaacttttaattcaaacctaacataattttcagtgcataatatatggtatattattatgctgagttttgccattttacaaatccaattggcgcccatcgaaacgaccatgcttcaagtgcagcaaggtgcaaaattcaacttttattatttgaatttggcattggagaaaatgaatgcggacaaaattttggaaaatatcggcactgaattggtgcaggacaaaatgatccaaaataacaaattgtttatggatataattggagaaataaatgtgcatgcaaaaaaagtttttggtcaacaattatatgagtaaggatttgaaattatttttggaaaaataatttttgatctatttaaatttatttgttaaatacataaaa

SEQ ID NO: 79747 - DNA, 1133 bp, Heterodera glycines
atgtcaaagcaaagtttggccgatttgttaaatgaaacgacaaaaaatgatttggcatgtttactgttgagccataaagaatcgctgaatttagagcaaattgtcaaaaacatttccatttcaaaaaacgagtaagggaaaggaaacccccaaaatttgggagcgtaaattgtaaacatttttatgatacgctaggttgattttcatagtaactatttaaattttataatgctaatgagcccataatggtacattttaagcaaaaatgccaaaatcggtagaccaaaaaataaacacataaattaaaaggggtgatttttcaaatgtttttgataagaaaacataaaaaataaataaaattaaatttaaaatttttccagcttcggagcttctgtatttttccataacatattaattcatatacatcaaaagcacatcaaccaatataaagagccaatttataaaataattactttcgcacatctttatcggctgatttttgagtattttgatggtatattcaataagatcaatggaccaatcatacaacaatatattgggttggactataaaataatgaaagaattttttgaaaaaagtaccaaacaattaaacggactaatagcacgagggaaaagtgacaaaccatttttatttgctttgaaggaatcggaagaagcatttatcagtgattatttgttggaaaattgcacgcatttaattgacgaacaaaacaattaaagaacagatgaaaaaaagatcaatcaaaaaaagcacagtgatctgttggcgttgtgtttttaggaatgatttttgaatttatataaaaggatttgcatcccaccttaacattttagaattccgttttgttcttatttagatttagtccgaaaatgagcattttgtttttgggtgtgaccaacagcaaaagcaattcgattgggtagcctaaagaatcgggggcgcaataaccagaaaatatttcggcggaggaatccccccaagccctgcggcaattttgccttttacattatgctaaaaaaatttgttagccaaattatgacctaattaaatttctgggctttgtggcgggctcagaggctctcactcctccaaatggaaccatacaaaaa

SEQ ID NO: 79748 - DNA, 589 bp, Heterodera glycines
  unsure (1)..(589): unsure at all n locations
atgttttcccaaatttttgtttttattttatttctggcaatgtgcaaatgccaaaatgtccgggtaaataatggcaatgcccgtgtggcacaaagccaacagatgttaggtggcaatggacagaaatttttcgtcatccaacgggacacaaacgcattggatggctcagcatcccaggttcaatccagcggaatgggaggaaatttggcggtaaggcatttttagaaatatcgtaaaatttatttattttttaatttaaataaatcttaaaaatataaaaagaaaacttagtaattcaaagcttttaaattaaatggatgccgaatttagatttttctaaaattaaaaaatgcgcaaatttgtgtgaccaaaacaaaattaataattgaatattaggaaaataaactaacaattatgacttttaaatattaaaatttaaaaaaatataattaatatctatcgccagcaaaacatgatgcagcctcagcagcaacaattttcacaaaattttgcaacaccaccgcaggcacaacaaactcaacaggcggttagaanaatcttatgcttaattgcatncagcatcgtttaa

SEQ ID NO: 79749 - DNA, 1763 bp, Heterodera glycines
  unsure (1)..(1763): unsure at all n locations
atgaccaccatcaatcacaaccaaaccgtgttcgacgcgacttacacggacgtggccaaacggatcagcgacggaggcgccgatgggaacacaaaccacgaacattcggacgaggcgtaccgaaaagcggctcgtaggttttcgaaattattttccgattttttatttacaatttttgacctttaaaatgtggtgtgtgcacacaattgtaaagtgcctaaaattggcgaacaattcactaaagaaatttaaacattccgatttcaactctttctcggcagggcgtccgtctgaagttcgaatttcccttctacggccatcggctggcgaatttaaccattgcaactggagggtttctgtacgtcggcgatcaggtcagcagctgagaatgaggggtaaggagaaggcgaatttggtccggcggtttagttttgatgaaattttgggncatttgggcccttccgccccccgtcttccccccccccccggcaactctttcaatcgctgttcacttttgcctccttttagacccattcttggcttgcggccacacagtgagtgccaatgccaattggctcttgaaactccttcctctttcttatccacacactcacaatcagatacattgcgccactgatggccaactttgatacgatggccgacaattcgagcatccaatacggcgacgacggcaaacggatggtggtcgagtggagaggggtcacactgagggacaacagagagggttagtcgggggggggggaaagtatgcggaccaaatccaataccaaaataacgggagggaattgacgggacaaggctaaactcgccgggacataacgtcctgcttgaattttttttatatattttaaaaaaataccctcatttcagccggtccttttactttccaagtgcatttgtggcgcaacggcaacatcactttcgtctacaaacaggtactccccggtccgactgatctgtgcattgtaaatgctgcaattttccgtttttaggtgcccgtccccgtgacgaacatttccggtcagttcaaccaatcggggcgctgccaaaatgtcgcacaaaaaaccctatattaaaagttttttctcccatttaataactcaaccccatccgccgcagatgctcaacacccgtgcaaattgggcatttcggatgcctatttgttcaaccacaaagtgtccacgctgtcccaggccgttccacaaaacaaacgcgtgatccacgaggtatattttcagcaaggagagtggttccacttcaaaatggaagcagttcgccccctcccctcaaaaaaacaatttttgtttttaattttgttagttttttttcgtctcgatgcaattcctaatgggttctctttcattggtttgagtttatttctcttttntagtaccaccggataaccattaatcctgaacaaatccgcccncaacaccgtcgtcatgcttaaagcattgccaagtgagtctctcactcgtatcatttgtccctaattccgttttttccaaatccatccttttccaactctcattttacttttccctcatcttcttcccaatgcgtcagcttgtctcgaggccaacagctgcgagcagtgcatagcaatgcaactgaaggcgttcaagtgttcgtggtgtaacccgaaggacagcggcaaagggccgtggaaagagggcggaacggcgacgggggaaagcgtgcgacagtcggagaagccgttctgttcaggtggggcggggtga

SEQ ID NO: 79750 - DNA, 1479 bp, Heterodera glycines
atgcccattccaactgctcacaggttccaactgagcacgggcgccacgcatgctcattcaactgagcacgggtgccacgcgcatgtgccggtagctgctgctgcacgaacatccagacacgcatctgcgcctgagctgctactgcactaacaacctggcgcatctaccccgttactggctacgcctcgaacggctagggcgcggctggctaaactgaaccgcgcatgccctcggagccggctagtttattttatgtaataaaagatttctggcttttgaagcgggctttgatagtttttctgtaaaacgtttttaaatttcaaaagattaatttggttaatatttaaaaataaagcgcatttgtccgttatttttctgttaccattgtttctttttacaacatgaaataaagaatttccatattatagaattttatattcttttaggtgtaaatttaaaaatatctttattcttctaaaatataaaaattgtggttttgaacgtgatgagacatttgcgccgcgccatttgcgccgcgacatttgcgccgcccagcaaaaatggacttttgcgccgcgctgtcaaaaatattatattcataaaaattccactattatcaataagttttactaaaactataagccatcggcaaaaataactaattgaaaattcgaaaaaattactagtcacaaagattgacattcaatttttaaccattaaaatcttaacattgaataggttcatcaaagatatgaaaaaatgattaagaatacaaactaacaaaaaactgaaaaaaagaattttctttagaaaccccaattatttttttgcttcgaaaaaagaatgaaattcaattcctttgtaattaattttctcaataagttattttcatcgattttaatttaatttcattgaaaaaacgcactgattttcaaattttcgctcctattttaccatttttcgcattatttcgcaatttttatgcccttatttatttaatctttaattaagaacaaccttataatatttttaaataatttcatttacttaaacttaaaaagttttaaatcttcgttgtttcaaaattttttattttgatcttcagataaaatttgtaatttaaaagttctatttaaaaagcaatataaaatttaaaaaaggtagtcttcaagaacagatcaacaattggaattagtttatttctgtttatttatattttttaaaaccgttgatgacaaattctaggccgaatttgagttctaaacagaaactaatttttaaacattttaatcattacttcaatttcagaacttatttaattttgagaaagctaatcacactacttcaagatggaccacaagcaaaagttgcaatttacatgcaatacatatgttaatatcaatataatgaaaatactacgcaaagttagctcaaatgacaataatacttaaaaatttatgattattgttcacaaataaa

SEQ ID NO: 79751 - DNA, 1172 bp, Heterodera glycines
atggctgttcgtaagatcaaaaatgacaacgctcggaatcgtaatgtctatacgatggctgttcgtaagatcaaaaatgacaacgctcggaatcgtaatgtctatacgatggctgttcgtaagatcaaaaatgacaacgctcggaagcgtaatgtccatacgatggctgttagtaagagtaaaaatgacaacgcagggcagtgtattgtctatacgatggctgttcgtaagatcaaacgacaacactgggcagcgtaccgtccaacaccaattcccttgtggtaaacggtttctccatgttcttcatgttcatgttaagagacttttggcttccctgtttgagcacaacaggtactaacgcctcacaccagcgcgaaggtagtctctactcgtgaggcaaccctcacctgaacgaacacgttcaggatcacggggcgaaataatagtgcggcaaaaatacatgagaatgatctctttatttaaacaaaaaccaaaaacacaaacaggtctcagatccttcgctcatcactcgagcagaatttctttgtcggtacaaattcttctgcaaattcttcctctttcatggcaacagaaggccctgcgagagatggcccgacatccatagcatccttaacagatgcgctggagtcatgtactgctggttcgtcacgatgttatgtgcagcagggtagttcagctgttcaggaccctgaaacaccaaatgaactgagctccaattgacatatactgagaaactgaccaagattgtttggaagtggttgagtccattgtaccatatcaaaaccgggttctgtacctgcctttgttgaccttgatggccatgtacagtgaagttttgcagctgatcatgtggaaagtcttgctccattctctgtttttaaaccaatatgaggtaggacttgaaaatatttgtcaccatatgattgccgtctgggaaaaacactccaattgtatggcgaacggtgtcgtcataaaagctcgtagcacggcggacattgtcaggatctacaggtgacacgacaacaattgtctgaccgagtaagacggccgcgatcagagcatcaaatgcgtctgcccaagcagttgcgccttcccgacttgcgatgtaagcgtcaaagttgttgatttgatcgtccaaaaggagtgcttca

SEQ ID NO: 79752 - DNA, 1929 bp, Heterodera glycines
atggaaagccgcgtcaagctgccgcccatgatggttcagccgagccgttgtgcgctcatcgaggaaattttccctgccgagctactgaacaacccgcttgcgagttggcagcagctgtcggagcgcgcaattctttgccctctgaacagggacacgcttcaactgaacgagaccatcatggtaaagggatattattgtcaaacgagaatcctatttttcttcttaaaggaccggctgacaacggtggaacgagtttaccacgcggtaactctccccgtggtggacaagacaggcgaagcggacttggagaacatcgccgccgacgccaaccatgagaacttgtgcaggatgactccaccaggagtccctgaacacattcttcgtgttcgggtgggcgcggtcatgatggtcaccaggaacatctctctggaagagggcctgtgcaacggcacccgagttcaagtcatggaactcttcgacaacatcatccggtgccgcattctgaccggcacccatgttggcaatgaacacgacctccatgccgcccgcttcgtctttggtggtgacccgaaggcaccgcacgagggcccgatcaagtgcgagcggatccaatacccgcttcgtcctggcagcgtgatgacgattaataaatcgcagggtcagaattgttccttttccttcttttgtatagtgttttttgattgcaggtcagacgcttgcgcgagtcggagtgctgttggacacctctcagtgcttcgctcacggccaactttacgtcgctttgtcgagggtgcgagactcggacaacatcagagtctgcaccacacgcagtgaccttcgtgtgaagaatgtcgtgattcgggagctcctggacgaagaggaggaggaaatggcgttggcggcgctgcccgatgacccaagcgatccggtatgatttgaataaagggattttttgaagaaatttttcaagtttccacgccatccaccggcggacagtgaacccgatgatgacaagccaattgggatgccgaatgaggcggtgttcaaaacacccacgccatccacaagggcacagcacccaaagacaacgccaattgagttggataacacagtgtccaaacaacatctggacaagttgacggtggtgaaaggcgacatcaccaaacaacaaatttggatgatcgtcaatgccgccaactcggatttggtcaaaggcggtggagtagacgacgcaatccatcgcgcgtgttctcctcgtcaaaaagagctcaaacaactgctcaacatcaagattttgtcaaatggtggaccaattgcggacggcggggtcgtggacacgcccgcgtttggagacttggccaacaacgtccaatgtatgccagtgctaatcgcgtgttagtcttagtcccacattttgtagacattttgcatgctgtcggtccaaaagtcagtgcagcgctcaatgagcaccaccgcaggtccctggcaaagtgctacaccaatgcattggaccatcttgcgagcatgcacatggatatagcaaacccccagccgagatcaattgttagtgcaattggaatttattcgttgacttatctttccatcaattataggcattcccaagcatttccaccggggctttcaatttcccccgtgtggatgccgcgcacattgccattagagcaattctgaattggcttgcggaccaaccagcggatgcaccggcaatcgatgaagtccgcttggtcgcatttagtgacgacgactttaaattgtacaaggagattcgcgaacgagtaataaataagcaatcatgttcgtttctaattttttttttcgtaggtcaaacgccaaatgaacgctggcaaacgtccaacgcccaaaacatcgttgcagacgcctttacgcattccaatggtgtgtatatga

SEQ ID NO: 79753 - DNA, 1591 bp, Heterodera glycines
atgttatgggattgctcatttaaggtggacgaattggacgtgcacggtccgagcggtcaccggattgccgttgagcagggcttcaaggacgaagaggaaaatttgaacgccatttgcgaggcggcccaggccgaagaagagcgaaggcaaaggggcgaagagcgcgtcactcagctgaccgcatacttcgcgtacaacgaagcgaacccgccaattggcctttcgtatgccaactgctacaagaagttgcgctatgaccgagccaagaagcagtggaagctgaatgttgatgcgccagtgcctaagttctgccggctcaagaccgtttcgcccagcaaccgcgaactcttggtagaacgccaagcacattaccaatttgatcattttttctattacaggcaattcgactgcttctgttggttgtgcttgacccaaagggatgggagtcattgcgcaccgtcaacggcaacgtgttccctacctttgttgaagctgcgggagcacgtggtctcctcactgacgaagacctctggatgaagaccatcgatgatgcgttcagaatgaagaagtccatccggcagcgcattcgatggcttgcagtcttctttgcgacagcgaacctcgccagtccttgcacaattttggacaaggttcttgtaactgcggacaagtggctggtgcacacaagcgtagagagagcctcggccgaagagcagaagcaatacgtcctgaatgccatggaatggttcctgctcgccaatggcataacgcccgactcggagccgagggaggatggcacctatgagtccgcttgcgaacacattggtctgccacgtcctcagggccttgtgctcagcaaggacattttcatgaaggtactgaaactgttaccaattatgtgaaaaccatatgcctttattagcttgccttcttccgtgatgatgcgcttaacgagcatcttcatgtggacttccttccggacggtcaacgacgcggtgcaatgcgacaagactaccttcaaaagtacatctccggtcccaagcccaatgaagagcaacaacagctgattgatgctgtgcaaactgcactggagcacgtccaacaagtcatcgatggacaatgcccagacttttcgccagacatccagcgtctcttcatggtcaccggtgaaggtggcgcgggcaaaacgtttacgtataatgtgagatctcatccttatttttccacataaattcctttttctttgtagaagatcattgctcgcgccaagtccgctggcatcaacttcctgcccatggcgtcgaccggcattgctgccgaactgctgtacgagggccagactgtgcacaagcggctttgccggcttaagcaagttgattcatcaacttcgcccaatgttgacaacgagagcaactttgccaacatgctccgcaacatccacggcatcctgatcgacgagatcagcatgcagcacagggacgtgctcgagtttgtcgatcggctgctgcgttctgttgccacgcaacagttcaaggacttgtcttttgctgggaaggtggctaaatttgatcattgctttttcaacgtttga

SEQ ID NO: 79754 - DNA, 2039 bp, Heterodera glycines
atgtttttcgcgtcagatcgctaccgtattcaatccgattcgtgcgactttttgtacgccattctctcttgccttgtcaagcgggttcatcaacttgcagccgatgttcagctgcgttgcccgattccatgcatttgtttctgggcgaaattgccaaatttatcgaagttcgaatgactaaccctcaattagtgttatgctcgagaatctcggggtcaaatctttgatattttcggtctcgagcatcagcagcctaagccattgatagatagatagatacattgaatattttcgcattccaagaatggccccgaattcaacactctaaattggggggggggggtctttccacgagagtttgggtcgagattttcgcttggaactcatatccaaaattggggatgcatgccaatgaggtaaaatttggcaatttgttattttccgagccagggtaaattggaaaaatttactattttcagagcccggggtaattttggaaaatttttgaaaatttgccttttccaaacctgaaaaatttcagtaattttttagagaaatttcgatccttttcccttgcgtttaaggccgagaatcagtttgaacagttagagaaggaagcgtgccgtgtgtctgtccaaatgcgacatgttgaaacagtgtttttgagtgcaacaaagtgtggtgacggagaacagcagaacaatcagctgaccaacatcgggacactgctcaattacacccaccggtgaaaacgctgggggcaaaataattaattaattaccccctctttttcggcattttacaaaaatttttaaatgtttcgctgtgccaaggagaggcgctgccgtgaaaaagggttgtcacccgaatcttgaagtccaacgtttttccgaaatgacccgagttcgcagatttttcttatcccgaattccgtctcgaattttcttctgcccttttcccgacccgaatcccggcattttctcgccccgtggcaaccctgacaggggatggaatccccaggattttcatccctttcccgctttggcacagtcgcctaatttcggaatcgcaaaattataacaaattggtctggaatagtgtagcaatacattgattgatccctgatcgctgttcagagaattggccaattcattggacaaaattgcgaatgttcaacaaatgttgagcaaagggggacgccattcgctgcggtcactgctcaacctaatgaatgcgctgtttaaaattaacgaaatcaatttgccattcgacggaagcattcttgacggcacagaccaagtgggatggggttaatgaggatatcaaatttagtaaaaacttttgggggaggggcggatttataaatgtggaaaatttggggctgggaagtggaacgagtggtcgaacccgtggtgtaagccgaagtgccaaaagtatgggtgtggggatatggccgagaatgggtcatttgtatcccaaaactgatcattctcgacaataacatcacgtatatgtcgtcaaaattccgcatttatggttagaaatggaaaattttgaaattaattcaacttctttttcgcacttagaggtccgtgtttggaattgtctgaatgagtgtcatttaactgagcacccatgaagcagggtttcatgccaaatgccatgtccaatctgggcccattttcaaattctaatcccgacattttcagaaattgagtgaacgaattgtccaattgctttcaccggccgatgtccaattggtcgcggatttaaacagtgccgaaattggacgactgttagccgaactgctcgaaaagggtgacgacagtggtggtggtggtggtggtggaaaccttggtggaatagcggaggaagacgaagatgaagcggcggaggaagaagaaaatgagggcaatgccaagagggaggaggagagggaacggagagagctccaagaagcgattgccaagtcggagcagtccttgggacttgccgaactgagaagcggctctctgccggtcaaacatcatttgtactag

SEQ ID NO: 79755 - DNA, 1500 bp, Heterodera glycines
atgaacgacgggggatcaaatgctgatgccaacaacaatggaaacagcaacaataatcggaacagttttggcaccgagagcagcttcagcgccgggtcttcgtccaccattgctgctgtttctgttgttggtgatcagggcctccattacagtgtgactggcgtgctcaaccagcagtcaaacaacaatgtggaaaaaattggtggcattggcaccggcaccaatcgtccccagcgtcggctgtcactggtcggcaacggcggtattgcggtgaaattgccggactaccaacggttgccgatcagttcgtttggctgtacaaccgatggccatggtcgagaggggcgaatttatgccacagccggcttcgttggtggcaccaacaatgaaggaactctgaagaagggttcatcaaaagcggcatttttgccatcatcgtactcctcctctaatgccgtcggcggtggcaatttaattgttggcccggctttcaataatggagggccaagcatttttggactgagaaatggaaatggcatttcaaccgccgcctcacacatttgtctgaatggcattggcattagtggtggatcgtcgtcgtcggcatcggtggtggcggacggcaaatcgacgctcagccgacgggcccaacggttggcacaaaaagcggcccataaactgacgattggctcactgagctccgagctgagcagctcggcatcggcactctattcactgtttacttcgtccccagcggaaaatggggcgggctttgctgcgatgaatggtggcaaaactgtgccatcatcgggcacttttgctggtgctgcgaacggagtcggcggcatttatgccgaaacatatttggggcacgaacagttttatcatgtgaataaagaaaattaaaattagaaaaataatggtagaaagatgattcgttttgaaaagggttgaagaatatgtattccattattttttttttcaaataaaattttgagaattttaaattcatttttttaatgattttaacagcaggggtcagagcaagtcggaaaacaacagaatttaaaattattttttagttataaatagcttttttgggatgtcggaggtgagattttttctagaatattttaaaattggatgggaatgaattaaaaaaaacaaatgcatatcatttttcctatttaacccaaacaaaattaatttttttttttactgttaaacacatttttacgtatatatattttttgtttacattttttaactatctaactcgaatttttagccgttaaaaattcattaattaaaccgcgattattaggctaaattcatttgatcaacatgtatttaaaatcgtttcaggacaaggcaccgtttgtttcggcacacacttcgcgtggcattgactttttggaacggttcggccaatttgccaaggaacgcgcactcatcgaggaggaatacgcgtccaaattgaagcaagaatcggaagattaa

SEQ ID NO: 79756 - DNA, 1257 bp, Heterodera glycines
atgcggacgatcgtctacttcaaactgttgcaaattgtgctcggtttggccttcgtgtggcaacttctttcatttcaccaattttgcggcacatttgtctgtccaaaggtgtgctgctgctcattttcaattttttttaacggtctttccatgcttttcaggccttcctccatgacatctctgttggccactgcaaacgctttacgctgatcggaaaggactcaaagacgggcgaattcggcgctgtgttggacgagcgcaaatggcacaaccaactgttcatgagcagcaccaacggtctcccaatcaaagaacagcagcagcaattcatggacgaattggccgccaaattgccgtgccctggacgccactgtattccgattacgacggtgagcaaaatgccatcagaaatatcgaaataaaatgccattttgttttttcagccttcgttttttttctggactgagaagaacagaaatctcctcgacaatgttgtggacttcttttccggccaactgttgctcgcattgtgctcgcttctcaccattggcattggcttcgcccggatgttacgccctgcggcagaatatgaagtgagttcaatgcgtgaacacagacagcacatcagcccgacaaaaacgcgaacaaattgcttttcagttgaaatccggtggaattttgaccaaattgtgatcagttttgcttttacgcgaccaaattgcttttcagtcgaaatcctatgctttttttgatcaaattgtgatcagttttgcttttgtcgggttaggagttgcaaaaatttgcttgttttccattgagtcggttactaattttgtttttcatttttaagtgcttcgactattgcatggccctctattctgtcttttgctggtgttgctctgcttgggcctcatcgtgtttgctgctctattggacatcttattggtcttgcatgaacttccgtgcggatgacacaaatgtgccgttggtcacttttgtgagttttgccgcccatttgattctgcattttccaatttctggatttttcaggtgttcgacatcgtcatggtgtgttcgttcgtcttcgagatgttcttcaacaattcgctggtgaaaaaacggcccgagaatgcttcattcgctgccgctaatcgcaaattgcgcaacgatgtcgccacggaatgtgccaatgtcgccattcatcgccagcaacagcagcagcagaagaacggaagtgccatcatcatgcaaacttaa

SEQ ID NO: 79757 - DNA, 1965 bp, Heterodera glycines
atgccgatgccagtttttcatccgcagcctcagttttacaggggtcaaatggtaccacaatcccccatccaaaactatgcaccgtttttaaacaatcaaatgcctgcaatgcttccacaccaacaaaatatccagcatgctcaaatggctataaacgccgcacgtcagcaggtgaaccagcagccatttcaaaatgcacagcaacaggcggtcctacaccaggcgggcctgagtggacttgaatatgcgatgattttggatcgtctgccggatataaagggaaacgaaggcagcgatttgattcgcaatttctttaaaaagtacagtcaatacacgattgattggcctaacaagaagcgtatcgaatcgttggaggcaaaattaagtggccgtgctgaaagagcctataatgccgctctggccagcgaaccgttcgcttacgaaaacatcaaaagaagtattttacaacaattggaggagacggactgcagagaaatgagtgcattcaatgatttgatgaatggggtactcagaaaatccggtgaaaacctggacgatttggccgatcgaatttcgagtcttgtacgcagggcgtatccaggactaacgcgaaatctggcagatgaatactcgatcaaacatctgattagaagtttgaataaccccgaactcgcactgagtttggagcttcatcgccgtaatggaatgtcatttgatgaatttgtggcgttggcttcgcgcgcagaaacaacccaaaaagcggcaaagatacaaaacggggagcgctcaaaaccatattatgagcgaaacttccagcatacgcaccagggtgaaagaaattccgaaatgatttctaaaaatttttcgccacgccctatttgttacaattgtaacgagcccggccatatttcgagaaactgtaataaagcaggggcacagtcgaaccgaaatgcacccgcattttttccacggaatcagcaacaacaacagcttcataattcgccagctacgggagcgaaccgaattgttcaacattccaaaaatggagtaaccccagcggtacgctcacaaaactttcttaagcaaaattgcataagaatggaagaggaagttaaaaccgacgcaaccgacgcaaccgtcgcgggtgttaaactggaaaaggaagttatagagtatttgagggatgagttggagaaaagcgaaactttttgtagtggattcgaaccgaatgcaatgattggaaaaatggtgacggtggaacttggagtgatgggaacccaaaccagaggaatgcttgacgggggagcccaaatttccttaatgggtggaaagtttttctatgatttgataaccagtggtaaattggatcttcacaaaaccggatttaaaggggtttcagcccgaatttcggatgtcaatggtaaagagttggaatgtttgggaacgacttctcttccagtcgatcgaaaaggttgcaggacaacaaatgtctgcttccatattacgagtgctccttttggttttgacttgttaattggtaccaatgcattgcgttctctgggtttttgtctttatgacattcccaataaagaaatgattaattttgaggaagtgaaccatcaaaagaaaaaccagatcagtgttatttatcaaatgacattaaaaccgcatacaatgcaattcgtaacattgtcagcaggaaatgaatggaatggcaaagatgtgttaattacggctgccaatgagaaaacttttcataaattggagccaatcgtcggaacagttcaagatggaaagataatggtgtccattttgaatacatcagataaatttgtgcagatttttgaaaacgaaataattgctgaactaactcctgcacttttgatgtgggagactgaaaattcgcttgcttccgtcattgttagtgaataataataccgtttcttcgattgatgcacaaagaga

SEQ ID NO: 79758 - DNA, 736 bp, Heterodera glycines
atggcggagacaacgtcgccttcactggccgcgaacattgcggagaaacagcaccacaaaagcgggggtggtggcgcagggagcagcagcagtgccgcggcacacaaatgccggctgatggtctaccacgaggtgttgaactcggccgacttcaagtgggttcacatttttaagtttttaataatttctaactatttttcttcgtcttttgaaatttttttatttatttctttttttagtttattgaaaaggtttctccgttttgataattaaaaaaaatatatattacttcggtatcacatcgattgatgttggccatttgccctcttcccccgcattcccacaaaaaaaaatgtaaatttttatttttctaactttcatagagatttttccataaaatttaataaggtatctttccaaataaattttttcaattttttttctagaaaaaactacaaaaacttaaaattaaaaaattttcagttttattttttaaattttttctggtgggaaacaatgcgagggagtgaacgtgttgcacccccaaattcacccccacttttctcccctgggcaggggcagtgtcgtgtcgctgcagtcgtgccgctcctccttcaactcgttggctgctggcgagtcgatgcactcggtgtactccaacccgtcgccgaacgtaaagcaacgtaaccacaacaacaataacatcatcgtcactggacaaacggggcataataaa

SEQ ID NO: 79759 - DNA, 1903 bp, Heterodera glycines
cgacgaactgatgcgcgagagtgcggagaattgcctgaccaacgcgtacaccaatgtgacggtgaacagaggcgcgccgtatgaggtgggaaacccaaaaaaactagcaacaaaaccaatggccaatgaatgggtggggccaatgccctaactgaaaaaaaaattttttgggttaggataggctttttggaaagttttgtgccacttttctttaacaattttaaccgtttttcaaaaaaaaaaaaaattctggatgctgtatattaggactgcccagacattattcatccacccagtcaatattaagctacctaaatgatgtcacagagaaatcttttggttgtgccccctcccctaaaaaacctaaaaaaattaattttgtaaaattaaaaaaatgatgcgaggggaaaatttttgatttttttaaatgcctaatttgttaatgaaaagcgcaccaaaatttcaaaaataataaattctctctcgaccaattgcgtttcccagatttacgtgtggattgaccatgccgggtcagtgctcacctgggactttgacatcacaaagggcgagtgcgagttcgtcatctaccgcacggaaaaggtattttttgggtgcacttcatttccctcaccgttgtttctcccagaaatttttttttaaataatttcaaaccttgaaattttttataaaaaattcttagggaatttcttagtaagaaaatttcaagaaaaaaactttgaaaaaatttcagcgattttctggaaattttttgaaaaagcttacaattagtagttaatcacaaaatttcgaaaaaatcgcagcaaagttttccaaaaaaaaaagtttttttttgaaattttcttaccaacaatatacgggagtctttgttttttgggttgaaaatgtttcaaaatttttcggctgccggcgtttttaaaaataaatatttattctatgatttttttttttaattaaaacacaatttttattaaactacgttctttagggaaaattgagagtaggtatattgattgatttaggtttttttttcgttttatttcatattttttggaaaattttagacatgtgccaaaacatgcaaatttggaataaaaaaaatttaattttttcattttttcaatcactcagaaaatcgctgttcccctccactctcaccaacagcagaagcactcgtccgcctccttttcggcaacagctgcaccaccaccaaacgcggcaacttcttccaatgcggcaacggcgggcggtgccggcgcggccgtcagtggcggcggttcggcaacggtgtcgagcagtatggccgccaccgtaatgggcccggttgagcgagtggtggacgaaatttccaatttgttgtcctccgccgccgggggcagcagcagcggcgcgcatgcgcctcaatttcatgtagaaaaaataacaatatcaatttaaaaaagctcaaattcaaaaaaaatatgaattatttccaaaaaatgcaaatttttttgatatttgcgctattttcaaaatttatagcgcccgggtgaaaaaacaggaatttgtatcggtttgcgccaaaaaatgacaatttttgccatttttgggtcaaattttcaaaaattaagttcactgggaatcagccggtaccatttggcgccgccttgataagaaagttgtgcataattttcaaaatttacccctttttcttaaaaattttttcatttcacgggggggaggtacacatacccctccctcccccctgcttttttggatttttacaatttaattacttttttattttatttttaaggcaataattggcgagccgaccttccgtgttggcgttgaactcttcttggcccagcaaccgctgagctttggagaaggcgactcgatgcag

SEQ ID NO: 79760 - DNA, 637 bp, Heterodera glycines
atgaataagaaatacttttattctgtatgggaatcgaaccgaggcaaaaatcaaataaagtctttgcaaaatattttcaaaaaaaaaaatatgtaagcaaccctcaacaaattttatttctttgttcttgctaattgttagtttggatgatcaaatatatattaaaacaaataataggtgaaattacatttttcttcaaaatttctcaatgaaaaatggcatttattttttttaaatataattttaacaattttttatttttataataagaaaaacctaaatcctactgatgtcttacaaataaataaaaaataataaaattttattattttttattctactgagcaattattggcaagaaaaagtaaaataatgattaattttttattaatccattaatttacattttattagagtggccaccggaaatgattaattttccttcaccttgtttagatgagaaaaacagaaaaacatctttttcgcgcggaaatcctccaatttaaatgcattaaaaattatttacggaatatgttcaaattaatagcaattaaataatttttgttcacatttttcttttcttttccgattttgattaatttggttgtgattcataaaaaattacttaaaaaataaa

SEQ ID NO: 79761 - DNA, 845 bp, Heterodera glycines
atgaatttaattttgttggttttactgcttctccattccaaaattgatcaaacacattctgctgatcatgacaacaattttgaatgccgcaatgttccaactgatcaaatgaaaccatttcaatacaaatcggaccgatgggaagagaaaatggaaatcaaaatttctggaaccaaactccaccagggaaaagaagtacaaataaaaaataagtcaagaaaaaacatagaaaaggctttaacaacaaatgcttcaaagcataattattttaaaagtggaattagtttaaatgttttaaaattcaaatgattaaatagaaaaaatttcgctgagttttaatgggatgattatttgtttttttttcatatatttgagcattggtggggccagagaaccaaaaaaatgctccgaaatcctaaatcaatttatgaatcttaaaacattaaatatttcaaaaaacaccataatgtttttgtttgtgcaattgcattttttacttttaagcatgattttaaacattaaatccagaggtttagactaggaatttatcttgaatttcattgttatttttcatttaaaattttagggattttaataattaaataatatttctttagctttacattggtttttctaccgccgaaaatgacaatttacccaaaaaccaatgtgttgtcatcaaaatttatggtgatgaactgaacgaaaaagctctctatgataatagcatcaaattttttcatctattaaaagaaaatgacccggagaatgagcacattatcaacttaatagaccagtaaatcaaaaaaaattcaaaaatatgaataattaaaaatttgttggta

SEQ ID NO: 79762 - DNA, 329 bp, Heterodera glycines
atggggaaggggtggaaaatgccgaggaattgggggagggtggaaaattttggaaaagtgccttggttcgaagcttttcggtttgattttataactggggacgagaacccgagtaagtccgaagagtgcttgttcagatccgaatgataagattttggaaagctgctttaatccaaatcttttaagcgtccatttcgacggtaggcgagcgaaagtatcatttgttggactcggtgaagcgggacacactgtctcaaaaaggctcagggacattaacatctccaaagaccagatgctggacgtgcgaaaagatgtgggagaaccagtga

SEQ ID NO: 79763 - DNA, 93 bp, Heterodera glycines
tatacacggcgagtcaattttgggctccaagtacaattaagttggttttttcgtcttagtggtctgtgagttagtcaacaaaaaggggtctca

SEQ ID NO: 79764 - DNA, 565 bp, Heterodera glycines
atgggtgtttccggttcttcattgtctgcttacgtgcaagtcgcagtccacgtacgaaaagatgtttgacatgatcagaaaccgctggccgacatttgcaccgaaaaacgcatccatggacttcgaacaggcgatggtcaacgccctccgcgcaaaacatccacagtgctcaatcagcttttgtctcttccacttggtgcgcaacatgaaatctcgcctaacagacgaacaaactcgcgtaagaaaaataaaaatttattgattttgaaatctcaaatttagcgtttcacaaccgacgctgcctttgcacaagctgtcaaaatgatcacttcgctggcctttgtgccgcttgaggacattacaccggcgctggcagcgctcgaagatcatcttctggatgagcttgagggcgttctcgattggttggttgagtttaattttttttcaatttcattagtaattttaaaggtttgtaatcaactacgttggacggcttcgcaacaacggcacacgcactcgccattgtttcggcccgaagaatggagcgtgtatgagcgcacaatga

SEQ ID NO: 79765 - DNA, 1333 bp, Heterodera glycines
atgttctcatcggagaacgccaaacgcggcgcatttgctaagaaaagtttgaacggaaatgaattggagtccgaggccaacgagggggacgcggaggacattgggaagagtttggaggagcagtcgcatcagttggcactgccacggcttttcaaggcacttctctcttttgagtttgccaattactcccgtctgaacggtaagtaccgtatgcatacaatccacgccaatttcaaatgttctccagaatccgaagtcgaccctttgctgctttcctgggatgttctgatgcgtttttttggagatttggacgtcctttcccgggttcgcttttgcgatgccatcgatgtcaaaaccctttccaatgcgttggcccatttgtttaattctctctccgaccccccggggcataaaggtttccccccctccccggcaattaattactttctttttgcttcttcggatgccatttgcgttgtttctaatgtcgacgaccttttcactggcccttttcattataaattggtggaccgtcctttcgatcgtgaacattttacgagtaatctcttcttccggactttggccacgatccccgctttgtttcgcgaatggcacggcactctcagcaaaacggaagcgaacacagtcaatgagtaatcacaccctttttaaccaaatctacatttttaaattatttaagatacacccaaaaatatttgagtcatttgcttattcaacgtgaattgcgcagtttggaaaatatgaaacgtgggcggttagaggtcataggcatttatcacatttactttttctaatttatttaacgcttatgacttttgggatactttttgcaccgctttttcaatctgacaaatggcacatcaaaagcggacattttgaaattggttgttattttcaggtccgaattctgtccaaagtgcgtgagatcgaatgcacttatcggctggaggagacgacaatgactttgacaatacttttgcctgaaaattatccgatcaaagcgccaaaagtggagacggggcggagcatagtgaacagagaattgcatcgcaaatggcttcttcaattgggcgttttcctaaacggacaagtcagtcttcaagagtcaaatacgacggagaaaaagcaatgccgaaattttcagaacggagtgatgatggacgggattttgcaatggaagcggagcatcgaccagcacctgcagggcgtggaggagtgcaccatttgcatgtccaccgtttcctccacaaattaccaattgccaaaaattcggtgtcgccaatgtcggaaaaaattccatggcgattgtttg

SEQ ID NO: 79766 - DNA, 370 bp, Heterodera glycines
atggcactttttggaactaaaaacaatgcaataggaggagagcaacgaagaatcactgcaggaataattggtaataatttctgaatgtgggccttttcataagagcaaattcagctattggagatgaacttttaaaagggacgacgcgagacacaaattctcaattcttgtgcaaacaattatttgagaaaggagtttgggttaaaaaggtaggcagaagcataataattatttgtcaaaatacctctttacccaggtttctattttgggggatagcataacggaggttgccaaagaagttcgaaacttttgcgtggaatttgacattgtgttagcagcattcctttgtttttcatggaattttgattaa

SEQ ID NO: 79767 - DNA, 733 bp, Heterodera glycines
atggacttttttttgcttctgtctgcgatggccgcgctttttctcttttttctttattcaatgaatgcgctcttgtgcgttcgccgtctcagaaaatgccacggaaaagaaaaagtaaatcatcgcagtgaatggccaatggcacactttttttagcataatttcttcattgcctcaaatcggtcgagcaacgaaagccctttgagtgatcacttatgtcaaaatgtaccatcttcattgggagaaagaaagaatcaactcaaaaataaaaacagaagtcaatggccaaatgaatgggaagaagaaaagtggcgacaaataccgataatgaagagagacagtggaaaaaggagggaaagaggtggagagagtgtgcgtagggagacacggcgagttcgggcagagaaaaaggggaacaccgaattcgaaatggacctggcgatttggaggaggacggggaaggaacaacggcagtttttctagcgtaatttttggctcttacaattagcacgaatctgacatttttttagaaataatatatttacagtgagttgcgcgagaaattacgtgaccttctaaatctatgatcaacaattcctgcccaaaaagatatttgagctcaaactataacataacctaaaaaggagattaatattagagaccggaattttcaaatttgcggatcctgttgcaggattggaatttaaaattttttacattctgtattaataaa

SEQ ID NO: 79768 - DNA, 674 bp, Heterodera glycines
atgatttggctggtgctgatgaaggtgagatgttggtgcagcctatgcacatgaacggtcatccggcggcggcgcaagcgggctatgtgaacgaccacgctgcacaccatcaccaccaccatcatcatcaacaccaccagcagcagaatgggatgctcatcgatcacaacgtgtggcagcagattcttgctcccgtacaacaacagattcagctgacggcgcaggattacccggccatccgtcgagtgggaacaacaaaaacatttaaattcaaatttatgattttccctcatttcagctcatggcgctgggctttccgcgaaatttgtgcatcgaaggtggggggggggggggtggacagttggaatttcaattgtttaattttcaaattcccttctttttcagcttacattgtcagcgaccgtaatgaagtgggaaactgaattttgctatttcaattaaatgtctgaatgcctatttttaaggagcttgctgccgagtacattcttgaacggatggcggaggggaacgggccgtgaccgcgttagaagagaaaagaaaatgaggagaggacattgatatatcgaatactgtattatattgtatgtattgtatatatgtatattctatatttcatatgtacatattgtatgtatttacttacgcaacattta

SEQ ID NO: 79769 - DNA, 790 bp, Heterodera glycines
atgaaattctacgcctacggaagagtccgaatcgacgccacagcccacagcacaggaaaagtgagacgaacgggcaattttaagatctaatgagcgaccaatttcaactgttttagggaatatctacccgagtttgaacggcaacactcccatcacttcgttgtcctttctcgggtgcggtgcgatgagtacgcccaacgacgaagtatcatagaaagaacataaacaaataattgatataagcgaaaagtggattaggagagcactatgaacctctattttggccatgttgagtgtgaacgccaaaaacggcaaatttgttgggaaatcaaaactcatgttttagtatacagaggaattgggcatattattcgccattattatacaaattgatgattccatgcgtttagcccggcggcatgaacttcaacatggccacagcaacaccggcgaattttggcattcgaaacgaaaacaatgacgcggagcagaacatcgaagcgttgttccggacgcaaaatgtgcaggaggagacgccacttgcgggtcccgcgttctgtcctacgacgccttaccttttcgcaatggcgggaggcaacagcgaaaagtgagggacaaaagaaaaaagcaatttcagacaaatcaaacaaatttaggcgcacgggagtaacgccgaagtacttctgaactggtcgaatgtaataagtatattgtgcttcttttgttcgatatttgtgaaattcattcatattcaccggcgttgtataacatatacacatttggtatatta

SEQ ID NO: 79770 - DNA, 1581 bp, Heterodera glycines
atggagcagggcggttttgaggtaaattcactcagggtatttgatgggcggggagttctgctgatttctttgccctttaactttgtgaatggcattcccatgacccattggcatgcatttattgaacaaagagtggcaaatcccttcccatacggcaaggcggggtcattcattttcatcccaaacactccaaaatggggaaaaatctgaaaaaaattcctgttgaattgctttttgaaactacaaaaagtcttcgatttgacatccgctgggccactgttcgggtgtccgcctcatttgaccactgtgttattaagtgccaatcagattggctcttaaaggaaattgggcgtctaatgattttgcatcgaaaagtagtaacggctggagggaacatatccaattctaattaatgacaattacaggctttccaatttattaaggttgagttcgtggcggaagagaaagcgcgtctgttccaagtcgtttctcagctgaacagcgaacgccgttctattgtccatcgtgccattgcgtcccattttgcggttgacgaacagtatggggcgaaactggtcaaagacggtgccactgaccaccagcaattttgcgagaagattaatgctatgattggcaatttggttgatcccaccgacgcagcaaaagttgcagtcgcaggagactgtatgttggcgagcacagaaaattttgaactttttatagcatagcaatccctcaagaaatcacaaaagtgacactttcttattttggttttcgagctcatcaattaaaatctgacgtccattttgtttgaggattggtttcatcaattttaacagtactaattactacatttatcactcagttttgcaccaacaagtccagtgtgcgtacggatctctagcggatatgaatcagatctcgaacctgaaggcgcacatttctgaacttcgtgctcagaacttgacccaacaggcgcaaattggtgcacagcaggttcagattgatggccttcatgcccaagttggtaatcagcagaatcgccttcaggctcaagttgttgctcaacagaatctgatcggtggccagcacaatcagatcggtgctcagcagaatctgatcggtggtcagcacaaacagatcggtggccttcatgttcaagttgctgctcagcagaatatgatcggtggccttcatgctcaagttgctgatcagcagaatcgtatcggtggccttcatgctcaagttgctgatcagcagaatctgatcggtggccagcacaatcagatcggtgacctgcaggctcgaaatactgctcttctggctcaggtttctgatcatctgtcactttttgatacccctgctcagaattcttccctgaggaagaggaagttggtttcggacgttgaaaagctgccgagtcagacgtcgagtggaccatcgaaattggccatcggagtttcggagacgaccgtcggaccttcgacgtcgatcgttggagcttcggagacgaccgttgaaccttcgaagtcggccgatgatttgtcgcagacgggcgaatcattgccgtctaaggattga

SEQ ID NO: 79771 - DNA, 5007 bp, Heterodera glycines
aaattagggttgagcggtaccggtaccgaccggtaattaccggttatttggtaccggtaccggtaccggttttttcaaaaatcaaagtatcggtaccggtttgtctagtaccggtaccgccggtaaaaatttgcactggtaagaatgggggtctgggtgagaaaagagtagggaatggtgaagaaggagaaattttttgagaaaaaaaaattaaattatttattttcatttaaagcatttgttcatatgcataagtggtcaagtggctaaaccttctgattttattatttctcggcttgggttcaattccccactgggatagaatattcttcatattttctttaccattattttaattgaaattttaattaaaaaaaatattccaactttttttctttcattttaagcatcctaaaaacccaaaaattaatcaattggtctttttttacaaattctgttaacaaatcgcattaaaaaatacaaaatttttcacggcggcgcctatcggcaccgccggccctccttgttccccaaaagtcttgagaaaaacgtgccgcgaaaaaagcggtgttgaaagcaaaaaaggtcattgatttacattaatttacatggccggagaccccttcgcaaaattggaaaaaattaccgagtaccgctcaactctactttattcttcatttggcaaaatcaaaaaataaaacaaaaaaaatgtataaattaatgaaacataaataagaccaaaatgtccaaaagtgaacataaatgtatgtataggcctatttatttgttagcgtagttaatgccagcgtagagtctttttctctatttcttgttcttcttcgttttgtgttcgctgcctgaaatagaaaataattatgaaaggaaattccataaaaagacgaagtgcctggtaaagtttcgtctcgtcttttcgtccctcctctccgcgactcttttgaccctgaacagagccctgaacagaagcggaagctttcggcgaattgtcggacgcggacaattgcttaaacataattaatttccttcaaaaatgggcggtttccccgctttttacttctacttggactcagaatgaaaaacgacccaaatgactgtaacttgagaaacatgcaaaattcgaaccagaataaccccttccaaaattttcaatattagaaatatcaaaatttggcacactatttttatccaaaaatttatataattttttcgcggtttttgagtcattttttagtggttccgccagagaaaatgcaaattttgatcattggaggcgatcatcgaatgtgtgccgttaaccccagtgccacaaaatttagagatttttccggttggattttgttatgtcgatttattcttgcgctgatctgtaatccataatcaatattgaccaattccaaatcatttccgattatttgtttttttctgatcagagcaccacacattgatcacttatcatccatcctgagagtgactgatcaaattttcccttcaaattcagctgaacatcagcgtcttcatcaccgtcactgatctgaacgacaacgcgccccaattcagcgcccgccgcttcgccgtgcaaatcgccgaagagttgcccgagggcacgccgatccgattggacttccgggccaccgacgcggaccaaccggggtcaaatagtcgcattcgttaccgaattgtgcgctcatcaccgccagcagcagcagaaacagcagcagcagaggagcaaaagcagcaggcgagggaatgttcgcaatcagatgaggagcatacggtagggtagctggcgcatggtacggtggtggaaccatttacttttaccgtagaaaccctgacaaaaacacttttgcgaggggaattatcagcagttttcactataatttctagagttcgatattttgaaagcctggacctgggtttcctgaacaaaaaccaaggaaaatcccacccaggaaaaacccaggttgaggaaaagtggcctgtggactttgacctgccccaagaaaattttttgatagcctcggctcagaatttctaaaaattggcggcttttcaatgcatttgtcaacaccaaaaggtttccggccaaggctcctccgatgatcggcatccgtttgaagtgttttacaccgattctgatgacgactgtgccgctttgcttctgcacatcccggacccgttgcgacccgaactttttgttgccggacggatcgattttgaaaaaatgccaaattttacggtgtttatcgaggcggaggaccagggcacacccaaactgcgcactttcgcacgattggacgtgacagtgatcgacgtggacgatctgaacccgaccttcgaggcacagatgtacaaaagcagtgaacacagagtaaaattgggagaggattaaatgacctgtttcaaaattgttgcacaatgccaacaatcccaaaaaattggcataatgccaatctttcagggcttcagcttggccattgagccgtcaccgatcagagcgtgggatgccgaccgctcatttgatgagccaatcatttactcactttccggaggttggaagaaacgcgaaaacaaaaaactgatccttgatcagagcgatcaattagtccacatattgttgtaattaagaacacgcggtgaactacgcaattgatcagctaccggtgaggtcaaactgctggccgaaaagctggtgccggcgaatctgatcgtacaggtgaaagccaaaatgtcggcagaaaatgccctgctcaacaaaatttctgttaaaatattctcaggatcataaattccgattccaaaaaatcagagatgatcactttgaaatttgaaaataggcgcgacaagcaaaccgatcggagcgcaattccaccgcctttttgctggtccaacctccgacggagggggacgaagaagcaaaaggggagggcaaaagcagcgaactgatcattttgagggtgggtttttatggaatttacatggatgaagcattgatataaattccaataaaattattccgtcgatcagttgtcgcaaaacacggccattggcaccaaattaatgcgattggtggacgacgaaaaatgcggcacggaatcagcggagagaggagaagcaatggcattggaaatagtgatgccgaacgggcagcagcagaagcggaacaaattgccttttttcatcgatcagaggacgaaatggctgagattggccaaacggatggcaattggccaatacgccggtgagtcattcgttaacgatcgtttagagtttattttatttgatcaaatcagtgaaattgggttcaaaagttatgctcagcagaggaccgatcatgtccataatttaatcaagcatttcttgctgaaagttatgttttaaatctaaattcgttcactagattgacctgttcatactctaaactttggtcactgattagtcttaagccttagcttttggatgattattttttaatgatcactaaaatgatattgatatctgatcgctctggcgaatggtcagtaagtgagtgatttcatttacctgctgtgaggacaaaacatgatcagaataagccacacctgttgacaaatctcataaaaagcaaagcctaaattaggatagacaaaaagattaaacagatgtattgcgtttgctcgatggttttaatgatcagagcaatcaatgttttccaactttttagcaaatatttctatcaaattgacatgcccaaaacggcctccgaccatccgatcactggatatccgtctgacagtttttgatccgatcagaggacaaaatttcgcatttgaaaagcaattttacggatttgaactgccaacggtgggagagaatggacgagaacaatcggttgagattggacggatcaaagcaaaaaacgcggggacacggggaaatggcacggcacgagaagaagcggatcagctgatcacttatgcgttgttaagcggaaatgagtgcgctttttacaaattagctaaataatcccggaaattgggcaccgattttcaaaattatttttgtttataaagattttaatttattctttaaatccatagagacattccagtacaatttcggtgctcatgtttcgcttctttaattaatagccaatatggcatttacggcacaccacaaaaaactacagaaattattctaccgtacttactggtattttcaccccttctcaaagggagggggggggggctataattcagggaggggttctatttcagtaagtacggtaaattgggcacttgccaagtctccggctttttttggcacgccatgcgtttatttaccacaacatttatgatgacaatttgccattttccttcccccaatcagcagtttgttccacatccatcccattgatggtgtgctgcgccttctccccacaaagtccgccgaactttttcgcctcccgccggccaccgaattggtggcattagccgagaattcagccggaggtcgagactttgcgctgtgcattgtccgccgatcgacgcgttcgggtgtgccaccgccatcgctcggcacagtttggccgccgtcgttgacgccccccgatacggcactttgccttggcctcctctgctttctgttgctgctgacaaattgtgccactcttagcctttggctgggcaaaaggcgcatggcaaatttgtgagtgctttttcaggcgattggagtgacaaatcggagcccttatttaagataaaaatgaatgggtggggttctcggcactttggaatacccaatattgagcattggtgcccagatcccttcagcgtccccttttaagccccataaaaacttttgcactttattcctctcgtcgttccccaaaccccgaatttttcaaaatgtttctaaaaatcgctgaaatcgaaaaattttaaaaaattataaatttttttggatgggaaacgacaggagggggggaacggccgctccataccaaattgg

SEQ ID NO: 79772 - DNA, 1035 bp, Heterodera glycines
atgagcgcacaattcggtaacgaatgcgactatttgaccccggttggtccgcgtcggtggcccggaagtccaatcggatcggcgtgccctcgggcaactcttcggcgatttgcacggcgaagcggcgggcgctgaattggggcgcgttgtcgttcagatcagtgacggtgatgaagacgctgatgttcagctgaatttgaagggaaaatttgatcagtcactctcaggatggatgataagtgatcaatgtgtggtgctctgatcagaaaaaaacaaataatcggaaatgatttggaattggtcaatattgattatggattacagatcagcgcaagaataaatcgacataacaaaatccaaccggaaaaatctctaaattttgtggcactggggttaacggcacacattcgatgatcgcctccaatgatcaaaatttgcattttctctggcggaaccactaaaaaatgactcaaaaaccgcgaaaaaattatataaatttttggataaaaatagtgtgccaaattttgatatttctaatattgaaaattttggaaggggttattctggttcgaattttgcatgtttctcaagttacagtcatttgggtcgtttttcattctgagtccaagtagaagtaaaaagcggggaaaccgcccatttttgaaggaaattaattatgtttaagcaattgtccgcgtccgacaattcgccgaaagcttccgcttctgttcagggctctgttcagggtcaaaagagtcgcggagaggagggacgaaaagacgagacgaaactttaccaggcacttcgtctttttatggaatttcctttcataattattttctatttcaggcagcgaacacaaaacgaagaagaacaagaaatagagaaaaagactctacgctggcattaactacgctaacaaataaataggcctatacatacatttatgttcacttttggacattttggtcttatttatgtttcattaatttatacattttttttgttttattttttgattttgccaaatgaaga

SEQ ID NO: 79773 - DNA, 952 bp, Heterodera glycines
atgtcagccgaccaagtaagttgaatttaaattttaaaaaaccacttgagcaattttcattgctaatcttttggcattatgtctctttaaaatacccaaaaatgaaaaagggtactcatgcactttgtatccacattttttttttcgcatttttcaattttttcactcggagaatttcaaggatcctgtctctggtcaacatacgaatacaattgaatcgacgtggcagaagttcaagcagcaacacaaaacgagatttggcacgcaaagatcacttttttccacatacatttccgattttttgtggcgtaggcaatttggaggaccggacattttttttaatttgtggacccaaatcgcggaattgtatccaataagcacataaatctcctttatttgatatttaaagcaattgtgacaataaaaaagtaaaaaaaaattgaaaaatgcgaaaaaaaaaaatgtggatacaaagtgcatgagtacctgaaaaagattacctacatattttaaagtttgcgaacccattctaaagtcagtcccattaaaattgtcccctcaccgaaacacgaaaaattgcccaaattcctaccacaacaaataataatatgaaatatttgccgcctgaacttttggacgaaatgactttttacatatatcctaaccaaaattgttcgagaattctgacttcttcctggctactcatggaatttttgaggccccatatcgaaagatggaaaaatatatttaaattagtatgttacacaatgcaaaaaatgggaattgacccttattgccattttacttttttcagcgccgttacgagttaatcgatctgcacaaactctgcaaggaagaaatcccttggcgcacatttaccgccctggcaaaaacggacaaaaattgcaatgcctttgttgccgcattacaggaactggttaaagaggcatga

SEQ ID NO: 79774 - DNA, 1036 bp, Heterodera glycines
atgcgttttctcactgtggacgaactcaacagaaaatgcccccgggagggattggcaatggcaccatttgccaaaaatggcaacggcagcacaacggaggagcaacgacggtggctgaaccaaccgttcgacgaaacttgcattagggtgggagaaggggaaggaaacccagcgattgattatgctcatgctttgatcatatgaagctcttttttaatccatctctctctctaatccactttatccgcttatccttttcctccctctatttcatcctttttcacttctctctctctctctcgctctcgctctctctctctcgctctctctctctctctcatcccttttcacgcttcatccctctctctcatcctctttatcctattatcctttttcattcctctccctctatttaacccttttcactcctttctcttctctctctctctctcttatccgcttcatccctcactctcatcggctttatccgcttatcttttttcattcctctatttcatcccctttcattcccctctctctctctcgctctctctctctctcgctctctctctctctctcatcccttttcacgcttcatccctctctctcatcctctttatcctattatcctttttcattcctctccctctatttaacccttttcactcctttctcttctctctctctctctcttatccgcttcatccctcactctcatcggctttatccgcttatcttttttcattcctctatttcatcccctttcattcccctctctctctctctcttatcacattttattctctcctcattattcgttcagtctttcttcctcggactgagtgcccaattgcgtcgttatgagccttgggaagagtggttctacactgtcatgtacacgctgatctctgcgctcgctctgctcggcaatggaatggttattcttgcggtgattcgtaagcgcggcatgcgaactgcgcgaaatgttctgatcgtcaacttggcactttccaatctgatgttggcactgacaacg

SEQ ID NO: 79775 - DNA, 1640 bp, Heterodera glycines
ccatcatccccccccccctcctttcttcaggtcatggccattgatcgctattactccgtccgttccctcaacatcaattccccttccggccgatcgggccaatgccttcgtgccgtgctcatttccctgctcatttgggttggcatttgtttaattgcttccgcccttctttcattaacttttctctttcagcttttctcctttttgctttcatttcctttgcttgtttattatcgggtccatgtgctctatgtgattaaagtacattaattacaacatttttaattaatccgaatttaataaatttgacaattaaggatatttatgtgcacgaagaaatcgcgtgggcaaaggaaacgaatgccgatttgattgtattgcgcagttacgggtggcgacagtgtcggctcagtaccggccaatttgaggagggaaaagcacaaattgaaatggttgaagggaggaaggctggggtgtcctttcaaatattataattacccctcgggcattggtttgggcattgtcttttcccttaattaacagtttggctttggtttggctattaatcactttattaacccattagggtattggttcgttatctgatcgtcgtctattaaacccttaaaggcttccccagcaaatgcacaaaattcgtcctctctgatcgctgtcgacgatcgcatggtccaacttggcatggccgcgatgcaaggggcgatgctttacgctgttccgcttgtcgtcctttccattttcaatgtcattttgtgtttggaatttttgaaaaacccttacaatgaagatgaaactgacgcgattcctgaagatgaacaccaaacagctgaaacacaatacggaaagagaaggggacagcgtaattgtgacgacggaacgacgacagaggggcgggtcgaagacatcgtcgatgggaggagtcactcaacgggtacaacagacgaacggggggattaattagccaaatgaggagaatggggaaaggaaacgggaaaacaaaagttgaaaggggtaattagggagaggcaattaattagacaaatgaggacaattggtcaaggggaagcgatttgcaaagagaagttcgaacttattggttccgtttgttcagtccagcatcgccactgccgatttgatgctgccccggcaagtgtccattgttacggtcggaacttcgacgagggcagcggaaaagcgcaggaaccgaacgacagtgagcaaatgccaatgccaaattgcaaattggcatgcgatcgcgcccttcccctccttcttgaggtgcttctgatcgccatggccggctcctacgccgtcctttggcttccctttacgttcgtttccattctgatcgacttggattggcttggcgtggtccgtccctttgcttcaaaaagtgaccgattaacagcaacacttttcaggagagtggctctccaattgtcgaacgcattgatcaaacttgcaaattggtaggcattcgctgaatctgatcagttgggtttccgcttctcttctccttcagttgtccatcacctcaatttgcgtcaatccctttctgtacggctttttgaacaccaatttccggcacgaattcaatgagattttcctttattgcttcgctt

SEQ ID NO: 79776 - DNA, 2658 bp, Heterodera glycines
aggtgaagcaatgaaataaaatggggaacgattgtgaatccattggtacttttgaggaccgacgagaaatggacagcgaatggcaccacggcggggggaaaagccgcgccaggaaatctgtgggcccctgaaatggctctgtttcgccgtcaattttttcatttttgtgagtttgactttttgtttttgttcacattttggcttactttgttagaaaattggcacagaaaatgcacccaaaacactcaaatgaaaatcatatttttcatttgcttatccataattagcatttgtccttgaaatggacagtaaataatgaatgggctttctcttcccaaatggaaactgacgacaaatcttcaccaaatcctcctaatccccaattatcccccccccccccccccctctctgatggccttaattttcctccccaaggcaaaggattttgattgataagcgatgttaatgcgagcagcaggaacaaatagatatatgacaaaatgacaatcagagccaatcagcggatgaatgattaattaacaaataatttggggcgctggggagggaaatgactgaaggattaattccagcaagaaaagtgacatcttctgcattaattgtaataataattttatatcccaaattttatctgacactctcttcccgttggaattagtgtggcaaaaaatgggataacggataaaaagtgggataaatgggataaaggatatggggcgggggctctaaaagggacggccttagctcagtcagtcgcataatcttttacgatattcctggtcatcataatccccaagttcttgccagctcgcttccgtcgcttgccttgcgcttggcgtttatctctttctgaccgaccctcgtcccatcgatgagtttgtcgacgttttgctcaacccggctgtgctgctcacttccgccggtctcttctcgggcaccgtcgcccttttcggccttttcggcgccctcagggacaacgtttgtcttctcaaattggttcgcttttcccctccccccttttttgcccggcttttcccctccaaattcaccccttctcttcgttcagttcgctctgttcgtcttcctctcttacctcgttctggtggtgttcacctgttttctgttcctccttttttattccgacgcctccggggacgaaaaaggcaaaataattaaataattggctgttgttttagctaatgaccgatctgatcagattgggcaaatgcccgtcctttttatccgattacccatcgtacgttaaggcatttccgctcagtttcttctccgttattccatccgccgttatcacatcaatcgaaacatcgcggatttcgtggattatatgcaggaacaggtgaaatggcagctgaatttcatccgaagcatcattcttttgacatttgtttagcttgagtgttgtggcagcacatccttcagagattggaacatcagcgagcagttcaaatgcaattcctccaatccgtatcccgaacggtgggcgtttgtttgcacattgctttccttttccattttgatcattggccattgcttttcccattttccgctcgttttccgtctcttctatttgacgtccatttccttttttggtttattgctttttgtccctctgatcagttgcggtgtccctttttcgtgctgtcgccgttctgtcgccggcggtgccaatggtggtcagaatccgcttgtgcctgccattcgatcgcttcaatgttggcaaaatgcacagaagaagcgtgagcaacagctcgactcggtttgccgtttgtctatgctgactaagactaatcattgaagtgattaattcgttttgaggacatttacgtcgccggatgtctccaaccgctccgaacacttttcgacgaccacgcgtttcatatcggatttgccgttgtgtcggtggttttgcccgtggtcagtcaaatttaattcgattaattcgttcttctcttctcgtgagtcttaatgatttgtcagttactgacgttgttttgtgcattccaacgcttagttttgttcagtgtatggccgtgtttctctcccaatgtttggcccgtcaaatcgattatcagcgatttttactccgaagggaagaacgacgaattgcgcgagcggaacggagggaaaggcgttttcgagagcaacaacagaaccaatccacgggtcaattagcaacgcaaatgggggaccattcggcgccgaattttgggtaattaattagtgaaaatttgtggatgttcgctgatttcagcggcaatgggaaagaggaaaagcgacgcagaaataaccagcaaaaggagaagaggaaaagccggaccaaaagttcgtcaccattgagaacagcagcaaaagtggcgaaaagactttcggtgaatttggaaaatgggacggcgacgagagaggaagggaggaaaaacagagtggggacgagtgaggacaagcagacgacgagagagggcgcgagggataacgggaggcggggaggggcgccggcgaggggcgcgagagaagcggcggaggccaattcgcggaacagcgcgtcaccgcggaagaatgtgccgcggggcacgcgggaagagacaaaggcccagcggaagacatccgccgcggaaccgacgg

SEQ ID NO: 79777 - DNA, 778 bp, Heterodera glycines
atgggaaaagcaatggccaatgatcaaaatggaaaaggaaagcaatgtgcaaacaaacgcccaccgttcgggatacggattggaggaattgcatttgaactgctcgctgatgttccaatctctgaaggatgtgctgccacaacactcaagctaaacaaatgtcaaaagaatgatgcttcggatgaaattcagctgccatttcacctgttcctgcatataatccacgaaatccgcgatgtttcgattgatgtgataacggcggatggaataacggagaagaaactgagcggaaatgccttaacgtacgatgggtaatcggataaaaaggacgggcatttgcccaatctgatcagatcggtcattagctaaaacaacagccaattatttaattattttgcctttttcgtccccggaggcgtcggaataaaaaaggaggaacagaaaacaggtgaacaccaccagaacgaggtaagagaggaagacgaacagagcgaactgaacgaagagaaggggtgaatttggaggggaaaagccgggcaaaaaaggggggaggggaaaagcgaaccaatttgagaagacaaacgttgtccctgagggcgccgaaaaggccgaaaagggcgacggtgcccgagaagagaccggcggaagtgagcagcacagccgggttgagcaaaacgtcgacaaactcatcgatgggacgagggtcggtcagaaagagataaacgccaagcgcaaggcaagcgacggaagcgagctggcaagaacttggggattatga

SEQ ID NO: 79778 - DNA, 94 bp, Heterodera glycines
cttggcttgttttttaaattatttggacaaaacccatactgagaaaccgaatttatcaactgttttaatttaaaaacatgaagtgaaatcagtc

SEQ ID NO: 79779 - DNA, 950 bp, Heterodera glycines
atggccaagcaatgcgacgagcgggtgaacacattgacaaatggtgagaattagggggaaaagcaaaaggaacaaaattaattttttttttttcttgaacgatttaaatttactaaaaaatttaaaaaaaatttcagcagcgaatttttggggtgcttccatcaaaaagcaaaatgtttccacttacttgtaaaaaaccaatgaaacttgttttaaaacaaattttcttgtcaaaattccggtcagtcactgtcaatcatcggcccggttgaaagtcggttcctagcttttctgaacctgtttttttttgtaatggttatttcccggtccctggctactcatataattaaatttcgtcaaaatccatgctaaattaaaccaatttttctagcaaattggaggcctgccatgccctcactcgaatttctaatccgagttccagaattttctttctttttgcgttttttcccttttttttgctattaaattttgaatttccgacccaaattctaacacctcccccccccccccccatttccccggcagatgtcgcctttctgaagttcctgcggcgtcgcgaggcggccacggcggcggacgccgacggcggcggccctcggcgggtgaccgacttcgacgagttggtccgccagttggaggagaagcagcgccgtttggaggagggacaagtgcaggagacgccgctcaccgagttcatccgacagatggcactcgaaaaggtggcacctcccgaaaattttttttttaattttcaaacttatgttagaagtaatccaaaaaaaattgataagaaatttcttaacaagaaaatctccaggaaaacttttttgaaaaaattttcagagatttttttattttccaaataatcgctgaaagatttttcggaaaaaattttttcttgaccaattgctgtccgaaatttaaaagaa

SEQ ID NO: 79780 - DNA, 1386 bp, Heterodera glycines
  unsure (1)..(1386): unsure at all n locations
ttgcgtgttcccattattgcaatgtgcaatctacagcagaaactctcaaaaattgaaacacttcgtttggccaggtagaaaatgaatggataatttttatattaaataataaaactatttgtatattttagtatattaaataataaaactatttgtatattttagtatattaaataataaaactatttgtatattttagtatattaaataataaaactatttgtatattttagtatattaaataataaaactatttgtatattttagtatattaaataataaaactatttgtatattttagtatattaaataataaaactatttgtatattttagtatattaaataataattgcaattataatatgtatacaaataataaattacttatttttaacaaaaataagttaatggaagctctttttcaaatttttgttaacttaagagaaaataatttttgaaattgtttttgtctatttaaattttcgaataaaatccttttttccccattttttgtcattatatataattaatttaccgtattactaccacacatcacaatgtcaaattaatttccccactttttttccggattatattttacttacacaaatctcaagtgactccgttgagtagggaaggttctgctgctggtgctcctactcaatgtttgattattggacaacaataaaagcgcccaatttttggccctcaaaagtgagggccctcaatcatgggaatttctccggaaggtcgagacacacaaattttgcatgagaaaatgatgggggagggaagagcaaaaataattgggcaaatttgcaggaacaaattaaacaaaaaaggaaatacaaaaataattttttgataaacaaagatttattcgaaaaaattttaaattaaataatattaaagtaatatatttttaaaatttatttaatttttgtgtgaaaaataaatttaaattacccgaaaatagacatttcattttcaggaactacatcaaagctttgaaccaaatggcagaaaaaggcgcccaaatgatgtccaaggtggactatgcgcgaattttgtgcgaagagctgagtgccaccaccgcaaatcaaattgccacttgccttggcgttccgccaattttactccgagcgatgccaacgcaacgccaacaacaacatcaacaagagtttgacgggacggcacaatcacagaccgccaattgcactccgaccaactttaagactcaatcgngaaaaggatgttttagtgggaccattgtttgaccaccaaatgccacgaatgagcaggaccgaatgtcagcaataattntgtttttaaatttgaaagtaaaaatattcatttaattaataatttccattanattatttgca

SEQ ID NO: 79781 - DNA, 612 bp, Heterodera glycines
atggctataattttgcatgaaagtacgttagcacaaagtctgaagcctggaacaggacgggattttgtgggatcaatcccttgggatatcatcccgcaaaattaagttttaatcccggagtgggatcagaaaatttgaaattttcggactctaataaggactaccagcctacaaatatttatagatttgaagtacaagactcaaaacctaccccaaaattagtgaaattttttgttaatttaccaaaaatgtgtcaaaatcaaattttcacacttttttcgctttgacagatcgctgcacgggtgcagccaccttttgttggcactgaactcctttttcgagttcctgcaccagagcggccattacattttcctgttcaccatattcagcgggcgcaatttcatcccctattttgccagtgctgtctttcagcttcaatcaatcttcggctacaatgccgcaattttcacgatgattggcacggcggtggaccgactgttgtccgtgctggtgcctgatttgtaagcgatatgttggcaaaattaaaactttaaaatctctctttatcagagagaatttctctcaaattttgtgtaagctattaataataaa

SEQ ID NO: 79782 - DNA, 1928 bp, Heterodera glycines
atgccaagagttggagatcgagtgatggttgaggcaaattataacccgtctatgccatttaaatggaatgctcggtcaattgaaaagatacaaaatgtggaataccgtcaggtatcacatttttacttccattattgaacgttatcttttaggaaacaactcaacaatatcaacctcaccaaaaccgacaggtccaacaaccgcaaaacgggacgtcgagtcgttggaatgatcgtccgccacgtgatgaatttcctcgtgaaccgcgacgtcagcctccaatgtccattcataggactcctcctcgggatgccggccgtaagttacgttaaccaaaattattacattttatttttaagaaaaacgacctctttcacgacagcgttcaccacttcctcgtaaaagtcctccacgtcgtcaagaaagcacagtttcaaaaagggagcgggaggtccgcgatgaaaccgaaacccgagagaaggaccgagagtcgactcgcgcacgttctcctcagtcgggcaagcgagacactgcttcaccacctcgacgtcggcagcgcattatcccccgttaccattgtaacgtgtcgaaacaaacaattccacagtacacgcttttttttctatttttttcgtgtaattgtcaattaagtggcgagttaaaatatgcagaattgcgaaaacgttattcgagtctttacataccgtccgactttattcgctgcaagttcagctgggttgattctgtgaaactcgagacgcctcttcaattttcgccacacccaatcaaatttcatgtgcttcataaggatgtcgatgttttgttggacgagggcaaacaattgccgttggaaaaccctccagatgctgacagtcgttttgttgtaaaggtaatctttcaaattaaattagtttatttggattgattttctctttttccggttaggttttacttatctcacatcctggacttactgcgcttcgccgaaaattgagcggacttatgccggatgggagcattgatgaatccacagaaactcaacccttatctaagagtatccaaatacttgttggtaatatttttaactgttttttttaattagtcgtttaatttcagggtatcgtggaaagggcgagtttatgtgcatcggcggcgtgtggtcaccttcgttggatggtacgaatccacttgacccgcaaagcatggtcaatactgcgattagaacgacactttctttgactgggattgatttgtcaagatgtgcaaaatggttagtcgtttggtttttcaagttttaactttctttggtaaatttctctctctctctctctgtctatgatgctctctctttctcttactctctccagcttcatttaggttcacttttgcgtttgattgttatttccgtttatttctctttttctgttcttgccacacaccctttaaacttctgatgcaggtacaagatgctgcatttgcattactttcgacccgagcgtagtcgcgttgactcgtgtgtgctgatgttgcctgataccagcaccattactgactttcagctctcagatgagcaataccaacagactgtgcagaaactccaggaccaactggcgtctaaattgtctgcaatcgatgcgcaggattttgtctcaccaaggcgggaaaatgagaaggggttaaatttggattctggcgatggtgaagctgctgcggcggaaaccggcgaaaaaataaatcaggaggagagaagcggtagtggtggaattgatcagtcgcccaaacagccggcggttggggaccagcatcagccagaaatcacaaacaccatctctgctgctgaggtgctttcatcaaagcgatttataaaagttgtcagctcgacctcaatgtgttcgggagttgccggcggggtcgaattcttgtcatag

SEQ ID NO: 79783 - DNA, 831 bp, Heterodera glycines
  unsure (1)..(831): unsure at all n locations
atgcaattgctctatttntcatctttttattctgcagtaatttccagggatttggtacagacgagtatgttctaacgaatattttggtcacaagaagcaatgagcaaattcgtgccattcaaaaagtgcgcatatttaaaaatcaaaaattatttttgtttaaaaataataattttatagccctaaattctacattttaattcctcaggcttacttcaaactgttcaccaaggaactgcaaatggacattgtggacgacaccagtggcacttacagacgactgttgtccaatttgtgtgccgccactcgggacgaaaccggcaaagtgaacaaggacaaagcaaaaaaggtgcaatttgtagagttattagattttcaaaatttatagaaaagtacatttgaagtttttatatatattcgtattattaaaaatcttggcttcttaatacaatttgtgtttagaatatttataagtccttaaatttgttcaatttaaaaaacgtcagatgaaaacgaaaaaattaatagaagttaaatttcttaattttactagggcccggatttaggggcgaaaaagtccaaaataggaacctaaaaaggggcagaaaaatcgcgaaataggggcaaaatagaggcgaaaaagtttcaaatgtaggggtgaaatttattaaaaatgctgttttttctatgtaaataagttaaaattaaggcagacaattttattcattgattagagatacaaaaaattatttttattcgaaatttttgaatacatttttacaaaataactaaaatttcaaaaatctaaattttgaaaagaaagaaaataaa

SEQ ID NO: 79784 - DNA, 450 bp, Heterodera glycines
atgtgcgaaacccttcgaacaataaacggaggagtgcccatctgcaaatcgaacttccaggaattggatgttgcctgtcaatctattctccgtgaacgtcgaattcaactggcagatttggcatgtggagcagtagtatctaactgtcaaagcaaattggcgggtacgattttttctgagaaaaacatttggctgtttgaaaatatggaataattttttaatgtaataattttatttgctttttaatattttctattagttggacctttttaataatgaaacttttacaataataaaaatatttcattcaggaagcctcggcgaaccctcaaagctcatacatacgcaaaatttgggtggcagtgacggtggttttataaaaaaaatcggtacttccgggttttgtcaccccccccccctgaaattttttttctaataattctaggctaa

SEQ ID NO: 79785 - DNA, 889 bp, Heterodera glycines
atgtatgttcccattggcccttgggaaaggcgttttttaaaaaaaattggaaaggggtgtactgtacataaaaaatatattgtgattttctattgtcttgtggttagcagggctatgctacttccttgcggtgagtccggaaacagagttatttttaaaaatattattttgtttttcttgcaatgcaatggaattatctggctaaagcaggctaaatttgtccaatttttgacataaaattaaatttttaatcccaaaatgtcgggtccccaaatgttgggttccctaagtgtcggatccccaaatgacgttcgatccccaaatgtcgggtccctaaaagtcgggtccccatatgtcgggatccccaaatgtcgggtccccaagttgcaaatccccaaaagtcgcaccacggccctagccatccctattatatagtattcagtttatataaaaatattaaatttggtggttattttaaaaaatttttagccgatcagcacaaaaggccagcggcttcaatgaacgctaccatctttgtgccggcagccgatcattgggtggacttgaagtgtttttttttttactttaaatcagggacgtaattattatttattaataagtgtgaaaaatattatattttaacaaaatcgatatagttattactttttctttttcctataaatttaacttaaaatacatatttatcctaattattgaaaaatagtagaatttaaactaatccaattaaaactcagggagattctggttcggctcttgttgtggacatttcttctcgttcttacgcagttggacttttttcaatgcttaccactaactcgtccttccgcaacgttcaggcaggcatgtttttcaaggcttttcaaataaa

SEQ ID NO: 79786 - DNA, 1215 bp, Heterodera glycines
atggccagcagcattagcagcgttgacatcgactcgcaatcggaaatggcgtcgaattcgagaaaaactgttgatgatgttcagtcctttgaagaatttcccgtctattcttccaaagtgagtgtcccatagactcaatcaatcaattcgaactttgaatgaaaattggaattgaggtccgttcttttttggcccaagtcgatgactctgaaatgcttcgtcccgactttgatctgacgacttacataaacaccattttccctaccgaacaatcacttgtccatttggattcgtttgtaaagaaaattgacgaagaaattgtaactttttttataaaaaaatttctatatgtacatttccgcatttaaaagttcaggccaattacgaccgtgaactgtccgaggctgtcgctgaacacgggcgatgtgcccttgaggcaaacaacgctttgctgcaggtccattcagtcattttgacaattattcagcaatacaaaaactaactatttccaattttaggcccagacaacaataacggaattggagcaaaaagtgcaggaaattcgtgacagaacgctttgttctgagacttccgtgcacgaactgacaaaagacattcgacaattggacgttgccaagaaaaatctgaccgaatccatcgccactctccaccatttgcaattgcttctcaacggagtgaatttgctcagtaaatggctttgaaaaacaaaaatttctgtcacttaaattaatttaatttccagctcaatgggtcaccgaaaggcgatacaatgaaattacaacggaactgccggctgtgctcaacgttctgttgttatttgaggactatcagcacattgaacacgtcaaacagctgacggacaaagtgcagaaaatccgcgaacaattgaccgtccaattggcagccgatttaaaagcggcttttaaggcaaatttattatttaagttatatttcaatttttaaatgccaatttagacgggccacgtcgaccaacaaacctctgaaatgtgtcgggttgtggtaagacaatttagagcaaatcgccaatttttcatttattttcagagcgttttgggtggaaaacttcaagacgatttcatcaattggtttatcaaccaacaattggccatttacactgtcctttacgcggactctgaagacgtcgcctggttggacagaatcgaagaaaggtaa

SEQ ID NO: 79787 - DNA, 1120 bp, Heterodera glycines
atgttgaagaaccgcacgcaggagagggacgacctcagggacgacatcgccaacttcacagccgaaaaagccaaattggaacgaggcgtggccaagttggaggaggacattggaaaactgaagcgcgacaggacgaagacggacgaagacatcatcagactcaagcgggagcgaacaaaggcggacgaagaaattggaaaactgaaaaaggagcagaccaagtgggaggaggagcacgccaggctgaaggaccagcatgccaaactcggcgaggaaaaggcagatttggagacagcggtgagtttgcaaattgtaatgttgttttgaaaccaaattgaaacatggttttaactgtgggagacaggtgggtcgcacggtgccgatagactcccccggggaaatttgtccaaaaatgactgaatttacaattttaggctcattggaaaaatttaaagaatttaaaaaaagtgttatcaaatcagtagaatttttcagaaaaatctctcaaaaaatcatttatataacattctaacttttgttgaatgttttttctttgtacagcttgctgaccaacaacaacaaatcgaacagctcaaagaggacaaaaaccaatggacgcacgatttggtaattttcttttttttaaaatccacgaaagaaacatttaaaaatttagactcaatatttcgacgccaatagtcagcaaaacgaagcgtcgatggcggacgaacaaggcaaaatggaagcgaaggaattggacgagcaaaaccagtacttttatgaccagcaggtcagatacgttttcaaacgaagggggaaaaagttaaaatttgaacaatttccctagcaaaacgcatacaaaattcaaaaacttttcccggcggcgcctgtcggcaccgccggaccgccacaccctcttcccacgaagtttttttggaaaaacgcaccgcaaaaaaagatgatttgaatagcaaaaaaaggtcgtcagaaaagtgttcagaatagaaaaaagtcgttgcggtgaaaattgggggccttcgtacgaaaaattggtcctggcgcaccccccccccccccgggacggcataaaaaatgccgagcaatgctgaaaaaaaataaa

SEQ ID NO: 79788 - DNA, 1920 bp, Heterodera glycines
atggaagtgccaaaaggcggaaacaaagctcttcgacgtgccaacctcgattcggcccaatcaattgacggcaacattgggaacaagcgccgacgaacggtttgcccaagacttttcgggggggggggttagagacatgccaccaaatgcctaaggcctttggggcttctaatacaatttaaaattatttggcagctttactgtgccctaatatttctaggaagatccaaattggcattcttggtattatttgggagcaccaatttacaaacaattttggtcataattttttaaacaccatgaaattttttttgaaatttttctggctaatagaggaggaataagaaaatgtttaatttggacactttttagaaaaattacaataccttaaatctgtcaaatttttgacactcttactgaaatgtccattttaatttttccaattttagcgcaacgagggcaatcagcaacaaaacccgcaaccgcccgagttcccaccagtcattttggccgcacatcactcgcaaccacaacatcaattactgaatgtgagtttttcatggttgcatatttcaaccgattttgttaagcgtaaaaatatggaaaattttaaaagtttttctccctttttagcagggacattcgacaggcgcctttccatttgttgaccctcagcaacagcaacaattgacgccgcagccattgggcacgccggcccgggtttcagtgacggtgagggttttttagggaatcccccccccttttttcacgtttcgaccccttccccttttaagtatacgaagccgtttccgatgctggagcaacaacagccgcagcgcacccaaaatttgcaacaaggcgatgaagcggcgattatagagcgcgtccgtcagcgacagctcgcagaactcgctgcaatggaagcagctcgacccatcccggacgatctgcagtactgtgccccgtacaatgcctatgggctgaccagcatcgggtggcttttgatgggatggcgagaacagatggtcataaggtcagaaaaaggggcatttaccggggaacggaaattgagacagattggacacccgaaaattatgtccaatttaggctgtccagttttcggtgtcaattttgccagattatatttcgctctctcttccagcagtctgatcggcgtggtcacccaaagcggccccatggggggtgacaaggccaaattcaagggccgaaagctgattctacaatttgacaaggatgcatctcagcttctcaccgtcaaggaatgggagagggacgacggccggcccagcgagttggccagagcgcaagccagagaccgagtgcatttgcagcgattgaacgtcgtccaacagaagggtgccattgcaacaacaaacgaaaacactttcattttcactctaaccttcggccagttttcaaccatgaccatcatttcgcatgcggggaacggtatgggggggggagggggccggaagtggtcgtgcctttgactactaaagtttcccgatccccccaatttagagtgggccgcaaacgcaaccgtaccgcacaacttttttggcattgttagcaatcgcgccggtaagagctcaatgaattttttttgcactacaatttcccccaccccaaaaaacagatggaaccgggagtgccaatgtccaacagcaacaatcacaacagcatcaacagggaacatcggcggcgctgcatgcgcaagtgggccaaaatgaagaagaagaagatgatgaagaccttttgctgtgcattgaaaatggccaggaattgtccggcggtgatcggcaccagccacaccagcgcacctcgaccccggtgagctgagctgcccgggggcgagcaaccgatgttgttgttgttgatttggaatgttttaatgaaata

SEQ ID NO: 79789 - DNA, 655 bp, Heterodera glycines
atgatgaatgagttggaatgccgaatcggtttatcaattatggtaaaagcacagaaacagctaaattggaaacacaaaagagtcacgtgcgacccaaagagcggaaaaaagccattggcagaagaccatggaaaacgaattatcatggaaaagacaacgggtacaaaggccgcccatttgtggtcatttctgaaggaaatgtcagcaggcgaaaaggccacgccattcaaagtgaagtgaaaatgttttcccaattaaattttaatttgctttttaattattcaatgttttgttaaagtgaaaacaaattgacactttaaatttaattttatcacttcgccgtgcccattttccagcaaaagcgtcggccattcgccgcccccgcaggcgctgcccaaaggaaaagagcgatggaaaacggaggggggggggacgggggatcgatggaccgagtgacttttgccccttcttttgcctcatttcattcttttattccacgcattcattatctgctcctgctgcaacatatccacctctttttggctctaagttcagtttaggcatccaatcaatgagaccatctttagtttctttgcccataatttttatggtattcaattgattgtgcttctcatgcgactaccaatagaaaaaa

SEQ ID NO: 79790 - DNA, 1488 bp, Heterodera glycines
atgagcttcacttttcctggtggtgccaggcggccggtcatcgacatcaatagtgaaaatctgatgttcgtttggaaccttccaagatggatcgatatcggtgaaattaagaggtcggttacattttatccaatttgtcttttttgctaaacatttcattaatttttcagaagcctgcagccaaaatatggaagggttcgtccttttgaccgtattcaaaatacttagacaaagcgtttctcattctgttactttttcagatcaaatttgtggagacgtttgaggcgtggagagaggggaggcgcatgggacaaatcattctcgacttcggcacgtacagttctctctcagcgttcactaaggcactctccaacaaggaggagttcaactacgagggcgtcgagttcatgtgttttgattcgaaagtgatttgattgccatgccctatttttcatttgctttttcccttttcagattggtcagaagccgtttttcaacttcgtccgtcagcagaccggggtcgacttgttggcatgcgaaggagtgccgccaacattcgaatacaagcgaaaggtcagcctgatcagaatcgagtgatttgctccaccaacttccgcactgtttcttatttatattccttttctgaagtgctcaaataaattcttatttttcttttctccgttttgtctttgtttttccattctttacaattagtgcgactttttctagggatcttccttcgaaagagaacagcaaaaccccaacaccatttctctgcgacctcgtgttagggacagggatagtccgaggggcaccgaacgcagtcgctacaaccgtgacgacgacgacggcaacaacggacgacccaatggtgcggcacaggccgtgccttctctgcggggtgtgggccgtggatttggacagattggctcccgatttggcaaccgcgaattgccaccgccatcggacgaatcgaagcgaacggcggcatttgagaagattggctcccgatttggcaaccgcgaattgccaccgccatcggacgaatcgaagcgaacggcggcatttgagaagattggctcccgatttggcaaccgcgaattgccaccgccatcggacgaatcgaagcgaacggcggcatttgagaagattggctcccgatttggcaaccgcgaattgccaccgccatcggacgaatcgaagcgaacggcggcagacgaaaatgagtctgagcagagaaatggaaggggcgacgagaatcgtcgcgttcattcgattgttgaacagggaaatgataaagtcgaagatgaacaaactcaccggaccgattcgccgcttggagacttcggaagtaatccaccgagtcgaaactttgcccggcgaatcagtcgcccgaagccgtcatttctcggcgaaaaacgctcggagggattctttgctgctggtaaaattagcgggacgcggaagcgtcgagcaattcgaaattga

SEQ ID NO: 79791 - DNA, 611 bp, Heterodera glycines
ggcccaatgaggagaatgacgacgaaattggacaagaaaatgacgatgaagttggacaagagcagcagcagggaaaggaggagggtgaagagagagacgatggcaaggggacgccatcagccgacgacgacggggagggcgcgaacaaatcggacggacgcaccacggactcgtctttcacacagtacagggagaagtcgcggtcgcgcgaggactccgtttctgaggatcgggacggacatggcggcgccggggtgaaaaacacgctgaaaataacgcaggcgagtgacatggggaggggaaaggaataaaccacaacactccacggttcagctggacttcggttttgacatttcgaagattctcgaagcactgcaaactgtcggggaagtcgtccgcttcgaacgccttgggaaagttggtaccttttgaatttccgacaagcaatttcacgtacaatcagtgtcttcccttttcagactagcgccgctttcactttcgacgacgcggctgaggcggccaacgcgagtgttttggtggtggacgacttggcggcaccgaatgcctattttcaactgatgacagccgaagaggcgtaccaataccaataa

SEQ ID NO: 79792 - DNA, 789 bp, Heterodera glycines
atgcaaaagtcgaattcccctgtgctctcatttgtcagaatgttttgtcgcccggttcgcccaccaccgccaacggcgccgttctgacgccgctggcgaattcgggcggcgccgtcgccgccgcccacccgccgctgcaacaacgggcggcacagcggcaaagggactgtctgagactgcgcggactgccctatgaggcgcaagtgcagcaggtggcatgccaaaactgtcttatatactgtaatacagtaataaatgagtcttttggcataaaattacaaaaaaaatcagtcggtgatttagaaaatattacataatgttttccgtgtttgcttttgctgctgaccaaattcctttggtttggaattgcaaaaagagaatatatttatttaattggccgcgttatctccgtcgaatcgcataaattattttgcggtgatttgtccctttttttgctcactttttttcgtcactttgtccatttttgtgtccatttgcataatttgctgcccattatttcacatttcactccttttttgagtttattttcccaatttttaggtcatcgaatttttgggcccccacgcgcagcgagtgatgtttcaggtaaaaggaaaagtcccacttttttttgctagaattccaaattttccagggtgtccatatgatttacaattcggcgggtcatccgagcggcgaagcgttcattcaaatggacagtgaacaggcggcggccaacgcggcgcaagaaatgcacaacaaatacatggaattgggcaaaaagagacg

SEQ ID NO: 79793 - DNA, 1407 bp, Heterodera glycines
aaaggtgggaaaaggaggggggggcaaaagagaccgacaaaagcgggagatttttcgggaatttttgattttttttttaatttttggggaatccccattggttgtttttcccaccctacgcaggtggccaattctgtcccaccacgtggcgttttgttctgctctcgcgaggcaatccgccagtccatttatccgctgtgtgctaatgcgatgattgcgcaaatggcggcggaggaaacggaccgatgcggcgaaatggggcaacaagcgcaagacgtacaggtggagagaagagaagatatgcggagagggggagaggagagagagagggagaggaagagagatgggggagagagagagggagaggaagagagaggagagagatgggagaaagagagagatatggggaggtggagaggggacgagagaggagagagatggggagaggggggagaggggcaacagagatgagagagaggtgaaaggggagagagacaaagttggggagagagggagtgtgagagagagagaaatataaaagagagcgaggggagcaaggagggaagaacggcgggagaaaagtgcttaagggaagtcaagagttggtcttgaattatgtccgtccattgctttgtcagccgcaactgttctccgcccgtcttccgctgccgccccttttccacgcgtttgtccctttctcttctcccggcggcgctgtgtcgtcatcccacgcggtgtccgccaatggtgccgaatggagcggaggagaagagacgccgacagagccaatggacagcggcggagacggcgaggtgcgcagacagttggaggagagagtgcgacggatgtacggcaaactgtgcgagaagggaggtcagcgcgccttttgagcggcggggcgagcgcagacgccttttgagtgccaaaggctatttcagagagtgccgtggccattttgtcacggttggagcgcatcgcccaaggctatgctccggcagtttggtagaaaaagcggggggcgagacgctttgaagcggctaatcgatggaccaaaaatagttccgagttgcacgtcgactcacgctgtgtggtgcgagcccgcgggttgccttggcacgtctcggacttggacgtggcgatgtttttcgccggcctcgacatcccaccgtacctcttccaccccgtattaccgtatccttctgatttcggtgcctttcccctttccagcggtggcgtcgccctctgtttggggccggaaggacggcgcagtggcgaagcgttggtgcgcttcgcgcgcgcggaccaacgcgacttggcactgcaacgccaccggcggcatttgcacgcgcggtacatcgaagtgtaccgcgcctcgggggacgaatttgtgaaacacgccgtcggtga

SEQ ID NO: 79794 - DNA, 1826 bp, Heterodera glycines
ctgaatagtgtaaatacacgaaatggcaacgagtggaattggacacccacaaatgggcaccgacaaacaccaaaagttataccaagtgagaggacaaaagggcgacagacaaagcaaatgaaaaggggcaaattggaggacggaaagtgtagcaatgctaacttaaacatatttgaaagcttgtggacatgcatgggggcggagagctgatcaaatggatgcgatatgctcggaaaggcggcgactattccatcgtggatggatacttcgaggtgggatttggacaatcgacccattgattgggccgatcgatggttttgactgatcggattgatcccttttcacgtatttgtcagacaacgatcaaacaggcgatgtacaattcggggaagggcaaattggaatcggtggcagaactggtcaaaatgcgcaacaaagaacggaatgaacggcttggcgctttttcccgcaaaaaaggaaagggaaaaagcggaccgaacattttggacgacttcaatcaaaacgccaatcaaaaccagggggatttgaagaaaggcaacgaaatgccaggggcaattcggggatggaagaatcattggtattttgattaagcattgaaactgcttgacgggggaaggggcgggaaaggtgagaaaagagaaagagggacaatcatttggaaaaattttcaaatttaaaaggtgacgcgaagtaccgagagattgtgtggaaaattgaggagagaggtggggaggaaaagcagaaagcaaaggaaaagccgaccaattagggcaaatgggcgagaatttggttggctgttgtctgatgcagggtgggcccatccacacggagttggccatccgactgctgaacgagttccccaagttggtgaacgacgtgatgctttccgaggattattacggtacacaccaaaacatattggttactgtatgtacgaaaatgggcaaaaataaagcaacaaacaatcaaaaatcgaagaataaataatggatctgattaactaacagtgagtgttagccattattacagtccatcaaaaacactgtacattaatcaccgtaattagtaatgaccatttgcaaaggtctctcgcctctgcaccaagcaattgtcaacgaggacccttctttgtgtaactatttgttgcagcatggagcggatgtgaaccaacggtaagcgatggaattacactctcggcaccaaatgctatggtcactgatttgttaggacaattattctttaattgcctttgctcagatgcttcggtgcttttttctgtcccgacgaccaaaaagttggcaatttattccattttcaatggccaaacaatttacaatttgttaagggcagtcggacggattccttggaacacgaatacgtcgaactgaatctcaagacggaatacgcggggtaaaacaaaatgggcgtgggagggggatcgggaaatcgaaaacggacaccgcccaatcagacggatgtatttcggcgagtatccgctggcgtttgccgcgtgcacaaaccaattcgactgttatcgcctcctccgtgccaaaagggcggacccaaatgcacaggacacgaacggaaacggtcacagaacgaaaagcggataatgaatagggaatggattagggattcaatccattgataacaaatagcttttgaacgagggaattgatcaaaaaagggattaaagccaatgaatgaatgaacggattaatgaatgaattgaatgaatggccattcgtttgtcctttcttttagattgtcttcatatgactgtcattcatgaaaacatggtgagg

SEQ ID NO: 79795 - DNA, 2300 bp, Heterodera glycines
atgggaatgtcttcagtgataatgtccaaagccactgtacaaacggcggcgaaagaacgtgaaaatggcgaagaaatgtgaggacaatgtaactgaaagtagaaaatgtggaagaaacatttcaaattaaacaatttttacggtgtctgtgtgcttctgaatccgatgactttattcggcaacggattttgagggattggcaacggattttgcgggattggcaacggatttcgatcggatttgacaatttgcatttgcttcccattgaattagcaatttgtttctccaatctccatttgcgtgtgttgaaatcttcgtcgacgattcagtcaaagcagcggctgaccagtgcaattccgaggccgagctgagaaggcgcaagaaaattgaacaccaaaagccaacaattgaaagagatgaagctgaaaaatttaagaatttttatgaattttattaatatttatttatttatttacatttcttttttgtgagggctcgtcgttttttgacatggtgaaaaagaaccaaagaatgatggcacaaaatgaaaaaacaattgggaaagcatcaaaacgagggaatccaaaacagaatttctgaagacattctcggcatcaaaatgaccggaaattatagggagaaatgagagaattgcataaatgagtaagagaaaaagaaaaaaggcatttttatactaaaatattagcgcagaattctttttctttatttgcaaagcaaatttattaaatcccgacttttttccttcaaaaattcgtataaaaaacaaagaaaatgtcaatgaatatcacattttttctacaaaaatattgtgcttacaattcagacgcttgccttccaaatgttgaagctttgcttttgccgccccccccccccccctcctcccaaacttaagcgcgtgccatccaaatttgaaaactttgcttttacccctccccaccccaattcagacgcgtgccatccaaatttgaaccttttcacaaattgttttttgtctgttggctttagccctgaatttagctatacaaaaacttggctaaactccaagctttcaattgatacccaaaaatgtgggcattgaccaaatgagaaaaaagttttggcctaagaaattaaggatgatcactgattggacgcttaaacacgggaatagagtcggaatgctaatttcacataatttttcaatttttgttaagcaaatatacataaaccgtcgaaaactgtcttaataatttgctatggaaattctgccccattttaaaattgtaagaaaaattggacaaaatgccgaaattgaaatgcaaattgttaatctgcatgggcaaccgatgccaattccgcaaattcaattgcccataaattttgacggatttcagcgaattgacgtatggtaagttgggcgattatgtaaaaaacttagacaacatttccccatcccattttaagctttatcaatctcaatgccatcgcttttcttgacagtttgcgtccacttttcgccgcctgtccaattaatttgaccatcgactctaacaatcccgcaattttgaagtctgttgtggacaacatttggccaatgctcaacgttggtgcgatgctgttatcagagagaattttgtgtggtttgcgcaaatcaaattcctcaattctcaattcctgtccaacacttcgcgttctgtgcctttatgccactgacgatttcttcaccgaatttcctgccgacgacagtgcctcggcgtcggatgaaaaagcattggcaaaatggcttttcacgccgcatccaaatgatgtgccaaaggtgttgaaatgctctattggtcgggaaagattttggaagctgaaaattgttcagttcaaaacggtgcgtgccaatcaatgattaattttatttttaaattttcatgttttaggcttttgccaatgcttcatctcatgccaatttcatcgttgtcatttgcataccgttgtgcttcgttgagccatttgaattgatcaacagaattggggaagaattgacgctgaaaataactgcggatggcgaaaacgttttgttgatccgttgtccgattgagcgtgacgcgagcgaatggacaaaatgggaagaggaggcgattggctggcgaatttcgaatcagaaaaaccgaattgacgtgggtatttatgatccagccgatgtcggcgatgggtaagagaatgattttttttttcatcaaaagtccaatttatgtattgctttttaggcttctcaaacccgctcccggcccgagtgttcagcaacagaa

SEQ ID NO: 79796 - DNA, 628 bp, Heterodera glycines
atgaaggattggtctgatcatgttggtccaattattgtttgtaaaatttttgttcagacttttgtaccggataaaatgagattattcatatttggtacgggataactttttaaaatttatctaacaataagattgatccatttcatctttttgcgcattaaaaacgcacacataatgaggataatttatgcatttgaatcatttgtctattcttaatccccgaataactgtcaaaatccacgtttttaaaggttcgggattctttataatataaattgggcaagaagtcagaaatttgtgctgcaaattacatagttgccaaattgcaaaaaaacataaacattttcctattttttaattaggaatttacatatttattaatttgtttgtttgtgcataaatcaggggccgtaatttgaccatgatggttggtgggttgcgaaggcgcagcaaaagaacatggttgatggttacttaaccatgttaccatggttaaacttttctaatcatcaaatccactcgaaaacctaggttaattataacactagaaagtgaattttcatagctgctcttttaatcatggacggactgacctccactgagccattgaccctcacaagtttaaaaa

SEQ ID NO: 79797 - DNA, 303 bp, Heterodera glycines
ggagagctcagcagaagtgaacggcccttctgtgcccggccttccgactgcttttctgcccaatcgccgcctccgtccgcaatgtttctgactccgttgggcaatgtgaagaacgaattggtcgtctgtcccaccgatttcggcggagatttcgtctttggaatggaactcgaaccatccaacagcgacttttgcgcgtcaactgccgcctttgccccttcgatctcaatgaatggccctttcccgccgatgcaaacacaaatgattagaatgccaatgccatctttatcagcttcaatcacg

SEQ ID NO: 79798 - DNA, 481 bp, Heterodera glycines
attgaatgattggtagccaattctaagcccggcaccctttgagaagggaccaaccaactcggccgcacttactccccgttacttcccttgtccatggtggaacggcaaaagattgtgcaactgtttcacgaagggtggaagatttgtgatatttccaagtaaatgctcattcgaatcgcatccgatgcatttgcgtttttggcagatatttgtgtgtcacgcacagttgcgtctccaaaattctccagcggttggtcccatttcgcaaacattcagcaaaaaaatgcacagattccgcgcgaccggttcagtccgcccgaaggatgccaaagaaggccgccaggagtcgcctttggtcgcggccattagggactaccggcagagacttggcattatgcggcagtcggagattcgggagcagctgatcagagacggactttgccgtcgcgaaaacgcgccctcccgctcgtccataaatcag

SEQ ID NO: 79799 - DNA, 2147 bp, Heterodera glycines
atgttaacaccagccacagcagtcggcagatgtttggagctcaagaatgtgagtttttacatggagttgctaattaatattgaaaaaataattaaatgttttaattattaaatcctttttagaagggacttcaagaaaagttgaagcagcaggaaacgaatgcactgctggagaagatcgaagcggagaatgggaaaatgaaaaatgaaattgagaaaatgcaggcaaaaatggacgagaaggagaaacaattggagaagaaggaggaacaattggagaagaaggagaagcagtacatggacaagttggaggaattacagaaaaacgtaatttaaaaaaagaattgaaacttaggcattcgaacccgaaatttcggactccctaaacggagaaccgagttgaagcatttaaaagtgaagcgaattcaagcgatttgaaattttatgcatttaaatagctaaatttaaattcctttttaaggtgcttcaagtgaaatgcgattccgaagaggaaaataatcgaaaactgaaaaatgaacacaaagaaatgaaggaaaagcaggacaaattggaggagaaattggggaaaaaattggacacggtgagagtgaaatattcttattttctctttaatttatttacggcaaaaattatttttgaaaattcatgaaaaatatttggccctaattttagagtttagtcaacatatttcatttggcaaaaatacctttaattccagcagaaggcattccaagcagagcacgagaaaaagctcatggagcaaattgagacattacaggcgaagattagcaaaatggaaatggaaaagcaaaagcaaaagggtaagggaaaattggataaggattactgtacataccgtaacattattattataattattattactgattttaaatatattcaattaattaatgaattttttagtttataacgaccaaatggaacagttgcaaaatgaacagaagaaaaagaccaatgcattggaaaagaatcagcggaaaatggtgaatgaataatgggaagaaaaaagaaaaattattagtgaatgatttttattatatttgaaatgcgaatttaaaatataaattatgactaattttaattttaaggcgcttcgaaacttccgccaaaatcgttgggatgccaacgcttgtcactataacatcaaaatcatcactaacaatcagttggcaatttattgttatgagggaacagattgtaatttttttttaaattttaatttataaatatgaatttttttaaaatttaaatttattatcattagtttaatttaggcagagattgcactgtcttcgctacccatccaattttgttgtgcaagaattcttctgagattttttactttgaaattccgtaacagatttatatattaactgtatgcaaaatttcaaaaagctcgttaattaacaaacttaaaaaaaacctcaactttttataaaacttgaaaattaaattttataaaaagttggggatttttttataaatttgtacgtgaaagaaacctttttaaaattgttaatttatttatttgctattctttttaaatttattttagtaacccttacgggtggcttaccttcggatttgccatcaaacagcaggataaattggaaggagcaattgctaatgacttgggcacttatgcatatttaagcggaggcgattttaccgttaatggcgaatggaaaattcaaaaagaggactattcctttggtagtgaagatactgtcggttgtggcattaatttggccacccggcagattttcttcaccaaaaatggatggcttttgggtttgtaaataataataaataaaaattattacacaaaaatgccaatttttgttgttatttttaatccaaagacacaaaaaatctgcaaatccctttgacctattccaaaaccacaagtaattccttaattttctgatcacagcttcctacgatttggttgatcattctccatttgttgatggtcttgctgaattgttcccattcctttctttgttgtgcagtggtgaagaaattgaggcgaactttgggccaaagttccattacaatttggcaaaaccgaaacaatggaagagcgtgatgctttcatctaattaa

SEQ ID NO: 79800 - DNA, 556 bp, Heterodera glycines
atgaatcggtctttcatttgtgcagaccgaggtgcgcaatgggaaggaactcggcttcaccgttttccacgactgcgctttgccgccggacgatttcgtgtcgaactgtcgcatcactttcgatcacctcaaactgatgggtgtcaacgacatttgggccgacttagagccccatggccaactccatctccaaatcgaactgcagggcaaaacggccgaggaagaattcacgggcaaagagccgcgggtgttccaggaacggtcgggcgcttttatggaccgccagaggaggggggccatgcgacggaaaatccacgaagttttggggtagggagaaaaacggaggaggatttgatgaatttgggttggtattcagtcacaagttcatggcactttttctgccacaaccgaccttttgtgcccactgcaaagacttcatttggggcatcgtaggcaagcagggataccagtgccaaatctgtacggttgtcgtgcacaaacggtgccatttgggcgtcgtgtggaaaagtcccggcagcaaaacggacgcttttga

SEQ ID NO: 79801 - DNA, 846 bp, Heterodera glycines
atgaaccgtctttacaaactcccccgcggcttcggctccttcgcaaaattggaattgctcgacttaacgtacaacaatttacgcgagcaaagtcttcctggaaattttttcttcatgccaacgcttcgggcactttatttgggttggactggcgtaatctctaatgaacgataaaaaaatccgatttcaggggacaatgactttgagtcgttcccggaggatattggccatttggtaaaaagtttcaactgatcatccctctgaaaaatttgtcccttccttcttcagaccaatctccaagtgttggtactgcgtgaaaatgatctcattgatttgccacgacaaatgggcacattgcaaaagctgaaagagctgcatattcaggcaaaaatgggggtggagtagccgagatcattttatccgaactgggcagatttttatagggaaatcggcttcaagtgattccgcccgaactgggccaacttgatctgattgacccgaacgacgaaaatgccaaaacacttcgagtggaaaacaacccgtcagtatttgcgggcattggaacattaaattattttttgatttgcccaattatcttttccaatttaaggtggatcgtgccattgaaagatgcgctcactcgcggtgcccaaggcggcgattggcaaagcgggtgaacgaataatggcacagggacagaaaatacaaccgaaaaattcaaaatttagcgttgagtctttttggaattacattcgcagtgacaattaccgtcggttgtacgaaagtcatccggtgggcgtggggtcgacgccaccgaagcgaaacaaagagaagaaagtcagccgg

SEQ ID NO: 79802 - DNA, 340 bp, Heterodera glycines
gcataatatatttgccgaataatcaaaacacaaaaagtacgtatgaactcaaaacaaaacaacaaaaggctgatgaaagatgaagtacacgtcaaaaccctgttttggaacaaaaacattgagagatctgagaatgtttggaccgtaagcgtatttaacaacaaaatgataaagatcaattaattatgtttcattcatccgccagcaaactgcgcaccaaatcattgatgaactgagtgcaaatgtgaagcgcaacgcgaaatgcaacgaggcgttcctcaggcgacaatttcattttgtcaccattcgccactccgatgacatcagaaagagcattttt

SEQ ID NO: 79803 - DNA, 1240 bp, Heterodera glycines
atgagcacggagcagctgatcgaagtgatggaggagttgcgaccctgttacaaatgggctgattacaatttgttcaaccacaattgcatggacgtaagcggaagaaaacgctaattaattaattaatggggatacatttaattaaacggttttaagtttgccatggattttatccgacgcatttcggcggtgaatttgccatccggcaaatttttttcttggacccaagaaatccgacagccgctcattttattgccgatcagaaaaatatgcgaaactgagacattcaaacggacagtcaaatcactgaagagaaaagaggagaaagagcagggaaaaggtggagggacagagaaagaaaggaaaagggagcgaaaaaggacaaagaaagcaaagagaaagtcggagaagcagaggaaggagagggacaacgccggggagggagggcagcagacgaaagagcggacggaaagcgcaggcgaaagccccgcggaaaggtgggaaatggggtaattgtgggaatcgaacttaaacgaggtcgaatccatccatatccaaagttcgtttctgttcgaaccctttcttccatttgtttcccccaccaattttgtgccaaattttgttcatttgtcactttttagtgccattgaaaatgcccaaaacatttcgttaaggaagaaaagttctgccgcagaacaacagcaaatacacattgagcaccgcggtgccctgggcttgtatattacaactatcagaatattgccaatgacggaagagatgggacagaaggacgaataacgaaggacgaatgaccaaatgcgaaggacggacaaacgaccaaccccccccccggccgggaaaatgccatttaccattcattggtggcacacttttggccttcggaatggcatctctccccaattggtgctgttttatttgtctcatattttgttccttcaaattattcattcatttcaattaggctcagttttctttttattttccccattttaattaaatttctttcaaatatgtatttctgtgattgccttttttcttttcctttcatttcgcttttcaaattttgccaaattttaatgtttgatttgttgtgcattttgtgctttttctctccgtttttttctcattttgatgggaagtgttaattattagtaataattaacttcttaattaatttgaaagtttggaatgaaaaaaattccgcacataaaacgaacaa

SEQ ID NO: 79804 - DNA, 1011 bp, Heterodera glycines
atggttggacagaaaaaacaattggataatcaaacaaattctggcagagttatttctactttttctgttgctgaacatgggaggcacaataacgaatgtggagaagcaatttgttattctgaccaaacgacaacaaaacaaaagtcaagcagtctaatgcaacagcattattttgagaccaatggttccaaggaaatcacaaccaaacaacgactacagaggttgaggagaaaaagcacatcttcacgcaagaacatgtcactgtcgcaccgatacactgcccccttttcatcgagcaaaggatgtgccgggtttattgttccacccgtttttccaaagacgtgttccttgtacgatgaaagtttcagcgggggagtgtttgttgaccatcaagaagacagacttttggttgaggcagttgatcggattcgaaaacggaatttctcatgcaaggagaaagaacacgacggatgcttgcagaaacaacagacatctgctgacgcttcccaaataaacggcgattttattaatgaaaattcggacatcgacagtggaaattcttcgatcacagaaggtcgccaatcgcctatatgttctgaatttactcagaattttggtcgaacagaggcgactcaatttaaaaaggctgcagaaaattcggatgttgccagtgacgccaattggaaagacaccaatcaacgggacggcttcctaagaaaaaactgccgattattgcattttgtcaagaagaaaggcagtgaatcgttggacaacgaacatatgcaaaatgacgaccgagagaacgacaaattgccagcacaaaggcagtgggaaactgacacaacaaaacgaaagtcatggagagccagactcctccggacattgtcagtggggagcccatccgtcggaagagtcatgaaagacaaagaaaagcaaagaggtaattaattaggttcatttctcaatcaacgctcctcaatgaaacgctacgcaatgtgtgcatcaatagaa

SEQ ID NO: 79805 - DNA, 1051 bp, Heterodera glycines
  unsure (1)..(1051): unsure at all n locations
tttgatagtcgtaaatttaactaaaatagatattccatctcccagtgggngaaaagccgactagncacttcgcgaatttctaccgggaacgggaggnggngacggnccgcgaacncngncgncgncnnncgcnggacganncanngcaaccctcggaaatgcctctgcccgaaggngcgctgcactcgcaactgctggacgagtttatgatcagacaggtggccacggaaacgaaattagaaataaaacaatgcatttttactttatatccagataatcgatattctgccgccacgagcagagggttatccttgggttcagatttacaattccgaaaagcacggcttctctttgactacgctttacaggtatagtcaaggacactctcatcagaaatggatatgaggtgacaagtggcggaggggggaattcgtcaaccactttcaaattgctcagggggagagaatcttttcactcccagtgattaattgacaatttgtccatattactattgtattgcttccatataaaaaaatgcgttcaggaggatggcggaatgggatgaggaaatgtcccccgtccttctggtggttagggacgtgaacggacatgtttttggggcggtgtccagcggcgctttgaagccgtgtgaccattactacggcaccggcgactcgtcccttttgtttcggttcaccggcgaattccctcacacgcggtgaggctttctttgcggattcgcttaagactgctcttctctttctcaacagggagttgagaacattcacttggaccggggaaaaccaattcttcgtgaatgccacccgcgaatcgctttcatttggggcgggtggtgggcacttcggcctttggttggacgctgacctgaaccacggccgatcacaaaagtatgtcacaacgaacggctagtgaaattgatctttggaattattcctttctcagatgtgctacctttgacaatgaaccattggctggtggtcaggaggaagacttcgttgtgcagttcgttgaagtgttcggcttttgtatg

SEQ ID NO: 79806 - DNA, 429 bp, Heterodera glycines
atgggtaccatccctatagccgttggtatagggatgggtaccatccctatagccgttggcatacggatgggtaccatcactatagccgttggcatacggatgggtaccatccctatagccgttggcatacggatgggtaccatccctatagccgttggcatacggataggtaccatccctatagccgttagcatagggatgggtaccatcactatagccgttggcatagggatgggtaccatcactggcgtgttattcgcctggtactgaagtgtactttttgagcacacttcagttttgcggatttttgggctatttttattttattaaatatcttttcagaactgagtagtgaatttttttctgaaaattcgaaaatttccagaatttctggaataactttttttatattcttcatagaaataccaa

SEQ ID NO: 79807 - DNA, 333 bp, Heterodera glycines
attatgagccacccaatttggcaaatcggtcttttaaaacgcattaaagaagattcagtcgattgcttggagtgcaagcaaaaaaacattattaatttttcatcttcatcattttttggtttaaaaatatatttgaatacttttttatactttgaaagacttttttattaatacagaattttttgaaatttcctaaaatccgcaatcctgcgcaggatcctgcagattttaaatgcaggattgcaggattaatcctgccggatcctgtcctgtaaaaaattttgaattccaatcctgcaacaggatccgcaaatttgaaatttccggtctcta

SEQ ID NO: 79808 - DNA, 2153 bp, Heterodera glycines
  unsure (1)..(2153): unsure at all n locations
tgctctttacgcttcttccaaatgcaaattccctttggacagtccaacaaatatntattgtaaatacaatgtcgacacattcattcattctcctctttcggcccttctctttccaaatattttgcttatgctaaacctttaaaaaataataaataaaaattaattaaaataattgctcagcttttcctttcttccgcttcttctctctttgcctttcgtttgttcagcatttgcttttccttttcttcgcttttccttttcttcgcttttccttttcttcgcttttccttttatccgcttttcccttgccattgttttgctttttcactttgccaatttgaacaattcttcgccctccccccccccccgacaaaacaaatcacttttttgtaaaaatgatttcccactaatttacgcgtggaaacgaacgatcgatgggcgatttcttcgagttgctcattttcaatatttcttattaaatgttcagcttcgactgctggacaaaataaccttttattaccgtatcactttctctctctctctttattttgtctcttcgatcggattaatgccgcggatttgtcaatattaatcacgattcaatcgattattatctgctacctactaaatggtttttttaactttttccgagtattttcttttttacttggcttttcctccgatcgttttatgcttctcgatctcgatttaatttgtaccccctccctcccttttctcctcatatttatttctaaacttctcctttactctccccctgtaaagccattgcattgggcgcactatttgatattattacatattccctcattttttatatcttttttgtccatcattctttcgtctgtctcaaccaaagtccattttcaccatcgtgcgaattggattcaatttattgaatgaatggatggatgggcattcccccccccccgtggacagaaatggtgagatgagcgaggagggggggggagggtgttgcgtaaaagcgtaaaatctgcgggataaatttcggtcgagtatcgatcccctccatccattgaaagttcgcatcagccgcctttcccaaaaaaggccaaaaaagcatgttttccaattggaaaatggcaaatgatgcgaaaggacagcggagtttctgccgaagagagtttattctaatggccttcaatgctttcttcctttcttctgtgtctccttggtgaggagagattgaaagagccgtgccaacaaaagttgggggcgggggggggacgcggaatttgtctccccggcacggcacagccgcacttaaagtgccgaccgacggatgagctttgtgatcgcaattggcattttttttttattcttttctcattttgttaacaattttgtttgaccaatttttagtcgctttgtctttcgtttgttaatcttttttaattaattttatttaatttttagtccttcccctccgaatattcctcgccttcacccctcctccccgtgctttcctctgctgctaatttcagtacggcaacaattccgcgccatcaccaaactccaattgaggcaccaacttcagcacagcttaaggtcctaaaaataaaggccataatttaataaatgaattaacaataattaggccgccggaccgaagccgcgactttgcgcacttatcaaaaaaaggtgaaattggagtgaatctgacaatgaaagagtttcgaattcatttgtcacggccaatgtttgcttttgaagcaacagtttaatttgctctccttcagtcccattgacgaattcggcttcaatttgcacgccgaaaggggcaaaggtcacttcgtcggtgccgttgacaaaggcggcatcgccgatgagttcgtccaattgactgtttccgttctttgcgttttattcgatttgttcagtgccggcctcgaaacggggcaaagaattgtcggcgttaacggccgtttggtgtccgcgcaaacgccacataaggtgaactcggaaaagcaacaaaaacccaacgatcggacaatcccaaaacaggaaatagtgaaattgatcaaaagcgacccattgaaaaccgttttattggtggcctccgaagaagcggacagattttatgccgaaaaaggacttggtgaagcgactgacaa

SEQ ID NO: 79809 - DNA, 891 bp, Heterodera glycines
atggaatgccaacagcgaacttttggaagagttcaaaagggtcgcattcgtaaaaggaggagaaagtgagtgaaagcgatggagcaattgaattgccttttttagcggcgttccttcggaattgtgcccaattcggagtcgaagctgcgaatcgcccggggcgacaacggccgacttggcacttctccgttgtgccgttctcttctcggcgtttgcccttctcctccatttagtcctttttcttttttaaaattggttttatccttcactcgccgtcttttgacccaattaattcattctaaaaacaatgcgaaaattcggtttgatcaaattgagaaaacaaattagcccaaagtatgtaaaattttaaaaaattgattatgcttcaaaaaaagttatccatgaagtttttcaaatgaattccaaaaaccaacccttgccccccccctccggcggttaggggtgctttctctctctgtttctctctctctctctctgtgttgtctctctgtctatcgctctctcccatccgctcgctctttattgtgatcgcttctcgcctcaaccagctctacttcacccaattggacatactgcgggctctcccaccgattttttaattttcaaaatacagtattatctacaacgagtatcgtatctttttatatgaaattattatttttgatgaaatcacatgcctattcattcgttgttaattttgtcctcggaaatgtctttttgtcctttaccaattgagcatttctgtgattttattaattttgcagtaaggttgacactttgacagtttaataaacaaattttaatttatggtcaaaataattgccatacttttgaatttattttttatacataatattttgcaaaaataaa

SEQ ID NO: 79810 - DNA, 735 bp, Heterodera glycines
atgcaaggcggcgaagatgacctctatttgtgctgtccgactggacagggattcaccaagctgaccaaaaactgccactttgtgctgtggcgagagtgagtcggctttgccaaaatcagacaaattaatgtgccaaaatggaagcatccataaaacgatcgattggaatggcattttcagagcaacgccaaaataaatttttaaatgcttggatgcttattctggactaaaaaatgattcattcctttgtccgtcattttggcacatttaaaagtgtcgttggcatttgaatttaattgctaattaaaatttcccacttttaattgtcttcccccccccttcaggaacaggtgagtgccgttcgtgctgtgtcgtcccattgttttgtccgttttcttccgttcttccattttccacccttttcagtcgtaattttgccttggcaaagatcgaccaaaaaactgtggccaaaatgttgcttttcgctgaggaagaatccgccgtcactgttagcaaatgcattggtaaaacggtcgaacggacggagcgatggccgaaggcgggcagcaaacagtttgtgcacgcggtccgtccgtttacttttgccttttcatttttgaaatcgttttcggcactttttcagttgcgcggcatttgtgtggaatatttcggctgcaaaattggcatttaattttgttattttaatttcttatttttccaaatcgaattaataaa

SEQ ID NO: 79811 - DNA, 1104 bp, Heterodera glycines
atgtcaaaaaatgccgcccaaacattcgtcgagccgcggacaggaaattattggcattttttggcgacagttgcaaaagagggaagtctgattgaacatcagaagagttttgggcttatgaaaagaaacggaacttcagagaaaaagatatggttgaaatgtgagaagaagcagtgcccttataggggcttatatttgaaagagaagatggcactttttgatcgatacgaacacattcataacccattggaggacgagctgaaattggcacggcgaaaaacaggcgaaattggcacaatgaagctgcatgggccaaaattggcacgacgaaaaacatgcggaattggcaattgtggaaagttggcaccaccaaaaaaggacttggcggagacgaaaggaatacgaaaaataggcacaaaatcggagggaccgaaattggcatcacgaaaaacggacataaatttgaggaacagagaaaaggaggaaaagccgaaaattgctgaaagcaaatgcaaaggaggcgaagatgacctctattttgtgttgtccgacttggaacaggaattcaccaagctggccaaaaactgccaacttgtgctgtggcgagagtgagtcggcttttgccaaaatcagacaaattaatgtgccaaaatggaagcatccataaaacgatcgattggaatgacattttcagagcaacgccaaaataaatttttaaatgcttggatgcttattctggactaaaaaatgattcattcctttgtccgtcattttgacacatttaaaagtgtcgttggcatttggcatttaattgctaattaaaatttcccacttttaattgtcttccccccccccccttcagcaacaggtgagtgccgttcgtgccgtgtcgtcccattgttttgtccgttttcttccgttcttccattttccacccttttcagtcgtaattttgccttggcaaagatcgaccaaaaaactgtggccaaaatgttgcttttcgctgaggaagaatccgccgtcactgttagcaaatgcattggtaaaacggtcgaacggacggagcgatggccgaaggcgggcagcaaacagtttgtgcacgcg

SEQ ID NO: 79812 - DNA, 321 bp, Heterodera glycines
atgtcgtccattgaaatggaagtgccaaaagtgaacaaccgcaaaaagcggcgaatcacgtggacctttttgatgcgcgtggacaacggagagaaattcattgaattttgtcggcaaaatgggctgaatgggcaatcgcttcacaatgccgtcggaggaaagtgccgaaggatgtgccgaaggtattggtttgaaagtgccgaaaagtgcccatacaaaatcaaattggacatcgccacgggggaagtgtacgagcggaaccagcacaaccacacaacgccggaggggaatggcaatggaaaaggtgcacaacagccgtaa

SEQ ID NO: 79813 - DNA, 2403 bp, Heterodera glycines
tccatcaaagaaagtgccgaattgagcgcggaggacaaaaaagcgctgaccaatggttatgcgccactcaaacaactctcgcagacactaatctcgacaattatggcacagaaaggtaagggaaaaaagaactcgttgttttcatccaattctttgtcttttgttagaacttccttctgtcgaccaacattttggaaatgctttcatggaattgaaagaacgcttctttggtccgtgtaaaaagtgaataaaattacactgattttgaataccttcagttgcttatgcctaccatttccgttatgttgagcaaataagtgtcatcgtggaaaatgtattttcccttctttttttgtctcatctctctctctcttaggaggaggatgaatcactacaaaatgcccttcaaaagtgtttgttggccatgcgtcaaaagggctccagcgttttcgacgtgcctaccgcagtgtcacgtccaatccaacggtgtctgaagtaccccctttacgttggcgagttgctgaaagtcgtgccgcaccgccagtcaccgttcctcagtttgccttttagaatacgcccatccatcacccggaccatcccaaattgatggagtcgctccgacaatttgggactttggcgtctcgtatgaatgaatgcaaacggcgaaaggaactcagttaacaagcgctttccgtcgaatttgcttcgtgtaagccaatcttttcagttcgcaaatatcgcagccaagaacagctgtcgttggccgaccgtctcttgcgaattaacatgcactcgctggtgaagaagagcaaccggctgaaatatcgcatcaaccgttccatcggactgaacacggcacggtacacggagttcgactacctcgtgcaactgttggaggaagcggagcgaagactgtgcaaattcctttactgtgcccaactgtacaaaaaacacatcgaacagtccgttaaacggcacgaagacacttataaaggcaaacgagaacatataaatgaaaaaaacagttaaatgtaaacgaatgccatcattataaaatatgggggggggggtgaaacggcgagattagcaggaaagagctgctcttgggtcatcgacctccgatcacaaggttgaaaaagcattcgtcttacttttgcagggatttgtcatgcgcaagacgaaaatgttgtgaaggcttttgctgttatgtttcggcatttggatgagctttgtcgacgccatttgcagacatttgaccaagaagtgatcacagagggaaagaaacttgtgcgcagtgacctcgccaaattggtgcacaaacgtttcgacaaattagcagattacgaaacagcaaaagcgacacacaaaaatgtcttcaaaaagcgtaaatcgaaaattcgtctttttaattcagtccgatgaggtggaaatgcggcgtgccgaattcgaagcgcttaacaatcaaatcaaagcgcagctgccacgtgtcatcggctcaattaacacggtcaggcggaaaggccaacttgcgattaaatacgaatttagcgtgttcgtgagctaatccaacgagtcaataagcttgacgaggcttttttgtgccggatggacgaatggtttgccagagaacgaccggaggtaaattcgccttttcgaaaaatataagccctattttcaacactgaaattttgtgcttttttccatttcagaaggtgcgtgactgtttcagcgccgcccttcctttccgcgctcatctgtccgcgtcccatcgccacacattggctgagctgaacaaaattgcagcgcatctttcgtccgggtcgaatccattgcaaaaaagtcaatcattgtgccaaattgggaaaagattgagtttaattttcgcagaaaagtcgcttcatctttctttccgaggaacgaaaagcactcatttctcaaatgaaagggaagcgcaaaataaacagccaaaaacgcataaacgacgaccccaaacgacgaaagagcgggacgcactggtgaaaattggacgaataataatgcataaacgattttgaaaccagacgaagatttgccatgctcaaaagttgacgcagcaattgcgacgtgtccaaagcgactgggaaagcgcgtcgatggttctgagaaggggcgacgcagtggtggtgaaggcactccggcaggacggtttcaggtgaaggacgacgacgactttttcaccaaaatgggtcttcagtctctgtgacaacgccgtttcctccggactcgtccccgtcgctcttttgggtccatttgacgagagtttcaccgctccgttctctcccgagtctccggcctccggaaatgagcctcacgcgattgatttggctgttgaatccgccggccataaacaaaataattccgatg

SEQ ID NO: 79814 - DNA, 1156 bp, Heterodera glycines
atgataactagagatcgacattttgaaaaaagcctggacctggattttttgaaactcattttaaaatcaaaaaaaggtttgaaaaaatcaattaattgcttgggaacatctaaaaatatctaatttacaataataatgagttttgaatctatttaatctgttttaaaaacttgaaaaaacatcggtcacttgaaaaaataaattctaaaattttgtccaggaaaatccaggttttttcgtgttttgcctcgacctggatttttttcacatttgacctggaccttgatttcctggacaaaaatccaggaaaatccaggtccaggaaaaatccaggttgccgaaaaatggcctggacctggacctggattttttgaaactcactttaaaaatcaaaaaaaggtttgaaaaaatcaattaattgcttataaacctctaaaaatatctaattaataataataatgtgtttttaaatttatttaatctgtttttaaaacttgaaaaaacatcggccacttgaaaaaataaattctaaaattttgtccaggaaaatccaggttttttcgtgttttgcctggacctggacatggatttttttcacatttgacctggaccttgatttcctggacaaaaatccaggaaaatccaggtccaggaaaaatccaggttgccgaaaaatggcctggacctggacctggattttttgaaactcactttaaaaatcaaaaaaaggtttgaaaaaatcaattaattgcttataaacctctaaaaatatctaattaataataataatgtgtttttaaatttatttaatctgtttttaaaacttgaaaaaacatcggccacttgaaaaaataaattctaaaattttgtccaggaaaatccaggttttttcgtgttttgcctggacctggacatggatttttttcacatttgacctggaccttgatttcctggacaaaaatccaggaaaatccaggtccaggaaaaatccaggttgccgaaaaatggcctggacctggacctggatccaggaaaaatccaggcatggatccaggtccaggtcgatctctaattaaaataattttctaaatattaaaacaaccgcaagtgaaaatttttgacatcgtataattcgaaaacaactccaaataataaa

SEQ ID NO: 79815 - DNA, 141 bp, Heterodera glycines
gcaaagcgattgctggaagaaaaggagcacgagctacaaacattgaacactgaattggcatcagagagagctgtaaaaaacatttttcaatcaaaatacagactttgttggacacggaaaattttccgtgactcgaaatag

SEQ ID NO: 79816 - DNA, 400 bp, Heterodera glycines
atgccaattcagtgttcaatgtttgtagctcgtgctccttttcttccagcaatcgctttgcctgcaaaacaaattaaattaattttttttaagtcaattgtatgtaagatgtctttttttaaatcggaagattttttaattttgacgccatctttagcgtcatattcttaaaaactttttcttaagaaaatttcaaaagaaatgattcggggaaaaagctgtccgcatgacatcaccacctcattcagctcgtaaatttgatcttccaggcgccgaattcgcccttgtgctacttccaactcacgctgcgcactttctatctcttccttcatggatattcttaatttttttagattttggtaaaaaaaatttaaattttttcgtggtgcgacaaaataaa

SEQ ID NO: 79817 - DNA, 619 bp, Heterodera glycines
ggcaatggttgtttgacggtctataataatagagtctgttattgtcgtaacatttctgtccggttagtctcaaataaaatgttggatgtctaattctgttttttggttaattatcaaaaacataataatcaacttaagcttcagtctcatttcttttttgccatcttacttatgtttgaatgttttatatactcgagcaattattagctctaaaattatttgatatgagtgcctaagcagtttgttctttccatttttggccctcttgttaacacatgagatttgactgccttagtgccgtgtaatactgcgggggaggggtgaatacggcacacaaagcaaacacttgatgaaagagggagaagtggggggggcatcgcccgaaggattgcttatgccgtgcccagcccaatgcccccggcaattcccgtcgcttaattgcatttccattcccttctcatgtctctctctctctctctgtccttttcctccgtcaattcaatggcaaattctgatcaaacacaaataaactttccttaattgggcgtgtcttttcattgctttgtccttttgcaatttcggtctctcattagttaattccattgatttgcctttccct

SEQ ID NO: 79818 - DNA, 75 bp, Heterodera glycines
atgccagaggcaattccggaaggcgattacgagagaggaaagaagattttcaagcaacggtgcttgcaatgccat

SEQ ID NO: 79819 - DNA, 857 bp, Heterodera glycines
atgaatcgacggtaagaaaggaatttaaaaaattgcaaattttcatttttccctatttcccatgtttcagttggatttgtgcggatgtttggatggacattctcccatcttttaatcgtccccaactcggactcaaaatggcattgctttccgaccgtttcgatgttttggtggacaaacatttcgatggaaaaagcgaattgccaatttggagttacatcataattttcaaggaccaagaatttggaccaaaaccaatgctatttgttgtttcgaaatatgtaatctcattgccggatcatccgttgccaaacaaaatccgctttaaggaccttcggattgagtaatttaaaaaattatacagaaaccaattaatgtggttggtcattttttcccttttcaggtacattgaccattctgtgctcgcatttatccgttccaacaaacaaatttgggacagaatgggcaccaaatttgagttgaaagtgtattcatacgaaacggatcaaatttgggatgttttggcccgagaaatttggccaatttttgcgccaaacattcgccattttggctttcactgtggcgatcatttggacaatttgcttcgtttggtttcaccgacacttctcactgattgcgaccaattgaattcaatcgattccggttatctgtcttccagtgcgatcgctgttgatgggccaaatgcaatttctgcttggcaggcgttggccaaatggttacacacgccgacaaaaaatggacaaccgaaggaattgcgttgcgatgatttttcaaagtccatcaactatttcaaggaggtgaccgaccataatttcattaaactactaattaattga

SEQ ID NO: 79820 - DNA, 992 bp, Heterodera glycines
atgaaaaccgaaccaaaatttggtattaaaggaattgtagtctagaaaacgaaaaaaagttagttgtttgataaaatttcaatttattttcaatgggtcaagcccagtgtcagacaaaattgctcataacgccaaatatttaaattggcgtaaatttttgcgtgtttacaccggaacccgtcagttcggccccaacacgtttcgcccccagcgggatttcgcttataacttttttctttgtcatccaaatccaacattgttggtatcattcgaaagcccttcagatgctctattagcctgcaaatttccaaaaaaattcgtcaattttgaacaaatttatggccaaaaaagttggaaaatctggttttttgagttcttcaggccataatttttttgaacctttacaaaatttttcaagattttgcaggctagtagaggacacttaggggtctcgaatgataccaacaatgttggaccgaacaaatttggtatttaaaaaaagtttttggaagggagaatctttttctaagcaattctatatataattttcgtaatgtatgtcacaagaggagagagagagaaagagaagaggagagagagagagagagaaaagaggagagagagagagagaaagaggagagggagaaagaaagagaggaggagagagagagaaaggaggagggagtgaagaggagagagatagaaagaggagagagagagagaaagaaaagaggagggagagaagaggagagagatagaaaagagcgtggtgagtcgaagtgcaaaaagtccgagtgtggcgaagtgcaaaaagtccgagtgtggcgaagtgcaaaaagtccgagtgtggcgaagtgcaaaaagtccgagtgtgggcgaagtgcaaaaagtccgaatgagtgatgatcagaagaggcgggtcatttcagtaccgaagatttattctaatgattaattattatttaaatttataattgaatgataagctaata

SEQ ID NO: 79821 - DNA, 447 bp, Heterodera glycines
atgccaagattgtttaatttggatgcttctagaaaaagttatggcgctgatcaaaaattgatcatttttatggtgatcaaatattcaaccaagtatatctttttatgtaaaagccgtagccccattattcaaaagtcaaatcagtagagaattttgtgctcttttcagtgggcttgcccattttttctagaaaagatttcccaaccccctagggatttcgaaaatttccccgattttcagtgtattttgggtgtcccggtcactaggaaggaatgatctgatcaagttggtgtaagagacttttttgatcagcaccaaaagttgtgcgagcatgaattatttcaagtttttaaatgaactataagatagtttttcaggtttgagtcaagacttttttggggcactgtatttctctcgcaaaaatgtaatttgtttgggaaatattaa

SEQ ID NO: 79822 - DNA, 225 bp, Heterodera glycines
ttttaaaatttcgaaaattttcaaaatttttcgagctaggcctaaaaaacggtttttgggtttttgaattttaagaatttttaacgaattttcccgggaaaacgaagaccacttccaaaacatagtttttcgagctctatcgaatggtattttttttgaaaaaatttcgatttttttccggaaatagaaaaaatttttggcctaagcgggacatttgagtcccgg

SEQ ID NO: 79823 - DNA, 1916 bp, Heterodera glycines
catatttcattgtgtggcaaaggggatgttatgctggaacttcaacacatcataagcattgctcaatgttttccaaatttgttgtcgttgaacctttggaagtgtttgaaggtgggactgaataaaagaaaataaaattgaattcgccttcaattagcaaagaattttcggcaattctttgaatttaataaacttatttttgtaatattccaacaaaagttttttaattccaaaacttttcagttcgaaaatggcttaaatccttcacagaattcgtcacatgccctttccgaactcctctcaaagtgtgctgcaatcgaatacttgtcactttgtcgtgccacgaacattggcacaattctttttgagccgacgcttttgccctcaaaattggcatttcttgaaacggacgacacttttgaccttcaagcgatgttcaaagttgctaataaaattgaattgttcaattaatgctgttcattttcgcagattgccaatgaacagtgccgtaacattcgctgtctttcactgcaaattttgaagccaacaattccgtcgttggattttgttcacgaagacacattgaaaaggtgcatttggatatctcttaatttacattatttttttatccataatttgattttcacgtttttgctaacatgggatttttttttttgtatccgatttcttttttttcagacttgttcacctcgagcttgactttcataagacaccgcaagcaccttttttcgagaattttgtcaaaacatccttgggttttcttgctaatctgagaatattacgacttgctaaagtcacgggtgaggtaatgaataattaattgtttgggttttataattactattaaatttctgttccgtccacaggctttgctggcggtgattgaccgttgtccaaatcttcaagacctcggatattccgcttataatattgacattttggctgcctttttgtctctttcgcgactgaaaaatttgcgctttttggtcattcgccattatggcaaagttcttcagcaaatttctactcaaaaatgtgttaaatgttccgagaattgcgatgagacatttgttggccgttcgcttaaacaaattgcgcaaaatgagaaattggaggtggaaatattcactcacaatacactaatgagcaattcatttgacatcattaaaaataatttggaataatttcagttcctttctttgaactttcccatttctgttggtttaatgtgcaaattggtgagagagtgcaaggcaagtttttcttcacaaatgttttattttttattaagtgtccattctcaatccgaaattctgggtcttttttttgtttaaacggctctcggacaattcatcataatcgaccaaagcgacaaagaatcttttccataaaaaacaccaccggctctaatgttccgcaaaaaatttttgtcaagtgcacagaattttcagcggagcttcggcaccctcccaaaattaaatcatttcagaaaattaataccaattcgaatctacgcttagaattcatatcctgaatttttctagattaaacatcaaaaatgtttaaattttaagttctataatagaaacgattctttgtattttgttatgtttgctttttggccactcttcaaaatccccatttctttttcagtgtttgaattctttgttctgtccaattgtgcgttaccaaccgttggcttcgctttgccaatgtttgaccgaattgaaccagcagatgaacagcagcagcgaaagagtggacgacgttcagcagcgaaagcgcacattgaatatcagcgtcaactttcaaaaatcccgcacaatgtcccacccgttcatccgttttttgcacacgccagactttggaagcgatgtcgtccgacaaaactttga

SEQ ID NO: 79824 - DNA, 172 bp, Heterodera glycines
aacaaatgtctcatcgcaattctcggaacatttaacacatttttgagtagaaatttgctgaagaactttgccataatggcgaatgaccaaaaagcgcaaatttttcagtcgcgaaagagacaaaaaggcagccaaaatgtcaatattataagcggaatatccgaggtcttga

SEQ ID NO: 79825 - DNA, 5142 bp, Heterodera glycines
atgtggttaactgtctcatttagttggtcgactgtctcaactgaatattgttatctttttatgactaaaatcatgtcacaacatggtagcacaattatgctaagtccccttgggtcagtgaacaattgccaattcaaggcaggccaatgtgaaatggaagacaagacattgcttatgtgggacaccaacactacccgggcctgtgaattttcgaaaattggcacatggaaaggactacaacttgacaatatttggatttctgatgaagtcagttttcgtttgacatttttgaacaacacaaagaaagtcaactcatgtggtctgaatttgataaaatcggaggaaggatttgctgtacaagacttgccttccgacgatagcaacgaatcctcaaagagaagcagaaagacgagatcacttgaaagttgggtcaccgaatcggaaatgaactccaaattgggctatttggatgaacaagtaagagaaatgctgactctttccttttctcagacaattaaatcgatttgtgattatatgttggagacgagaagatgggcagcgacggcacttctctcagatccaacaacttttgccagaaaattattccaatctggtaaactggtggcaaaggtggccgggcccgaattgattaaagtgtggccatgcatcgaattgcaagcacatgactacgaatttgccaaaattgggaactcagcggactccgaattcgaatgctttgacaaaattccaattaaattccgagtgaaggacaacaaaagaatggcatttattgacccaaggacaatgattttgagctccgacgcgagactggcaccatgctcagaataccgcaaacagctcatttttgtgcgtggttctctttatgaagttgatcaaatcgatgctcaggtcaaacaggtgaatgccaatcgcattgacggtttcagccttaatctgtcattggcaccaacttatgctcgccattcctttcttcaccttgccctagtgaatgtgtctgactttattggccaattttacgacgccaatttggcaagagaaagcgaactcacattccaaatcaaaagtgaggacgctatagtcacaaagactttgtctgaacaatgggagcaggtgagtgagtccattcgcaacaaaatgtttgggaattgggaacaaattggaaaaattgtcatgtccatgatgataattattgtttttgcagactttttgatccggtttggattaatgattaaagatgaatacgttggcagaggaaaaacacgacgcatgacttttggtggaaacaaaacgcagaaaattgtgaaatctccagcacacctcaacatgatggatctgaatgcatctgtagaatttggtaacgaaattgagctcagtcccgttaagctcattgaacccgcccaaacccaggcacacaaaatcgcaggaaaacgaaagagaccggtaaaaaggactcgcttcagttttcgggcgccaaaagtactcattggacttttagtaatttttcttcccaatgcttttgcaaatcccgatgtgaataaccaaatttcaattcaattcacttctccatcaatgatttatctgcttatcattccatttctgatttttatcactatttcagtactgctctgctcaaaacggaattcagaccttccaatgctcccaaatctgaatgcgatttcgccgcatcacgccgtggtgcagacattgattaattccacacccgtccgctgcttaatggacactggcgccagtttgactgttgcaccacgatcagttgcggatgaactcaattgtcgaacattttcatctgatctggaggcaatgagtgcctcaggccatgtcattcgcctcaaggaatatgctcaggtgaatttgaacattgctgggtacacagtccgttcattaatttattttgtggatgattccgaatttactgtggcccgggactacagtgtaattgttggttgggatgtctttgaaaaattgcccccaataaaattcgatcatttaaacgggaaattttttgttggggacaacgaatccaaattgtgctatcgttcaattcttttactgaacgatttgcgcgtgtcggcagagaaaaacacactcattccggccgactcccaaatattggtcgatgcttcaatcgaatcatccccaaacccaaaaaattcattttgcattgatcgacctgacataagtcttattaagaagggattgacagtcattaatagtgtctcgcctgcgggccagaaacaaattaaagtggcagtggtaaaccctaccatggaaccgaaatggatttggaaaggaacacatttggcatttgccaatgaattgttatgtgaccgaaatggatttttgaaggaaaatagcacaaaagaaattcttacgttaaattctgaacgaaagaaaatggaaattgacccaacatttgtagtcgacttttctagggccatggtcaaagacaaagatttggaaaagctgaaggcattaatcgaagaattttcagatgtttttagcaaattcaggtacgatcttggacttttcacagccgctgaacatcacatcacaaccacaactgaggaaccaatagcatctgcgccaagacgaatgccgtacaaatacaaagaggaattgaagaagcacattaatcagcttttagaagcaggagtcatggttgagtctgacaccccatgggtaactccaattgtcattgtacagaagaaggacggtggaattcgtccttgtttagactttcgcaaacttaacgaagttacggtgcccgacaagtaccctctcccacgccttgatagcatcatggaaagggttggaaattgccaattttacagctctctagacttggccagtggctattttcaaattaaattgagtgaagaaacgtcaagaaaatgtggaattataactgaagacaaagtgtaccaaatgattacgatgccatttgggctgaaaaatgcaactgcagcattttcgagggccatggctatcgttttgtctggattggaggatacttcattggcctacgttgatgatgtgctcattttcacaaaaagtccgaacttttcagaacacctaacggcggtaaggaaagttttggagcgttttcggctttataatctgaaacttagcccgaagaaatgcatttttgcctcaaatgagatgaattttcttggatttgttttaacagctgaaggttttaagccaagcttaagtcgaatcgaaattctcaaagaaatgcctgtgcctttaaatgttaaggaagtaaagagagtgctaggacaggcaggcttttacagacggcacattgagaactttgcaatggtcgtagagccattgctgaagcttacgaggcaaggcaataaattcgaatggggcagggaacagcaaaacgctttcgacaagataaaagaattacttacgcaagccccgagtttaatttttccagattacgacaaagcatttcacattttcactgacgcctcatcgactggacagggaggagttttaatgcaaaaggatgacgtgacgggcacattttctgccatttcctattgcagcagaaccctctctgctgctgaaaggaagtggccagcagttcaagttgaaatgagtgccattatttatgctttaagggaatttagaccgttcattttcatgtcggacattgaacttcacacagatcacaaacccctcgcgtttttgctaaaaaaatctgaaaccaatcagcaattggcacgatggctcattgaattacaaaattatcaggtcaaaattgtccacgtggcaggaaaagccaacactttggctgatgcactttctcgtgccgctgaggacaagcccttgtcggaaatatacaatgtggatgaactcgaggacattatcgaatttccggtctgtctcgctttggcagcacattccagggtggtcgcggacccatttttgcatactttgaccatccgacacgaggatggaaacacttacgaagttaatttgttggaagaacaagcagctgatcctgaagccgcggcctacatttcgtttgtcagggatggggaatttccagctgatttggatgagaaagaaaaagaattatttgctgtaggcactgccaattacaaattaatttcgggaattctttattttgaggacaagggttcccccccaagaatttatgtcccaatttcgttacgtggactcatttttgaatcatttcactcgtctcttttgggtggtggtcatttgaattacaggaaaacgattgccaaatgtaaaaaatatttttggcccaaaatgtactctgacgttttaacttgggtcaaattgtgtgtcacctgccaattgagacacaatccaacacccgcgtaccgggaagagatgctcatagtgccagccaacacactttttgccaaagttgggctggacttggccggcccctttccagtcacccaaaaagggaacaaacacattttaaatatcgtttgttggttcaccaaatacgtgatttccgtcccggtccccgacacaaaagcacaaacaattgcccacgcttttctcaccaattgttacttaaaatacggcggttgtgttgaattgatcaccgataatgcctctgcctttacttccgaattttttaaggaattttgctccatgctttacattgacaaaaagtatgcctgtcctcattggagtcaaggcaatgcgtcaactgaacgcacttttcggacatttcacaacatcttggccaaatacatttcgaagactcagcccgacttcgatgaatttttggatgctgccaatttttgctacaacacgtcagtgcatgcttcaacgggtgagactccattttttcttatgtttgggcgtgacccaattttctgtgttgatcagatcattgatccgaaagttcgtgatccgatagcgatttcggaccgtaatgaatttaaacagaagctggtcgttgccataagacacgcgtggcacgctgcagctgatgaatatgcaaaagcccagcgaaaaatgaaggaacaatatgacagaaaggcaaggccacagcaaatcacaattggtgaacgagtgctgatcagaaactacgacggacgg

SEQ ID NO: 79826 - DNA, 516 bp, Heterodera glycines
agcatttctcttacttgttcatccaaatagcccaatttggagttcatttccgattcggtgacccaactttcaagtgatctcgtctttctgcttctctttgaggattcgttgctatcgtcggaaggcaagtcttgtacagcaaatccttcctccgattttatcaaattcagaccacatgagttgactttctttgtgttgttcaaaaatgtcaaacgaaaactgacttcatcagaaatccaaatattgtcaagttgtagtcctttccatgtgccaattttcgaaaattcacaggcccgggtagtgttggtgtcccacataagcaatgtcttgtcttccatttcacattggcctgccttgaattggcaattgttcactgacccaaggggacttagcataattgtgctaccatgttgtgacatgattttagtcataaaaagataacaatattcagttgagacagtcgaccaactaaatgagacagttaaccacattcggggtgacaaatccaatttctta

SEQ ID NO: 79827 - DNA, 5974 bp, Heterodera glycines
atgatcaaaagtgctgtagtgcgagccttaagcttatataaattgaaagatgggcagctagaagttagcggtttccacatcgattcaccggtcaggctggatgccccgcagtatgagctacatgtcgcattggaaaacggcaaatctgaaaaaatagtagcttatcgggcagattggatagtcaaatctatccgtcgagccgaatggaagaccggaaatgtggaaataaccgatgaggaacccgatttactcattggtatggccgaattctggcgatttttccagcggtgcgaacagataaatcggaacttattccgcatttacacttcagtgggacctatcgtatgtggaaaagatatcccacaggaaatcggagaaacgagacaaatttgcgcagtcatgtaagcaaaagctgattgtgaatttgcagaaacaggcatcgacactgcaaaaaacttttgggacctacaactgataggaataaaagacgacccaaaagaaaatgatgacgacacagcgatggaaatcttcgaaaagaaagccaagagactcgctgatggacgttatagttcgggatggccatggaaagagttcccgcccgatttgccatcgaattacaatatggcatataggagattggtcaacctccttgaaaaactgcgcaagactcccgagttattggacaaataccacgagtcaatctcgagagagttcaatctcggattctttgaacttggcgaaagaagggagggttttcctgaacacttcctgccacatcatggagtagtaactcataaacttcgaattgtttttgatgcttcagcacacccacggggagagaaatctttgaacgagtgtatgttcagaggacccgtgatgattcccgatctcgtgagaatccttctaagatttcgtctcccaataattgcattatgggcggacttagaaaaggcctccaatgccatatctttggacaatgaagacagggaatttgtgaaattcctttgggtgaaagaccctaagaagaaattgtcgacagacaatttacagatcttccgttgggctcagattccttccgttcggagtaatttcttcgccatttattttggctgcagttgtccagaagcatctgaaggagaaagcttcccccttggcgttggaattcgctgggaatgcctttgtagacaatctaatgacttcatgcaaagacgctggagaagtcttaaagaagtatcgagaagggaaagcattgtttgctgaagcacaaatgaacctgagggaatttatttgcaactcaatgaaagcgatggagcaaattcccgaagaggaccggcttaataaaccagggactaaagtacttggcatcccttgggacattcaaaaggacgaattgagcattggattcccaccgacgaatgaagccgggaagatttcaaaacgcattgttttgaaaacattagcaagcatatttgacccattgggaatggtcgcaccttgccttctccaagcaaaattgttcctacaacgattgtgggacagaacccttggatgggacgaaattttaccagctgatgaaacagcagaatggtttgctgtcatcagagaatggaagaccgaaccattcaaatttccgagacgatccgtgctgcaaggtgaaatggtccaactccatgcatttgtggacgcgagcaaggacgcttatgcagcggcacttttcataaggtctcagaaaggagaagaaaccaatgtacagttactctatgcaaagagtagaatcaagccccggaaagctgaagtaacaattccaagaatggaactcttggcaatgctaattggggcgaggatgctgaaatttgcggaaaatcagctgagaatcccaataaatgaaaaatttatttggggagattcaaaacccgtcttgagctggattgagtcaaaagattcccagcccagatttgtggagaatcggttgagagaaatccggaggatatcagaaaatgccagatttctgcatatcagaacgcacgaaaatccagcggatgtagcatcaagaggatgcactccagaagagctgagatcccatcatctttggtggaatggaccaacatggctccgagaaccaatgaaaagttggccgatcgacttcgaggtcaccccaaagggagccatgaatgatggacaagaaagttcagaattggacaatgtagttgcagtgccagcaacaacgagtgaagacaatccatggattgacccttgtcgatttagcagttggactaaactacgccgcactgtggtttggtttctccgtgcaataaacaagatgaggaagactcgaatattcgagatttcagagggtgttcctatgagcagtgaagattaccagtacgccgagatcttacttgtaaaaatggcacaaaaatgttggccaatgtggaaaaagcaatcacaagaacttgtaaagacatcgaggaaagatggtcttgtccgactgtcaacacggctcgcaatgagcaatgcatcagaagatatggttaatcccattatccttcctgagaattgtccaataacccgactaattgcacagtcggtacatgagtcccttgcccattctggagttgaatccactttgacagaatttatgggaaaatattggacacccagagcgagactgaccataaagaaggtcattcgagcatgcggtcgttgtcgcaggatccaatgcccggcatataaattgccaacgatgcctcctcttcctgaggaccgcgtgaggcggacggcaccatttgaaagcattgggatcgattatcttggaccaacgaataccaaaattaatggtaagcttcagaaggcatggattgctttgttcacttgcctaagtacgagggctatttatttggaaccagtgcttgacttaagcgctgaggcattccttcaagtgttccgtcgattcactagtaggagaggaactccaaaaagaatcatcactgacaatggcacacaatttgtactggcagctaaagtagttgcagcattagaagctgggaagacacccacatgtccgctcgaagagcacctggccaacgaaggaatcaaatggcgatttaatccatcactaagaccttggagtaatggatttcttgaacgccaagtcgctggagtaaaagcggccttcaaaagagtccttgggcgtcgaattttgccctatgaccaattgagaacgtttgtcgcagaagttgaagcgacaataaatcaaagaccgatcacctacgttgatgaaggaccaaatgctgtccagccattgagaccggtcgatttcataatgccaaaggccatattgagtttggatgtccggaggaaccaacaatcgtcggacacggagttcgaaaatgaacctaaaaatctccagaagcaattgcagatgcgctgggaaggtactctagccacattggatgaattctggaccagatggaaaaaagagtacctgttaatgctccggaacagattacaatgggagcataaaggaccaagaagttgcctggcggaccaaccaaaaatcggagaggtagtaattatcgaagaagaaaaaactccgaggaactgctggccgttgggcagaattgttgaactccaaggatcggacaatattgtgcgaagtgccaaactcaaaataccaaaggcaaatggcgagcgaatttcatggcgtgaaatttcgcgtccgataaaccgtctgtataggctcgaagtaccaaaagttgacgagtctgaagaccaagaagaagaagaagttccgaacggaaaaataggacttcaagggccaatcccaaaaaaggatgggaagcaggcggaaagaccgagagatgtccaacaaggacagatcagaaaccacggaatggtgacccggtccatgacgaaagcagcttccatcttgggattaatgttcatgctggtgatttggacaacatttgtagaaactcgatttgttccaaacccaccggatatcccgaagttacataggggaagacaatttcctccttgtaaaatgtgcaagttagagtgtgctgagagaggcattaaagtcactgtaccaagaaaagtgaccaaattcgaagtatgttgtggtgcaaccagcagctgtttggtacaccgatatactccggataaacttatttatgagctgcctcgagagcaactaatcgcggattaccagtgcggggcaacgtattggctaagagatggaaaagtcaacattggagaagtggaatgcccaccacaggacccatgcacattgattgactgttggttttgtattgaaaggatagccaacccggactgccgtccagatgtgtccacaggagtgtatggattgttcactttcactgggataatcgcactctgtaggatactttcaatactgcggcaagttacctcaaatctattttggcttattcgatggatcatcataactccaataaaaatggtcatccaaggcattggaaaaaggctacaaagagatgatgccagagtagtccaaagggaaccgaataagcggaagatgaccccgaacagagccaaaaaactttcgaaaatgggcatgagcttactcgcattggcggcaagctcactgctaattgagcatgctgcaggctcagcccgtgttgtttcgataagcgcagtagcagaaaactgtctgagaaaggcaaatggctcggaatgccggattgaaagctcgacagatgtcactctactgccagtaggacaaccagttcgacttatccttagagacccggaagagcgagtcatgggagtcgttgagatgaaattactgtcactcagcattgtatgtatcccaaaaactgagagatggttacggtcatataccgttcggaccacatcagtgaagagctgcccacgagaaggcagttgctttggcaaattttgccagagagtgcatgaggattacatgaaaggatacagtgcatttgtacaagaactgggaagtgttcaaaaaggtcctggatttacaagttgccgagaatcgtgttcattttggaactgtggatgcaaacttccgactgcgagttgcatattctacagagtacacgctgtgcctgagtcgaaaattatatacgaattaatttcgtgtccaacgtgggagtatcgaatcaatgcgaaacttaaagccgaatccggaggaaactttaagggtgaaatggagatgtcgttgataccagggattaccttcaaatggaaggaggtgaaactgacaccagttgcggtatcacaagcaccagttcctatcttagggcataagttcctgtcagatggaacatctttctcaatggtggaccaagttaatacaaatcttctctgccaagatagagaaatagcaagcaatttttccggctgtactttgtcgaaagaagcgtgcccgaaatgttgggtcgatgaagaggcccagagagttgattgccaatgccgcgactcaatccttgagaaggaattcaacaacccggaaaaaaggctaccgttaagtctgcgcaatttgaatatccgatacaaagatggcgaaattttctcggaaacccactacacaccaatacaagtgatggtgcaattcgagggtctccgtcttggcatcgaggaagacttcaccaagtgttgggcacaaacaaaaacacttaaaggttgttataagtgtcagtcgggagcccaattgaagcttagatgttggacggaatacggttcagcattggcagatgtctactgtgttgatggaacacgtttcacggtaccatgccggtcaaaagcggaagatcagaacgtgatattatcctttgaccaggcggaaatcgacacaaactgcacaatcgaatgcagtggaggaaaatcgaaattccgtatgaaaggacatttgatatatgtcccaatccagcaacaaattgaaatgggcgttcggatttccgacacgtga

SEQ ID NO: 79828 - DNA, 772 bp, Heterodera glycines
atgcgcttttgggtcaacggagttaaggtcgttcctttcgaagtcagagaatgcaaatcatcactttattgtctcaggagcaattgttcagccggtaaaagcactttcaaatccgtgccgggggaccttccataaaaatcgaggacattggcttttcattaacctgtcacttttctaaattcatttttattaattttgaaacatttagtaaaaaaatgaaaaacataaacataataatactgtaattgaatactgtgcgtttattcgcataccttgtcccgggtcatccgaatccagaatcccaactcgatatttttctcgtcccggaacaacgctgatgccgcgcactttcaaattggccccttacaaattagcctcgaaaaaaaacaataaaatattgaattttattttcatttagcttcaaccaatgaacactactttgttttgggctgcaccttaacgaacaatgaaacaattaacaaggaatggctgattagtgattatatcaagccaaattctagcaccaaagattggaagtgccatttcgaattcggcaaacgcgaccagccaatgccattcccattgcctgaaggtgcaattttgccaaaaactgaaaatactcaaccttggcaataaattacaaaaatttcaaagcttaattaatttaatttaggtataaaaaacggaaaaaaaatattataaaaagataacaattaatttgtgcattttaatttgttttgcattgtttttgagcagaatatctcaatgtaaa

SEQ ID NO: 79829 - DNA, 351 bp, Heterodera glycines
atgacaccggcggaggagcaacagatgggcaattatcatgcgcaggttgcgcgcgcaacggaggaattccaacagcaaatggcacaggcggtgcaggcaccgttccgcggcggatttggcattgtgggggagagagattaatggatttgacaattttttaaatttatttagccaagcattggccaaacgccccaactccgtttgccccagctgccatgcttccgcgtggacagcagcagcggcggagacggcgcgcaatcgtcgcaaaacgcggcggcacaaaattttagcggaaatgccgctggtggtgttgacgaggaaaacgatgcctctgtttcggttgaagaatga

SEQ ID NO: 79830 - DNA, 533 bp, Heterodera glycines
atgacccaatgtaatgaattatgttcggaattgctccaaaatggaagtccaaataattacaacagcagcaacactaccaattgtgacaacgatgccgattcggcaaattcgctagcaacaggcacaaaattagtcgccgcggggcgaaatttttcaaataaaaaagtgcccgtgtcatccccaaaatgtgtgccgaccactgctgaaaatgtcatcaaacgaccgccacttttctacgattcgaaacggcgtcgggttgacaaattctaccaaaaacagagcagcttggtggaatactttgaacaagacagcaaacagattcaggttcagaaatggccaaaacctgtctcactattttacattggctgaataattaatgaattcggacctgaaagcagtgccaatctcataaaaatgagaaaaatatggcaaatgcataaaaacaaaggaattttttttaaactgtttggttttgcggtggccatagacacaatcggggaattttgaaagcgattaataattggacaaattta

SEQ ID NO: 79831 - DNA, 196 bp, Heterodera glycines
atggacagcgaaccggacaaatgggaggccaatgctttggccaatgttagtgtcaaattgacaatcaaagaaagtaatgtgagacgacgcgatgcacgtgccgattcagtattgcacgaagtgctggaagcctcggacattgcgagagaagggcagtgctgtgcagcacagttacgcaagcttaaaccagaaaaag

SEQ ID NO: 79832 - DNA, 1995 bp, Heterodera glycines; identical to SEQ ID NO: 15549

SEQ ID NO: 79833 - DNA, 731 bp, Heterodera glycines
atgccaaattcgaccgtcaaaaatgtcgctttgatgaacggcacttcccccgccccctctgccgatcttccgcgtttcaatcatccaactccgtccgcttctttctccttccccaagggcagctttttctcctccgcttctgcttccgttgagtcgccaatgacggcaactaaaaatcatcggccaacagagccattggcaacggcatttttgggggccagcagcagcagcagcaacggcacaattgaacatgccgaaaacggtggcaatggccatcaaccgatgacagtcattctgacagtgcgaatgctaatgcagggaaaggtggacaatttgggcatattagatttgttggctagagcgataagtgggcacggataggctgatcaaggacagatcggcaagaatgctagaatgatcaattattgatcaataattcgaaggttgatcaatagtaatactatgagaaatttgctcagattatgcatggacataagaaaataattgaactcattaaactcacgggcggaaggaagggggaggagggggattaatccccaaaataaaaataattattaaataaaatgttatctaattaacctaccttttttgttagtaaaataattgcaggaagtcggcagtatcatcggcaaacgtggcgattatgtgagacaaattcgggagcaaagcggcgccaaagtgaacatttcggacggttcgtgcccggaaag

SEQ ID NO: 79834 - DNA, 198 bp, Heterodera glycines
attctttcggaccagaaaaaggttattcggtcggcgaaaacgcctccaaattgaacgccatttcagttctgccaggatttggagctttgccccgcgggcatttcctcgccgagttcggcccgacgccccacggcccaatcaaaggcccgcaaggtcagtcgccatttgttggccccgcgcggcgagtgatcgatcaaa

SEQ ID NO: 79835 - DNA, 123 bp, Heterodera glycines
atgaagctcttttgcccttttgtgtttctcgttctgctgtccgccactgcttttgcgttctcaaatctgaacaaaacgccaaagactgtccattgggaagacgcgtgcgacgagtgccaattg

SEQ ID NO: 79836 - DNA, 1020 bp, Heterodera glycines
cgccttttctcccgccactcattcactcacttctcagttcattctcgtcaaaaatggcaacctccgcaaaaatgtaagctttttggtcatttgtgcatccaacagctgttttcaatattgtgtttaccgcattttctctcttccgcttttgtcttctaccgtatctcaatatcttctacttctatctcctaccatatcccttttgcttctcactcctaccgtatattttacgcttttatcttctaccgtatctcatatcttctacttctatctcctaccatatcccttttgcttctcactcctaccgtatattttatgcttttatcttctaccgtatctcatattctctacttctatctcctaccatatcccttttgcttctcactcctaccgtatcttttacgcttttatcttctaccgtatctcatatcctctacttctatctcctaccatatcccttttgcttctcactcctaccgaacttttttgcttctatttcataccatctcatatcctctacttctatctcctaccatatcccttttgcttctcactcctaccgtatcttttctgcttctatttctaccggatctcatatcctctgcttctgtctcatactgtatctcttccacttcgatcccctaccgtatctcttctgctttgtaagtaccataccccgtctagttttgttctcctcttcgtccttcttacggtcgctttactcgtcgaacaagccacggcacaggtaaaataaaagctctgtttgaagaacactgtgcgtgacatgtcttttcccttaagtggggctactactacccgtactacggcaaacgcgaggccgggttcgccccccagggcaatgccaacggaaacgccgaagggcccgcggccggcggagggcacgcgatgttcagattctgaagaagggaggaaggaagaaacgatcaaagagtgatcggattgactgatcagcaagcaaatggtccatttcaaaacatgcgataaataaacggaatgctt

SEQ ID NO: 79837 - DNA, 189 bp, Heterodera glycines
tgttgcaccgccaccaatggcaatgggcacgatgccggcgacgacggcaccgccttccaaagtttgcccgattttgccgaaacggtggcatttgtgcaccaatttggcccactgttcgagctcagcccgttcagctttgacgatctcgcccaggcactgcaacagcttcaccctccaacagagcaaaag

SEQ ID NO: 79838 - DNA, 97 bp, Heterodera glycines
atgacttctcaagcggcggaacaggaactcgacgaatgtttgaaggataaggttgttatttttgtcattttaaatcaaatttttatcagagataaag

SEQ ID NO: 79839 - DNA, 92 bp, Heterodera glycines
atgatgaacattcggtccaacggcaaaattcggtttgctgtcagttgctcgtcaaacatgaaccgcagcatggaggcacactttttcttgca

SEQ ID NO: 79840 - DNA, 975 bp, Heterodera glycines
atgcgcattcaatcagtcgcgcgaaccggggatcccaatttggggaggtcattaatccagggcccggatcattggctcattcaccctttcccccgaatacgaattccccttttcctctcattctcgttcgtcagctgggttaggacatcagcaccttcactggtagcaccggaggtttgctggcacgccgctggctgtccatccctcccggagaatgagatggagatacgcgtggagaaagaagagaatggaatgaggtgcgcaccgctctctcgggagtcttgtcaaggaccggtccacatttgaatggccaaaacactttcttgaaaagccaaattgcagcccaaattattttcgttatttcatcaaatgccgccactcgctcacatggtcaaattaatgacgaacatttaagggagggcattcgagccatcaaaccataattttgtttattttcgcagatcaattaattttgtttgacatcatatttgagggctaagattcttatgtaaaaacatcatttaattatatatatatatatatatatttcctctttttctctttttcttcctctttctctcgttagaacgatttaacagcttagtacttctgcataaaagtcttagccctaattacgcaaatttttttttctttggggatgaaattttccctatacaaaagaattttttttttctctttctcagcgctctcgccgattcaccggaagtacattacagctgccgcctgagaatcagagcccatcggccgagaattgcgataaacacgtatcatgtgaatactacgccgctgtcaacagttctcataatcgctcgagtaatcgtagattaaatgtcgtagaattactgttaatttataaggagatgccccgcaaaatataagcatttattttccctttgtttatgggcactcactttcagaaaattcaatattttcaattttaaccgcactatttaa

SEQ ID NO: 79841 - DNA, 1120 bp, Heterodera glycines
atgcctcgcattccttggccacgtggactgatgtggcggtatagccttcaatataaggcgttaaattttaaacaaagttttccattttcaataacttctgttttcaatgcaacgctttttactgattgcctttatcatcggcttttgttcggcaacggactgggaattggtcgacaatcagcgatgctcgacgaattgtacctcgtcgtttacatgtttcaaattggtcggctatgtagggccatttatatgccttaaaaaaggctacattctcaatcgggcagagatgtggcccgattggccagagacgggagttggaaaaaataggtcttaaattctatatatataatttattttcccctaggtctaattcattttaaaatctaaattaatgtcaatttattattattatgtatcaatttgtagtgatggcttttggcgctgggcattatctggagcggccgttgtttccattatttggcttggaattttgactgctctaatggtcgccggtaagaaaagtttatatatttctttataatgaaggggtaaaatttttgaaatctaaaattatttttttcaagccctattgttaattttccttcaagtttttaattaaccaattattttgaaaattttctaaacaggaattaaattgtccattgggccaaaactgttttcaaatttgccataaagtttcagggaaaatttaggaagcgcatggccaaacattttcaaaatattcaaaaatatttctcttcctattactcaaaaagacaatgaaaaaatagtgtattttatgctcaatacatgacaaatttgatgaaatagtgccgacaatcagttttgactattgttttttgacccaaaagctttttttacagtttctgtttctatttgaaaatgtcagattggagtcctcataaatttgaacctaaggataattaaatatttttaagcgttcataagaatgaagaccatcgctaccgcgaggaccgtcgatcgaatcccaatgccgacgttttaattgatcgggaaatcaatggccaaatgcttttttgaaaattacaatttaaacacataaaaacgaatattttcaaaaaaatggtaatttaaaaaa

SEQ ID NO: 79842 - DNA, 830 bp, Heterodera glycines
atgcctccatatcatcggttggccaaaagcctgtctccttcttttaaaagtgtgccgtttttacggcaacgttgttcatcctttgaccggattggagctgtattgcctgtaaaaacggcacggctttacagtcggctttatgatgcccttaacggaaacgccgggaatcgtcgaaaggcttcaactccccatcctaatatatttgatgatgcaccctttaaccccttaggttaccttcccgatttccaaaccttctaaataaatagtatttcagattttattacccaacaaaataattcttccgtaatggaaaaagggtttttcgcaccaaaattggaggttttttttgccattttccataaataattaacattgaattaataggagcaaaaacgcaaaaaacaaagtgctttccttaaaaaagcattacgtctaaagattggagcattatggaagcagtatagatcggagcgggcaaaagtggttgaggaatacaccgcggctataggtcaattaaatttagttttttttttaaattttgattttaatcacttatttttcagcgatcttgggaccacaagaaaatgtttggtcttcgcctgatcctgacccaaaagtgccatccacaagtgcagcttgggagcacaactacgtgccaatctcgccggattatgcagctactttaatgtagcgatgcactacaaatgtgatggtctttaattggtgatattattttagtttaatgcaattattttttaattttgcttgcgttttatcaatagatatgaaatacgaattaatacgcaaatatttgttaagggataaataaa

SEQ ID NO: 79843 - DNA, 398 bp, Heterodera glycines
  unsure (1)..(398): unsure at all n locations
tgtctgccacctgggcgggcgtccgcgcgagcgcctttccgaataaatgnacttgacaatcacacgcgcgcgcccgctgccacggccgccgcgcatgccgcgcgggggccgattggtggaggacagcccgggcacattggtacgcttcggcaccaccttgatctgacggcccaggaacagcgagtcgttcaacgaggtggacgtgttcaccgcgtccacgtccgcgaattggatgtacgcgaaactggaggaaatgtggcaaacatatgaaaatgtgttagcaaaagggctataattagtaatgtacccctctcattattataatcagtcccgcccgcccccttccgcttttcttccccgaaaatttaaaaaaaaatttcagaaatttttcaaaaaaa

SEQ ID NO: 79844 - DNA, 2404 bp, Heterodera glycines
atgtcttctggttctagtggtcccgaagaaggtgaaattggggccgaactctttgcaaatgaagcctttgaagaagcagaggaaccagctggtcttgtccaattttttcaagcagaaagcaagcgtggccgagagttaatcagaagcggcggttttgaatatgcctttgaagcggacagcggacttcaagaaggtgcaaaacttggaattttttgtccaaaccccaaattagggatcgaattttggcgctgtatcaatcgccccccgtattgccctgggagagtgcatgtcagttcagcttggcaaatttatgttgaacaagacgaaaatttgctcgcgctttacaacacacgtgaacagcgccatccctaccaatatttaagagctgtggcctatcgaatgccggacccaatttaacttttccataaaaacggaaataattcgaaacaaaaataattattttgcttactaaatgaaatagcattgtcttttttaaaactaccatttactgtcgaaaagtccactgtcgaaaagtcctccccttaaacaaaaattttttctgtcgaaaagtcctttactgtcgaaaagtccgctgtcgaaaagtccttctgtcgaaaggtccgctgtcgaaaagtccggcgccccccccctttcattctcccacaattgctcgccgtgctcgtcctcgtcgtcctcgcatcatctctcgtaccagagtcggatcgcatggccaattgcagcactttccaatgagcactcagcgaaccggatggaagaaaatcgcgcgacaaatcgaaggaagtccagtgccattaaactcgatcagattcgattctcccccgaagtcctccgccgcgcggagtgtcgcaatttgcgaaagttatcccatgaatcccccctcccattcccaaatttttcctcaaccaaacatttcacaatttcccagtattgttcttttgccacaatcaccagccatcagcttggccggattttcgcacgctctcccccgcttccaatgatcacttcgtgtggtatattaatatccccccgccccgccccgttcgttgggatgatgtcgtgcggcgatcgcttttcgccattccttggttttttgctgctgacttcatgaatttttatcgctcacacctttttcccatttttactcagtgacaataaattctcgtgattttgccgtccaaagtttgagtcaaatttgggggcatatttcccaattacgagacatcttttcctatctcggcgtttacctcaaatttccgcccgatgattgtgccgatgcgtcggatggccaagcgttggccaaatggctttttttgcctcgtccggacgctgtgccgaaggtgctcaagtgctcatttgaatttgatgaggagcaatggtcgacaaaaatcaatggactaatagcggtaattaaaaccagctcattttgggattcacaatgtttttttttcactttttttaggcattttccactgcttcatctcctgttaatttcatcattggcattgcctattcgtctgctattgatgctttcaatgtgccgtttaatttgaccaatgaattgactggggagcgattgacgctgaatactgccaaaaacaagtacagacattatttgttgattcgttgtccgatttcacgagatgagaacaaatggacaaattgggagaaggaagcgcttgagttgagattttgggaccaatggaacataattgaaattgcaattgttgaggaagaaaccggagaatggtcagcttgaaattggcaatctttcggttcattggctccgaattttctttttaaacaaaattatggaaacgcattctaaggctattttgagctgctgagtacgaatctgaccacctttttgaccaatttcgagtcccgaattcgaacatttaaaaaattcaaaaatttcaatccaaaaatgcttacatatgcacgcctagcaataagcactgacaacttttttttccgttgaactatcgccatatatcttcgtccaaataactgggcaacaattggcgcgttgtccggacatccaggcgtacttatttgatgaaatttaaattttttttttaaatgttcgagttcgaaattggtcgaaaaggtggtcatattcgtactcgcggctcaaattagccttaacaatgtgtgtccagaattttatttgaaaaaaaaattcgggaccgaccaatgaacgaaagattgccattgaaatttcccatttttttggttttagtcttatcgatggcacttctgctgatccaagcgacccaaatggtcagcgtaaatgttatgttcagaagtgaatgatcctgcgtgttattttgttgtattccataatcatatgtatgtgtcattttaagtggtttctttgaataaa

SEQ ID NO: 79845 - DNA, 383 bp, Heterodera glycines
ccaccaggagtggagcctgcggattaatttgactcaacacgggcgaaactcacccggcccggacaccgtaaggattgacagattgatagctttttcatgattcggaggatggtggtgcatggccgatcttagtgcgtggagcgagttgtctggcttattccgataacgagcgagactctagcctactaaatagctggctcattgcttctgtgggcacaacttcttagagggagtgtcggcgctcagccgcacgaaattgagcaataacaggcctgtgatgcccttagatgtccgggggtgcacgcgcgctacactggcaaaatcagcgtgcttgtccttccccgaaaggggttggaaaaccggcgaaaatttgccgtgattgg

SEQ ID NO: 79846 - DNA, 2643 bp, Heterodera glycines
  unsure (1)..(2643): unsure at all n locations
atgccaaaatatggacataaaatatggaccaaaatgccaaaatatggaaatatggacataaatcgcgaaatatggaaaaatatggatatagaaatccttcttttctgtcttcatctctgcaggcttttctcccaccaantatatcgatttttagcaatggtcatttatccgggagttaatacccgttcagctcaccggaaacttctttggaatcactttggcccatttaaaattttggatctcactgattcgacagcgtcagtcataccaatcgataaaccgaattttgagcctataaaggtcccaatagaacgccttgtaaaagtgcctgaaggtgtaccaaacattagtacacttccccggggtaaaaaccccttcaaaaatcagttaaatgcgctgataagtgtcgtgtgtttgatcagtcgcgaaatggaaaatgaaccgtgtggaaaaagtgcggccatggaaaagatcaaagatcgggaaaccgaaaatgaaaccacaaatttgggcaattctcaaaaattggaacacttgggccgtcatttaattgggcaattgaggacaattgcaaattcagttggtggaaaagtgatggagacggaaaacagctgcgggcctttgctttgggacacgcaatgcggtggactcggcatcgaacaccgaaactgcgtacaaatgacagcagccgacctcgacccagtgcttgaaagagccggtcttggcctcaaagtgatcagaaaatggaaaaagatccaaaatggggatgaatgtggcgattttaaggtgatcggcaccccaatgaaagcccttcttagcaatttcttgctaaaatcgaatgccgtttcatcagtcgccggcggtcggaaattgacacagctgatcgtcagtgctccggttggctttgaactgatcacttactccggcgcacgcgaagaccaagtgaaaatcggcaatttcccaacggaaaatgacatcgaaagtgcctttacggcgtgggtcgaaagatgcgcagtgacaagggacaaattgctgaagactggctacactccgatcgaagtgccaatgccaaatgtcgttgccgaattgccggaatcggaaaaactcggatggaacgaggtgctaaagaaggccagcttcgtactaggaaaagtacgcgcaacgacgatccaccgcaagccattgttcgtcgagaagccaagagtcatcgtaggcgactcatcggccaaacaattgttaaaaatgtggccaaaatcccaattcattggcactgaagaaggcacaatcaccgaagtgatcagagctttttatggcgcaattctatcatcaaaagtgaaggccgtcattgtgatgatcggaagagattcgatcagaggtgaagaaacgatcgaaaatgtgctggaacgtgtggggcgactcgaacagctgttgaagcgctttagccatgcccctgtgttttggctgcgacctcctttcatcaaagagaaaatgattgaatacgaagaactgatcatacgaatgaaggaacattttgggacggcacaaggcaatgtcaaatttgtaaaacgacaacgccggcgggacgatcagtgctggaactgtggcgctatggctccggtttcaataccgaccatgtgtcaaacgatggcaaaatgacggaaaagggcttattggttttgagggcctgggtcatgtcccaaatcaaagggatgccaaaggaggacaaaaaagaagagtcagaaccgaaaaagaagagtgaagaggggccaaatggagggacaagcagaattggaagaggacgtggacagttcaaccagtcagggtcgcgtggagctcagcatgttcaccagcaccacccgtatcgccgtcagttcgcgcagtcctttccgagtcgttctcgttttggagctgatcgccgttgatcttgacctcgccatcgcctttcgtgaagccaattgcactcccgattcgccaagcaagctctgtggacatcgcttttcaaagggcgaagatgtgcttatataattaatttatttatttcccatttttgacttatttaatttggttgtttccttctcaatttttcatctccctttgctttgaatttgtatttcccgccaattctatattactgtaatatcgattgtgtttctgctgctgaccagcagccacgtcattcccttctcattccattcggtttttgttttatgatattattcgtttttgttttctgctgtgaatttaatttgctgcctcggactttaattgtaaaagtaaattgtttggattttggattcgggatacaattctccatccccatttggctaattgtgtgtgcggtaattgcttcttctcgccaattcaccgccgaagcctttctgtgtgttacgacggcttttcaaaaactttttgaaaacttggggttggggaggggggtgtccggcggtgccgataggcgccgtcgggaaaatttttgaaaatgagtataatttgttaagagaattttgtttgataaaattttccatttctcaggggtgtatttttcgtttttattgcatttttgttaataatttttttcaaaatagcagaaaatattttacaaaaaattcttcaaaatgaaaaagagcacaaaaaagcaataaa

SEQ ID NO: 79847 - DNA, 120 bp, Heterodera glycines
acatctgaaaagtgcggatgaaattgaaatggggtactgtacaagtacactacagtactcgcaatactgtgtaatgggaaataaaaattgtaaattatcaataatgccttacttgtccct

SEQ ID NO: 79848 - DNA, 2987 bp, Heterodera glycines; identical to SEQ ID NO: 15562

SEQ ID NO: 79849 - DNA, 843 bp, Heterodera glycines
atgcaaaattttcttctcaacataattgtgaatgaagatggtaagttgataaatcgaacaatggattttattctaattttttgaagaattgccttgctcttcaaaatgagtgggcaccatcttgaagaaaagctctttggttaaaggaatggaatatatgttttaaatcataatttatttattgacgttctggcgttccttttttcggaccaaaatattgttaattttttgttcatgtttttgttatctcttttcttcaattgttttgtatttctattaatggtgatttcttgttctttgattgccgtggtctcgaatttttaattactgttgcgtattcaaaattatctttgtaaattattaatgttttgtcatttactaaattgtttgcgaatttgttttgaaacaggtgctgtaaagtcctttattttgccatattattgaaattggattaaggacgcttcaaaaaatcctttttgtaagcaattgatttttttttggacaccaacaatttatctgttcctttccagtttcagttgtttgcatatcgtcggaaatggaataaaggcgcttcaaaaattcctttttgtaatcaattgttttatttttggacacccacaattatctgttccttttcagtttcagttgtttgcatatcctcggaaatggattaaaggcgcttcaagtgttgcatattgttggaaatgaattaatggcgcatcagaaatttcttattgtaagcaattcattcctttcagacatcagtaatttcattatcctatttcagtttcagtttttgtcaaattgttggaaatgaaaaaaggcgcttcaaaaatttcttag

SEQ ID NO: 79850 - DNA, 461 bp, Heterodera glycines
atgtcccaccaaccatttgctaatttcgaaattgtacggcttgaagcgatgatcattgggttagaaatcgacaaggaccaactgcaacgagatgtttatcatcttaaaaataggaaaacacaaatccataacaaaaaaatcgaattgctacaacaaaaggaacaattaataagagaaataagtgtgttgagagagacaaaggcaactctggtcaacgagacgaaagatttgagagaagaaatattggaattacgagatatggatggttccaaagacgacgacccactttgcgccgtttgctataccagaaaagtcgtcagcgtttaatgcaaaactaattttggatattttagagaaattatgcatgcattccatgtggtcatcgtgccctctgcaaccgatgcgccgaaactgtttcaattgatgggcgttgccccttttgccgtgaagaacttattggg

SEQ ID NO: 79851 - DNA, 356 bp, Heterodera glycines
atgaagcacactaaaaagatgctacttgtaccggagagtgaatatttggcgcttatcaacctgctgaaagggggcgcaggtggaacggactcacttcaagccgaaaaagcagcgatcgatgccagcatccaaaaaaatctaaatgacaataaaacgggtgcggacgtgaaaatgaagcgccactcgtggttgtacaaacagaggcatcagctcaaggacatgattgagaacaaaccacaaaaggtgattgtggaaaacgctacaggcacagcgccaaaaacattgccccgtatatgggcatacagaaaccaaacctcaacaagcttgaagaattgaacgggcaggatggcaaaaaa

SEQ ID NO: 79852 - DNA, 786 bp, Heterodera glycines
atgggcatgacggagatgaacgagagtgtgttcggcgtgcgcaccaagaagggcatgttccgcactgttgggcacatgcacaaggagcagttgacccgactgatgcaaacgttgcgcaacacgttcccccactttgtgcgttgcatcgtccccaaccacgagaagaagccgcgcaaaatccaatccatgctggtcagtttttcagttttattgcatgcgcagtgccgtaacatggtgcggagagagaccatttttatggcattgaataatgaatggtacatctatcaacaaatttgtaagggattgaaccgaactccggatttggtttgggatggggatattaggtagaatggaacaattttgcatttttttcgcacatttcgttttccctcatgttgtcccctgagtttttaaaacatatttactaattaatataaaccaagaaattttcatgaaacccgatttggatgaaaatcttggaaactaataatcgttgaaaaatcctaaattttgataaattatttctgccctactaaaatgttcggccactttatggcccttcaaataataattattaaatggttgtacgtccatcaacagttcgtatcactttcgcttcaggtgcttgagcagttacgctgcaacggtgtgctggagggcattcgcatttgtcgtcagggcttccccaaccgaattccgttccaagagttccgacatcgctacgaaattctgacgcccaacctcatccccaaggggttcatggacggcaaagaggcggccaagtaa

SEQ ID NO: 79853 - DNA, 2598 bp, Heterodera glycines
atgtcccgtctttggcactttctttgtgctctcttcgcctccgtcttcttcacctcttccccccttcagacggagtcggaggagcgcgcggacgcggaagaaatggccagcgatttgaagcagaagaacgtgaacatgcaggagatgctcaacgactattggatgcgcattgaggagaatgaggacacgcagacgaagctggtggaggagaacaagaagctcaacgagaccaacaaggacctggaggaacagctggagcaggaggagcaggcacgccagaagttgcagttggacaagaagaatgtggacctgaagctgaaggagttgcaggcaatgaatacatttcgaaatttaaaaaaaataagaaaatttcattaaaaaaaagttttggaaacttttttgaaaagacattaattcatcataaaaaaaatttaaaactaaaatcatacttcttataattaatgctgttttccaggacttgtacgcccagttgcaggacgcatttgcgaagctgcaagcggaaaagcaaagtttggaggcgcgcatcggactgttgtccaaccaactgcaggaagaggaggacaagaacaagcaaagcgtcaagtaccggcacaaggtaaaaaattgtaaaatctaataaaataattacacatccatcgccaccacataacagttggaggcccagttgaacgagctgacggagaagtaccagtttgagcggaaactgcgcgaggagttggaccggaacaagcgccggctggagttggacatgggcgagcagaagacgcaggagcaggagaagcacaacaaaatggagagcatgagccgggagatggccaagctggaggcggagctgagccaactgcgcaacaagtgcggcacatttgaattacagtggaaagaaacactatttgtagaatgattggactctgtattttcaggatgaggttacccgtgacatttgtgtctattgccgaaatcggacattttgcgcccggacttatgcgccccatttcttaaagggcattcattcttttagacatttgtatagaatccaggattggtaggaacactttttcttacgaagcattttttgcgcatccacatttgttcggtggcttaaatgttgctgtccacagtatatttatgtgcagtttttccagtcagaaaatttaaaagtgcttggtccagagaattaaaaaatcgaacaacgaaacagtagtaaaagaagtttaatttgttaacagctttttccaattttgcgattgaccctttgagaaaattaactcaataaatgtccgaaagtccttttgaaatgggttgcacaatgccggagctcaaatgtctgtatatgttttaagaggggggggggggggggaggcgggcatggcattagtggccaaataaatatgcatggaataattgagtgtcactccataaacaaaattccagcgccgacgacgatgccgccacaattgccgccctgcaaaagcaggcccggaagttggagtcccagttggaagaagtgcgcgaggactcggagaacgagaagaagcagaagcttggcttgcagagcaaagtccgccagctcgaacaggaactgtccggttagttgggcgttggctggtggattggctgggtccccattacattcatcggtcactttggaattccattgatcacgcactattttcctattatgcaattttttcattagtttttctatggctcactttttatgtcattttagtgccccttttttaatttaaattcttttttctgactctttctttgcttgccttttcacctttttcttcgtttagttttttctttcttagttatttccacaacagctctaaatttctagtttcttactttgtttcaatttttctttctattttaccctattttttctttctaatctcttttcctttctttatctctcattcccgctccattttactctgtcctgtctttctttctattctctcttcctcctctctttctcatgtatctctcatatctccaactctctgtctctctctctctcatccattttttactatattctatcccttcctcctttgattaggcttgctggaacagcaggacgagcaggaagcagaacatcgccaattgctcaacgccaacgcgctgctcaagcagcaattgaaggaggcgcagaagaagacggacgatgacattgttgcccaattggaggagcagcggaagcgttcgcagaaagagttggccgaagcgatgcaggcattggccgactcggagcaggcacagaagcgggcggagcagtccaagaagaaagtccaacaggaggtgagagcagcagacgacgtgcaatttgaaggaccaatcgggggggggggggataattcaaggaagtggcaaaagaatttcaaaaaaggaatggatagcgggcacgcgtgcctctcccccaccccaccaataaaattaaaatttccagtaaaatgtgaatttgtttaaatttaacccttaaattttctcggcggcgcctaatgactctgcgggacccctattttcatgttttttaaatagttttttggctgtaatttgtacttgaaa

SEQ ID NO: 79854 - DNA, 162 bp, Heterodera glycines
atgtccgttgcaagccgacggtgccgactgtcgccgatgatgctctcccagccaactgtctgcgtgatcttcttcggatgctgcatgatgaactggagcacgcgcttgcgcaagaactgcgctccgtacctggtcgggcagacaaatgatgggggatatacg

SEQ ID NO: 79855 - DNA, 1359 bp, Heterodera glycines
atggctggcaaattgcggcagcattccctgtccagtgttcggaagctgcaagaagttagtaatggaaatttttcaacaattcttttcaattttggaaaatttgcgttcctaccgtaatcctaccgtaaaattccaatgaaactaattaaattgacaattattggctcaaaaatagaaattttgtccaattgttgttttacagctgctccatgactgcaacgtgcagttggctacagtccgtagccaaacgcagcaaattggcaccgcggcggacagtgcgcaactgcggcgagagttggacaacaatgccaaggtgggcttgccaattgccaccgagactctcgaagaaaacagcaagggcacaatttggcatttctatcgaagtgccaatgcttcccgattcggatttgtcatcatgaattgcataaaacggcaattcgttctttgctctcaacaattactgatcagttatcattttcggttccgatcgtcacccaattttacgcctgatcggcagacaaaaaaatgcatttgcatttgttggcattaataagctaatgaattttgtgcatctcagagttttgggttttggcatttccgaaaacttcggaatttctggcattttattgccacaaatccggtcactaattgtcagtcttccgccttctgctaattggtccttaaatttcccatttaagggctgttttcgtgcttatgaaaccacaaagaacagtgtgttgccgcagcttaagcgcgaaggtgcgttcactgatcaaatttttgattctatattttttagtagcactttgttttttatttctcattgatgacgttttttcatgatatttttgatcactttttttaaattgggtcctttttgaaattgaaatccctcgttattccctgattttatctgatctgatttgggttgatcaacgcattttaaatataatcaattcctccagagagactcttctaattcaatcgctgctgctttgatcacaattgttgaccaaaaatcctaagggggcttccttatcactcccactcatcagtttaataatttggactttcattctgatcagctcggttcgagtcggggttctgatcactttatcaatcactttgatcagctcattgatcagtgatcactcgtcctccttttcattgtcacagggaatgcgttcagtcaatgtgtgatcggcttcatcggatgcgtgagcgcctttttgctggagatcaaacggtgcggcgcgttggaaaaaacttttcgcatggacgaggcgccaacaatgtaaaaaaagcaatgcaaatttaaaagcgccgaattttttaatttaaattttaattgggtaaaaa

SEQ ID NO: 79856 - DNA, 1006 bp, Heterodera glycines
atgtcggaatttgcgggagagtctgacgggagaagcagattcagtgatgccgtgtatataactggatctcaatggaaaattgaagcaaaaataagaaaaattacggaaggcactgatgagaagaaatatttgggattttacttatggtgcgatgcaaaagaaggtccaattttaattactattttaaaaatataatcattattaaaataggtggaccatggaactgcgttttttcggcaacctttcgaattgtgtcaggaaagaccgaagcggagaattctattgggaaactttgtgactatgttattaatagaccatgtgtcggctgtggattcaaaaatttcattacttttgcggtgagtgacaattgaaaattttaattgacataattatgggcaattaaggaattgatggatccgaacaatggattctacaacagaaaagaggacaaattgacattgaccattgatgttacagtggaatatgaaaaaagggagaaattaattttggatcaaagcaaatccaatggaacaattgaaatggaaattgaaaaagtgtcggaatttgcacgagaaatctttttgagtgaacgtaaaagcgaaactatgcacatcaaaggattgcaatggaaaatattggcagaaatagaaaagaaaaatgaaagcactggcaatgagaaatgcttgggcttttcccttttgtgtcatgcaaaagaagaaggtgcaaataaaatgctaattaattaatagtattaattaatttatttttagacacaaattggaattgcaaatgtacggcaacatttagaattgtgtcgcaaaagagcggcgtgactgatatcaagagggaattcagcgaagaaagaacttttaacagcgaatcgaaggccagcggattccctgatttcatttcatttgctgtgtgtcacaattaaactttccctgaattgacccaattatggacaattaaggaactgatggacccgagcaaaggcttttacaataaa

SEQ ID NO: 79857 - DNA, 466 bp, Heterodera glycines
atgttgagcttcatttacacggatgatttgagcgaattgaacggagacaatgcaatggcagtgctttacgccggtgattttatttttaaatttaatttattaattattcaattccctaattagccaaaaagttcaatatccctggccttgtccgtccatctgtgcaaattccaatctctgaattgcgcaatattttcttggcatataaccaggctctcattttcgaattggaggtgagaaagacaaatttatttttaattcttttattttgattatccctttttggaataattttataatttgataatttttaaggattttgcctgcaaatgtttgcgttacatttgtcaaaatgcggctcacttgttcggatcagatcaatttttgcagatcaccagaatgtgttttgcaatcttctctagagtgatcgtttgttactcaacgatgaatttgaatttggaaaact

SEQ ID NO: 79858 - DNA, 803 bp, Heterodera glycines
atgactgaactggaacggatgcagagaatgaatttggaaaatgaaaacggtataaattttggcattatataaaaatactaaatgaattcattgatcatgatgatattcattttctaccgattcccaatccctaacccaaattcgaataaaaattcaaaaatcaattttttgatttttgttagcgattcggaattggtgtaaatagatattagatttcgatcacaaaatcaagttttcatgactttttcaagtataccgtgcttttagctgagttgatttgaaccattaataaatattttattccaaaatttttgttttcgaattgtctaatcttcatactttcagataatcgacaaaggtctttttctcctgacccaacaattactgaatttacagctgatcagggtaattactcaattaattggattaataattatagttaaaaggttgctcagaacttaaaatttatgttttaaattaagcttcgtatcaaaatgaatgtctgacgccaaccgatgaattgcgacgaatgcgaatcacagaaatggaacggatgcaaaaaatttcgtcgccgggcagatacggtagaaaattctttgctgtacattttgagattattattagaaccttcacaatttattattattagcatatttttaaatttatttaaatttttcgccgtagacaatggccacaaaatgggcatggctaagccggagattttgacggatcgaatgaaattgttgctgagcacggccaaaggtgccgatgcacattttttggttgggcaaagtgacaataaa

SEQ ID NO: 79859 - DNA, 847 bp, Heterodera glycines
atgcgacgattcgtcaactcagccaaatgtcaacgattcgtcaactcaacgattcgtcaactcgacgattcgtcaacccagccaaaatgtgacgattcgtcaactcagccaaatgtcaacgattcgtcaactcaacgattcgtcaactcgacgattcgtcaacccagccaaaatgtgacgattcgtcaactcaatcaatattacttaaaaaatggaacttaaagcaattgacaagaatttcgagggatgcttaatttttagtctttatgtaatgctttaccaggcgaattgtaggcgcatttgacattgcatcaatttcaattttgtttttcagttttagcaaatcaatcgaatttcaacaaggaaaaacggagaggggatcattatgcatttggcatcaaggtcgggtggttaaatttttcaatggcttcgattttttgcagggttccgtttcactcgcatcagagggcggtggtaccgctgttccaaccgggactgtgaggtaactgcagcattgagtaaagaaggcggaactaatggtgtgctcggaagaaaagagcacaaccatctgccggacccagcgtgtttccacgcggaggtaaaacgcaacggaattaagacgacaacgatggaaaacccgcgccaaaagccatcaaaagtattggcagaagtccgtgcaaacgccaagtgttagagaaggaagtaattattgattaggtgtatgaccccacgccacttcgccatcttccccctcccattcccctcattcagtttgttattgtgcccaccaattttgacctcccaatttattctctgcatttatttattattttattttcttcggcaa

SEQ ID NO: 79860 - DNA, 360 bp, Heterodera glycines
tgagaaatccatgcattaaattgacaaattcatagtcataaaatcataataatcttcaacatttgaatttatggtcattgtttgttattccattatcatttggttgccaattgtccgtactgattggccaattgtccgtattggttggtcatttgtccgtccgattccgattctttccccttctgttgtctattgttgttgttgttgttgttgttcgtcgttgcctcttcgcctccatctttttcatcaacggctccaagtgtttgtactggtcgctgtcctcgtcaatttgcatgtccgggtccatgaacagactttcgaaccgtttgtccaccattatgttgcgcaacagtgcgtgct

SEQ ID NO: 79861 - DNA, 569 bp, Heterodera glycines
atggacgcgcaacagcttcaacaattgctaaatgctctccagcaaatggtcacaaatgccgcaccgcaaaacgccacaccggcaaatttgagcaatgccaatttggcaagctccatcgatgctcgcctttcaacgttccattacaatccggaggtcggcacaacttttgaatgctggttcaaacggtacggaaaattgatcgaggacgacggaagcacactgccggaggcctcaaaagtgcgacttctcctcggcaaactcggagaggaggagtacagcaaatatcgggacacgatcagtccaacccagccggaccaagtgaattggaatgacaccatttcgcacctcaaacagctttttgccgagacacgttcgctgtttgtccgccgctacgaatgcttcaaaattcgacagcaaccaggacaggacgtgtcgtcacttattgcgcagatcaacgcgtcatgtgaaaacgcagatttgagcctgacaaaggaacaactcaagtgtattattttggtcatcgcgctcagcgatgaacaccatgatttgcgacaaaaggcattgaaaat

SEQ ID NO: 79862 - DNA, 540 bp, Heterodera glycines
atgggaaaattgaaaaatgagagaagtcttaacttcatggtcaagaaaagtgagttgagaagctaattgagatgtggtgacaagactgtcagcacttctctttgaacgaggttgatccgtgggaagaaattgaacggcaaaattttgatatgagagagagagagtttgattacagtcctcgatcaaagttttggtttggggaaaggaaagagcaagatcattttcttctgcaacccaaatgttggacagaaaagttcctaaaaattttccgaggttaatgaattgacagagtttcttgggagagggaatccacatgaggatggaattatcgtcgaggcggcaattccctgctgtatatttacaatttgggtgtcctagagatgttctgatatgatcttcggaatgatgcacaaaaatctcagtttgaaaagcgaaacaatttgtggaattgtgtgctttccaggaccagccaaggaagggataccgtttttcatagctgattggattattggagaaaaggagctccccactttggattag

SEQ ID NO: 79863 - DNA, 5430 bp, Heterodera glycines
atggtttgtcagacacacgttgagggcacaatttggtctcttcccatttggctaccatgtccaaaattaaagcatactccttctgacaccccgatcaaacaacctattcgccttttccgaccgaacccattcgaacaaaaatccaaggcatgggtgtgcaggaaggtaaagaaatccctgattgagtacaccaatccatggaatgatgtaatcattaagcaactcccgtccgaaaatctcccagtattattagatgaatgtaagcaaatggttcaggaaaagtcatgttccgaagggattctaatccaaagtggggagctccttttctccaataatccaatcagctatgaaaaacggtatcccttccttggctggtcctggaaagcacacaattccacaaattgtttcgcttttcaaactgagatttttgtgcatcattccgaagatcatatcagaacatctctaggacacccaaattgtaaatatacagcagggaattgccgcctcgacgataattccatcctcatgtggattccctctcccaagaaactctgtcaattcattaacctcggaaaatttttaggaacttttctgtccaacatttgggttgcagaagaaaatgatcttgctctttcctttccccaaaccaaaactttgatcgaggactgtaatcaaactctctctctctcatatcaaaattttgccgttcaatttcttcccacggatcaacctcgttcaaagagaagtgctgacagtcttgtcaccacatctcaattagcttctcaactcacttttcttgaccatgaagttaagacttctctcatttttcaattttcccattccctcacccagctatgtaactttattgatgaaaataaacactggacctcttctgccctcctctcaaatccaactgctctagcacgcagtattttctcaaatccctacctttttgccaaacaattaacaattgactcaatcaaaatatggccctgcgtaccaataaacagctctagctaccaatttaaggcaactgagcttcaaacttgttttgatcttctcccaatccaattttccactaattctggcccaaaatcagcatttttaaaccccatttcaatgattgtcactccagaggcccgaactgctccctgctctgagtaccgcaacattcccattcttatcaacggctccctagtccaagtggaccaaattactgggtccgtcactcctctcaaagttaacaatcttccactagaatctaattcattgtttgaaattcccaaaatcaaaactcatgcatttcatcacttagcacttaccaatttgtctgacattatttcccattctttcgcagcaaatattttccaggttagtaaacttacttacctgattgaatttgatgactccaaagtgaagggagtcctctcctctgactggaaagaagttagagatgaaatggtcaaacaaataactggagattggtcccaattaagggattggtttattctaattatttgtgccctctctgcctgtgatattcttattcgtatccttgcacttgttttggaaaagtattttaacaatctttccttattacaaaccttctttggtcttacaacaaataacacaaatcaatcacgccctccgcctccccctcctcctccttccccttccaatacgtgctctgtgcaatcacccaatttttcgaatcatcatgttgttcttgaattaggtgaaacatctgaaggaaacccaacccaatggcctccctcaattacccgcttttctctccttcccaaatttgagtcaaataattcccctaggcttctcaatgctatgtttccattaaattccaaatcctttgtcacaacaattcccgcccacgcagatacaattcctctcattgcattaattgactctgctgcctcttcttccattgctccgattaaacttaaggacaaattcatctgtcaaaatcttaactcatcggaagtttctatcactactgccgttgggatcccaatacctgtcacgggctcagtcccgttctccttacacatggcaaatatgctgtgcagtgcacatgttcatttcgctcccgattatttggatatttgggatatttgtgatatcattatagggactgaaactcttgaaagattcccaccaattctcttcgattttcataataaattcctaacctttggctatggtcctcctactcttttccaatcaaaatcacaaaacatttctgactgtcaatcttccccttcaaagaaccttctcatctatcaaaacaaagttcattttcatccacatattccttctcaaatcaattcctcaatttctccgtgcatactttcacaaacttgtgaaaactctcaacatttcaacgttccacctccatccagtaatttttgggctgatattaaccctccctcttcattatgccattactgcaaaaaggacaaacatcatataacggaatgtccctttgttcccaaactctcaaaaccaaccatattcagaaattcttataaaaagtccattatgcctacccttcttcttcttatagcgctattcccctctgtacatgcttcattatccaacgaaaatgttaacaattttgaacagtattctcccatatctttcattagcatttcatttatattcactctcatggtcatttcaattataattattctgttcatctatccattacaaatattttttcctcctggaacatcatttcgtagctttaaaaaacaagtaactcaaagccctcctttcccagtcatccaacttaaagtcaactctgttttaattaactgcaaaattgacctaaaatctgacatctcatttactcatgtccgaatggcatgttatcaaaagtccaaattttactccttccccaaacccctatgtgttggtgtgtctttccttccattgcaaactatcggcgaaatttcaactaacattgaaatagcgtctcaaactcactccttaaaattactcatcacagaagaagactcatgggtctcggaaaataactttgatgttgtattgggttctgactttctttccaaattcccagcaatcttatttgatcctcttctttttaacatacaaatcggtgaccataattatcccatgatctcgtccaaccgagattatattttcacacaatataacccacataaaccgaaacttgacgcaataatctctgcctccctcaattccgttgagctccgctctcttgtagacacgggagcaacgctcacagctgcccctatctcccttgctgagacaattgggtgctctcctagaaaaaccaatcttcgagctataagcgcctcgggtcaccaaatccccataattgcacaagccgaggccttcttgtctattggtaccataaaagaaaaagttttaataaattttgttgatgattctcgcttcatcagacccgactatgccctcattattggttgtgattctcttgcctgtcttcctcctgtaactttcaactttcagaatctcactctttcccttgccaacatttcagtccctatgggaaaattttccaaactccaatcgaatattccaatttttgccttacgttctataacattagcccctggctcgcaaacaattgtccccataaaaattacaactctcccaaaaatacgttttgcagtaattgactcattaaataacagactcaccagagatgacttgggctggaacccaactcttatcgaacccattaatggcatttctgccatcccaatttccaatccctcacaatccccaaaaactatttttgctaatatgacaatagccacagctaatgaggtgagtgaagaccctgacttacatttcttttatgaggacccagaccatgctctcttcagtatttccccccaaagtgatgaaggtataatccctgacccctcattcaaaattgacttttctaaatcttccgttagtggacctgatcttcaaaatctcaaaaatttatgtgaagagttctctgacattttcagcaaatctcaatatgatctggggtccagcacagctggagcccatgaaattgtcacctcaacgcaggaacctattacctgtaagccacatagaacccctttcaaatatcgggatgagctcaaaaagcacatagaacaactccttaagtctggtgtcatggtccaatctgacactccgtgggtgtctaacatcgttcttgtccagaagaaagatggtggactctgtccatgcattgatttccggaagctcaatgaaataactatccctgaccattatctccttccccgtctcgacacaattatggagaaaattggccactgccatttttactcttctcttgacctttcttccggttatttccaaatccccctcacaaaagaagcctcacgaaaatgtggactaatcatagaagaaggtgttttccaaatgacacatctcccttttggtcttagaaatgccacttctgcttttgccagaaccatggcccatgtcctctccggacttgatgggtttgtcgttgcctacgtggatgacattcttgtcttcaccaaacccccctcattttctgaccatctctccgcccttcaaaccatttttgaaagatttcaacgattcaatctaaaactctctcccaaaaaatgtacttttgctgcctcttccatgaactttcttggtcatactgtctcatcaaaaggttactccccatcactctcacgcatcgaagtgatcaaaaatattcccactccccaaaatctaaaacaagtaaaacgaattgttggcatggccagcttttatcgtcgtcacattcccaatttttcaactattgttgagcccttaacttctctcaccaaaaaagaaaagaaatttatttgggacaaggcacaagaagatgctttgaccagaattaaggaacttctctctcaaaatcccattctcacttttccggattattctcaaccttttcacattttcactgacgcatcagtcattggtcaaggcgctgctctcatgcaaaagaaaaatgatctattttctgctgtagcatatgcctctcgcactctatcagcccccgaacgtcggtggccccctgtccaaatcgaactcggagctattgtctatgccctcagaactttcaaaccatatatttatatgtctgaaattgagctccacactgaccaccgtcctttggcatacctccaagcaaaggcacaacaacatgcccacctggcccgttggctaatagaactccaaaattttaacattaaaattgttcatatttccggtaagaaaaacgcacttgctgatgctctttctagactttccgaatctgatcctcctcagattccaagtgactctcaagagttacaagacatcattgaatttcct

SEQ ID NO: 79864 - DNA, 1208 bp, Heterodera glycines
  unsure (1)..(1208): unsure at all n locations
atgtttttggggaaaaaaggaaanaanctcttngatgaaataaaattaggtaaatgaggaagaattaaattttgaaattaaagagcagaaaaattggtcccataaaattaaacaaaagagaaaacaaattttaaaaggacaaacggacactgaaagaattcgggaagaatttgagcaacaaatggaaaaaatgtgtgaaattgctgaagaaaatgccaaagaagaaaaggcaaaattggaaaaagcaattgaaaatgcgacaaatagtgaagaaaaggaagttctgggacaaagaatacaatgacaaatttggcactttcaattcatcgccatttattgacgaaatttgacaaatttggcactttcatttcgtcgctctttcataaatcgttccttctttcccatcagatccatggcatttctgatgatgtgtactattttttcttgtaactttcattcatagtattatttttagtgtttgatttactgttttatttctcttatacttttgtctttatacggtgtaaatttaactatttccactgtagtggaaatataaaagtgtcaattaattgtttatttcttaaaatcatttaattccattgtttttctgattatttctttctttttcttttcatttaaattgtatttgagaaagaaccatattttccagttttttgaaaaatattagttttagcatttttgaaaatttcagttcaatcctgagttggaggtgggcaatctcaaaaatagaaaaggtcctgatttttacgatttgtcctgactttttatcattttgatattaaaatcagagagaacctcacttggaatcaaatgccggcttattttcttaatatttaaaccctcttccgggagcttggcttgtcatcgttaatttgatgcgatagttgaccaaaggtaggggggggggtcaaagtgacagatgacaaattaaaaccaaaacatttagggttgttgatgatcaatcactattataaataattgcataataattacataataatatatatatataattttattaagtaaaaaatagatttggttaatcctacttatggtcaatcaccattttcaaaaattgcatcataattaaataatatataaattctattaagtaaaaaatagattcagataatcctactaatgatcaatcccaatttttaaatattgcatcattatttaatata

SEQ ID NO: 79865 - DNA, 803 bp, Heterodera glycines
atgttgattaattccgtttttatgattcctttttttattagtatttttcaacaatttttaattacattttcaattgcaaattcatcggtgagttaattataattttactaatttatttcattaattaggttgaggacaatatgctatttgcatttttgaaaggacagaaagaaattcaattcagtgagtattcaagacaaaaatatgaggcacaccttggcattatgcattttatgagaatgaattggcaatgtgacaaaattgcggtgaagtttgaagaatatgaacggacaaaatgcccaaaatatcgcaaatatttggacattttgcacgaatatttgtacagagaatacatcggaatccccacagtgaagccaaaatttgtgtttaaaaaacgaattgaaattaatggaccactgatttatgcggtgaattgtctcgtcgaaatttggctattttattttaaatactattggttaaacacaaatttcagaattttcatttttaatcgttttgaactaaaattgttgaatgagaagagattaaattataaacaaaaattgtcaattaatgaaatgattttggaattggcaattgacacagcgaatgaatggcaaacaaatgaaagtttagacggaataatccaacaaaattgtggagaaaaatttgaagaatatttaaaggaaatgttcaaaaaatcggaagaaaaggcaaaaaaagataaacaatggaaagccaatgaaataaataatggcaaacatttaataattaagcattcgaaatttgatgatcaagggacatgg

SEQ ID NO: 79866 - DNA, 700 bp, Heterodera glycines
gtataaaagcggcactccgaagcctgacaaatgcagaaacattcacctctcaaaccaaatattttattttttttatatttttaaaattaatttccgcggattttttaacataaaaaccctttcactttcaaataaaagctcgtgaaaaatgaattttgctctgatcactttgccctttgtactgatcggagttgcttctgtgtgtcttggctcgggtaataattttttaattctgtcccaatttccctggggtttttttcaactatagtaattaaagggctctacggtgacgactacggtggctacggtcaccatgacccgcaccacgacggacaccatgacggaggctatggttatgggcacgaagcaccccattacggtggcgactatggctacggtctgcacgacagacactacggcggttatggctacggttacggtggcccacaccatgacgatgggtacggtggctaccgctacggatacggtcacccaggatcgcacggatacggtcacggatttgcggggttcgcactgtaagagacggaaacggaaagcagcgaaaggagagggaagaagctgtggggagagaaagaggagaaaaagcagtgatcgtacaggatcagcagcatgttaccgtattagcaaatgtccaccatcattacagtaatcagcattttcactttcatttcccaacgaa

SEQ ID NO: 79867 - DNA, 3735 bp, Heterodera glycines
gaagaagaagcgaaaccgatggaggaggaatagccgaaggaagaagaagccaaggtggaggaagaagcggaaaagccaaaagcaattgaagtggaaaagccgaccatcagacaaggcatgcaggatcaaagcctgccgaaggtatagggaggacataaataactttaaaaagatttaatttcggcacagggctctccgcttgtgctggacattcaagtgggcggaactccgaccgacgtgcaatggttccgcgacggacgtccgcttgacgaggcgtcgggagttattgcggaggatttgggcgatggtcacttccgtttgaccgtgccggaattggccaatgacggcgattttggacgctacgctgtcaaagtgagcaacgaagcgggcgacgcggaatcggtggccaacatcacggagaaaggtggaccaaaagcacgtttatatagtaggattgccaggtttatggtacaatgaaaaaagattcttctgctcatcccttccatcatttgatcagtttgtcagtggtattttgatcagtttctcaatggcatttgatcagtttctcaatgatattctgattaatttatcaatggctttgatcagtttctcaatggcatttgattagtttctcaatgatattctgtcaatggcatttgatcagctattctgatcactttctcaatggcatttgatcagtttctcaatgatattctgtcaatggcatttgatcagctattctgatcactttctcaatggcatttgattagtttctcaatgatattctgtcaatggcatttgatcagctattctgatcactttctcaatgccatttaatcagtttctcaatgatattctgattaatttatcaatggctttgatcagtttctcaatggcatttgatcagtttctcaatgatattctgtcaatggcatttgatcagctattctgatcactttctcaatggcatttgatcagtttctcaatgatattctgtcaatggcatttgatcagctattctgatcactttctcaatgccatttaatcagttctcaatgatgttctgatcggtttcgcaatgatattctgatcagttttgtttggcaggtgatttttgtgactaatcaatctttgaatgaattatttgcccagttgttttttgttgattgaccctttaatcatttgcgtgccgtccctttccattttcattaattggctttgcttcagtattctttctactaattaatttgcttggtgtgttttaatattgtacctctgttttgttatgcctatcagccgtttatttcgttgggaaatgaaagtgaaaatgctgattactgtaatgatggtggacatttgctaatacggtaacatgctgctgatcctgtacgatcactgctttttctcctctttctctccccacagcttcttccctctcctttcgctgctttccgtttccgtctcttacagtgcgaaccccgcaaatccgtgaccgtatccgtgcgatcctgggtgaccgtatccgtagcggtagccaccgtacccatcgtcatggtgtgggccaccgtaaccgtagccataaccgccgtagtgtctgtcgtgcagaccgtagccatagtcgccaccgtaatggggtgcttcgtgcccataaccatagcctccgtcatggtgtccgtcgtggtgcgggtcatggtgaccgtagccaccgtagtcgtcaccgtagagccctttaattactatagttgaaaaaaaccccagggaaattgggacagaattaaaaaattattacccgagccaagacacacagaagcaactccgatcagtacaaagggcaaagtgatcagagcaaaattcatttttcacgagcttttatttgaaagtgaaagggtttttatgttaaaaaatccgcggaaattaattttaaaaatataaaaaaaataaaatatttggtttgagaggtgaatgtttctgcatttgtcaggcttcggagtgccgcttttatactgtgttctgtcctccctttctgctaaactcgttccgccgcctttggcaaaatgcgccgttttttccattccccgcaattttcgctaaaggggggggggggagaagcggtggatatcgaacatgataattgtgtgtattttgctgtgattagcctattgcacaacaatgtaattgctttgcccaatattcgctccgaaaagtgccaataattgcgcaattaatgcgataattgtcaaagccgccaaaccaaagcgtaccccgacagaatgaatgactgactgacattatgccaatcattccccttcaattgttgatcaaaaatgttcttcttagcaattgagtcatcgaatcgaatttcaaaataatgcaatttccgaataaattttagcgccggaagagcaaaagccggaaattgtgcgtggtttggtgccggtcagcgttcggccaggagagccgaccaaatttgaagtggaggtgaagggaccggtgcgatcggtgaaatggtacaaaaacggacgggagatggaacagccggagacggagcaggacgggaactgttaccgactgatcatccactcggctggtcctgacgatgaagcggattataaggtggccggaggcaagggagggaggaaagacggggatggcacacaattgggacaatggcactaagcagggatggcatggattagaggataacgaaaactggcattattgaatatttaattaccctttactatattaattcgcacgaaatggcacaggtggtgctgtccaatttgggcggcgaagcacagtccgaagcaccgctgaagctgatcaaatcgttacgctttgtacgtccgcttgaggatgtaactgtgccaaagggtcatcgggcagtgctaagtgaggcggacaaataattaaggcaaaacaattaaattaaaattagtggcggagacggaccgctcaccagcgctcgctgtcaaatggttcaaggagggcaaggagctggtgccgggcgaggcggaaaccaaagcacaaccaaagcgcgtgtcggatacaaagtttcggcttgaagtgccggacacggacgcggacgacaccgcccaatactccgtagggagcagcaattaaagcaataattaattgtcctgctgaccacagatcaaagtgtttgaccgcgaggacgagcccggcgtggagtgcagctgcgcactgaccgtgctgttgccagaggaaatgccggcggaaccgccgcggtttgagcgaccgttgcgcgaacagaccattccggaagaggacgagttggtgttggaagtggaaacgcagggaaagccgcacaccgtccgatggtgggtacagcagccaatccactgaccattaattaacatggcccacccccgccgctgcaggtacaagaacggccagcagttgtccccgtcggatcggtcgcgcatggaaaagctcggcccggaccgcttccggctggtggtgccaagcgcactgcaggacgacacgggcgactacgcgtgcgaaattgccaacgacgcgggactggcgcgctgcgaggcgcgccaaacagtggagccgttctcggagtttatccgaccgctgcaagacctttccgtggtggagggcgaacgggccgaattctggtgcgaaacaaacagaagatcggtgcgtttagtgcataatgcagcatacagggaggacataatcaaaatgagactaattactgatgaaaga

SEQ ID NO: 79868 - DNA, 1339 bp, Heterodera glycines
atggctccggcgactgggccttcgagcgtggcagctatcacttggaatggtaattaaaaatttgagcattttctgataaaaagataattattttttaattaaaaatcccaaattatgaaaatttaaatattaatttttttttaaacttttagtgctcgtggcaccgagtcgggagcatatttgcaggtgtggaaaaaaatcaacggcgcatggctgatccacaatgattgctttaatgtgatcaaatcagccagagaataataagaagctgatttgtgaggcgaaagaatggagcaaaaacaaaggggaagaaaaattgaaaatgaaatttggaaaaataaaatagtaatttagaaattgtccccttgtcgattaattgtgttgtattgaacgagacaattgcataaattggcgaaacatcaataaagtgttgctttttaaagaagaaatgcatggcggataccccaaggaaaaatgtaaaattgaggaaaaaaatataattatattttttctatttttgaggctcggatttttggcctttttcatgagctgttgcaacttttcaaatttttgccccatttttgggtttaaaaaaattgcgcttgcgccggaaattttaacattgaaaaattgacagccggaaattcttcgtcggatgttgtttttttttttaataatttcctcatacattctgcaactttatcataagtaatatcatggtttggcaaaaatatttaatattaatgtgaatttcatggccaattaattgcataattgattttttcatatgatttcgctgtcgtaggttaagcatgatgaaaatgaaaattaaaacgtgtgcatataaacgcgaaaagcaaaattgggcattaaaacgctgaaaaacgctttaataaaaatgaattatataattttatagtcattttacaattttatattggcatttaactctctaaattatataaaatgtttgatattaaatataaaaatgaatgaaaattattttacagatttgatttaaaaattattcccaaattttccatgttctccaaagcttatttcattctcgtcattttcggaagcattattggcggaacatttggaaccgacaatgaagacgaacaatgggaagggtatgagaaacaagtttcaactcctaaatatttttatcttatttttattttaatatatgttattatttttagttttgagttcatgaacaggggcgaacggatttctaagttttttaaaaatttattttttatgcgtatagcaagcatcttatgcacgaagcataaaatagatagatagattatgactaccaaattttcgaattaaa

SEQ ID NO: 79869 - DNA, 958 bp, Heterodera glycines
atgccaccaaaatccaagcccaaccggacacataatattcggcaaacagcgaaaataataaggcttttggggtgctgccaatttgggaaccaatcttggcataaacattctcttccatcacaccatgttttcggtagaaatgttaccccaatttgtccgtgccgttttatgtttcctagtgccaaaattggccctttatattgggccgggccgttcctttccgggcttattcattgtaagacggaaaacgctcatttttcatgagattttggaacctcttaagcgtttcattttcgtaagaaaattgcttttgaagacaaatttttttaaaattatttctatatacaataatttttgcgataaaatattttttaacactaattaagattcgtaaaagatttttatttaaatatttttccacataaaaactcctaaaatttgttatttcttaaatgacatatttaagtgagctcatgtctgaagggtacgcagatttaatatcattatatttcgccattattatgtgaaaatggcacaattttcatctcatttcagcagctcttcccttctcttttaagtgccctcctcccccactttttttttgcattttactcaaaccgtcgaatatttcagcgccagctgaagtgaaatttgaactccaaatccgcaaaacgatgtgtaagtttttccgtggaatatttccaatttccttcttttttatgccatttgcgcgccatgccattttctcatcaaaatgtgttgagaagagaggggaggaaaagtggtgcttagccccttcttcgcggggttgtaaaagctgtcggtacggcaccgatgattggatggcactgacatatttgggaatgcctttttgaaaaaaccttttatttggctcgcctacgcaacaaacattttttttaattccagaaaaatatatgacgaatttaccggaaataaa

SEQ ID NO: 79870 - DNA, 1348 bp, Heterodera glycines
atgccaaaagaggattttacaaaaagcgttggtaataaataatattttgatgattagagagtttgctatcttgaaaatgcttgaacctggcttggattccttgttggacctggacctgtaatggttccaagtctggattaagggcttttcataattataccgtatttcatcggataaaacccccttcaaaatggggttatactcgagggtggggctttaatgttcaacccttttttacaaaatttcaatgtttttatgcaaatttttccaatagcaaatttttattagtttttgaaataggtcaaaattattgctacaatttaaatcttaacctgaaatttttaaattaaaaagatttttcattttttggaaccttggaaatttaggcgaatgcttgaaaattcataattcacttcgaaatggatcaattaaagtgcaaaaaagcactaaaaatagagaaaaatctggagaatttatactttttttaaggattttctagcttaaaatgaagaagttagctgataataaattttggaaaaattcgtttttcggaaaataattaaatcactgttatgaaaaggtatttttgaaagaaatatacgaaaaaaaatctgcaattttttccactataagattgtctttatttcttatcgaatcggaatcaaatttttattttgcactaattataattctaataacctaattccatagacttaaaatttaaaagaccgtatgtcgtttttttaatattacaatgcaccaggtcaaggccaaacttaattgatgactcattttatgaatgaattaattgtctaattaattatccatttcaatcaaatttcagttccaactggtgtgttaacaattgaagaagtgaacagcgtgtatcagcattattcccatcaaaatttaagtgatgccactgggcttttcccattgaaatttccaacgcaccgacggaacaaaaacgaaggcacaattgagatggaaattgaaaaagtgtccgaatttgcgctggagccggtgggaagtggccgatttagcgatgccatggacattgggggatttccatggaaaataagggcacaaatcaaaacgaaaaacgaaagcaatgagaaatggttgggcttttacctttgctacgatggccctaaaaaaggtaaaaacaaaagtcattttcgtaaatctgtcagggaaaaacaaaaaaaatattatttcttacttgttttaagcggaggaatacatttactaaattcttttttccagaggtttttaaatattatttaaatcattcgaactaaataaacgattatgtagacaattttctacaaaaatagaaattcaaaaa

SEQ ID NO: 79871 - DNA, 1529 bp, Heterodera glycines
tttcaactggtgtgttaacaattgaagaagtgaacagcgtgtatcagcattattcccatcaaaatttaagtgatgccactgggcttttcccattgaaatttccaacgcaccgacggaacaaaaacaaaggcacaattgagatggaaattgaaaaagtgtccgaatttgcgctggagccggtgggaagtcgccgatttagcgatgccatggacattgggggatttccatggaaaataagggcacaaatcaaaacgaaaaacgaaagcaatgagaaatggttgggcttttacctttgcaacgatggccctaaaaaaggtaaaaacaaagtcattttcgtaaatctgtcagggaaaaacaaaaaaatattatttcttactcattgttttaagcggaggaatacatttactaaattcttttttccagaggtttttaaatattatttaaatcattcgaactaaataaacgattatgtaaagaattttctacaaaaatagaaattcaaaaattaaaaatgcatgtgaaaagtacccgttcaacttaataagtaccggatttaatgataatggtaattttattgaatatttatttattgtgcagaaaattggtcttgtaaaagttcggcaacacttcgaattgtttctcaaaagaatggcacggaggatttaattggaagaattggtgatcgcatttttaataaggaatggaacaattatggatttaattatttcattagttttgcggtgagtgggattcaaataaatttaataaacttcatattttgaaattaaaatttttaaaattttaaaaaagaaagtgacaaaaaattgaatagaattttttgaaattttttggttataactctttgtaattttttttctagattttaaaaaattaaataagataggatttgataggatatgtaatgcatcgcgtaataccaatttttattaatttaactaaattcaagctaagttatgctttcttattagcaataaaattaaaactaataataaatttaaatgtttctatcattgacacttttgtaactttggctcaccatgattttatattacataattgatttaaaattaaagttataatcggaaacattgctgattttcatgttaaaaaaaattaattacaatatttgtcaaatttttgtattgcaaaataaatcactaaaaattaaggaattgttgaatccgggcaaaggattttacgacaaagatgaggacaaagtcacattggccattgatgtcattgtggatgagccaaaaactgagaaaattatttccgatccaaacaaatccaacggcacactttctatggaaattgaaaaactatcggaatttgcacgagaagtcattagaagtgaccgtataagcgaaactgctgtgtacataaagggaatgccatggaaaatatcagcacaaatcaaaacgaaaagcaatgagaaatgtttgggctttttccttttgtgcgatgcttctaaaaaaggtttggttataaaattattaatagaaatataa

SEQ ID NO: 79872 - DNA, 802 bp, Heterodera glycines
atggagcaaagccgagtcacccattttgcggtgcagaaccaaatgattgaggccatattgaaggtgagcaaaatgagaaaagcagaccaaaaacaatttttctttttttagaattaaaaaaatttggtttttctaattatttttgacggcttttgaacgaaatttttaaagaaaaatcgaatgaaatattttgttttggaaaagtcccttttcatgggtattttaagaaatttggagggccaattcttagtgttttatgtttaattaacatgataaatcataaaacaatttccatctgatcaatcattcattgtcatttttagatcttcgaccgcaacgatggcaaatgaatgtgcttccgcgggggcggatttgttattattaagtgccggccttttaattgccagccattgtttgttgcctaattaaggcgatgttcttaactaattaattttatcacttattatttaactttttgttgtcttttttaaatatttaatctcatttcgggcaagccataagctgcttaacaatcttttattcttttctcatcataatatcgctttttgttttttttccattttgtttcatgttggataatcaaaattttattcatttttgatttggtatcataaatttaaaattcaaaatgcgcggggtggtaattagagaaaatacggtatgtgtttttgtttatttagagtcccggagaatgaatggattatcattcttttttaaacccattgccgcttaatgtgatggtcagaagttttttgctgttctacagtagaatttaaaaata

SEQ ID NO: 79873 - DNA, 794 bp, Heterodera glycines
atggcaaaaggacatataattggaaacagttctgggtgtacggtatgattgaacggagcatcatacggtcactgctttgtaatttctttttgcaatttataaataaaaatgaatatttaattaaattttgtctctttaaatagacaatttctgattggcttcaagcaaaacacagatgacagatggataaactcagaagagggaacgcgaattaaatatataaatttggtaaatgaattattaatagggctaaattattttggggttcacattttgaaagggattaaatattgtcggcaccatttgattgaaacaatttcagtcttaaataattgaatttggtattttaaaaacgaaattaatccgttataaatcggacaaatgtacgggaagctttaatggtcaattagcttatggattacaatagatataaatgagactaaacaggcgaattattgagacaaaaaaaaaatttaattagtgttaattacccaaccttaattatccaaaatatggtaattttgtaaaatggcgaattgaaaaaatgtcaaaattgtgtcaccaagtcggctcatttattttctgtatgtttctcagtttaataaaatattttcagtggttattcacctcatcatttgatttgattggtcattaatttgttatgctgctcaacccaatacatatagtatcaatcgaaagctcacaaatcgaattttgagctgaatttctcgagcagaatgaaattggggaaattcaaattaaatttcaaattaaaaaaagtttagtgaaataaa

SEQ ID NO: 79874 - DNA, 1199 bp, Heterodera glycines
atggaaaagcagcagcagtcaaaaagtgatgatcaccagcaaagtgatcagaagcagcagcagcagaaaaaggccgtcgctgttgtggtgccgcgaatcgtgcggaaggaaaacggtgggaattttgtaattatgtacagtaccatttgggcattttctaagacataaaaaatataaataattcaaattaattgctaagggaattcaactgccaaatatttttttactaaatagcatttaaaaaacaaaatgaaaagaaataattttggaaaaagcaattagcagaaaagaaagaattttgtttttgtttataacagactttattaaacatcattttgctgtttttacaaaaataattaatttgaaaaaattttcggcatttgacttattttacaaatccatgtttttttgaaaaataaatgataaaaatggaaaattgggggattttgaaaatgcttcttctcctcggacaatccctcagaaaaaaaatttaaccatttaataaataagaatctaattaatgaagggccttaattacggcaaagttaattaatggaatttgaatattcaaaccagccttaattgttcgtttgtttgtgttattttgacttattgtggtcatttactgtgcgtgcgtgcgtacgtctgacccccctcactctctctctctctccgtcccgctctctctctgcccaattaatgatctaattgaacgcccgcccattggacgttctttgatactctccctccagctagacacggcacacagtccaattcctagcaaaatgtacccaaaagataatccccacctgctgaactgtgatgagagaaaaacaaaaaatgaatggaatgagttgagcggggcggggcggggtcaacgccctcacttcactttttaccgcacaatcatcattatttagaacatgttaagatgcatgttcccacaaaataattattttctttagttccatacaattgaattgttttccatttaaatttaaattaaatttattaatgctttttaaaaatcatttagtcctcccccgcccgtcctttccaattcttccgatgtttggccaacagcccatggaaattgacgccgagtcaccgaagggcattcggccaacaggaccaggttggatggcatatatatatatatagatatatataaatctgagagtatctgggttgggcgggaa

SEQ ID NO: 79875 - DNA, 793 bp, Heterodera glycines
atgaaattattaccactattctttttaattgtaattttaattatcaaaattgaccaatttggagcagagaagaaaaaattgaaacaaaagtcatttgacgaaatttttggagaaaaatgggaagaaaaggaagaagaaaggcgaaatgaactcaaaaaaagagaaataattgcaaaattttataaaataaaagagaaaatcaagcaaaaaggaagaaaatacccaagaaaagaatggaaaaaaattgaaagaaaaatagctaagaaattggggacaaatcgaaacaaaatttataaatggatcaaagaatttggtcttcaaaaacgcaaatcttacaaatcaaaaactgatgaagaaaaacgtcaaattattcaaaaattcattgaaatgacaaatgaatttaaacaaaaaggaaaatattctttaaaagaatggaacaaaaattatgccgaaatttgcaagaaaattggagtaagcaaagggacaattatcaaatggaagaaacaatttggcattagcaagaaaataataacgaaggaagaaaaaatggaaaaaataaaaatttattgggaaataaaaaaagaaaacccaaaaatgagtgaacgggcaattgcaaaaatgatgaaaattgatagaacgaacatttcaaaatggaagaaactgtttggataaaagaatcattgaagattgaaaggatgattataagaaaaattggataaatttgccgaaaaaattatcagaaaaactatgacaatttctagttttttttcaaattttttatagttgtattaaa

SEQ ID NO: 79876 - DNA, 575 bp, Heterodera glycines
aactaattaattccattgacaatgtgcgctcaaagttgatctcggatggagtgttcaaaaacacgtttaatcgcaatgccaaagcatcaaatgaatttcaacaactcattaacacgttggagcacaaatttgtggaacaaattggccaacaaaatgaggaggatggccaagaaaacaaacgctacagcctcgtggacaaagtcactttttggcaaaacagtgtccgggtttcggagaaagccggcaccgaagtgctggatgaattggaggaaatgcgtgctaaatttgtacagaatgcggacgaatttgatcagcaggaatggatttttaacagcaaaaaaggcttttggctgatctgagtgttctcccggaaaatgcgtcagtgaaaaaagcatcttagaaatttttaagaaaaatttcagaccttttcctagcgtatttttccagatttttgaaaaaaaaagaattcttcatacaagttcgaaaaaggttttaaaaacttttcacttgaaattttcatataaaaaattttttcgaggcggggggggggggaacagtaaatttttcaaagtcta

SEQ ID NO: 79877 - DNA, 231 bp, Heterodera glycines
atgggggtctgggtgagaaaagagaagggaattggtgagggatcagaaatttttgataaaaataaattaaattatttattttcatttatagcatatgtccatctgcataagtggtcaagtggctaaacctttttacttgcattatttgtctcttcggttcaattccctgatggaacagaaaatttttttatattttctttaccattattttaattgaatttaattaataaa

SEQ ID NO: 79878 - DNA, 742 bp, Heterodera glycines
atgtgtcaatcaaaaggcagaaaaagaaaaatggtggaggcaaaaaaagaaggcattgatgaaaagaaagctgcgcaatgttttactgtttcaaaaattttggcaatgttcgtcggccgggacaaaagtcaattttactatattgattggggagaaggtaatttaattagtaatttttaatattttaaaaacaaatttgtgtgctgataattggtaataattagaaaaattaaatttaaaaaaatttgtaaattgtgaaaaaaaaaacactcctaaaaacccctaggttttcgaacattttggcattactttttgaaacaaaaatatttttttttagaaattttacaagcaaatagagaaaacttagggctaccccattttttaaaataataaatttgtaaacaaaaaaaacaaatttttgttgcttttacataaagttcatatgaaaacgcgtttatttttataaaacggttttattgaagtattacaaaacacccctaattcccaggacaattgtacttgaaaaatccttttttttatagaatatgtcggccaggaaagttgggagcctttgagttatattaatgcgcttgaaatggtggcggaatttgtcgaacgttcaacgatcgattgcgtactgaaagcattgttaggtgaacaatcagtgccggaacatatagcaaaaaaactacgcaacagtgacaaattcaaggaatgtacggatgaatttaaatatttttaa

SEQ ID NO: 79879 - DNA, 1850 bp, Heterodera glycines
atggcaacgggaatcgcactgacacttaccgattgcgttatgtggttcatcgacgaaaacaccggcaaattcagtgaccgtttttccgatgatcagttctcattgttcgatgcgatccatcaacctcgtccgctggtcaaaaacaacgtacgagaaatcattgacatggcaaacaatcgacggcttactgttgtggaggcggaggatgcgaacattttgcgtatgcgggtgggaagattcatcgatttgaacggacgcaccgaaatgtctctgcatgatgcgtaccaactcaaattggttcaaaagccgcagactttggccgaggtcattgatagtggctcgctggacaacgatggtcgtttcatcgatggtgttaaacctcgcactctgctcgaggcgatttgttcgggaatgctcgacccggatgtggcgcacatcaaagcgggaccaggcgatgagctgatttccatcggagaggcgctgaagcgaggccgattgacgccgaaaggagaaattgtgttgactctgggtgaagttggcatacacagaggagagaaaattaatttgttcatggcgcacgaacggggccttttgaccagccgtgttcgacacaccatcttcgatgtaaaaggagtgagaaatgctgcggatggttcaattatgagcttcaaggaagctcgtgatgcgggaatccttcaggtgtggtggtggtttacggggcacttagtaatgccagtcgatggttgaaatttaaaaaacttacaaaagtggacaagtttagtttttgattttggtaatttttgtgggtgaaggggcgaaggtcaacagagagagacggatgggccgatgcaatcgatgagttttttgttgatatttcatttgttcgttttcttctgcagcttcaattcgatgggctggaaaccagactgaacgaagcatcggcccggggagagatcaattcgggactcgccgaaattctcgtcgctccatgcggcttgtccaacaatggtctgccattgtcattggtccgcgcgtttctcaaagtacgttttgtttgctgtgcctgtaataatataaatggtttaaacacatttttttcatcattttcagtaccaggtgagaactccccgtcccagcgaaataaaatttagtttatttgggtgattccaccttacgagatcagtcagtcaaggttaggtaactggcaaaattctgtgacaagtgacggtctttttatgcgtcccgaaattcgttccgaaaatactgtcaaatttgatgatgttgcttatttacactaaagggtcgcgtggacgatgtcaatggagaagtcattgatccggccaccgggcttggaaagtccattctcgaggcgtacaatatcggctccgttttctccacgttgcgtgccgccatgcgtcttgctgcactgctcgacgttcatccgtcgctttgtcagtgaaagggcgagaatggttgagtcatctataccatcccactttaattgattctcaatttgactttctgtttatttttaaattgattcttactttgacttaaattatctgtttatgttttactgtattcgttgatttattaattttttgcttaaacttgatatggagaagaatgaaatacacctagtaacaggcaccgtatatttactgtatgcgctcattacctttttttagtaccttatttttgaaaaaaagaattcaatgatcagttacaacaaaacgaaagccaatgagaataatcctgcgggaaaaaatgatggagatggattggcttttatacgaaaacactttagccacaaaaaaatatttaaaaaaatttattcaaaattaaataaa

SEQ ID NO: 79880 - DNA, 1170 bp, Heterodera glycines
atggttaagccttctgtctttcgttatttatcccttgagttcaattccacattggtacagtaggcttttttcatattttctttaaattactttaattgaaattaaattaaaagaaaattttcttacattaaaaatattttctttattttttaaaacattagctccataaattaacaaatgattgtacattttttggacaaatctgttaacaaattcattcaaaatttttcctggcggcgcctatcggcaccaccggaccgccattttacataattttctgaaatttggaccacaaaatggcaaaaaatagcccctttttggcgcaaaaacggctaaaaatccctattttttctctccgtcgatgataatgttggtccaaaagacttttgttcaacatcaaaaattagcttatttgttaaaagaatttttttttctatataaaatagagttttgattaaatttaagaaaagtttgaaaaattttcttaggaaatttacttaaaaattaaaatttttccttagagatttctataaattgctctaatttcctcaaaaaattggctcaatattgtaaattttgacatttttggacaaaatctgcggcaaatcgcattaaaaattacaaattttttcccggcggcacctattggcgccattgttccctgtactcgaaaaattttttggaaaaaacacgccgtaaagaagcggtttatatggtttgttttctttaaaatatattttgtttatttttccagcgattaaattcccgttttttattaataaattgaaattaaaaaaatcattcagaaaactttttacaatcacggctcacggatcacgggaatcacggggtttttggggtgtcatgatcacggatcacgggaatcacggggtttttggggtgtcgtgatcacggttcacggctcacggatttttttgaaagccccgtgatcacggctcacggatttgcgtgattggaaactcaatcagggccagctctgctgctgacacattcctccgtcttttttaattccaatctacagtactaccttatcgtaccaacccatcaagtttgttgacaatatttgtactttaaagcatttaaattcgaattgaaaaacgtacaaaatgttattaaaaatcatttgaaaaaaacaagaaattgtttcta

SEQ ID NO: 79881 - DNA, 775 bp, Heterodera glycines
atgaattgcaaaaatgttggcactgatcattggccaaatttcgtgaaaagtgaactccaattttcgactcaagctaacgaagacggacaattggccacaagaagtgaaaagtcgttgaaaaagacggagaaaattgatgacattatggtccatgaatctgaaacaaaagccaattcaaactgtttgggagttatgaattatggccggctttcaacccattaattcccattcccttttgctgttcggctctactttatgcaaatgcttttgaatgcgatgactttgtgcggcaccggcttttgcggaattggcgccgattgtttccatctgtaagtgccgaactctctgatagaatgtcaaccatttccggcaccttaggcaaaagatggacacatttgtctcaattgccgacggatccaattttgaattggtaattgtcatctcatcttttatttggccatccttttcatatgtgcgacgaattccaatttcgtccaacgcccaacgccgcgatttgaagtgttcgtccaccaatcggtcaaaccggtgactgagcaacgcaatgccaaggcccagctgaaaaggggggaccaaatggaacaccgaaagccaattgtcgccagtgatgaagctaaacgaacgcggaattaatgaattaattgaaaattgattctatcaaaatttacattgctttttccatttgttttcccacttttttggactttccgacattttatggccaaaaaattaggaaaatttcaaaaaatataataaa

SEQ ID NO: 79882 - DNA, 1235 bp, Heterodera glycines
atgagagcaaatgggccaaatgggagaaggaggccaccgagtgggacttcgatgaacagtggaaccgaattattttttcctattggtaggaaaactataaccccttttttattttattttgcggcgaatttggcattttccaccattaataattgtaccaattaatgtttaatccccatcatttgcccaacttgcattttgcctttgtaataattatttgtgcccttttataatttgttcttttatttttttcaaaaaaatatatcaaaaagcatatgcatgttaactaaggcaaatacgttctcaatttttgaatttagcactctaaaaaattaaattaagatgcaaaaattgaaataaacccaaaaaatgcaagttcaaaatctgttacaaaatttattttctaaaattaacttttcgaaaaatacttatttttttgtattctgctaaattttgctaattttttccaaaaaatccttaaaattaaaattttgtatgaaaatctgttaaaacatgttattccaattttttttcctggcggtgccggtcggcactgtcggaaccctttccgttcccaaaagtttttttaaaaatgctgcaaaagggccatgcccaaattgacatcatctggatcatcggaaattgtaggaaaacattgagaaagtgatgatcaatgaggttttaatctcaattatcaatcaatcaatttatacgcaaaagcgtgacaccgacataaataacaatataaataaatttggtcactgaatgagatgaggtggtttcaaaagtaaagaatcaacatcataggtgtcaagaagtttagcaaagtcaatggaattaagtaacctcgcctctttaggcaaacacctatagaggcgagaggtacgaataaaaaacgaatgataccgaacattggttgaacaataagcggttttaataataaaatcatttttcagttctgaatatgtttttgaaaaggaatcattatgctgaatatggatcttttccaaaattatatcatggaagagttttaaatctatttttattctgcgttttaagagggattcttgtttaaagagttggaggagttcgttatacccgggtatatcatccttattattattacgtctaaaaacaatacgtaaaaatgttttttgaacattttcaagagcatcaatgtcttttttcatgtatggattaaaaatcggagaaccaaattccaaaatggatcgaca

SEQ ID NO: 79883 - DNA, 1417 bp, Heterodera glycines
aataaactagaaaacaataataatacttccattgacagcatcccgaatatttttctcaaaaattgtaaagaaaatttggtttatccgctatttcatattttttgtttttcaatgatgactggccaagtcccaaacatttggaaaaaatcaattatttatccagtaccgaaaatacccaatccaataaatcctgttgattttcggccaatttcacttttatgctcaatttcaaaaattctagaagaaaatattacccagaaaaactaattttgttgagacaaataatgtacttccgaattgccaacatggctttaggagaaaacactctgttacaactcaacttttggaagtcattgatgactttagtttagctttggaaaacaaaaaatcaattgatgttatatattttgatctagcgaaggcatttgatactgttccgcacgaaagattagtttctaaactcaaaaatattggtataaatggtactttactaaaatggcttcaaaattatctacaaaatcgtacatttttcgttagagttggctctgcgttttctgatgaattcccatgcttaagtggtgttccgcagggatcaaatttgggtccgcttttgtttttaatttatatttcagatcttcctaatttttgtaaaactgaaaacgttgaaattaagctttttgccgacgatcttaaggcctattctatactatcaaaaaatactatttctccactccattctttcattaataaatttctgaattattgtgaattaaatggccttaaaatcgctcctaataaatgcttagtttcacatcttgggcctaaaaaccctaatgaatgttacttaataaataatattccaattttaaaaaatgaagaaggtgaaccagttagagaccttggcatttatttttcaaataacttaaaatgggaaaaacatatagaatttattactaaaaaagcaataagaacatcttttgctttactcaagtcacttaaaactaaaagcccaaaaattctcataaatatattcaatgtttattgtcgatccattttggaatttggttctccgatttttaatccatacatgaaaaaagacattgatgctcttgaaaatgttcaaaaaacatttttacgtattgtttttagacgtaataataataaggatgatatacccgggtataacgaactcctccaactctttaaacaagaatccctcttaaaacgcagaataaaaatagatttaaaactcttccatgatataattttggaaaagatccatattcagcataatgattccttttcaaaaacatattcagaactgaaaaatgattttattattaaaaccgcttattgttcaaccaatgttcggtatcattcgttttttattcgtacctctcgcctctataggtgtttg

SEQ ID NO: 79884 - DNA, 931 bp, Heterodera glycines
atggtgtacggtcacatcacattaggattcatttggaccaaagcaaaatggaaaaaacaggcaaatcgggtaaaatgattccaattcggcaggcacatgacaaattttcaaaaaatgcaaccggattcgaaagaatttaaccgtcatatttggagacaagtaattgtccaattaagattataatggcaaccgatattaaaaacatcttaaatcgactgtcttcaattgaaaccttattatcaaacaacaacaacaacacattggcatcccaaatggctgaacaattcaacgcaattgctgaacgcctcagtgaaattgagcgcaaaatcaacagcaacaacaatgccaatgacagcgcggaagagaaagaacgaaaacggagcctcgttttgatcggacttccggaggctgtggccgaaaagccatcagaacgcgccaaagaggacgcggaaacagttgcggaagtgttggacgctttggatgtggaggtttgcccacagatggtgtatagaatggggcggcggattgatgagaagcgaaaggggccgcgtttggtcaaagttgtcttgccagcgacgacgttccaacgttttgcactggcacaatgggggcgcaaccggacggaactgaaacagcgtgtcggttggcagcgactgctcgtcagaccctccttgacgaaggaagaattggcggctgagcgggagacacgtgaacaaaggcggatgaattatgaagaaagcaaaaagaacgaaatggtgacgacgcggcgtggaggcaaaatggaaaaaaacttttgaggtcacaaaactttctcaattgtttttactttaactcaagaagtttagtaaacaaaatggatgagtttaggcttttacttttagaaaataggtataaaattatcgcaataaccgaaagctggttgaacaataaa

SEQ ID NO: 79885 - DNA, 666 bp, Heterodera glycines
atggcattgctttccgaccgtttcgatgttttggtggacgcgcatttcgatggaaaaagcgaattcacaatttggagaacaatcagaattgtaaaggacgaaggaccaaaagcgaaactgtctgtatggaccgatggcaatgtatcgatcgatggcaaaagggtggaatttccattgccggaccattcgctgcccaacaaaatttgctttaagaaccttcagattcagtcagtcttaacttttgtgtacgctaaagcatttttatctttcttcagttacattgaccattccgtgatcaaatttctccgttccaagaagccaatttgggacagaagaggcaccaatttggaagtgcttgtggatgcatttgatacggatgtccaaccgatttgggatgtttttgtcagtcaaatttggcctatttttgcgacaaacattcgccatttatgcattcctaatggtgctcatttggacaatttgcgtcgtctgatttcaccgacatttctcactgatcttgatcaattgatttcaatcgattctggtgctctgttacgcgatggaattgctgacgatggaccaaatgcaactgctggccaagcgttggccaaatggcttcacactccgacaaaaaatgggcaaccgaagcaattacgtttccttgcttat

SEQ ID NO: 79886 - DNA, 1320 bp, Heterodera glycines
atggaacagcccaatcaggaaataaagacaaagcgaaacaaggagaagctggaacatgagggttcactttatgttcttcacaaactcagtgacgatgaacttcggaagtattggcgatgcgagtttttcggagctaacgacaaatgcaaaggtaaatgcataaaataaaataaaaactatttttcaaattcagggcgccttcacactgacattaatggtaatgtcctcaaaataattggaagccacacatgcgacatgagtgccgcacaagtggagtgtcagcgacgtataacccagctcaagcggcgtgcagttgagacgtgcgaagcgccggctacaatccgtgcgcaggtattgcagaacactgcaacccccgtgttggctgcttttccgaccaaagctgcgactaaaaaggtcaacgtttgcaaatttttatgccaaaggttggtatttctcgaaattatgaaatgcgcccgtaatttttcaatgcttgttatttttttttgttgttaacacattaataaatatgttatgttattaattttaaacattttttcggaaaaaatcagtagaatctattttggacaaaaacagcttgccgtactaaactgaccctcgtactaaaccgacccctcgtactaaaacggccgtactaaaacggccgtactaaaccggccgtactaaactgacccggtccgctcaaaatatgtaaaaaataagtataaaacgtcgaaatatgtaaaatatgtaacaaaccccgaatatgtaaataaagtcccaacttttggactcaaacgagagttgaaaattaaatttccgacaaaattctcatttatacaccaaaaaaggtccattttttgtggaagtttccagcttgaaatttcgaagctataaaaaggttgtttcgtacattaattcccgttttttttgtaaaattctgtaatcaaattggttttatcaccagtcatttttaacaatgtaattggagactgggggattaacatgacaaattattaaagaaggtaccagcctcaggaaataaaaaaacaaaaaaagtaaagaaaattttcgaattcgggttcgggattcgaaaaatggatgtttggaacatatccgaccaatttcagtcgtaaacaggcactcacgcgaaaacgtaccccacgcgaagacggccacgcgaaaacggaattccaatcctgcaacaggatccgcaaattgaattttattttatttatttatcgataaagaaaaaattgccaattctgatggtcaaaaattgagcaaaagaaatgcaaaaagtcagaaaaaagaaacaataaa

SEQ ID NO: 79887 - DNA, 153 bp, Heterodera glycines
atgcagcgacagcagaagcagcacattttcggggccatgccagcacaacagcagcagcagcaaatggacgaaggcggaaacgccgaatgtggcgaatacgatgaggatttgcaagaaattccggcgccggtccaggaacaacagatgaacatg

SEQ ID NO: 79888 - DNA, 94 bp, Heterodera glycines
catcatcgatggaaaatgcgcaaacaagtcacgaatcagaaggactttcccgacagggccaaggacgcctttgcccgtctgccagtttcggaaa

SEQ ID NO: 79889 - DNA, 1476 bp, Heterodera glycines
atggccggccaaagggtcgcagatgagcaacaggggtaggtcggcttgttcctgacacaagctatccaatatctacaggggatttctttgggagaaatccaattggaaaagtgtgtatggacactcacatgatcacaaattgggtcttcgcccgtgtaaaaaaactgcaatgggtcatcaacgagtggcagtactgatttgtccgagttgacagaactgaaaaataaaattcaaaaatgagagcaaactgtagaccggacgtaataaagaaacaaaaatttaataaatgctgatgacctcgcgtcctctaatttggcaggcaaagaggcggcgatttgcggtgactcattctgttgagtgaaaaccgactcggcacaaggactgagaatttggcaagaaaattcgatgtcctcggccgacccttctgaatgtgatgggattttttgttaccatgttccaaatcagtcccatttttggtacttatcacaccgagtcaattttgagccactagttcaaaaagtaaatgcatatgtggcgaagtggtttttgtaagatagtaaagggacaaagggtggtggtggttcgagtccgttgtgcaacatgaatatttttatttatttttgtccaaaaaatttaaaaaatagattttcggaaattattttggaagctttttgccaactaaattgaaagatcttggtatcattcaaaagctcttgatgaggagaagctttttctaagcaaatgttgaacagtttggtgagttagaaaaaatatatgggtgttctaaacttgcaagttttgaacttgagcatagacaattaataaatcagcatagaaaaatgaagaatttttttctctatcgatatgcaaaatttgaagaaaatctgttaacgggaaaaaaagtttcttagagagaagtaaattcggtttttctctattaacagagataaagaaatagtacgccaaaaagagagatgtttttttctctgcactctctatttattgacacatgtctcgttttttgactcggtgtgttatgcactatacgaccataaaaaaataaatttattttttaaatcatataaaaaatttctaggggtttcggggtcgctaatcatgaatctgacatctatttctgccaaattcgaatcccgaacccttattcgagttattttcgcaccataaaatgattttttgaatatttgttcgaatacgggttcgggattcgaatttggtcgaaatggatgtcagattcgtgatcagcgatgcttcctaaattctgagagtacgtcactgttcccccttttcgatacccgtgaagagaatgagcgaaggcatttccgataagcggtggacagtatgctcagtgagttcgtagagtgcctttcttctccagggatatccgtgggggtccgacaaacaaacgcttcgcccgtttcgcgttagcagtgaaaagttctcatcgacgagaataaa

SEQ ID NO: 79890 - DNA, 1447 bp, Heterodera glycines
ccttggcttgcgttttccatatggtgacgaaaaactcattcaaaaaattgcgaaggcttacgacatttgcggtgtgttagaaatgattttaaatgtcaagtgattatgttacttatatttcctcggattcgagtcggggttcattgttcgcaattgacacaaatgaattttatttggtcaatccgaaactcctgaccaacgaaatatcccttacacaactaggaacccaaaccaatcaagcacatttgtgcatgcattttatttgaaggcattccttcatttattctcgtcgatgagaacttttcactgctaacgcgaaacgggcgaagcgtttgtttgtcggacccccacggatatccctggagaagaaaggcactctacgaactcactgagcatactgtccaccgcttatcggaaatgccttcgctcattctcttcacgggtatcgaaaagggggaacagtgacgtactctcagaatttaggaagcatcgctgatcacgaatctgacatccatttcgaccaaattcgaatcccgaacccgtattcgaacaaatattcaaaaaatcattttatggtgcgaaaataactcgaataagggttcgggattcgaatttggcagaaatagatgtcagattcatgattagcgaccccgaaacccctagaaattttttatatgatttaaaaaataaatttatttttttatggtcgtatagtgcataacacaccgagtcaaaaaacgagacatgtgtcaataaatagagagtgcagagaaaaaaacatctctctttttggcgtactatttctttatctctgttaatagagaaaaaccgaatttacttctctctaagaaactttttttcccgttaacagattttcttcaaattttgcatatcgatagagaaaaaaattcttcatttttctatgctgatttattaattgtctatgctcaagttcaaaacttgcaagtttagaacacccatatattttttctaactcaccaaactgttcaacatttgcttagaaaaagcttctcctcatcaagagcttttgaatgataccaagatctttcaatttagttggcaaaaagcttccaaaataatttccgaaaatctattttttaaattttttggacaaaaataaataaaaatattcatgttgcacaacggactcgaaccaccaccaccctttgtccctttactatcttacaaaaaccacttcgccacatatgcatttactttttgaactagtggctcaaaattgactcggtgtgataagtaccaaaaatgggactgatttggaacatggtaacaaaaaatcccatcacattcagaagggtcggccgaggacatcgaattttcttgccaaattctcagtccttgtgccgagtcggttttcactcaacagaatgagtcaccgcaaatcgccgcctctttgcctgccaaatta

SEQ ID NO: 79891 - DNA, 1285 bp, Heterodera glycines
gaaagacaaatttgaaaaagggccattcaccgtagattgatttactcagatgcgaattccattccacccgatcagccacatttcccgatcactgggttttgtccggcagaatgcacacaaaaagtgaacagcgagtgccaaaaaatacactgaaattgctctttttccgctcagtttcccatcgatggcatttacatttttgcttcacaattgcactcccatttgacggggcgaaagttgcacagttcggtgatcagaggagggagcaaagtgacggagatcaaccgggacgaccactactcaccccattggcagcacatccgatcacttcggccttttgtgcatgttcgacggggcgatgtgatcagcaccacttgtgtgtatgagacacgggggatgaaacattggacatgggtgagaacaaaagggaaaagggaagaaaaacagtgatggcacacatactgtaatttgaagggcggatacggtattgaggacgaaatgtgcgtcaactacgttcactattacccggcatcggaagtgaattttgacaaattaatttttatttttctcaacttttcaggtcgaagtttgtaaggtaaaaatggaaataatattattattaaatattttaaaaagatattttaaaatactataaatattttcgcttttttcagtccgccgtttccaatgcgtctctccacgcgttcttcgcgcgactgtgaattttttttttttacaatattttcaaactcaatttttctttctctctcccaaaggggcgtcaaaaataagcagatgaatatccacgagaagtattcggcggttaaatgggtgagaagaataaacaaattggcagtttatcatttaccgttaattggacggaattgggaaaggaattgctgaaaggcctattatatgcgtaattaataaactcaattttgggatatttgtttgtttcttgttgtattccaaccccacttcagacaatggctaagttcgccgcgttgcgcgaattgtacgccgttgcctcgctgaacgtcgcctgtctccaacattcgggcgaccttttccccgtaaaaataatcagtgggggcagacgaggattaattaatttattattgcatttgattaatggtaagataaccaaccgactgtccatttacagggccaccccacaaattggagtcgcgtgccgaggcccgagtacggcacggaatcgtcgacaaacgaagggcaagcgaacggcgacgaatgtttggcactgaacgactgacttttgtccctt

SEQ ID NO: 79892 - DNA, 1197 bp, Heterodera glycines
gcggtagctcttctccaagtgcaggcggttgctcaccgccgttggccattgcactgtacgtctgctccatgtttttgattgtaagtctcgtcacggcggtcaattctcgattttatctacagtatacttttttcagctcatcctcttttacgtggcctttcgttgtgctcgcgggcgcaacaacgagtacattttggccaacaatggacccgtgcgtttggcccgcgctattgcgcctcgaggtggggtagggggggggggaagggattaccctcttaattatagtaattaaaatttgtaatcattttcaagtggcttttcgtcgtcagcaccccgagcctttggcgattgccgtgcgccgtcgcgcgcctgcggtaaaataataagaatgtggggatgtaatttatgaaaataattcttgaaaattacaggcgccctgatgtgtcggacggaaggaaggggcgtgaaaagaatgaatgactaatgaaaattaacattaacaataatataattgatcttttcagattttgatcttttacataattttaatttgggattcttttaattgggtcaataaattgcacatatatattatttattggctgtgcgttccatcaaaacaatccattttagtggcgggatttgtatgtaggtcaagaatttgtgcgggatttgatgggttaatgtgataaacagaatgggtgtatttaacgcaaatggactatcccgagttcatcagtcgcaatttcacttaaataaatttttataaaattaaaaaataattttcacatatccttttgcctaatttaaattaaaaatataatgtcaataaatatacaaaattttcaccccagtttttttaagcctaaattttctcaccttatccattgctgtataaaatgtccaacggtactcaaagcatttcagcggatgcagatggacctgaaatgccggatgagcgccaactctggttggaaatgtttgagagcggtgactatgaagtgaagccgcgctaatttattttttctgaacacatttcatcattccctcagctcctcagctggtttggtcgtgaccgggccaagcaaatcatggaggatctgcgcaagtttgccgaagagacgggccgagaatgcacccatgtgaaaatgttgttggacaagatcaatcgcggaatgattaatgggaagaaagagg

SEQ ID NO: 79893 - DNA, 62 bp, Heterodera glycines
ttcgacgttgtggtcattcgatgtgtgattcccttagggatgatgagtaagtcgccatactc

SEQ ID NO: 79894 - DNA, 535 bp, Heterodera glycines
atgtctggaagtgaaccaatgtctaatgagatcctaaacaagtcagtaataacagttgacagagaagaatggcaaatttttaaaattttatagctaatgttatcgggagaagtgccatttttattcggaagttttttcagaagattttggggctcgatgatgttaaaatttatatccgatataaagcattgatcaatttctataatattacccaagcatggattgcttgggtcggtttcactattattaaatgaattggcaaataaggtggcaaataattcagatttctcagcactattatgatagcatttattttcataaattagattaggtatttcaaagggattgacattgaatttttgtatatatttataaattgaatttcttccctttgaaatagcctttttctcaatttggctatggtatttatttgtttgtatttttatatgtaaagaaatgctatcgtatagtgctgttttggatgggtcagttttagcttgcctgaataatttagccttttctttgatggatgcta

SEQ ID NO: 79895 - DNA, 713 bp, Heterodera glycines
  unsure (1)..(713): unsure at all n locations
aaaaaacttccgaataaaaatggcacttctcccgataacattagctataaaattttaaaaatttgccattcttctctgtcaactgttattactgacttgtttaggatctcattagacattggttcacttccagacatctggaaagaatcaattgtttttccgctttttaaaaagggtgacaaaaataatcccgaaaactataggccaatttcattaacctgctcactatgcagggttatggaaagaattttaagcaaaaatatttacaattttctattaaaaaacaaaaaaatttcggaatttcaatttggttttgttaggaataggtctacaacgagtcaactaataacagttgtggaagattggtacgaggcaataataaatggaaaaaatgttgactgtatttatattgattttcaaaaagcatttgactcagtgccccatgaattatttttatacaaattggaaaaaataggtataaggggcaaacttttgatgtggataaaggactttttgagtaataggacttttcgtgttaaaattggggatgatttatcctccagtaaaaaagttggctctggcgtcccccagggctctgtccttggacctttattatttttgatttatattaacgatcttcctgatgctttgccatcaggagtgaaaataaaatttatatgccgatgatgnttaaattgtatatttgttataaa

SEQ ID NO: 79896 - DNA, 790 bp, Heterodera glycines
atgatgagggccacccgcgtacgcttcgccttcttgtccgtcgtgaggtgagtgtgaacgcacccccccccccccccattttttcatttccttccttttggataatctttggcaattcagcgttcgtttgatcatcgattgccggccaagagttccgggcgagagcgcccaattggaacggtgggggagggggatgggaggggatgacaaacaaaacaaataaataaaatcacaaattttcacaggcttcaacggaatttgtcggtggtagattgtccccaattgaggaggtggcaaattttaaaaatatcaatttataaattaaatttttttatttctaaggcagacgagtccgttgagaattgagaagtgaagagaacaagagaagagaagaggagaagaaaatatgaaaagagaataggagcacaaaggaaaaatttttaaaagaaataatcagggatcattataagtttgtccatttatttaaataatttggtgaaggtcatttaaataaacagttaaatcgaagggttcaaaatttattattgaaattttatcaatattcctcggtccttctctttcaatgttggtatatctcaacatttccagagtttggtcattccctaaaaattaaaattaatcaaacatttaaaaaatagtaaaaattacaatttaaattaccaaataagccaaaaaatgaaaatgaatgcagcagcgatcaacgatcgctgccataaattattgtagaactgcggcttggaattttcataaaaaatcatctaaatagtga

SEQ ID NO: 79897 - DNA, 1174 bp, Heterodera glycines
atgagcattaaccttcgtgacaaaaaatcccttatggaaaatattttgcccgctgtcgacatcagccacaccattaatggaattactgtgagcagcgaacgcattgccgtggcaagaacaattcctttcgacattgtcggcaagtgcaaggagtgcaaggcaaccgaatgcgagacggaatggtgtatctcaaaggagggtgtgacaatttggtgcactcgatttaaaatcagcccccgttttgtgccttttgatgtcatttacgagcttcccggttatacctttttcaaggtattttcaacaatttttcttaccacactacattttttaaatttgtagatccgtaacaagagccgagtttttaacgttgaccatggcagtcgcagcgatgcttgcactcagacgcccacaccgctctaccacttaccgcctccaccacccccaccaaaactcccaaaaagaaaacaggaacagcaacaagcggacgccccggcgttcttttccgctctttcggcagcagtagtatagaaccccaaaagcgcactttcgcatgggtgtttaccgcacaatcccgtgcctatgggaggggtgcagccctttgatgttgccgcacgagcccgtgcctatgggaggggtgcagccctttgatgttgccgcacgaacccatgcctatgggaggggtgcagtcctttgatgttgccgcccgtggacccatgcctatgggagggtgctgccctttgatgttgccgcccgtggacccgtgcctatgggaggggcgcattcctttgatgttgccgcccaaaacccaaacctattggaccactttcaagttgccgcccagaaccaaaatctattggaccactttgaagttgccgcccacccaaatccgatttcccaaaaccgcacgggtgctttttttttgcccaacccatccctcccggccgatgcatcgccgcgcaaattaatcgataatgacaccgccctaccctccccatcgatgtcgccgccgcgcaaaaaaaaaatcgataaaattaatcgataatgacaccgccactctcatccgctccgtcgatgtgcagcgattccgagtcgtgaaaaaatcgataagcaccaaaattgttaatgaaattcaattaattctaagatataggaatattaattgtacaatagttga

SEQ ID NO: 79898 - DNA, 1959 bp, Heterodera glycines
atgacttcaaaacgcaacgggactttgcaaaaaggcggtccgtcgaccaaaaaatgggattttcgagctatagggtaagcaatttttaataatatatttaagagacaagtgtaatcaataatttttcaggaacaattttactgaggaaatggaaaattataaattaattgacgaacggtcgacgatttgcgaaaaatttggattcacgaagaacattacggaatttcggatcaattcggatgtgagacgtcctgacgaagcgatgagggacgcaatcgacacaatgattaaggcggcttttaagactacggaagaaaggatgaagcggaaagtgcggatgtttggtatggcaataacgggtgccgggcttgcttccccggtttgggtaccgtacagggcgtacccgcagaataatgcggatgttattatgcaggagattaataagttggggcagagcggggacggagatgaaaataagaaaacgcttttgttgtcggagcctattatgatgaaaattacttgcgtgacactgcccagtggagaagggccgaggaatgtacataaatttgatttcggatttaaggaacaccaacggataaggtaagttttttgagaaaaaaaaagaaaaaaaaggaaaacagaaaaaaaaagaaaaaattataattatttattaaggatttcgaatgtggataaattttgtttgttttatgctttggtggcgtcaaagctttatttggaagtgcatcggaatatttttaatcgatttatgaatagcatcgtgagacaacgagaggcagcatacggacttttaagaaattgtggaattgatattaacgaatatagctatggagtggagcacttatcgagggttcagaattatttggtgggttctaaaatttgggaaaacgtaaaattaatggatttttaggatgagatttaccccggtaaataccgggttgtggcatttgaaaagtctgcggatccgcggaaatcgatccgtgttttatggaagggccctatgggacgcgaaaatgtagtgccgatatttttggagaatggccattgggatggtctgaagaattatgtctgctttttcaaccgtgggagaaaattctgtattgattgcgagtgcttttacgacaaagatatttaccatactttcgactgccgggcaaggtgttattattgtaacaaagtaggaggagtaccatgccaaaaggagagtggagtgaagattgagtgcccgaagtgttgtcgttacttttacaatttggagtgttataattaccatcaggaacatcagacttgtaaattatggaggctttgcgttatctgtgacaagacttatcgatttaacccgaagaaggaccatgaatgtggagagacttattgccaactttgtagtgtgagccatgaccccaagcggggttgttatattatgccgatcgaggagaaagaggaaaagtccgtctaccgaattgtcgtttgggtaagatttaataaagaaaaagacaaaataaaacctaactttcaggattcggaaacatcgcaggattcgatttataagggggaccagaaagagcatgtgatcaattatatttcggtgagagttacgtgtacggagtgctgtgatgacaaaaataggacgaattgcaaaatatgcggggaggagaggaccaaggattggagcgaggctgaggggcatgagccgacgaaggcatttgtggagtggattttaacggcattttcaaattacgatacgtacatatttgcgcacaatgctgggcgttttgatggtaatgaaaaaaaaaattaatctaaatttttaaatcctaaaatttttaggtcattttgtgtttaactacctctgccgtaccgggaagaacccgataccgcttatcaatggactcaaaatttatgaattcaaagtgcgaaactcgaagaaacattcaatgctga

SEQ ID NO: 79899 - DNA, 1337 bp, Heterodera glycines
actcacggcgaagagaagaacaacaaattcccgctgacattcagcaggaagaaccctttcaaccagccccacagccttctattcctatacatccacaacttaacagaaaacggaaggcacagtatgctttgaatgatgttcaagaatcaaaaaagagtcttattggcttggaagagctaagacctccatcgcttcaacaagaggcatcccttcgtttcaaacaaaaaaggacaaacaaatcccgagtaaccctaccacagcactcgaattcattgtccttggcaaaactgcataatcctccgagggacttactggccgaggcagcctctgcccctttaccggatgatgatgccgatgattttgaactctcacaaaaccacgggagcgcttctcaggtccaacctcccccacctgcacctccgttgcctagtaaagccaaaaagcgaaaaagcaataaagttgatgaagatatcgaacgaaaaagaattagaattggttctcgaaagagggatttactggcagaagcagcctctgcccctttgcctgttgatgatggtggcgatgattttgaacctccacagaaacccggaacgtcagctcaggtccatcctctcccacctggacctccattgccaagtaaaaccaaaaagcggaaaagcaacaaagttgaagaagataccgaaagaaaaagaaccagaattggttcccgaaagagactgtcatcaccaactgttcccaaaaatcaaccaaaacgtcaaaagaattcgggaaccgaaagacaatcagaagaacagcgtcgtcagtttgcggatgatcaactccttttcagcatcccaaattctcagcttaccaatgaacaaaagagaaggcggctccaattcgtatttaaccgaaacccggtcaagtatggcgtacgcgaagacaccattttaaacaacgctggaaatccagtaacggacagcagtgtgacacaagcacttgaatacattattgaacgcagagcggggagagtcccacggtttagacagccgccggggacaaaattgattcgagaccggattaatcgagaccttattctacgaacatggacagccccaccggtaccaccgaggggagccaagcggaaattgccacaaacagaccaagaggaggaattaaaccaaaaatcacaaaaaatcagaggaacagtacagccgagaggcagagcacaggaaggactgatgcttccgtttccaacgagaggagtcaagcggaaaacaacggccccaccagaagcaacaatagaaatacctccgaaaactcaacgcctgagaccacagaaatggaaaaatcaatag

SEQ ID NO: 79900 - DNA, 832 bp, Heterodera glycines
atgaaaattggagcgccaaagaaaaaaattgcaacaaaaaaccatttaaagaaatatttggagaaaaatgggaggaaaaagaaaatgaacagaaaaagagagaaattgttgaaaaattcacacaaaattaaagcgaaaatcaaacaaaaagagagaaaatattcagcaaaagaatggaataaaattgaattgaaaatcggaaaaaaattgggcacaaatcgaaacaaaatttacaaatggatcaaagaattaggattatacaaatgccataacaaatcaaaaacggatgtacaaaaaattgaaattgtgcaaaaatttaatgcaatgaaaaatgaatataagcaaaaaggaagaaaatattcgagaaaagaatggcaccaaaattatgccgaaattgggaagaaaattggagtaaattatggaacaattcaaaaatggaagaaacaatttggaatgaatggaaaaagaataactgaaaaagagaaaatggaaaaaatgaaaatgtattggcaaatgaaaggagaaaatccaaaaatgagtgacgagaaaatttcaaaaatattgaaaattagtcaatggaccattttcaattggaagaaacaatttgagaagaattaaatgaggattaaaatattattgagataaaattgcattttccatttcttagagcctatttttggggatttttaagacatatagcctaaagctacctttcgagttattagtgtctatttcctaagcttttatttttagacctaaaagcctaaagaatttttgaaagaacctatttttgcctattggcgttttgtcgaaatttattaacaaaaatgca

SEQ ID NO: 79901 - DNA, 2149 bp, Heterodera glycines
atgaatagagacagtggagcccaagcaacagtcatcagcttcaaaacgtggatcaaattgggtcaacccaaactctctccaacggacatcgaaacccgcaactgcaatgacatcgcattttcaaccgaaggaaaatttcattgcaccgtcagttgcttcgatcggccatccaaaacactgatcgcttacgtcagcagtgacttaaagcatgatttgtttggccttccgtggattgaggaattcgagctcatcccaagagaaattttgtttccaaagagcaccaaaggaaagccaaacgcgtcaatcaacgccaatgtcgtcaaggcaccaaacccggcgattggcattacggatgaatcctcgctcaccgctgtgttgcaaaaagattttgaggaagtttttaagaacggacttggccattgcgcaatcaaagcgcacctgattctaaaaccggacgcccgacccatcttctgtaaagcacgaccagtcccccatggtgcaatcgaagctgtcgacaccgaactggaccgcctcttgcagattggcgcagtcaaaccggtagaattcagccattgggccgccccgattttggccgtcaaaaagaaaaatggaaagacccgggtgtgcatcgacttttcgaccggattgaacgattcgatcgaactgaatcgccatcctcttccgagacccgacgtcatatatgcagctttaaatggagccgcatttttctcaaacctcgacctgagagacgcctacctccaaatggaattggatgaaaaatcgaaacatctttgcacaataaacacccaccgcggcttatttcagtgccaacgtctcccatttggcgttaaatcggcaccatccattttccagcacttgatggaccaaatctgcgcaggaattccaggggtcttctcttatttggatgattgcctaatcgcctcaaagaccctggaagaccacgtcaatgcgcttcacacgcttttccaacgcatcaaggactttggcctacgaattcaactcgaaaaatgcaaattcctccaaaaagaattactttttctcggccacatcgtttcctccaacggcatacgccccgacccagcgcgctcagaggcaatccagaaaatgcctgcgccgcatgacaaaacgaccctccgttcatttttgggagcgctcaattattacggacgttttgttaaaccaatgcgagaaattagggcgccattggaccaactcctccgaaaggatgaatcctggagttggggagatgaccaacagtccgcgttcgagcaagcaaaggcaattatggtttcagaacttctgctgacccactacgaccccacacttccgatcgtcgtagcggcagacgcgtcaaaagatggcatcggcgccacaatcagccacatttttccggacaaaaaggaaaaagtcatcgagcacgcctcaacagttctgaccaacgcgcagcagaactacagccaaattgagaaagaagctctggcgcttgtgttcgcagtccaaaaattccaccggatgcttttcggacggaaattcacactgctcacggaccacaagccattgctggccatcttcggctccaagaaaggcatccccatttatgccgccagccgactccaaagatgggccctaatcatggccaattacgattttgaaatacggtacatcaacaccgcatcatttggccaggctgacgttctctcgcgcctcatcgccaattatccccgaccagaggaggatattttgatcgccaacatctgcaccgaaaccgagtgctacatcagcaccattctgcaaaccaaaaccgaacaacttcccgtcactgcagacgaaatcgcagaggcgacaccgaaagatgagattttaaagaaaattttggcattcaccaaatcgaattggccaaagaaaagcagcgacccggacatcgcaccgtattttccgaaaagggaaaacattttggaaattgagggctgtttgctcttccaaaaccgcgtcatcgtcccccaatcgtttcgcaaccgaatgctgaagtccctgcacatggcacatcccggaattgtgcgcatgaaagcactcgcccgccaacacgtctattggccgggcatggactcggaaattgaacggattgtcc

SEQ ID NO: 79902 - DNA, 529 bp, Heterodera glycines
gtaacacccagatatgttcaacggcaaaattgtgcaaaggctttggtgaagttccaaagccatttggagaccttcgatttgaaggtttaattggacaggactaaatcctgtcaaggcaattacctttctcccagtatttctgagttggtaatttttgatgtttaatggaagtctcctctctggactttccaataatttttcaaggttatgtgaacggcaattgcagttcactaaacctgatgaatggtcaggtatgcaatcagtgcatgcctgaacaccaagactgcaattgaaatcaattgcttcttgccgacttttacagttaaagtcaattgttaatggctctctggttagagccatgttgctcccgtcataaacaaaatctgagtttaagacgggggcgggcggaaaagttactccaatcggagtaaggctgatgttgttccatttcagtgttcttcctggatagaggaacacctgagttgacttgggtttttcgctcaagggtttcccaggcgaattattgcat

SEQ ID NO: 79903 - DNA, 1911 bp, Heterodera glycines
  unsure (1)..(1911): unsure at all n locations
actgaagaaggcgtacgagtctgatgttatntacggaacaatgcaagactttcatctgcacgaatcttctgacgaaatttatggaacggtcagtgagtaaataaatgaggacttttcgttcttcacacgaattcccccccccctgaaaattttattttcataatgaattcacaaatttttaaattaaaataattagaagttttctgataaagttggaaacgttgcaatggaaatcgaaaaattatgcctatttaaaaaatttaaatttctgcttttagttttctgatttgttttatttaaaaaatattcatttggagaaataataatttttctttctttcgttttgtgtgactgacttggaattacgcattttcattatcaattgacaaagtgtaagccaaataaattcatttagaagtaccaaagtggccgtgaaattgatgatctgatcaacgacgagggcgatttttcaaaagtaacagatattttttgttgggtcgacatcggtgccaaatcaactcacaaatcagggaaatgccacaacaaagagagaccgactaactatctgtctacatttagctgaacaaaattttcgcagaaatcccttaaatttttccggcgccgcctttccataaattcttatttttaaaattaactcaaaaatgtcgtaatatttttatctattttatggagaaaataatttttaaaattaaaatctgaattttagacataaaatcttgaaagtaattcctgaaaattccttaccgaggttttttggtttgcggggccatgagtggagttgggattacgctcggctattttccactttttttcattttctgggcacttaattattgaccgattaatttttgattgtggctattatgttttgtttttcaagaatgacgatgtgacgcacgagcgtgagcttcgtctggcgttcaattcgccgggaatggaaaatctgaacgatcagtttcttttgttgacgaaagttgctctacccttggccttgaaagcattaaaagatgccggaggaatcatcggaaaagatgggccgacaaaggaacaggaggcagctctcaaacagtacctggtcggtttgcgagcgtacgataattgcactaattagaaaaaataccgtattcctgcgaattctcacggcctctttttgggggaatgaaaagtgccgtttggaaacaaaatgatgcacgggattcacgcaccctaacaggcattttacccataaatatcgaactgtcggcattttactgtacctttttgaatttgttaattataaaatgatattgttccgttagtctcaattaaaagtctattttcagacaagctttctccgctggaatgttgagcagtcttccaaagcgaggagcaatcaaacggtaaatgaacataattaagtgctaagcacaatttgtgcttggataattggttccatttgttcacacctcagaaacactgaaattaaaatgagaaattttttttgaatttatttgataaattttaaagggtttttaatggaatgccccttactttggcgccctgcttaatttgcgccaaaatcaaccaattgattaaaaaattaacattggctaaagcagacaaaaacacgcaaaatggcaacgcgcaaatgggacagttccttctgttgggctattcccgtcggaactaattgtccaaaaaccgattcaattttaggaagcagagagtgccaatgcggacgaagaggagggggaggagtcgagtgagatgctgaagccgcagatttccaaacacttggaggaattcatcgaattggaacgcgaaggatgggtcaactcggcactgcaatcgttgagcttaagcgaacaagtgcactacatcaaacaggcggaggaattggacaacagaatg

SEQ ID NO: 79904 - DNA, 1827 bp, Heterodera glycines
atgccatttacattttccctaaattttctcagtgccttcgccggcggcgctccgttcggcgccatgtccgtggctgacctgggcagtctgacccgtctggaggacaaaattcgcctgctgcaagaggacttggagtcggagcgcgagctgcgcaaccgggttggttttttgatggagctccccaatttttgaaatttaaaaaaataaataaatttaattcaaaaatttcctcgtagattgagcgtgaacgtgccgacctcagcgtgcagctgatcgcgctcactgaccgtcttggtaagttgcatttgttggcggggcatggccaccaattgatggcattatgccaacattttgctccatttttcttccagatgatgccgagggcacaaccgaccaacaagtccgtgccaattcaaattttaaaagatataattttgattttttttttaattttagatcgaagccaaccgcaagcgtgaagcggagctgcaaaagttgcgcaaactgttggaagagtcccagttggaggccgaagacgcgctgaacgtgctgcgcaagaagcacaacgtaaagcatttaggggcattaagctgagagaaatttgatgtgccattttgggtgaaaatcggagactaattaaccttcattaatatacatttcgttttgttcgcttttcaggatgcttgccttgactacaacgagcaaattgagggattgcaaaagaaaaatgcgaagtaacaataattaattataggtgtaaaaatttattggatttaaagcggcttacttttttgtgacttcttttgcctaattatagcataatttttgccgatttgtacagccctcctccgatgccgaaattaaaatcgcaaaattttacagcaatttgaaatttataccaagacggaaacaactcaaattgggacaattttgaatgattagatatccagatcaacagtgacctgtttgatcgctgttgatcacattcaatgaacccaattctctgatcactttcaggattgatcgcgagcgtcagcgcctgcagcacgaagtgatcgaactgaccgccaccattgatcaggtgcagaaggaaaagcatgcagcggaaaaggctgcagaacgcttcgaggcccaggccattgacttggccaacaagtgaaattttatgaattagaaaaaaatttggaaaaatttcaagggtggaggacttgaacaaacatgtcaacgacttggcccaacaacgccaacgtctccaagcggaaaacaatggtaaaaagttatggatatcattaatttatgatgcaattaggcatgaatatttatatcaatttcagtttaaaatttcatgccaattaatttttgtggcaccttttttgttaggcaattaaatttttcatttttccatgccaatttccacatttcaaattttgcgtgtcagttgtttttatgtaaattcaaatggcatctatttatattgcaaaattagtaaatttaattatttttggtaattagtttctttgtaattaattaattacccatgcatgactaatttggcatttatatattatagacctgctcaaggaagtacatgaccaaaaggtgcagctggacaacctgcagcacgtcaagtaccagctagcccaacagctggaggaggcgcgccgccgcctggaggatgcggagcgcgagcgctcgcaaatgcaggcacaactgcaccaagtgcagttggagcttgacgcggtgcgcaccgcgttggacgaggaatccgctgcgcgtgcggtgagcaattttatttttgttttattttggccaatcagactgatgaaa

SEQ ID NO: 79905 - DNA, 727 bp, Heterodera glycines
gaagcggagcacaaactgtcgctggcgaacaccgaaatttcacaatggaagagcaaatttgacgctgaagtggcactgcaccacgaggaggtggaggacttgcgcaagaagatgatgcagaagcaggccgagtatgaagagcaaatcgaaattgtacgttggacaaacggtggcacaattagaggggggagaggggctttaataatttggatggacattagggtggtaattagggcccgaggcacaactcgggccgcgcacttgtagattatctaagtcatgatgattggcacatttttacgactgaaatagactttttttggcgtcggaaactgataaaaatttccccgaaaattttcagatgctgcaaaagatttcgcagctggagaaggccaagtcgcgcttgcagtccgaggtcgaagtgctcattgtggacctggagaaggcgcagaacaccatcgccatactggagagggccaaggtcgaaaaaagggaaaccgacactaattatgcctaaatggagaaaataggcattccatcgggactaattaggccatcaatggagaaaatttaggtattcagtcgatattaattcgtcttgactgagggctaattaggtcgcaaaatcatgagaatctcagctatgctaaccatggtccgaatcgagggactcacgcgactaatttatgccagaaataaaccgggagtgaatctagcgactaattag

SEQ ID NO: 79906 - DNA, 1752 bp, Heterodera glycines
atggattctcaaaaaagtccgaaagtaaacggaaaaaatttgatgggaacggaaattaaggattttttgggaaaattcgacggaattgtggcacaattgagggcaattgtttttcaagggaccgaggaggtaatggagacggacaacatcgactttgccttgacctgggatatgcagtgcggcggactcggaccggagcatcgaaattgtgtccaattgacaaccgctgatttggacccagttttggagagggccggattcggactcaaggtggccgaaagcagactgaagccacaaaatgcaaaattcgggcttaaggtcgtcggaactccgttgaaggctttgttggccacttttctgttaaaaaccaacgccatttcttcatctgcagccggcagaaagttggcacaatcagtgattggagcaccagtcgggtttgaactgatcactttcatcggaagccgcgaagaccaaatcaaaagtggccgaattccggtggaagaagatttggaggccatcctcgagaaatggaccgaatgctgtgcagttacacggacgaaattggcaaaatgtggatttggcgccatcaatgtgccgattccgcgctcaattgaagacctcccagaaggagaaggaaaaccgtggaccgaactgctcggaaaagccggatttgtgctggagaaagtgaaggccacgtcggtgctgcgcaaacaccaattcgttacgtcgccacgcataattattggagactcaagcgcaaagcaattggaggacttgtggccgacttctcagtttattggcgccacccaaggaagtgttggagatgtaattcgggcatttgacgcagtggccctgtcgtccaaagtcaaagtgggcgtgattataatcgggcgtgacgctctgatcagaaacgaaacggccgacaacgtcatggagaagattggaagactcatccaattgtgcgcccaattccaacatgttcagtttttttggctgcctccgccgttcatccgcgatcaacaaattgaacacgacatgctgatcgaccgaatgaaggaccatttcgcgctgatcaggggaaacattcgctatgtgtcgacaacaccgtcaggccgatcgcttctcgaaatttggcgctatgggaacggctacaacaccgaacatgtttctgccgaaggaacgatgaaggagaagggactgtacatgctcaaggcatggttgatgacacaagtcaacgatttcccgggtgatcgagaattggggatcgagaagaaaagggcggagagcgaagagaagggaagagggaaaacggaagggaaaaacgtgagaacgggagaatcagaccgacaacccagtcaccgccccattcgatcgccatttcgtcacaccggccatgcttttcatcgttcgaatcgtacgccgactcatcacccgtatgcgaatcccgtcgaccgacaccagccccagccttttcggatgccgaatcagcaaggcccgagccgccgacagttccagcgctgaggacatcgcttgtcggagggcgaggatgtcgtaattaataatgacctcattttatttttgattttatgatatttttggcattttgttttaatgtttgtgatttcgtttttgttttcgttttttgtcctcagactttaatttggaattgcctgacataaaataataaggctttattctgtgtgctttaattgtgtgcaagtgctgaactgttcgacgtgctgctgagtaaaa

SEQ ID NO: 79907 - DNA, 2105 bp, Heterodera glycines
atgccaaccctcttaaaaggtccgtttttaaaggaattcccaaacggacgtgtcgaacttgtgccatgggaacaattttcgatgggccaatatttgcatgtgcttgttgcatcgctgcgaaagtatgcggcgctgtacaagcagaagcagtgagtttacttgttttaagggttaaacaccgaaaaaatgcgaggggataatcattttaaaaagagggttctgtttacaataattcatttatcttggtaaaaattatttttttacggaattgttatatgtcaaatgtgtaaatttcatcttgtaaaaacaaaattacgtgtttattcttttcttgtctcaaaaactacctttttatccttgtagagatttttacaattgaaaaatttttggcaaaatcaaagaggaattgaatcttttagcgcttttttcaaaattttatgatccattctaaattttcaaaaaatttgcaaaaattaactcaataaattttaataaattttttcttcgtattttttaaaagatatttataatatttttttttcttgaaaaatatctagaaaacaattttcctggtcggaaacggtatgggggggagggcgaactgctcccatccatggatgccttgtttacagaatatcaaaaaaaatgacaaaaaatttcccttctctccacagatgctatgtgatcattcaaaatgtcgctgaacacagcggcagtgcggaagaggacacggaacggatcaccagcattgtgtacagcgtcgtgtcctccgatgggtttcgacagcgatgcaatcaaatcaaagtagtaataatacgcattttttagggaatttgtcacgactcgatcccaaattttcagcagaaactcgacctgttgaagaactccgccgtggccaccaacgcggccgggcagccgattgtggtggcgagcggccatttgccgctgcgaattgagcgtttgccgcgacgcggcaccggcagcagtgcgtcgcgtagcgcaacaacggtgacgacggcacgaggcgagggccaacagcaacagacgacgacaatgacaacgggagcagataaacagtggggcgaaggcaaaacggcggacggtgccaccgggggtgaacaaagtcggcactttggcaatttttggggagacaattagtttgggttaggaaaatacattgaattgtatttccagaagaatatgactggtcaaatgcaatgggatcgtcgcgtcccgcacttatccgtgttcgcttccgtaatcgtgaggccgcaattgcattctgtcagctgttcagggtgggcagggcgtttttctcttttgtttcgtcttttcctttttccccctcttctctacttctcttttattttctctcctccgtttcctttcctcttatcgcttcctttcacccgccctcttcctgtcttatcattctcttcccctctctcttactctttcttcttttccctcccctccactctctctcactcattttccccaaattttaggaacggcaaatatttctgcgtcaaaagagacagcagcaaccaaaggggcaggacgatgagggcattgtgagacagcacgggacgggcattgattgtggggaccgtgaaacggatgcagggaacgaagaagaaaaagaggagggggacggacagcagacggactcctactcggacttgtccgacttggacgtgttcagcagctgcgatgaggacaccaacggtggccatgagaagacaccgccagtgacgagggaggaaacggcgaccaaagaacacggaaagaaggagggcggagagacgaagacggaaacggaagaaagtgttggtgaagagggacagcagcaaaagacggagagcaaagcgaaggcgacggaggagggagacaccaacaacaacaccaaagccagcaacagcggcatgaagcggaagaagatgcagtcgtcggcttcgcagcgtcaccgtcatggccactgcagcgaacgccgccagaaacacaagcagcacctgttggactcgctcatctgcggtgcgtttgcccaccgggacctgacgccgccggagttggcacttggctacgcactccgtcagcactgccgg

SEQ ID NO: 79908 - DNA, 837 bp, Heterodera glycines
atgtccaattctaaggacaagtaaaaattttatcaaacgaaattaaaaacgtgtcaattttattcaaaacgatttgtattgaaaaattcggttgaacttttataggttttcagattttatgacaaaaaaaaaaaaataaaaaattttaccttatatatttttatatataaaaaaaaaaaataagaatgactgaattataaaatgaaaagtaacattactgttaggcatatttaaaagttatcattttccggcaaacccattttgaataattttaattgattttataatttttattttaagaaagtaaatacaatttgagaaaaaaaaattaaataaaaaattaattgttagtgggaaagacatgcgggccatcgacgagtctgctccgtcaatgtccttgtccacggacgcgtccacaccctcacacagcgcaacatatcaaatcaatttgtttttaatttaaaaaaaacaaagaatttttgaatgtttttaaattttgggtcttcttttttattttcgaattaattttcattttttccatttttctttttctgttattcttttaaagctaatgccaaattttgttttttcatttttgaactgtccaataactcatcccgattttcttacaaattaaggttgacgttctggcaatttttatacaatagacccacaaaaatataaaaatttatttttagcttgtttcgtaaaaactgtcattttagctatttttcgacaaaaagatagcatataactatctttaaaagcaacaaattttgcattcttggtaatattttcgatagctcagattttctctattatcctgcaaaatttcaa

SEQ ID NO: 79909 - DNA, 407 bp, Heterodera glycines
  unsure (1)..(407): unsure at all n locations
atgaatttgaacaaacaagaanaatattcaactgaagaatggaaacaaaattatgcgaaaatttgtaagaaaattggaatttgctatggcacaatttgcagatggaagaaacaatttggaattcgctgtaaaataacggaggatgaaaaaatggaaaaaatgaaaatttattggcaaataaaaaaagaaaatccgaaaatgagtgacaaagaaattggaaaaacattgaaaattagtcgaagtagcatttttaattcgaaaaatcaattagaaaaagaaagaacggaagaatgaaaggaagaaatttactttttcgcatttttcgatttaattttctgttctttccttagcccatctcgaattgtatagtcaatattaaaaagtagggacactttgcttcaaataaa

SEQ ID NO: 79910 - DNA, 485 bp, Heterodera glycines
atgcaaattggttacgtcattagccgaaagggaatgatgtacgacgtccacttccaagatggatatacgggacggtaccatgcaacaatttggaggagtattcaccggccaagtatgaaggacctggatttgtggactccgaatcgcaaatggaagcgatcgccacgcgaactccaatggcaaacgttgaatgccgaagaagaatggacgtgtcggacagacgtgtcgagaaaaagaatggacgtgtcagatgaaaaagatcctttttaagggtgagatgttagggatgggactcaaatggccgccccaattatttatttgtttatgtccctcgcctctgtactctctctcgactttcctccccataaatagtccgccctttgacccattctttcacttgtatcttcacttcatttatttgttgcatcatccccaatcgatattccccattgcttcatttgttatttaattttgtcttcaataaa

SEQ ID NO: 79911 - DNA, 1445 bp, Heterodera glycines
atgattttggcgaattacgactttgaaattcgctacgtcaacaccacatcatttggccaagccgacgttttgtcccggctcattgctaattatccgcgtccagaggaagacatcctgatagcaaacatctgtgctgatacagattgcttcataaattctgttttcgaaaacagaatcgatcaaatcccagtgacaaccaccgaaatttcttcagccatggccaatgatcaaccactccaaatggttcttcaatttttaagaaacggatggccaaccaaagtcaccgaatctgaaatcagtccatattttccaaaaagggacaaaatttttgaagtggacaattgcctactgtatgaggaccgtgtgatcgtcccaacttcgcttcgcagtcgcatccttaaggcattgcacatcgctcacccaggcattgtgcgcatgaaagcacttgctcgacgtcacgtgtattggccaggaatggactcggcgattgaaaaagttggagcacgtgcgaagagtgccaactgggccagaaaaacccgaccaaagcgcttctttcgccatggccaacgacggacaaagtgtttcagcgagtccacatcgattttgctggcccctgctcagacggtcaccaatatttgattttgatcgactcattttcaaagtgcccagaagtctatcgtatgaatacaatttctgcctatgccacaatatttgtgctccgatcaatcatttttcggctcggaatcccagaagaaattgtttccgacaatgggacccaatttcgatccgccgaattcgccacattttgtaaagaatttggtattaagcacatcttcacaccgccatttcacccacaatcgaatggccaagtcgagcgcttcgttgacaccttcaagcgttcgatgaagaaaatgtcaaaaagcgaaaaggattggatcgaaaagatgctattctcctacagaaccactccacacgtcgccttgaatggcttttcaccggaccaattatttttcggcaggaaattgcgcaccaaactgacgctcatccatccaaaaggggaaaaagccgaaaattttgatcaaaaatcattcaaaaagggacagtcaaaatacaccgacaaaatggctcaaaattttgatcggaagcatggatcaaaactgatcaatttccttccaaatgatcatgttcttctgatcaattatcggaacaacaagacggaatggctccaagggaaaattgttgagaggctccataaatcgcccacatatcgtgtttatgtgcctgttctgcgtcgcgttgttcatcggcacgcaaatcagctaaggcgacgacatcttttggaagacgaagccgaaaaagaggcacctcaagtcgaacagccgccgccggttgtcgaaccgcctcgtcagccccaacaaattcagccagccaattccccattgaaa

SEQ ID NO: 79912 - DNA, 316 bp, Heterodera glycines
atgaataaaacagaatggaacagtgaatggaaactacaaaaaatattccgggaaaagcataattatttaaaaacaattaaggaaattgacgaaatccttgacacaattaaggatataaatttggaggtaaaaagaaggctgaaagcgctcaaaccaaattccccttcagaatccgaccaagagaatgaatcaattgatgaagagcaagaaaacgatgatgaagaagccggagaagaagaagatgaagatgaaaaagaatatgatagtgatcaagaggacgaatcacaagaaatgcattcaagtgatcaaacacatc

SEQ ID NO: 79913 - DNA, 3799 bp, Heterodera glycines
atgtgtagaccagattcactgggcattaatgcttgtaattataatgataattttatatgttatttcattaagcctccaaattattcgaatactcacacgttttatccattggattttacaatttatttttaattgttttaaaagaaaaccaaaagtaaatcgaactagaatttcaagaccaaggttaaaaagaccattgatttatttaatcacttccagtttaattttatttaaaataatttttgcttgtgatgaagtgacgaatttagtcgctggaacaaatgactgtgctgtaacccaagaaggaaaaattgaatgttcttatgaccaaacaacccaactctctattacacctgaacacttaacctgcttaaaactcgacaatacaaaaactaacaccactatggaaacactacaaattacaatagaaactttaacaataatttgcaccgaaaaatctgattattttacgagaggttacgaattatcttcgacatcacaaaaaagatgctcaggcgctgggaaatgtaccggccaaacttgtcaatcagtaaaaatgtcagaccggaatcccgaagtgaatgatcacgctaataatcaaccaggttattcatactgtgtaccatcgtgcggaggatggcattgtcaatgtttcctcgcaactgatggatgtctattttacagaacttatgccgaatcagttggtgacgaaattttcgaagttgttaactgtccatcttggaccattcaggcgacaattaaattgtctatcaatccagaattaacctattctgttgacttgaaacccggaattttaacacacattggtgacgagtctaatagttctatatctgtcacactgacttcgacttcaattccaccgacgccgttatttggttcgacatttattatagttcgcgaagaattaaaagcagcaatagttgcgaacgaaaatttactcaaaaatatattacggtgtaaaaacaaagaagaagcgcaaagttttagttgcacttttccaccagaagcatgtcaatgccacggaggtgattccgttgtacattgtgaatgcgaaaaaagtccacttaccgaaatatttgctaggcaagagaaccttttacccattaaaacacagggaagttacgtatacttcgattcccaaattaaagctaaaatacagcaaacaacttctcttcaaatgcaagtcacacttaaaggacataaggttaaagctatttatgataaaaatatttgtaatattgttacaatatcattggaaggatgttattcctgtactagtggtgctaattggactctatcatgcaaaacaaattttggtaccgcattagccaatgtggaatgtccaagtcaaaaggtccaagtgaattgtgataaagaaggaaaagaacaacaaatccaacttgcatataataagcaaattattacagaaaattgtggagttatatgtcccgatggcaagtctgaaattactttaaaagctaatttggaatacatatcacaacaagatactaaaattatccccgctaacaatactaatgaaaaacccattattggaacttccttggaccaagtaactgatataataaattttgtttacactcttattaaaaccaattttttcaccatatttattattatcatattcatacttattctattttttctaattccatgtctactacctattatatatagaattatgtgtgcttgccttcttcgttcgcgtgggagtgtcgcgacagcgcgaaatcccaaaataaagaaaggaaaaaataaaaaacactagaaaacaaaatggggaaaaacaaaacctacataaacaaaaataatttttcatttaatttggaaaaacatattagaaaaaactatcaaaaatataattataaaaaatgggaaaaccttttgaaatgaataacggaaaattgtttgaaaaggaaaagtgcatttcctcaggaatgaaaggaacgaaaattaattgatattaaatggcgaattctgttaaggattgcgttcgtaaacaaattattaataattaattaaatatattaaaggaattggaattgcaaaggaaaaagtggaaaacaaacaattaatgggaaaatggcaaaacccaaacggatataacaaaaacagattttaattaaaaattataaattggagcgtactatggtttcaaaaaagccgtataaaaggggctgggttttcagtgatttcagatcgctcattggttccctccgaagtttccattccttccccgtgccgtgctctgcgccttccctgtgccgtgccctgcgccttccccgtgccgtgcccgtccgcctttcccgtgccgtgccctgcgccttccccgtgccgtgcccgtgcgcctttcccgtgccgtgcccgtgcgcctgccccgtgccctgctccttccccgtgccgtgccctgcgccttccctgtgccgtgccctgcgccttccccttaccattcccctttgtgcccattttatcatgtcggattatatttgttcattaattaattatggtttaattacccaagtttgagggtacaaaataaagtgaatttttggcgcctttggtctttaatttttgtcaactcgctctgaatacgtccgcccagcccattcaaacttttttgccgtcatcagaacgacaaaagtggtgccacgacccgggaccaacagaaattcgtccatttgctcatcaaaacctgaccaaacgtccgtcaaacattcaacctaacaacaaaacacgagtgagctgaaacagttgacaaaatcaaacaaaaataaaccaaatcaatcaaaaaaaacacacgggtcaccaagcccaattaaaccaaacaagcaaaccaataaacaaaaaataaattccaaaatacttcagtgaaacgagtgacccgcgcaagttctcgcccaccagtgagcaaattgaatcaagaagtggcgaacgaagaagtcccacccataaaaagtgatcaaaattaaatcattttctgatcgtaccgatatcccttaagtaactcgctcagttacaccaaccaaatcgccacaaaccgagtcggcaattgactcggcattaacactgtcgagcgagacacaaaaaaaattaattgagctaaaaagggctgaaaaaatagctcagagcaaacaattaaaaaaggcgataaaaacagtaaaatcaactgttcgtgccaaccagacggacgatattattcaaagtgaaaaagcgatagaaaagctaaacgacattcgcgaaaaaacaccggagtgtccaaatttccacgactccgtcgatccagagactgacggaagtttttttcaaaaattgaagagctgggaggttgatcacaaagaaatttgggatcaagcaattcgccacgccaaaaaacttgaacagaaaagaattgacagtgtggaaacgcaaaccaacaacatattggaggcaactacaaaagctgtgaaaggggaagagtttaaccgaactctgatagaaaaattagttcgtctaattcagtcaacaggctactcaacaaaagctggtcaagaccaagcacttatcagcctacgcaaaattgaaaacaatttgaagcaccaaagacgctaccttaccgcccaagaaaggacgacacattatttaaagaagacttttggcttaccaactgaacagaaattaaaatcgaacaacgattccgacactacgacccaatcaactagttctaatctgtgatcaaatttttaaaattgtgataataattgttaattccataatcaataaa

SEQ ID NO: 79914 - DNA, 1017 bp, Heterodera glycines
atgaatagactgtttcaaaactcgttaacaattatatcattattaacattaatttcattatgttcatcttattcatacgaatgtccaaaggaacctaaaatatggaaaacgagatatacaactctatgtatcgaaaacggttttacaatcagacaaaataaaataacaaaagaattttgctataaacaattggtatgcaaagacaaacatattattaaacgacgcccaccttattgtggtgaaaaatgtaaatgtccagagggattcaaattttgtagttttgcatcttacaataaaatcaaaaatgaatcagttgaaaaaattaattaccaaagcattatttcgttcttcaaaccaaatatctgcgcaccaaataaaactgaaaactgcccaatcatgaaaagaaaattatttaattcaattgttctttatgacaattcaattcacatagtgaaaacattaaatttacttttttcccaaattgactcaataaacaattttcgttgttttggggagggcaatctgacgattggtactccaatttactgtcgagaacatgactgttttaaaaataattcattcaaacaaaaatatggaacaaagttttgcttttatgaaccctatgaaaaaatttatcttgtgaaatctgatgaagaattaattcaaatcaaagcatggggaactattgaaaaaatattttacttgccaaataatttaaatcaatcatttattgaaaatagacggaataaaagagaagaaaactcttcaatcaatgaagaagcaaccattgagtgtttaaaaggaggcattattattaaagcaataaatgatatacaagaattacaaatttccattgaaaattatacaattataaaaaagaacccccaaaaagaggaaataatttatttacccccaaaacttacatcctttgaatataaacctatcattaaatttataagtaatccagataaaaccaatgagaaacaaatcacatgtcaatcatctcccgtatcgtga

SEQ ID NO: 79915 - DNA, 257 bp, Heterodera glycines
tgttcaccttttgtcaaatccgtcatcaccgataaaagacgcactttgattctgtcgagcagtcaatttttgcatctcatttatccatttttcctcatcgcccgctgcaattggacaacgcatgagcataaaaccactttcatcttcttcattccttgtgatgacattgtcaaattctccccagtcaattcgttgatcatttcaaatggcaaaacggagcccattgaagaggacggcggaaagtaaacgccaatgac

SEQ ID NO: 79916 - DNA, 2228 bp, Heterodera glycines
atggaggaagaagtgagagccggtgctactgttggtggcgtaatgcttgaaaagaaagttattgaatttctaaaagatgagtgcagcaaaggccaaacagaatcagagccaatggaggaaaagccgattatggggaaaatggtaacagtggaacttgttattttggagacaccaacaactggaatgctggatggtggagctcaaatttctttgatcggtggcaaattcttttatgaattagtgacgagtggaaagttaaacactatgaaaagtggttttaaacgcgtttcaacgcggatttctgatgttaatggtaaagagttagagtgtttcggagtgattactcttccagtctttcgcaaagggtgtagtacgacaaacatttgctttcacatcaccagcgcaccatttgggtatgatttactcattggaacgaatgcgcttcgttcattgggcttttgtctttttgacatcccaaacaaggaaatgatcaattttgaggaaattcacccgaaaaaggaaaagtctgttggaattctttatcaaacgactctcaaaccgttatcaatgaaactggtaacattgtcagttggaaatgaatggaatgacaaagaagtaattgtcacatcgtcgaatgagaaaagtttgcatagatttgagccaaccgttgggaaaatcaccgcagggaaaataaccgttccaattgtgaattcatcaattgaattcgtgcaagttgacgaaaaagaaataattgtcgagttgtttccgacaaatcttttcgcaaaggcggacgattcgcttggctcaccattgttggtgaacaatcttaaattgacaccaaaaatgaatgaaattaagtgccaaagcatggaaattctcgaatgtttgaaaagtcaggcaaaagacatgtctgatcaagagtttttacctctcgggcgattgataagcgaatttgacaacatcttcgcaattcgtgaggaggaattgacacagacggacatggtcgaacatcgcattgacactgaaaatgcgaaaccgattaaagcaaaacatagacctgtcccgtacgcttaccgagaaaaagtcgccacaatgatcaaagattatctcggaagaggtttgatcaggccatcattttcgccctgggcatcacccattgtgatagtcccaaaaagggatggaactctccgcttttgtgttgattatagagggctgaactctgtaacagttaaagatgcatttcctttaccaaacatcgatagcactttgttagcgctcggcggaaaaaagtttttctcggtcatcgatttcatgtcaggatattggcagataagaatggaccctgaatcggttgaaaagacagcatttgtgacggaattcggacttcacgaattcaatgtcttaccgtttggcctctgcaacgcagttgcaactttccaacgcttcatgacgcgtctttttgaaggaatgattaacgattctgtttttgtgtacatcgacgatgttttgatcgcttctgaatcttggagtgaacatttaaagcatcttcgagaagttttcaagcgaattgatgaagcgggtttgaaactgaaaatttccaagtgccgttttgccgttaaagaaattccatttcttggccatatcttaactcgagaaggtgtaaaaatggacatggacaaagtcaaaccagtcattgaacttccaacgccaaccagtaaaaaagaactccattcactccttggattcttaacttactaccggaaatatatttttggttttgggtctttggcagcaccactgtttcgtctcctaaaaaaggacgtgaagtttgaaatcaaggaagttgaattaggcgcaattaaagcactaaaaaagagcattttggaccacgcaatgctttatttcccggatttcaaagcagcagttgacgaccaaaaacggcaatttgtgatgttaactgatgccagtaaaattggtttagcagccatactttgccagccggacgaaaatgggaatttaagacccatttacttcgcgtcccgacaatgtaatcggcacgaggcgcgatactgcccaacagagcttgaggcgttggccatcagatttggcacaaagaaatatgctcaatttatcactatgattccaacaagagtgataacagaccatcgtgcactcgtttcaatgttcaaaagcaaaaacgagactggaaatagtcgtgtggataaatg

SEQ ID NO: 79917 - DNA, 628 bp, Heterodera glycines
atgagaaacccagcggaaaaagaggtaaatgtgaaaatgtgggcggaaaggaaaaaacgcaccaaagggaggggaaaggggggggctaaataaagataaaaatgattgcccaaaaacccatgaaaatacaaaccaataaaatacgaaaacgaagtcaaataaaaataggaatatgaatacgaaaatataaatacgaaataacaaacaaaataaaaattgcaaaaaaaaactcaaaaaacggaatggcctgtttcggtgccaaatcaattaaataaataaatcattaataccatttttgataaaagtgaagacagatttctgagtgtttttggggagattgatcactgatcagtcacaaattttgaattcctttggcccatttcgaatcccgcgccgaattcatacaaaaagtcaaaaaaagcagtgaaagccaacattgttttttcctttctttcagctgttcatctccgaaattgtcgaaaagtatttgaaggaggaaataggcgaagacaaaagcgacggaagttcatcctcttcttcttcatcagagtcagcagaaacatcacgggaaacggaggaggacgagcaaatttggggaggaaaagcacgcactgatcagtcccagtga

SEQ ID NO: 79918 - DNA, 1077 bp, Heterodera glycines
atggcacctcccaatccgtcgttgcaccgcgtccatccgttgagtccaccggcggtgcctccccaccacgggaggcaacaatcgctgctcaacccacaaaaagggcatatgccaacattcagtgcagtgcccaatgaccaaaaggagcagccgaagtaagttcagagtaattagtagacaattagcataagccattagcagggacggataattatggcttttgtttttataattgggtcctttctttcccgaaaaggcgccgccgctcgctccgtctgatggcatttgcgtcggtggcatttgccactgtgtcggtgttggccagtgccatcacattgccaattgtgtacagccatgtgcagagcatccaggcatttatgcagaacgaagtcgacttttgcaaggtgagagaaagcgaatcattcattcattgctaaaataattaattggtcaccgagaaaacttttacgatggcaaacaaagagagaatttatttttataaaaaattagagacaggactgaagaagtctcgagaatagactcgggatgagaccaagaccacgaaaccccaaagttttcatctaatcaaaacctagaaaatcgagcattttaggcatctattatattgccattccttttttagacgcgctcgcgtgatatgtggcgcgaaatgctgcacgtccaggcgattactggtggtttgccgacgtcctccgacaacggcaccgccacgctggctgtgaccgctgcacgggtgaagcgtcaaactgttggcaccacgtcatacgatgcccaactgctagcgggtgcagtagcgggtggcggttcgccgccgggcatcagcggaaacccgcagggcggcagctgctgcagttgccaagtgggcccgccgggccctcccggaaccgccgggcagagacggacggcccgggtcagttagccaaagaccaattaggcccggggcagggggataaaagaattgtgccctatttcagtgccccaggacgtcctggaaacccaggacctccgggaaagagatggcgtgctgttgcccggaccggtgagatgtggagatga

SEQ ID NO: 79919 - DNA, 1387 bp, Heterodera glycines
atgtccaaggactcggttggttgtactcagaaaatcagatccttttcagcttttttggccttgacccccaaactgacgagaaaacagctatcaaaattcagaaaactgataaaaaaaaattaatcttaaaaattcactaaaaattccaaacaaaaaaaggtcgccgccggagaaaaatttggacctttatatgaaaaatcggttccgagacacccccccccccccctccattgtctcaatcgtccgtcgtattgcgctttatctgacaatgagacaccccttgcacattatgatatgtgatatgttccattgtcaccttatttatacgttcctttactttcattaagtgtttttcttttttccttgaacattttatgtatattcgggatttcatgtaatttcttccagaaacgacgtcatgatcgcgacagttcggactacgtggaggaatcgaagcggcgatgcgacgaagcgcggaaacggcaaatcgaccgggaggaccgcgcacggaggcgttctcgggagaagagggagcaggtggagaaggagtacgaatactacttgcaaattgcgtgttcggagtccaaaaaggagtcgcaaaaaaacggcggacagcagcacaatgttggtttttgagggattttaccaattcacactttaatagtgccgaaaatcagaaaaggcctttttaattactatggaaatcgacagctcttaagggctttttctggccaaataaggcgttttaaaagttcaatctccaaaaatcacaaatgcttaaaacgcttttcatgggaccaaatgagttcttatctaatggaaaagtcatttattactaatatttattaacaatattactataattagttgtttttttactattgtaatttttccgattgctctttttcttttcccttttttgtgttcgtttcacttcgttctttttccatccttttttcgttcattccctcctctcccttcactcctcattcttttcggcaaaactctccgcttcttaaatttcacccgatcagtgattttctcttcactcatgcttcgccccctcccctccccttttcctttctctctctctcccacttttccttgggatcgccaactgtcccaaacagttgggtcgtccgtccgtccgcaaagcgttgtgtagcaagaaacgcacgaatcgcttccctccttttattatgggtggaagaaacaattgagcaaaaagagaaacttttccaggcgtttagtcaaggaaaaagcaaaacgaaaagggcaaatcttaaagttttttatgcacaccgcttgcccccctccccccgaaatttttatttttaccgacgactctcaagggtttctcttatccactctctgaatctgatttaca

SEQ ID NO: 79920 - DNA, 1767 bp, Heterodera glycines
atggcaacgacccgaaaaattagttctgaatccaactcaaagaacaaattgttcgcagaaaaaggttcggtaaatcggacaacaaaatcatccaacaaaaaacagcagcccatcgttttgataccgaaacgacgaaagcacaaaaattacatttccaagcggaagggcaacaaaacttcggctgcacttcgccaatgcgtctccgacccgtgcatttacaagagtttcgatcattggcatgaattgtggaaagaacctccggacggatgcgatgggccatgccgaaagacgagcattcggcagcgaaagaagctctccatgccaagtcaggaccagcttttctccaaccgaatccaacaattggacgcggctgccgcgaaacttcttgccgttgccaatgcgtcgattgacgaggaggagaaaaagatgatgaccgtttcagcatcagaacaactcgatgtgatgggcgtagtttcttcaacggcaatgaaaacaggacaacttgatcgaaatccaacgaggaatggcgccagggaagaagctgaattcgtttctgagataaatgctggaaacagccgacggaactccaaaaaactgaacattcagccatcacttgatatcactacaccgtcaacatcaaaacaactcgaaaaacaacaaacaaaagctccagtaaggaaaatctctggaaggaggcgcagaattgaggaattgtcgagaataaaagaggaattgagaaatgcaaaactaccatcttttgatgacatttcgaggcgtcactctcgacttcaaaaaaaggaggacattgaaaacgcacaagcgaaaagcacagtcgacgcagtttctgccgcctttcaatccacacaacaagatgccaatgccaagaaacgatccgtcggcgcttttccagcctctttgttggataacaatagagaaaaacaaaagcacaaaaaagccacagtgatggggaagccgccagcatcaccttcaatgcttgcgcgtcatgagctgaacaggttggccgagtattcgggtcaatcggctggacaatctgcggcaaagtctcccgggatcaacaacaacaataacaacattaattctgtcatctcgccttgctctccttctcttaacaattgttcgtacatgcgtctgcggaatgctccgccaacttccgctgttcgtccgccgtcaaaattacctcttgtggcagtttccattgaccaggatttcgacaatccaatgtttggatttgacacggatattcgagtccctcaagagcatcaggctgaaacatcaacaaccgaaacctttgatctgcttgcttctgccgttgatactgatgccaatgaccaatgttccgccgagagttgcaatagcaacactcacaattccgctcatcaacaacgggccaaaaacatcactccattggagttccaggcaacaattgaactcaacaattctccacaaaatattgctgacgcagaagacgaggagagagaagacgaacattacggaacaccagcggatgaaacaactgaggctcgggttcccgtgttgagagtgtcaaggcacggagttggacgtactgagcagagtgatttggatggcaggcatcaaatgccatgccatccgcccgtccctccgcccccttacccgggcagacccaaacccgtaaacccagcaaccgcttcgctaattgcctccctccaacttccgccatcagtttgtgccaaagtaacaaaatcattgccggtgtggatcagtgga

SEQ ID NO: 79921 - DNA, 466 bp, Heterodera glycines
atgattttattattaaaaccgcttattgttcaaccaatgttcggtatcattcgttttttattcgtacctctcgcctctataggtgtttgcctaaagaggcgaggttacttaattccattgactttgctaaacttcttgacacctatgatgttgattctttacttttgaaaccacctcatctcattcagtgaccaaatttatttatattgttatttatgtcggtgtcacgcttttgcgtataaattgattgattgaaattgttcggaggtgtgccaataatccgcttaaaatatttctaatttttattacattttttcagaccccaacgcattgtttgcccaacggcggctcatcagtgttgttggcacccaaactgatgagcacatttcagcacgaaaatggcgggattagcattcgggacacttatgagggcgatttggtctgacaacggacagaaagaaataaa

SEQ ID NO: 79922 - DNA, 1639 bp, Heterodera glycines
atatgagttggcggttttaagaaacggccttggcggttttaggaaacgccctggcggttttaagaaacgcgcaaagtggcggtttttagaaacgccctggcggttttaagaaatgccctggcggtttaagaaaacgcccaaagtggcggttctaagaaacgccctggcgttttaagaaacgccctggcggttttaagaaacgccctggcggttttaagaaacgccctggcggttttaagaaacgccctggcggttttaagaaacgcccaatgtggcggtttttaagaaacgtcccagcaccatctataatttaaatcactttgataattttataactattttttaataaaaagtatttaaaaatgagacttatgtattcgttgttattcaaaaaagtaacttacagttgagcttttcatttcatatctttataactcacctgaatgatttctttatttatattataaaattaatttataataaaattatcaataaaattgatgtagaaactttaaaagaattaattaaaaatcaaaaaacccttaattggaaaaaatcaattatttatccagtaccgaaaatacccaatccaataaatcctgttgattttcggccaatttcacttttatgctcaatttcaaaaattctagaagaaaatattacccagaaaatcactaattttgttgagacaaataatgtacttccgaattgccaacatggctttaggagaaaacactctgttacaactcaacttttggaagtcattgatgactttagtttagctttggaaaacaaaaaatcaattgatgttatatattttgatctagcaaaggcatttgatactgttccacacgaaagattagtttctaaactcaaaaatgttggtataaatggtactttgctcaaatggcttcaaaattatttacaaaatcgtacattttttgttcgagttggttctgcgttttctgatgaattcccttgcttaagtggtgttcctcagggatcaaatttgggaccacttttgtttttaatttacttcaaatcttcctaatttttgtaaaactgaaaacgttgaaattaagctttttgccgacgatcttaaggcctattctatactatcaaaaaatactatttctccactccattctttcattaataaatttcggaattattgtgaattaaatggcctaaaatcgctcctaacaaatgcttagtttcacatcttgggcctaaaaaccctaatgaatgttacttaataaataatattccaattttgaaaaatgaagaaggtgaaccagttagagaccttggcatttatttttcaaatgacttaaaatgggaaaaacatataggatttattactaaaaaagcaataagaatatcttttgctttactcaagtcacttaaaactaaaagcccaaaaattctcataaatatattcaatgtttattgtcgatccattttggaatttggttctccgatttttaatccatatatgaaaaaagacattgatgctcttgaaaatgttcaaaaaacatttttacgtattgtttttagacgtaataataataaggatgatatacccgggtataacgaactcctccaactctttaaacaagaatccctcttaaaacgcaga

SEQ ID NO: 79923 - DNA, 76 bp, Heterodera glycines
aattactggagttagcatcatagctgtgcttttccttgtctttttgatgccttcgcaaaatctggtgcgcttctga

SEQ ID NO: 79924 - DNA, 87 bp, Heterodera glycines
aattttagacaatgctttggtttcaatgaaaaataaatatgagaaaactaacaacagggatattgagaaaagaaaaagaaaatacaa

SEQ ID NO: 79925 - DNA, 689 bp, Heterodera glycines
caaatacggtaatccaaaacaggcgaatgaaattgactgggtgatcccggcccggttttgtacggatcgttatgacagcaaaaagatccggcatagaattgaagtgcaactgggcgaggagagcaaggaggagcgtcttgaagctggcgaatcgcagaccaaatggccaaatgcatatgtgatcccgtcaaaaggtcggtccaaaaacaaaccgttatctatccaagagtgatcacagtaacaatttcagatgggcacaaagtccgaataatcgacgcgccgggaattggtgacacaaaaggcgtcaacgaagacaaaatcaactttgacaagacgctcaacttcatcagcacattgcctgaacttcacgccgtttgcattctgttgcgtcccaacaccactcgcgcaacgcccgcaatcacatattgcattaagggactgctcacgtacttgcacaaaaatgcaaccaacatactcactatcataaattggcagaatagataacgattaacacctttttagaacattgtttttgtgttcaccaacgcacgcgggtccaattatgacatgggtaagttttaactgtcaacgaatcagtgaatttatatacttggtaatgattttcaggaaagaccgccgaagtattggagaaactattggcccccattgaacgagcgcataatgtttga

SEQ ID NO: 79926 - DNA, 1089 bp, Heterodera glycines
atgtccattaaacaggcagaaaaagtggtcttggaatgcaaaggagaagcggatgagaatcttcatgaggacaaactgaagggacttcgagtcagtccgagcggaaaacaattaaatgaaattatcgagctgattgactgtttaattatgctaattaaaattcaaggaatctctccgtctctaccaagaagagaaggaactcattgacaatgcaactgcggacgattccaatggaccaactgttataacggcggagaatgtgaagaagttcttcgatgagctgtgcgaattgcccttttttggtgcagacattcggcaaatgttcgagacaaagcaaaagtcacggcacgagcatcagaaagagtactccgagaagaagacaaatgttggggtgaagttgagaccaaccaaaagtggaaaaggtgaaacagaaagccatagattaaattaatcccactgattgtgaacattaatccgatccctaattaagtcgtccaaccggagcagtgtttgaacgaagagcagcgaaaactcttgaaggcctacaagaagaaacaaaaggaaatggaacagttggagcgggaaatggagaatgagaatacgctgcaacgtcgtaagtatagtagaaaatggggagaagtacggtaacaaatggcgtaaaaagacccaaaaagaatattccgcttttttgactagcgcgttcagtataaacgttgccagaaatgaagtttctctctatctctatgtgtctatttattgcattaatatttctgtactttcatttagcaactggaaattccgctgcttataaccaaccgtcaacgtcgtcatccagcagttcatttttgcgtaagcaattccaaattatatttttttaagctccataaatttacagagaggattcccagctacaactatttgttcggttcgtcttcctcgcagaatgtgtcgtcgtcatcatatggcacacactcgcgcaacagtttcaatttgtcttcaaatttctcttcttatggtgcttgggaggatgatcgtggtgtgatgccgaagaacaaacaatggcacaacccccgctggggaccgaagtga

SEQ ID NO: 79927 - DNA, 2678 bp, Heterodera glycines
ataacagtcatgaacgctacattgacgaattattaaatgatggtgttagccaactcccaaaaacttgcgtcaaaaaagcgattagcacaaatgaacaaaattctaatgctgttgcttcgtcttctaaatctaaaggtattaaatattcgcttcttaaatgcgcaaatttattttgtcaaatcctgacgtatttattgaactgtgaaacaattaaatattttacggttattaaaattgcacaattatatattagccatttaaccatacaaaaattaatgttttacataaattaatgttttatggagacagaaaacttctgctcaaagtgctgacaagagaactaacccgaactataagtgcttaaatcacttatttaccactttttattgtgtagagaagggattgcacggaattctccgatttccgacataaattggcccctaaattgcaaaaaaaattttacaattttaatataaattctgataacaaaatggacttaatttaaaaaaaaatttttccggtggtgccttgcggcaccgccgaatctcctcacccttatcaatttcattttttaagctgctcggaattccgacttccgacacttttgggctcggaattacgacttcccaaaattttttggtcctcgctataccatctctggtctggaatatagttttggctttttttatcctgtatcaaaaactggttttgaaaaaattcattaaatgaaaatgctcacaaaaatacgttaatttaatgcagttttcctttatgtattttaatgaccattttatccgccagcagacagatgatgaattattttgatttttctttaaaatattattccatcaagcatctttttattcacttaatttaattttattttctgttactatttaagcggtaatttttttttgctgataattcaaaaaaaaaaagtttatttgctctaacttaattttttaaattttttttatccattttcgaaattttgatcactttttactgatcagtttggggatcagagacaaaaaagccgaaaatttacaagagcaaatagactatttatgataaatattgtttaaaagttctttaaacatttacagttcggaatgttctttgtcagaggcaataattaatgttaaattacataaaccataaaaaccgatatttcgaaatagatttttgtattggtaacactaaattacgaaaaaaaattttttgaattataaattttatttgctgcttttaatttaattaatttaattttttataagaaaattaattagtaaccaacaatttcagaacacaaaaacgaggaaaatatttcgataccaaaactaatttttctaaagaccaaagcaaattctataagtcacatgacaatagcaaaaagcatacatgcgcatatgcaaaaaatgagaataaatgaacacgcaaatttgaacactgtgcaaagtgatcaggccatggaagacattgatcaaaacattggaggaactgatcagacaaatgtgtcaatgccaatagatgtgatcaatgaaagtgccaattcactgatcagtctattagttatgccaattgcacacagttctgcagctgatcaagcccatccaccattgtcagaaggtacaaccaataccaatttgacaagcgataaaagtgatcagacaggcccagaaacaccaaacagtcaacggaaacggtcaagacagcgaaagcaaagctcaagcaatatccagcggactgaatttttaggatttgcatcaacagaaacggaaatagcagttatcaaacaaaaagatcaaagaaatgatcaaccaaggaatcaaagaaatgatcaaccgagtgatcaaagaaatgatcaaccgagtgatcaaagaaatgatcaaccgagtgatcaaagaaataatcaaccgcgtgatcaaagaaatgatcaatcgagtgatcaaagaaattatgaattcaatgagcaacaaagttatcagatgcttggactttatgatcatgatgatcaaaatattgaaccaatgtttgttgacacaaatgcaccacaaatgatcgatacaagcgacttcgatcaaattgctcaactggctggtgacgatttgatgttcccccatccgatggaggtgtatgacgagccgaacaatgccgaagaacaatttgtgatgatcccggtcggaaacagcacacaacaaattgtagcagaaagtgttggcaaaacaaaaagcaattcaaaaagtggtcacggaaaaagccctcaaagcgctgatcagaacatgcgcgactatgcttctccatcaattcaactgaagcaaaaagcgggtcggcaaaaaaagccgaaaattgacgagaaaatggaaaaggccaaatcaaaaatgggagtggaaaaagcgccgatcaaaccggcaaagcacaaatcaaaaatgacaatgggaagaccactgatgagaaataaatcaataatgattacggaaagaccaccgatgaaaaacaaatcaatggtgataagtgagagatcaatgatgaaaaacaaatcaatagtgataactgaaaaacaaaatacgaaagcggacaaaggcaaatccataatgatagaggaagaagattcagcgactgattcatcagatgaggtacactaattagttaaatcaaattttattgctctccattaa

SEQ ID NO: 79928 - DNA, 1154 bp, Heterodera glycines
atgccatggaaattgagagaattctttgcattgattttagtccattgcaaccctgccaaaccagaggagctttggaatatgttcaaagactcattgtctgaagattttagcaggaattttagaagagaaatagctaatgctaaagcgtatagagaaattgcacttagtattatgaaggctggaaaaacgcttgccgattttccatcgatggaacagataaatgtagatgatgatgttgaacaagtatttgatctagccgaagaattggatttgggacaaagaaattatactttgatgtatgatgaacagaggaaagtttgtgatgaaattttgcaaagagtatggaatcctgtaaatgaacccgcgttctactttcttagtggaccgggtggaacaggaaagacacatgtgaacaagacaattgtacatatgctgagaggtcagaagaagaaagtttgtacaatggcttttactggcatcgcagcaactttgctgcctgctgggagaacattgcacaatagatttggattaaccttggatatgagtaattcgagtattagtccgagatcaagagtttggcaagaattgaaggaaacagatttgtttatttgtgatgaggcgcctatgataaataagcgcgcaatgagaactttggatgagaaattgaaagagataatgaataatggaattgcatttggtggcaaggttatgctttggacgggagactttcgtcaaacccttccaattcagaaacatgctacgagagctgagatggttagctcaaccataaagagaagcgagtactggaggttggctaaaagatataaattgacgaagaatatgagagctcttgcaacagagcaagaatttgcgagagatttgttagagattggcagtggaaaatggaataatgaaaacgatgagataattttgcccgagaattgtattagcaatggtgatttagcagaagagatttttgcacatgtattgtctctgagaattggaatgaaatggccaaaagtgccattttagcaccgaagaatattgatgttagtgaaatgaataatagagttttagaaatgttgcctggagaagaagttgtttatacgagtatagacttagctcaagatgagaatagacagagagcatattga

SEQ ID NO: 79929 - DNA, 791 bp, Heterodera glycines
atgcgcacgggacagaaactgaggaggaggatggcatttttgttgtttggattgagcattggtgtgccatttttgaactcgcgcgcattgccagcgacagttggcattagaagaattggctacgtcaacaatggcttacaagtattagcagtacgagagtgccatcggggaatttttggagagcctaagtgccaaccaaaatcctaaaaaggataaggattttgtgtgggcaggaaaatctggcatggaatgcaaccgccattattcttgtgtttacagtgcccgtgatgtttgaacggaaacgcttttttggcaatacgtaatgtgaaatcattaattctaatataaatgatgccagaaccaaggcccaaattaatcaaaactattcggtgtaatgactaattagctaataagaaaagcaatgccatttaatcaaaatgaaattataaaaaattgcgaaaatcataggtttatcactaaaatttcataaattaaaatattttccttgtggttattcttgctgactatttatagttttcatatttaatacaatggtttcatttatcatgcttaattacttcaggtgagaatatttaatgatggtaatttctatttcaggtgacattaattggcacgttatgccaaagtgaaaaaattacatttctggccaaaaaaaaaatgtttggttttttaatttgtttaaatagtggaaaaatttaattatgcgaaaagcccaaaatggggcttattaattttaattgaaaaaaagtaaaaaggaattctaaaataaa

SEQ ID NO: 79930 - DNA, 838 bp, Heterodera glycines
atgatcaaggactcctcctcttccgatgcctcgccttgctcatctccctacaattttcgcctcacttccgccttccgtcgcagttggaccattgaaaatttaaagtaatttttaaacatttttttcaaataatttacattttctatatttaaataatgcatttttggctcttaattaacaaaagcattcgcctcaattagtgagctctttatttattaagtgacaaatgaataggcgacaaattacctcttttataaaagcaccaccactttaattgagcatatttttttaaataatagcaaataattttttctggcctttttttttgcttaaaatgttttatatttcaaatgctataaaatttattttgtgagttataataaataaattaattaattaatataattaaaataatccaaaccagcaattaataaatcactttaaagaaatttgaaatttgctttttataaaactttttttaaaaaacaaattttacaggaaattgaccaatcggacttcaccaagcaacaaaaacagtgccaaggcaagcaatggtaaaatgaccgtaccagacaactcaccaacatctacagtaagccgtcgcagcattttgaagagagggagcagcaccgatgaagtggaacaaacagtcaaaacgttggcatcggagggcaagcagctgaggcggcgtcttctgatcaaaaaggtgaaaacttggagcataattgattttttccaattaaataaaatgacgcacaaatcgggccaaaatatttcgggagtgatccttttgaagctttcactgatcagcccgaagcaaaaattagaagcaaaataa

SEQ ID NO: 79931 - DNA, 670 bp, Heterodera glycines
atgaagtgttcactcctctcttacccgttcattggaatttccctcattttggtcgtcggagttgcgtcaagcattggcgcgcctgcggcggcgagtgggcgaaagataaagccgccaataatggagcgcggtgccgtcaacggaggcactaagccaactgaaatgggcaaggaggaggcggaacagtggaaaaaggagcgagaagaagtgaaaaagttgctggcggagcacaacgagaaagtgcagaagaagctgcttaagcaagccaaggcgttggagaaggacgaaaagtatcagcagcggatgaaggagcaaaaagccgcccgggcgcggcttccgaaggagaagcgagtgccggcaatggacattcctgagatcaatgaaaacagcccagaggctgcgtatctgtaccaaggggacattcaactatcgctggaagaagccaaaattttgtttgcccgggacgacgatgttgaagagggacgaccatcgacgagaactcccaatgcttcttctgatgctgttgcctccagcggtcgaaggcggcgcggggcgccaatgaacgctgtcacctttccggacagcaatggcctaatctccagtacccgttcagctttgacgacagcatctgtatgtttttcagtgtggtaataattgtagaaaaaataca

SEQ ID NO: 79932 - DNA, 1627 bp, Heterodera glycines; identical to SEQ ID NO: 2478

SEQ ID NO: 79933 - DNA, 914 bp, Heterodera glycines
atgttcagaatcgcggaaatcttcgcaaaaaattcattgagtgttggaatttctatcaacgtcaggtgagcggaggagggcaacagcaaatgcaagaagtgacatacgcccgacagtggttacatttatggttgcagatggtgatggaaaagtgaggaaattattggaatcatagatgatgggcccgggatttatatttgaaaccttattttaaatttcgaaaaaaattcttacaattagcaaaattccaaaattttgcacccaaagttctcctaaaaatgtaaggcgcaaatgtcgggaacttataattcaaaaaaaatggatgctaatcaacgaatttttttgcttcaaatcacctttcggcacgctttttccaaaaaaacgagcaagagggtcgggaaaaattttgaaactttggatctgatttgcgttaacagatgttcattcataatcttttttttcgatttagtgcaaattttttttttaatgaaaattaggatttttgtaggccggcgttgctgccattcattgcaaacgacgcaccaaattttcctccgtcgcttttacgtcggtggacccatcgcttctcaccgaaaataaaggtacgggaaaaagattttaaatttatagtaaaaattgaaaaatgtgcctttcaaaataaaatttttttttaggaaaagcgtggcaacttttttaagcttttgttcaaaaaattttttcgtttctttttaacaggtcttttacatttcccgctaaacgaaccgcgaaagtctgcgcaaaattcctggccttacacttcgagtgagttggccacgacgtacagacaaatcaatttaaaaaaatacgacaaaaaaatttttttttagggagtgaaaggcgacagttcgaaaaggcgccgttcaaatccagcataa

SEQ ID NO: 79934 - DNA, 173 bp, Heterodera glycines
atgtctatgaaattggcatcaaaaatgggagggtacacagaatacgcattactcccaaaagagtcaggaaaacgagggagggccgttggggctcgggtttgggtttttgcagggttcggttcacttagtcaattggcgatggacttggagaataattatttatttggggacaa

SEQ ID NO: 79935 - DNA, 354 bp, Heterodera glycines
atggcccgtggaactctgtggatgggcgaagtaatcatcttacatccttaattagggtgtcttcgcttcaattagtcactaattaatccttttaatttataatttcctatttaaatcatttcaataaagcaattaaaagggttattagagaataactcgattaattagtatctaattaaccctttaaataaatgtaattttttgttaggatccttatgtgattgtgaccgactatgagctgattcgttcaacatttctactcaattacaatgaacaaacgtcgggacgccatttttttcgcatcgctgaactcgtttctggtataagccattggaatgcataataaatattaaa

SEQ ID NO: 79936 - DNA, 968 bp, Heterodera glycines
atgctaattggtctacgtgaaatgtcggctaaactccgttccgacatcaagcagaatggtccgtgcaacattgatttatgcaaaccaattagtgtgctggtcggctcctccattagcatgcttttgtttggtcacccgctgaaagaggtaaataattaacgattttctgaagcaaatatatacataactcataattgtggtttattaataaatttattaaattaataatatataattaatagagactggctggccattcaaaagattcgatcatattgaaaaacccaaaaaaacttcaattaattcgttatttattaggaagacatggatgattttttgaaagtcaaagcgaaaacgaccttgcttttcttgttgttctcatggtaagattttgaatatttttgaaatataaacaagcaaatgaaattgtaccgtaattagagagatacgatcgctaattacaaaaaagagactatttctcacatttatttaaggtggacgacacaaattgttgcttcatcgccactttggtatggaaatatgaaccaaaaaaatgggaattttctgaattaatttatttttaattatcaatgggttaatagcaataagctaggcttgggacgaacagaaatttttccactgtttttttcaacaaaattaatcaaaattagctatttttgggacaccatttttggcataaattttgcaattttcaggtggcttcgccattttcccaccgttctcaacaacttttaaactgatcgatcaaacactgaccggaccatatgatttaattgacaaagaaattgccaaaattgtgaaacggcgccaatttgagtcgaatttatgtgccgtttcgttggtggacgactttttggatacaattcaaaacagtgaacagcgcaaaaagaatggcacaatgccattggcgcaggacaaacattttcagtaatttttttttaatataa

SEQ ID NO: 79937 - DNA, 892 bp, Heterodera glycines
atgaatgacctatgggcaaattgcctttgtttcgaatggacaattggtcattttcgccctttggtgagtttgttggaggtaatgggaaaagcagcagcagaagaatatggaaattgtaaagtaggtcatcaaatgaatgcctcccatttgtgttgcgcataatttttgtttcgtttggggcgtttcggcaaataattaattaataaaaattctggaaaaattcaaccacctgccaaagttttactttttaaatttcacagaatgacaacaaaaaatggcactctcattgagcgaatggatcggctgttgaccaatggatatttcgcggatgtgcactttttggttgggaaaggggaagaaaaagaggcaaatttagcaaatatttaaatcaaaattaatgtgaattttgactttagcttctgtcggcacataaaattcttttggtgacggcttctgaagtgttcgaaacgatgctttgttcggacgacgccgaaaatgaaaagacaaaaaacagtgccaagaattatagacaaattgaaataaaaaatatttatttattttttgccccttcgcatttgcgtcccgtgccaatcactgacatcgatgccaatgtgttcaaggtgatgctgcgcttcatttatacggcggatttgagcggattgaacggagacaacgcaattccattgttttgcgctggtcagaataaaaccaaaaatataaaatcattttgttttaattagccaagaaatttcacctgtctgagctggccaatgcttgtgccaacttcccaatttccaaattgcacaatgtgtttttggcatttaaccacgcgcgccattttgaagaaaaggtaaaaaattattgtcatcagcagagatgagattttttggaa

SEQ ID NO: 79938 - DNA, 1265 bp, Heterodera glycines
atggcggaaatgggtaagtggtcaaaaaaaatttatgttttgcggtattacagaaaatacgctctaataattttaacatttatcaggtaacaatgccacaaatgcgatgccgccgctggcgggagacgaaaattacgaaacaaaaagtggttagtttctgtaattgaattttgacgattttcataatctttaacattttttcagaaaacagttccaccgtcccgatgccactgccatcgtccgggaacagcagtggttagtaattaactaattttaatatttaaattaccgtattcacaagaaagtgtcgaaatactgttaaatgacgccatttagcatatttggctatttaatagaattaacattgaaatttatttaatcgtttggcctatttttgaccttttttcagtgctggaaattacgaagaatgcggcggtgccgtcacgctcggacaaaaacgacattggtaagtgattagcataattagctaaatattcccaaaattatataaaaaataaaaattgaaattaattaaattgaattactttcctcgaaattaatattattaatatagtgtatttaaattagggcactgaatacaaaaattaattgcgcaaatgaccttttcttaaaattgcgctctattgattgtaatgaaaaatttaagcattttttttgaatattattattaaatcgaaatcagtattttgaaattttcttttcaaattcagtacaacatgccttggaattcagatgtttaaaaaactcattttcatttaaaaaaataaattcgttaaaaatattttctatttttttttctttgtacaacattttctgcgctaaaattttttttattttttctcaaaaactgccatcaaattttttaaatattatttttctaatcgaaattttatcttttatttaacaaaaaattagctctgattaaataagaaacatttttttgttcatatggggctgccagttccgattaaagtcggggcttttttagattaatcattccaaataaattgtccacacaaattatataaaaattattaattaataaaaataaataactaaattacaaataaacaattaaaatgtagagaaatatgtataattcaaatgattgatttgcttaaataaaataaatttataaatgcaaattaatcacttaatgtttaaaaattttccagtccactacaccgtttggccaatcgtcgcagtgatcgtgcttctgatcttttactttttggtgaaaaagg

SEQ ID NO: 79939 - DNA, 1889 bp, Heterodera glycines
atggtaattagcggcgggcggcgcgccgcgttggccgcgccggcgctgcggctgcgagcggacgcgcactaatgccgccattgtacactcgctcatcctcaaacagtgggaaaatagcttttttatatatattttttaaattttctatgaattagaattttgcttttttataattttgtaaaaattgttatttggttataaaaatttaatttattgtaatgatgatattttaatcaggttatagatcaattccaaatttttttggaaaaagacttgcaaaaaatattccctttctatttggcctttttggaatacgcaaaagtctgtccgtccattgggcaatcaaaaatttaaaaatattttgtttttattgaaaagtaatattgtaatttttaatttggttaaacgccttattttttgaattgggctgcagcattaattcgaaaaactgaattttaaacccgaaaccggcatttagggacttcactgtgttctctgcgtgtccggatggattgaggaccgggaggacagcgcatttcggcaccatttggccacctttggatgagcaaggagcgagcagtacacgggagaacaaagtgagtttgatgggtgatcacttaatcaagcagggattcctgtgatgaccagtgggcatccaattggcaccggacaagacaaatgtttagctggtctgatcaatgactgaataacatttttttcatttaatctggcattgataaatttgctatagtctaaactaaatgtgatcgatcgccaactttcccaagcagtacttggaggaattgggccgcagcattgactttttcatcacatctcctttgttttttcctacgccatccaacgttcgctgatggaaacaatgttggccagcctcgtgtccgccatcgcatggcctttggtatgttgaatttcaaaaataaaatattttttttaaatttcctctgtcaggtgctgcttggttcctcctgtgtcattgacaacccgtaaaatatttgcactcgacgtgctcgtcaggtaaatcagcaggaggcgagagtcttgacatcgactcaataaattttctgacatgtcctcccaacatttggcaccaattcttttttaagtaaaattttccgccatttttcggcctaaaattgtgtggaattttgtggcccaagcccaaatcggactcttcggcccggtccctaattaacgcaccagcttaagttgaaggagaatgggtttaggtaaaaatgccgaaaacaaatgtgttgagagaatggcaaagctaacagaaatcaaaatttacgaattaacgccgattaaaaagtgcttgaagaaaattaattatcacactggtgaacaactgatcagtaaccttttgaattagaaaagtgagagatttatttgatcacatttttttgtccaccaaaaatatgaaaattaaaatttttatggaaaaattttatgttccgcaaaatttcgactttaattggggccgcaaatgttctgcaaacatccaatcgattcgtttactaaatacgcttaaaaccattgctaattgtgtcaggtgggtgaacatctcgctgaagtattgctaactcgacagcactgtcgacgtccgattcactctgatcgatttttccgaagtgttcaaatgatcacctctgatcggcttttggcttggcgcccgcgtgttttaccattgtaagtgatcaaaataggaaaacaaagaaaaaaaattgcagagaaatcgatacaaagtgatcagtttccttctttgtctcgagcctaattccaagtctcgaatatcttcaaactttatgttactactaatcattgggtaaaatacaaatgaaatagattttttaaaatattattttaataaa

SEQ ID NO: 79940 - DNA, 2042 bp, Heterodera glycines
atcgtcgtctgtccgttcaccgtttcaccgttcctttctcctttcgcacaatgtcagcgcccctctcgcccaatatttggagctcgccttccccagccccgcccagcacccttttcaatacgaattgtacaccaaaatgatcgcgcagcagcgcatggaccaaatggagagcgaacttagcaaacttttggaaaacgtcggcggacggacggctggggacgcaaatggcaattcgcaaattgcatttactgaatttgtgaaacggtccgcaatagcgtgccaggtgaaatgagaatattttgagggtgatgggcgaattattttcgattgctaattactccgtcccttccccaggcattttttgtcgacccgcggacgtgcgaaaaggccgaggagataatgaccagcgcaggaaaatgcttccgactgcgcggcggggagcagcgcagcgacggattcgggcacggacaacgcatcattctgagactgccgaagaaattgtacaacccgggggtcaaccaaatgctgaatgacggagtggtggtcaaattggcggagcgcgggaaaggcattgaccacgacatgtacagcaaaaggaggaggggggagggtggacaaattgtcgaaaaaggggacacttggacgaaaaagtggacattttgacgaaaaaaggacggaacatttggggaggaaaaacggaaaatggaatgcgaacaaatgaatttagaaggaaaaggaaaagtatgtgttggccttttaaaatctcttctcaggtcgtttgtgccgtcgggtgtccacgcgatttccccctcacggcaacgcgatacgaattcaaaaattacccgccgcacttcaaatgccgcgaagacgaccccagcggcgtttattcgcgcgtttggtgttttgaggtgcgtccgaagggatttcgattctttcggccttttcgtcggtccgactgagtctcgggactgattttgaccttttcggtctaatcagtgccaatttccctttgcccccccttcccttccccatttccaaggactgtttcatgtcccaagcggaaagggactgcaattgttcgttggccgccgcttctcggcccacgacgccgtacatttgcaccaccagccaattcttccgctgcgtctacccaaagctgtaccgaaagggctttgaggagcgaattgcggtcttttataagcaatttatttgcaaatctgaaatatgtttcaatttcctttttattttatttatttttcttttcgaatttgccattctcttccaaattaaagcgttgcaaaagccattgtgggcccccgtgcaattattggcgcttcgacaaaaccgtcacttactgtatttgattattaatttgtgatggctttcatttcattcatttgtctgtcgcttattattttaatttgccaatttcagcgctttttccctccgaacaagcaaaacattttgtcaacgactcctccaaatgggaagagctgcgcaacacaatcattttggacgtttattacatcactttggactacacaatcattagggtccgtccctccgtttgttttctttttccaattacccccccccccccactaattagcatatgctttcaatgacgccgccttcgtttgttgcgcaactcggaggtagtgaaatttaaaatatttttaacgcccttaaatgttaaaagtatgatcaaaatgatcattaggtaagtaaatttctttccctttcgattaggccaaatttcgctttggatcggcggctcaatcatttcgatcatccaattgctcatttatttgtccagcgctttctgtgcctatttgcgacgtggtgccacaaaacgacggaggacgacgacaatgagaagggacggaataattggccatgaaaggggaggaaaggaaaaatgccaaaggaacacagaaaagaggagacggaaggaggagagaaaaagagatggtgagagataagcaaaggaggaggggagagaaaagggggaggatgagagacaaggaagaaaactaaaggag

SEQ ID NO: 79941 - DNA, 3745 bp, Heterodera glycines
atggtccgctcaatgcttcgtccatcgatttttgccttgctgccgctggtgtgcctgctcagcgttttgccgaaacccgggcatggtaagtgaatacagtaacagaaattttcaagtgattttagactcgatattattcggtagctctaggagttctctgtagcctgaaaaaattcgaaaagttttattaagtttgaacaaagttatggccaaaagtacacaagcacaaccaggttttcgaatttgaaacttgacgaaattttttgaaatttgcaggctaatagaacatttatggctatcgaataatagcaagaaaataaaaaataaaatgaatttttgactaacattttttacttagaataaacaataaattttaattaaagctttcttagaaccaacaaaactacgtgatcttgtgttttctaatccatcaaaatttcaaaaaattcgtttagtttcaaaaaagtcatggccaaaaattttttaaaacgtttcatgtgtgtgcttttggccataactttgttcaaacttaaaacgaaatttttgaatttttcaggctaataaagaactcttagagctatcgaatgataccaagaattaaaaatttagttgtttttgagcaaaattatgtgaagttttttgttgaaaattttcatttggtatttattttataacgctctctttgatggatttttttttataacgacaaagcacttttttttcaaattccacattaagcaactaagtgcaaatatctcgttgaatcggaattaatgataagaaaaccgcgagacagggattgcaacaatgaagagaaatgtttcacgcagttctgttcaacgcaaaatggtaagatgaaaataattataattataataataacactaaaaataacaataataataataatataatagagataaataataaatacaataataaccagggcttctttttttatgtaaatacatgttttttcctggattctccatagcctaattagtaggaaaaacactttattttttgtgtttgcgaacaaaaattgcgacttttatttacatattttgagatttttctacatattacatatgtacatatttttatacatatttaggactttttgcatattttcgtacatattttgcattttttgagaatttttaaggaattttttttattaaatgtccccaaaaatatccaaaatttcgcaattttttcaaaaattttgagaattttttgtgaaaatgtgctccaaaaaaataatttttttttttttttgaaatgggatatcaaaaattaattttttaaatactaaaagatgattctaagtcctatttaggtcatttttatgacaatttatgcctatttcaccatttagaaagaattttttcccaaaaaaatcaccatttaaaaaattttatttacatattttaatacatatttctggatttttgtacatatttcatacatattttagtgttttttatacatatattatttaatttcataaattttatgattaaatatttaaaaaaaatgctaaaatatttaagaaataaaattatttctgaaaacaaaaatttatattcaattttttatagaaaaaattttcatttctattttaaatttcaaataattttctccctaaaattaaaaaaaatgtttgagcttctcttttaaatagacccaaaatttttgcggaagtttctaacatttagaaaaatgataacaaattttctataaaaaatcaattaatctagtttcataaaaaaatccgattttttaaattttcaggcttatttttattcaatgcgtggaactgtattggcatggacatgacacaagagcaatgtgacacactgagtgcgaataaggcaaacggagatcgggcccagctcaacatgtcgaaagttgctgtcagtgattggaaatgcaaatgcgctttgggaaatgccggagaggacatggcgaatgcaaattttgagtcgccagaaggtggggcgccaacagggcggagcaggacaaacaaaatgtcgccggtccaaacgttgacggacaaacaataaaaacttattcaaattcttgagaattaaaaaaatttaaactttttttttgttttttgataaaccagcgaataaaatttgctaaatttcagcaaaacgaaaataaaaaatgttttccttgaaatttaaattttgtcgaattaggctaggtaaggaaaaaatttttctattttattttttctgctggcgaagtttttggcatatttaaaaattctttataaatattttgaaaagcaatttaaaaacccttaatttttaaagaaacaacaacaaaaaaaaaagaaaaatttttatttttccacacctgactgatttgactgatccttacgcacgcgcgcctaaaagtgtttttttgcgcaacatcaagggcacaaagcccgtagccagaaaaaaaaaattcgtaggaggggggggggaaccttctaaaaatcgcaaagatcagacttttttgtgtgaaactcttttaattccagaccgaccccttcgctaacaccaaattttaatcaattcctacttccaaacgggttttcaataaaattcaaaaaacctttaaactagcgccgaatttattttaatatattattttttttacacatttttcattttcattttcacatttcagcaaaaatggcatgcaaatatcgcatggaatcggagaatgccgaactcaacgaacagctcaacaacaagctcaataaaaagttcaataacaatgaaaaaattcaatgcatcaaagaaaagggaaaatgcggcgcggtgttctgtaaaacgaaggacggtgaaataaaaaaaaatatatttatttttttaaatattaaaataaaattttgaaaaaaagtaagtcagaaagcacacatttctcccatatttctacaatttgtccttatttttttttacattttatccttatttttcccttaaatattggtatagaaaaaaaaaaaaatttaaaacattaaagattcataaaaatatttgtttaagaaataggaccataatttcaaaaactttaacggctatacctaatttgagacgaccatatatgtgtatttttaagtcaggtaaaaaagaaattaaatttctgattataaatttcgaaatgacacaaaaatccttaaaattcgcgacttttgggggaaccacttccccccccccctccccaactcgagtctctcggtttttgaaaatttcttttttttttatgggggtatagtttttgatctttatacatacgttaattttttttatgcaaacatttccattttccaggtgaacttaagtggaacaaatgggcctgcttctccgctgactattccaaaaaagtgtgtgccaaaaatgaaacaaatgccgtgaatgatgagcgtgacaaatggagcgattccaagttgccgaaagcggatgattggaagtgccggtgccgttttggtggaaacggaaaggacttgaccaataacaaatttgtgccgagaaattcaagtgagttgagggcaaaaataaatgtggacagagttttttcaaggacgcgcggaaagcgttttaaggacgcagaattttctgctgtattaatttcaatgaaaatttttataaatttactaaaaaaaaaaattacattcaccacaattttttagcggccattcgccatggtgacggaatgccaatgatcgttgtgggaatcatcatgg

SEQ ID NO: 79942 - DNA, 60 bp, Heterodera glycines
atgaacatgctgcgagaaaagagcaaaaacatccaattcgaggcattccacgtttttaag

SEQ ID NO: 79943 - DNA, 1195 bp, Heterodera glycines
ccaggtgtttggcaaagactccaattgcattgtgcgcaattggctttcttcgacggtaattgaccatttcaactgcacattgccatatttggacactgtgtgagtttggcaatgcattcaaatgccgtaaatcgaagtccctttgtgttttcacagcagaggaatatcgaccgaactacccacttgcgagccgttgaaaatcgccaaaaagtgagtgcttgaactatgctccgctggactaggctccccaaaaaatcagtgatcgagtcgctcgccccccccctcccatttgatcagtcgatcggtccctcctaacctttgtttttttcccgacctttctatgctgattgctgtcccttccctttcagctacaccgatatcattcagctggtccactcgggttctgtgcacggtccaaaatgtatcccgggctgcaaccggtgggagtacaggtactgtccgatgccctcgcccgccctgtcgtcaattggactttgtccgtgcccctcccttaagtgtttccctccagcagagtccctctctccaggaattcgctaattatgtcagaaaccctttaattaagctaatagttgaatcaattccatttttagacgttcaatttggaggtgtccttctatgacctgcagtacgagcatctcaaagaagtgactcattgggaccattaagggttaattactcaattaattaccctcttttcccacaaggtggttaccatcacagtgcccggctttatgtcccaaattgggggacaggtcagtcagaagtcacaagcattcgtagtgtgaaactcacaattattcggtttttgtgacattatgccaaataagacatcctttccgattaatatcaaaattcacttcagttcggctttttcctcggcttgtcgatcatcacagtgatacaggtgggaaaggaggaggggggggggggggacgaaaagccacacaatctttctcggggcaaggggggaggtaccccaacggtgtcgtctgattggcactgcctctgcaattgctttttccatgcacccctttttagattaccagtttcgcagtttggtccatttttcgtaccgtactttttcttgtcaatcggaggaaattcgattgggttttttcattaaatggaatttcgcttgaaaagcgagcgcaagaaaatgcagccagaagcggac

SEQ ID NO: 79944 - DNA, 234 bp, Heterodera glycines
atgccgacaaaaactacaaacggacgggaagcgcccgtatgtaatttttattatttttaattttattatatatttttttaattcagctttacagtaatgccgaaacaagtgtcgaaatgttgctggcaattaacagatgcatggaattattaagaccagagttggcatttgccatttttagtggtcaaatttttatcaatatttttattagacgattagaataattaattaata

SEQ ID NO: 79945 - DNA, 256 bp, Heterodera glycines
tataaaaataaaagtgattttgggattccagaccaaaggggggtgaccaggatttttgagtgaaaaatttttttaaccaaaaatctttcaaaaacatgtcattagggctattttatgacgctgatcacgaatacgtgatcagattttacttttaacatcgataagacctcagaatccctgtgtgattggggattctgaggcatcattttgagggcggagggggcaggttcggatccggacggtgtaaattattttc

SEQ ID NO: 79946 - DNA, 557 bp, Heterodera glycines
atggccatgttcacaaaacccgttctgtttagtggtgtttatttgtcgtggttttataacccatatgttggctatacggacgattttggagaaattgtaagaaaaattaattatgtaattaataaattttaacaattacagtactccaacacgatagcttctgcacataattacatcgttattattggtctatccagcatttatttgttgtttcctgtaattctttgttggcaaacctacacaatgtcatcaggcggccaccaaacacatcagtcatcttgggcagaaaaaatggcaataaacaaatatattttaatgactataatgaggttttttgtttaagcaaaaatgcaaaatttttgaaaaagctaattatcttttcaatcatttattataaatattcagatttttatccaagtgattatcataagtttgttcaattcaattgcctccgtaatttacatctcaatgcaatttgtcagaatcagcaaaatttacatcatcgttggcacttacgcatgggttttttcgagtggttagcatatttatttttaaaa

SEQ ID NO: 79947 - DNA, 1342 bp, Heterodera glycines
atgccgagactgggaattatcaaaaaacggaaatgcaggttaaaatcaaattgtacggatgtgagggattcaatgcggacaaaattccacttgaacaacggacaagctgatcggcaaccgccggaaccaatgttcccaaaaagttttttgaaaaaagcataccgcaaaaaagtgcacatgcggtgaaatgaggaaactgatgaacagaaacaaaataataatgaaaaaatactacaatcatttttcattgcatattataatttttttgtatccttgaatttaatgaaactttcacgttacgtccttgtaaattattatacccgtccttggaaagtccttaaccctaagttgaggcaaggttaatgaatttaaatttccccatggcgcccaatcggcggcgcccaatcgtaccggcgcccaaacggcggcgcccaatcggcgtcgcccaatcggcggcgcccaactgacccggtccgcggcagtgccgataggcgccgccgggaaaatttttggaattttaaattaaatgaccaaatgttggttgccttttgaagttttgaggggtcggcggtgccgacaggcgctgccgggaaaaatttcaaaatttaaatgtaatttgttaaaaaaatttgtcaaaaatgaccaaaatttgggatttttaacacattttttaagaaattggagttttggggggctgtcggtgccagcaggcgccgccgggaaactttttttggaatttttaatgaatcttgttacaacatatcgccctttttatacttttatcagagacctcaaaattcaggacaaatctgaaaaatcaggacacttgggagccctggctataactgattggtgagggaaaagggaaaaatgaagaaaagaaaaggggcagagggataaatgaatagggatgcgacttttagtgacgaaaaatcccaaaatagtaaaatagtgaaatgccaaaatagtgacaaaaagtccgaaatagtgacgaatagtgacataattttcagccaaaaattgagcaaaaataatttttattcactgattgcagttgcaaatgagtaggactgggatttttaagacaaaaaaaccaaatagttacctaaaaaaatttttaaaattaaatttttttgccaagaaagtaaatttttgagaaaattttttttcattgcataggagtatattttgaaaaattttagcttgattcttaggggtgtattttttgaaatttttttaggtagattcttaagggtgtataaaatgaatgcatcattactaaaaatgaggtgacaaatttaatggatgtaacggaacgaccgctcggcgtagaatgttgaga

SEQ ID NO: 79948 - DNA, 275 bp, Heterodera glycines
atgagaattggattttcgtgtgagaaaaaaaaagaagttcttatcataagtttgttccacacaattaccgccgtaatttatgtctcaatgcaatttgtcagaatcagtaaaatttacatcatcgttggcacttatgcatgggtttttgccaatggtttgtaggatttcttttaaaaaataattgaaaacttatttatttgtttttatttaaacagattcatattctttaaggttgtcatggtgtatttgttgctgaacaaacgaattcgaaatga

SEQ ID NO: 79949 - DNA, 4140 bp, Heterodera glycines
gatggcccagtgaatttataatcgccagcctcccggggtcatttagacagtaatacctatctaaaacaaactgtaaatggtagatatcgccgactgcattcggaggcagcaagtccaattcgatggtcccttgatcttctaacatgccaatccacttcccttccccgatcggaatccaagcgatcactgagggcgtacatcatacagaaattgagggtcggcagtaccatgacaaaggcgaattttggggaaggagttcagcagatttaagaatgaaaaaggacaaataatgtggttggattggcctttggccggtgattaatttccttctgttgagaattatatgttaaatgtttcttaaattctgtccatttttttgtattaatcatcatttcggtctttgttccccacatttcttctcctatttaaatgcttctcacttctcctgttcttcacttcaccatttccattgacttcactgttctgcattggaataaagcgcacttctctaaccgtctactcgctcattattcccccactctttggctggtcccccgtgttttccgcccattcgtctctccgcccgccgcccttcttagccctttcgttgccccctcgtggtcatcccccctcccggtcgttgtccatcccctttgtgcgacaagtggtgccgttagcgattcataatgtcttctgcacgatgccggatggctgcacttatccgtcttcgccagcacatcacctcagccgagaacttgctggatgaagacgatccggatgcccaatcagtcgactccctgagcaggaacgagaccacatcatccgaatcctgtcaaggatggaagtcgaactggatgcatggggtacaatcatgaacacactccaaggcccggcacgagaggcggaggaagcgctatttgccaactttgtgagagacgaccgtcatctgacggattggttagaggatgcgcgagagctgctggctcacatagcagcagagctcgcaaatccacctaaccaagtcatgccagcgggaggacagcagccagcagctgctgtgaaccaagccattgcacaagtgccagccatacctgtggcgatcaatgctgctgctggtgccaatattcagcagccggctgctgcgaatcatgcttatcagccacctccagtaccggtcgccaatgctcttaatatgccaatgccgccggcagctgctcctcatgccactgctcggcttccgcagcttagtcttcccattttttcgggcgaaccgatggaatggccttccttttggcaaagttttgagagtgctgtcgatcgtgccaccctcgagcccgtcgacaaacaattacctccacgggtgcttacgtggtgaggctgctcgcgccgttacagcctaccgtggagaagaaaattacgtccatgccatcgccgcactgaggcgactcttcggggatccacggaaaattgccgaggcactcagtccgaactgatcaatcttcggtcggtgacgatagcgttggatcactgcaacacttctcgagactttggaacgtgtgtgccgccaactttcgaacctcaacatgccggatgacagcccattcatgtaccaaatcatccacagcaaactgccgtccactggaactcgtcaaatggaacgtgcggcaggcatcccatggggtactcctcagctcagagctggactcgccgaagttctcggagtcagagaagaggttgaacggtgtctgcgcggaacaaatgccgacagacaaacacgatttcggcacgaagcaaggccaaatcgacctcagcgaccagaacggcatgaaaatgcgcgagttttttccgttgctcagtcagtcagaaattctgatgacaagcgagttccttcctgtctgttctgccctggccagcattgcgactcggagtgcaacaaagtgacagatgcagagactcgaaaaagatgccttttgcagcagaaccgatgccttatctgcctacggaaaggacatcagctgagagagtgccgatcaatgttagtatgccgcacgtgtaaagaacggcatcattcggcaatctgccctagtgccaaagggacatcttctgctcgtccaaagcaatcaaagcgctcgcccaggaacaaacagactttcggaactgagcgcaactcgaggtcattggtgtcatccgctgttgccaatgatgctgacccaatttctgagccgacaattgtcactacaatcatggcaattgtctctccattcgtccctcatacggcaactgagccttccgaaactgcaagacgatgagctcgaggtgaatcctatcgacactcggcagcccatccagatgaaagcgccacaacacgtgttgtgcgtccaacgagaggacggtggctacgagacgttggttgcccatcgaacggactggatcgtgccatcagtgcgccgtgccacattcctccagggaatgttagtacctgtggacgaggaaccggacattctcgttggaatggcagacttctggaagttttttaacggcgtccaaagagtgtctccgcaactgttcaacgttcaaacttcaatcggttccactgaatctgcgggcgcgatgaaattccgtctcgtccaactgccgatcatccactgtccgtcatgcccgtcaccgtccatgtttctgccaatgaagacaagatgaccaattcagctgtcagtgggactcagagaaacgaatccatctctgatcttgactcgctacggcaattctgggaccttcaaaacattggcatcagagatgaccccctcgaaaatgatgatgagacggcccaacaaatcttcgaccagacaactacgcgcctggccaacggaagatacagcgtgggatggccatggaagaattttccgccggacctgccttcaaattttgccatggcccatcgccgattgtcttcaattctcaaccgtcttcaacattcatccaaaagggcaaaactctctcaacaaatgcatgttcagagggcccgtaattatgccagaactcgctggaattctcatgcgctttcgcctggctgggattgcgctatggcgtgacttggaaaaggccttcaattcactcagcctgctggaacgcgaccgaaaattctgcaaaatgctctgggttaacgacgtccgtaaaccaccgttgccggataacgtggtcatctaccgatggtcaagggtgccatctcagaagcgctgaacaagtacatgagcagcaagactatgttccgcgcctgtcaaatgaacattcgcgaattcatctgtaactcagacgaagtcatgggccgaattccgaaggaagatcaactcgagaaagaagtgcctaaagtgctccgccttcactgggagttgaaaccggacaaactgtacatcgactttccgtccatggacaccgaaagtcgctgcgttacttgtcgaactgttctacaacagctcgcctctgtttttgaccctctcggactagtgtgcccggcacttcacgatgccaaaatgtttttccaatcactttgggaaaccaagctcgactgggatgttcctcttccgactgacatagttcaaaaatggaacacaattgccgcaacttggaaccagcaaaaggtccgtgtcccgcgccgagtcatcccgttggaagcggcctcgcatcagctacatgcctttgtcgacgcaagcaaagatgcctacggagcatgcatctcattcgggcacaacatggggacgcaatcacggcccatctcatttttgccaagagccgaatgaaaccaaagggatcaaatctcacttccgcgcatggagctcatgggaatgctgattggcattcggatgcttcaatttgccgaaaaacagctcggacttgccattcgccacaaattcatttggtgtgactccaaaccagtccttggttaggtgtcatcttctgagcagcaacctcgttttgtggagaatcggctaaaagaaatccgtgccgttgacctcgttcgcttcctctacatatcgacagagcaaaatccagccgatgtcgcctcacgcggatgcactgtgattgaactcacctcccatccactctggtggagcggcccaagttggctcatccatcccgaagatc

SEQ ID NO: 79950 - DNA, 291 bp, Heterodera glycines
atgaatgcgttggaaacgggaattcttggcattattggtgccgtttattgtgactatccattgctgatttatacaaccggagcattgggagcaggtatgtaatttttattatttctaattttattatatatttttttaattcagctttgtggtatgccgaaacaagtgtcgaaatgttgctggcaattaacagatgcatggaattattaagaccagagttggcatttgccatttttagtggtcaaatttttatcaatatttttattagacaattagaataattaattaata

SEQ ID NO: 79951 - DNA, 736 bp, Heterodera glycines
atgaagaccagccgaaagtttttgtgggaccaattcctcagggataaattccctaaaatccagaacattgccgtttattgtgactatccattgctgatttattcaagcggaattttgggaggaggtatgcaatatattttattgtaaaattttttaaaagtttgccatgttcactaagccaattctgttcagtggtgtttatttgtcgtggtttttcaacccatacgttggctatacggacgattttggacaaattgtgcaaattttaattaattttagttaatttttaaaattatagtattacaacaccatggataatgtgaataattgcatcgtcatttttggcctatccacagtttatttgttgttttctgcatttctaagttggaaaatgtacaaaatgacagaaaatcagcaaacatttcagccatcgtggacgcaaaaaatagcaaatatttgctgttaaaaacacattaattttaattttttcattatttatcattaaaatcctaaccctatttataattaaaaaacattaaattcaaataattttaaatgttttaaaataaatattcagacatttctacaagtgattatcataagtttgatacattcaattacagtcataatttacttctcaatgcaatatgtcagaatcagtaaaatttacatcatcgttggcacttacgcatgggtttttagcaatggtttgtttatttatttaagttaaaataaa

SEQ ID NO: 79952 - DNA, 781 bp, Heterodera glycines
atgtttatttgctctgccaatttgttatggttttgcagttgtcatgttcacaaaacccgttctgttcaatgggatttatttgtcgtggttttttaacccatacgttggctatacggacgattttggaataattgtgcaaagattattaatacatatatttaaaaatgaattacagtaccacaatacgatgcataccgtacaagactctgtcgtcatttttggcttgtccacaatttatattgttttttctgcagttctcagttggcaaacctacacaatggcatcaagccatcatacttttcagccatcgtggacacaaaaaatggcaaaaaaaaaattatttaaattttcttaattttccaaaactattttaggaaataaattaattacagttttttaatatcatttattttaaataatattcagacgtttctccaagtgatcgtcataagtttgtttaattcaattgcctgcgtaatttacgtctcaatgcaacttgtaagaatcagtaaaacctacatcatcgttggcacttatgcatggcttttttcgcatggtaagtcaaaaatttaagccatgaatttgacaactttgtaaataaattttgtaggatttttaattgaaattttgctatctttaaattaaatcattagtttcatactgtataaacaaagatatcaaattattttaatttctaatatgtgggttatgtttggaattgaaaaaatttgaggaatttttagtaattttttggtgcttgaaaatgcgtaaattaattaaa

SEQ ID NO: 79953 - DNA, 762 bp, Heterodera glycines
atggacaaggacattatcaattttattgcttgttgcaatttgccgttccaaataatcaaccacaaaactttcaaaaaattgctccgaaatccttcggaaaatttacgcgacgaaagccattaccgaagaaatgttctgcctgaagtttacaaagttgttaaaaacaaaatcaagggagaaattgctgagtttgagaacatttgttgtacctctgacatttggacttcggatacaacaaaggattccttcataaggtttttatttgtttagtaaaatgaaaatattcaaaaatttagcttgactgctgttggtgttagctcaaaattttcacgcaaaaaatttacactcgctattcaaaaatttcatggggcccacacttcggaacgcatcgctgaaattctaaaagctcttctcgaaaattggaatgtaaaagaatgccattgttttgtgaccgattcggcagcaaatttagttaaggttagtttatgaaacatttcatttcaaatacattttttggaggcatttgatttaatgtacattgaacgaatcagctgtgccgcccatgacctcaatttatgtgtaaaggagtgcttttcaaaagaaaaagacgaaatggcacaaattttcgaaaaatgtcgaaaaattgttggaactttaaaacattcggcaaaattgatggatgatttaaaagatgttcaaggcgaacttgggctaccgaaagctaaattgcttcaagttgctaattaccaaatactcatttaa

SEQ ID NO: 79954 - DNA, 7209 bp, Heterodera glycines
atgcaggaaaaatttgataagaaagaggagcaattggagaagaatttggaggaattacagaaaaagttggtcgaaatggatcatcagcagaaagaacaacagaaaagcattgatcagatggaaaaggtgggaaaatgtgaaaaaaggaaaatgaagcaaattgatcagcacattttgaatttgattttcttttttgctaaaatgccgtaaaagatgctacagacgaacgctgatgccgaaaaggagaatgatgacaacatgaaaaatgatcacaatgaaatggagaagaaaaatggacaaaatggagaaaaaattaaacgcggtggggtcaaattataaatcacttacaaaaacacaaaaataaaaaatttttggcactaatattttaatgttttagaaaatagattgctttttgcaaaaagaaaaatctgttaatttcagcagatggcatttcaagaaaagcttgagaaaaatgtcatggcacaaattgatgtgaaagtgcagacgaaggtttactgtcaaatagttaagggaaatgagcaatggttaattactgtacctaccgtaacattattattataattactgtcaaatattaataggatttgttccaatttaagttattactgaaaaggcaattttgattgaatcggtgaattggagggacaacaaaaacaccaaaagagcaaggggagaaggagacaaaaggcgagttgtaattatttatttgagcaaaccgcaaggcaacatgtaattgcacttatagcggaaaacaaagtaatgaatacaatttaaaaaaaaatatgatatggtcaatacagtaaaatacataaaataaaataaaaaagggatgaattaccactcaggacttattttctaaataaaattctctcagaaaatttttaaatttagctaaacttccgatttccatagccgttttgggtagacaattccagggattaattgtacgaataaaaaagttatttcgagatttattactgaatcttttgttttgaatcctaaatgtttttcgttgcgaccttgaagaaaattcgaaatatttttttgggtctaaatgagttaagcccctaattattttgaaagtcatattcatatcagtgagcgaccttcgagtacttaatttctccaatttgcaaatctcaagtcttttttcatatggtattgccttgaggccacattttttgtatacgattcttgtgaaatatttttgaaccttttctattcttttactctgttcttttgaggagatattccaaatttcggatgcgtattcgaggtgaggtcttatatagcttttatatgctaggattaaggtactgatattccttgtttttaatatttttaaaatttgatatgccttgtaataggccgcttttaaaatttttgaaatatgattgttaaatgagagcttttgatcaaccaaaacccccagatcacggacacaatctacgcttaaaattactttctcgccaattttatactcagtctagaattattttttcctaaatataatgctgcgcatttctcatgcgcaatggctatgccattgtctttagaccatttgctaagttagccaacgctaaagagagtaaatcccttttcgcgtcattatcatgcgaaatgtaaattttaacatcatcggcatacaatttaattccgacttcaggcggaatataattagtaaggtcatttataaaaatcaaaaaaagaagaggcccgaggacactgcctttgttccaatttaagttattactgaaaaggcaattttgattgaatcggtgaattggagggacaacaaaaacaccaaaagcagcaaggggagaaggagacaaaaggcgagttgtaattacaaaattttattaagaaaaaacttcataatttcgaccttttcgcaattttcatgtataacttttttggtaattgtctaatcgcgaagtgatacatagaattagattcgaaacatgttaagctttcgaatgataccaacaatcttggatttggatgctaaagaaaaaagttatagcgaaaaacataaaaatttttgaaaatctgcccacagataacacacaagtacccaaaattgttacaccgccagatttttattttattttttatttttcagtttcgtcatttgagtcctaatgactaagaaatttcagttccgtctctaagattggcttatttttcggaattttcatcacaaaaagtcaaattttgccttaaaaagtgtaaataagttcctgtttgattacgcgtatttagccggtttcaaactaaaaatgcaaagttcgaaaaatttgaattttcgaacttttgttcgaattcatgtccggggttcgaaattggtcaaaatagatgccggatcgtgatcagcggccccaaaccctaggaaacatgctttcatgttttttgaaaacaaaaaaatcctttatttgatttgagtcatttatgcattattcgaattgcctttgattgttcagggcaaaacggtgacccaaaaagacaggcacaaactgctgcaggcgaaagttgggaaaacggcaaaaatgagataaaaataaaaactttattatataataaataaaaaaaaagtacaatggcgtcaggctatgtctactacaaatggagaaaattggcgagaagtgatgtcaaaaattgaaaaattaaaaaatttgaaatgacgcgtcccgccgtacattagtgttaaccggacggcaccgtgttttgtgaattgaataattaaatttatttatttaattttatcgatcactgagtttttgtggaacgcccacactgagcttttttgtggaacgacctagcaccggtaaaatctatcccactttaaaagtgctttacatgggacggacaatagaggctgcaacagttggaaaattttgcgcaatttttggcaaatattaaaactaccgtttatttttttttaattttaaaaattagagtcaattttttgttgttgtttgaggctattaaaaaaattctttaaaagaagtcattgacctagaaaaaatggagcagcacaagtttttatcagattttatctagaattgtcattttttaattaaaatatcccaaaatatgtacaaaagccccaatatgtaaataaaaatttttcaaatggttattttttggaaaaaaaaaatcctcgtaaaccgcccacttcggcgccggccttttcggcgccgttgctaacaacttttttcattatcaaccaaattaaatatttttgattcgatagctcttgagattctctattagattgcaaaatttcaaaaaatttagtcagtttacaaaaacgttgtggccaaaaaacctcaaaaattgactttttcttggctttttcggcgccgtgtgccataacttttttatttttgaatcatttattctattttgacatgtgaatatagagcacacatagagctttcaaatgatgccagattggctaaagttatttttaatcaatttatttcttcttctgctgctgatcactgtttttgttgttttgtccgtcactaattgtcagaagaagacggcccatttgtgatgctttgtcccgtttcttctgccggtggaggagaaaaaatttgcaaaaacggcgcattctataacgacatcaataacattcacctcccccaaaatgatcacaattatgccaatgccaatgtgaatcccgaaaacattatcaattttctcactggtttttcccgaaactatgaaatgcgaccttagtttgttctgaaatttgttattttttgttatatttttataaaattttaatttttccgtttgacgcacatccgaccaaactgacaaattactgtagaagatattagccgcaagaaataaaaaaattaaaagttaagaaatttgtccgaatgcgggttcggattcgaaacatggatgttttgcacaaatccgaccaatttcagtcctaaacagctactcacgcgaaaacggccccgaccgattcttagggggtctaagaatctctatttgtaataaattgtttgaaatttgccggaaattccctgagaaatttaatgatttttttaaatcgttaatgggatttggggaacaagctgtgctcctgcaaacccacgccacaacataaattttttgcctatgtgtaatcgaatgaatgcatttttctttcgaaaattgtgtagttttcaggattttgacggggatttacgacatccattagcaatattagcaccggcaaaattaaaaagtgtcaaattgctgctgttcctccctcttttctgcttcattctctcttcctcctctttctccccgtccttcttgcttcgaatttttcctttttcactctctctcttccgtctctcctccttccccaatgctattttcatccttttcctcctcttccctcgtttctccatttttgctaccaacaaatgttggatttggttgacaaagaaaatttctaaccttttacaaatgaaagttgggtaaaaattatccatccaattgattatttgattgattgatttgtgggtggggggataaggtaaaacgcccggcaaatggtaccatcaattgtagcaattttttcatatctttacttaaaatcaatcaaatttttaattccttatatcattcgatagttctagatgttttctatgagtctgtatcgttttggcgccgccgttttggcgccgccgttttggcgccgctgttttggcgacgccgttttggcgacagggtcgttttggcgctgccgttttggcgccaagccaaaattaaaaaattgtgaatccaagatcgatttcaatttttaaaaattacaacttttcataaaaatgtaaataacaataactagggccccgacttttagtgaaaaaactttttttttgctcaattgttttgaagaaaggagctcaaaaaacgcatttccgcgtaaaaaatttttcatttggacgtcatttttcgtcactaaaaatcactattttggcgttttgtcacttaaaatagtgaaaattcacttttttggcactttttcgtcactaaaagtcggggccctaacaataacaaacaaaaagaagacaaataagaaaattcatgggttcatatgataattgcgcgaaacgccacgaagaaattccaaaatgatatgatgattttgatttgggttaatgtggtaattgtgatcgttatcattgttcgggttcacggaatgtaattctacaccaaattgaagaggcgcttgtctgccgcttatttctgcgtctctgattttttggcgccaaaacgaccctgtcgccaaaacggcggcgccaaaacgaccctgtcgccaaaacggcggcgccaaaacggcgtcgccaaaacggcggcgccaaaacgaccgattcccaaaatatgtgccaaaaattgaaaaaaactgctcaaaaaataagttaatttctcaaaaaagtctcattttttatcaatttcgctagcttaatgtaatgctttttggcgtaaattttttttcgctctcaaagatttactcatttttcggaatttcttcgctaaaaatcaaattttgccttaaaagtgaaaaagtcatgaaaatggtcaaaaaaatacaaaaaaagaaaattttgaaaaattattgggcatttatttgaccacgaatttgagtgccaaaagacatttttgtaaaaaaaaactaatttttccaaaaaatcgccaaaatatgtgacaaaaactgccgaaaccccaaaatatgtttttattcccaaaaagcccaaaataaatatgtgctaaaactcgctctgattgaaaggaaaacaggtaaaaatgctatttttgagattttcatgcgatagataaaaaaatatataaaaacatataaatccgttccctgataatatccgtcaagaaataggaaaaccataaaaataaagctttaccaacgcaattaattcttctgctatttgtgtgacatcattcggagctcggccaaattgtgctaattgcctcaaaaatgaaccgacggtaaaaggattttaaaagtcacacaaattcgtcatttatttagctaaactgttttccataatttcagttggatttgcaacgacgtttggatggacattttgcccagttttgaccatgcccaactcggcctcaaattggcacttctttcgccacgtttcaatgcgttggtggacaaacatttcgatggcaaaagcgaattgacaatttggagaaagatcaaaattcatcgcaaggacaaaggacctgaaccgaagctgtctgtacaaatggatgacaaatttgtgccatttccattgcccgaccgtccgctgcccagcaaaatccgttttaagaatcttcagattgagtaattcggaatcagagatttatggcaataaaagcattcatcccatttttaggtacatcgatcactccgtcatcgcttttcttcgttcaaatcaccaaattttcaacaaaagaaacatcaaattattgttgtcgcttccatcaccacacaacacggatggccagccaatttgggatgtttttgttcgcgaaatttggccctttttttcggcaaacattcgccacttgcgctttaacgatggtgatcatttggacaatttgcttcgtcaaatttcgccgacaattctcatcgatcttaaccaattgaattcaatctattcatttggtctgtcgcccgctgcgattgatgctgattttgatgcaacaatttctgctggccaagcattgtccaaatggttgcactctccgagaaaagatggccaacccaagcgattgcattgcgaagatcacaacgaacaaacgaacactgattggatcaacaatttcaaggaggtgtggccataatctcgacaaatcactgttttttgttttcaaattgtttagcattttctccgtgccaatgccatttcttccgtcagttacgaaattcatttttctgttcatgtgccgtcaatacaaatggtgccatttgaattggtgaacgaatcgacaaatgaaaagctgacattggccaaagcaaaagaaaatgaatgggggggcatcggttggataatgaaacgatgcaaaattattggggagacggcggcggttcattgggaagacggaaattgggacaataattgggacaatgtgatcattttgcttgatggtggcactaattgcattgggtga

SEQ ID NO: 79955 - DNA, 933 bp, Heterodera glycines
atggagaaacgagggaagaggaggaaaaggatgaaaatagcattggggaaggaggagagacggaagagagagagtgaaaaaggaaaaattcgaagcaagaaggacggggagaaagaggaggaagagagaatgaagcagaaaagagggaggaacagcagcaatttgacactttttaattttgccggtgctaatattgctaatggatgtcgtaaatccccgtcaaaatcctgaaaactacacaattttcgaaagaaaaatgcattcattcgattacacataggcaaaaaatttatgttgtggcgtgggtttgcaggagcacagcttgttccccaaatcccattaacgatttaaaaaaatcattaaatttctcagggaatttccggcaaatttcaaacaatttattacaaatagagattcttagaccccctaagaatcggtcggggccgttttcgcgtgagtagctgtttaggactgaaattggtcggatttgtgcaaaacatccatgtttcgaatccgaacccgcattcggacaaatttcttaacttttaatttttttatttcttgcggctaatatcttctacagtaatttgtcagtttggtcggatgtgcgtcaaacggaaaaattaaaattttataaaaatataacaaaaaataacaaatttcagaacaaactaaggtcgcatttcatagtttcgggaaaaaccagtgagaaaattgataatgttttcgggattcacattggcattggcataattgtgatcattttgggggaggtgaatgttattgatgtcgttatagaatgcgccgtttttgcaaattttttctcctccaccggcagaagaaacgggacaaagcatcacaaatgggccgtcttcttctgacaattagtgacggacaaaacaacaaaaacagtgatcagcagcagaagaagaa

SEQ ID NO: 79956 - DNA, 404 bp, Heterodera glycines
atgatagtaattagtggtttatttaaattagtctctgccgaaagtctcgtggtgatccccgatattgaagcacaagcattcaaagtgatgctcagcttcatttacgcggaagatctgagcgaattaaacggagacaacgtaatggcagtgcttttcgctggtgaattaaattaattgaattttaatttgttttaaattaaaatatttaagccaataaatacaacatctctttgttggtcaaggcttgtttggactttccgattaatgaactgtctgacgtattcctcgcttataagcaagctcgccttctcaacaaaaaagtattaatgatttttaagtatttaatttattaaaatttcataaatcttttgtatgagagcgctaatagcttttgtttattttaa

SEQ ID NO: 79957 - DNA, 1554 bp, Heterodera glycines
atgagcgaagtggcggatttgagtagagattttaatggcgaagtttttaacaacacgtcgaacagctcgggattcccacactttaccacttttacggtgtgtgacaattaaatgaccagaagcattaattgaccaatcaatttgaaaatattttgctgaatgaacaaaaataatttatttcaaattatctcctttcctctcccgttttaggtcattttttaaaatatttctcgctattttggtagcagggcaaagaaactggatagtctgagctcttataaattatgagattttattttttttttctctcaattttttcttttcatattaaaaagtaattaattgccattaagacaaaaattggagttgcaaatgttcggcggcaatttaccgaattgtgccgcaaatggacggtgtttgggatttcaggaaggaatttaaagaccatgtttttaacggtgaattatatgactggggatttaaaaatttcattaaattttcggtgaggaataattcaattttttgcttaattcttccaattatgaggtaattaaggaattgatggacccgagcaaaggcttttacaacaaaagcgaggacaaagtgacactaactgttgatttcattgtaaaagaagcaaaaatggcggaagacaaatcataaacaattgaacaaaaaaaagatccatcaattgtcatagatcgcattttgcattgtttctaagatttgtccggtactagtccagtttttttaccccattttttgaccacattttttttcaattcttcacacaccatcccagaaatgagctgctgtaccaaaaaagatttgcgtgtgtggctcagtggtttttgtaagatagtaaagggacaaagggtggtggttcgagtccgttgtgcaacatgaatattttcatttatttatgtccaaaatattaaaaaatgacgaattttgggaattatttttgaaggtttttcccaaccaaattggaaaaacttgatatcattcgaaagctctttatgaggagaagctttttctaagcaactgctaagcaattggattgattaggaaaaagatatgagggttcgaaattttgtttctcgaataactttttagttaaccctttttttgcgtttaaaaacccttacattttgtttgtaatttttttctctatcgatatgcaaaatttggagtggatctaacgtatagaaaaaaaaattaaacgtagcgaagtaaattcgatttttctctattatcagagacaaagaaatagtacgccaaaaagagagatgtttttttctctgcactctctatttattggtacacttctcgttttttgggatggtgtgttcaataggccaaaataattgtcatattcgtggtcagcgacctcaaaaacccccgaatatttgttttcataaacttttaatccaaaaatgagttgaaaaaaatgttgactaaaaaatgggatacaaactgactggagtagcatttgtccttaattccgcctttcatcttcatcttttttttaatttgtctgattttgataataaa

SEQ ID NO: 79958 - DNA, 515 bp, Heterodera glycines
atgaaaaagtgagccatttttttataaacaattaattttttgatgaaaattgccccattataggaaagaatttttgggtcctcgggaaacgtttgaagtgtacgaaaagcggaccaattcgccgctgaatgtttcgcgcgtgccatccccgcagggcgtgccggtggcatctccgcccaatccgtacgatcacatgccggtgccaatttcgatgcccgcagaggaagctaagcgaaaaggtcagttaatcaattggaaattgccaattagcttcatcaatcccgaccccttcattcattaatctttcctttcccattgctctacagtacccctaccgttcatcatcggtcttgccgttgccgttcccatcttcgttattctgatgcttttccttgctatttggcttcaagaaatgggcattatttaatcaaagcatattttgtcaccattaaaattaatatttaaatgtttattcgataaaaaatagcgaatgaaatttaaactaaaataataaa

SEQ ID NO: 79959 - DNA, 1031 bp, Heterodera glycines
atgttaaaatggactttaatgtctttttataaaagaactgatgaaggacaaaagtgtccgtccgcacattggaattttggaatggaagaaaagatgcgatgggaagaaaattggatgatttgggcggagatatttaggggggtatgtgagacatcattttatgggtgcgcgtgcataatcaatggaaaacaacagcgaacgaacaagcgaactttcccatttaagagattgaaatttatatatatttaaataaatttaaattaactaattttggatatttttctctaaatgcaagcagattttgaaggataaaaaaagaaagggaattggggacaacaatatccaaaggtaacataaattttaaaagtgcaattagtataaaatgttagaaaatgcttagggcaataaaattaatatttaattattttgcattaattaattattaatgttgttttcaattgtacacattaaaacatggaacggaaagtgatttttggctattgacaacaaaacaaacaccaaatagcaaatacaaaaacaaccaaattcaatggaccattcgaatttaattcattccgaccggttggaaagggtgggagagattaagagattacagcgaaagaaaagggtggcacaacagcgaattggagagaaaaagaaaaacagagaacggaaatagacatagagagagaaaaagagagagagggctaaaggaacgcgcaaaaaaaagagcggaaaatgccgaaccaacggagaaggaatgaacgaaggaaaagagggagcgaatgccgtggcatgacaaagaaatgaacgaacgaacgaacgactaactgaatgtgactgactgttgttgcttgttgctattgccaatttgtgcattcgttacatttttaaattatactttatggcgaaatatttattttaaatgcattaggtaaatttgaatttcgctaacaaatcaaacaatccatccattcggtcggactttttcattaaatgctttaaattttcagaagattttaccaatttag

SEQ ID NO: 79960 - DNA, 111 bp, Heterodera glycines
gaatgtgaaagttcgcattgccgtggccacgtggagaaacagcgaaagccgccgccgtcggacgatggaaatggcggcggtgggcccggcccttcgtccatttcaacctga

SEQ ID NO: 79961 - DNA, 1258 bp, Heterodera glycines
atgtttctcttttattcaggtaactctcgcccttaaaatatttatttagatttgttattaaaattatagatttttaaatattctttttaatttgtgtaatatgtaaattttagttaattgatttattatattttggaatatctccgagtattaaatatgtttttcataaacaaataattaagtcatttatttatatttattatgctattagttaaacctaactttttattaattttattttcatcttttaggttcctaagtcttaaatatttatttatttaaatttacatttaaactttctttctattttttacatttttatttttgttgtccaaaagatgaaaattaatttttattcaatttaattttttcatgcagaataagtcaattctttttttattatatttgttattattaattccttttttcaaatatatgttttttaaatttcttaatcatgtctcatgtattctctctcctgatcaatttctttataaaattaattttgtaattttttatcattttctattataagaatatgtagatattattttcaatttaaattggaattttcttatgatttaatattagcaattttattcaatttcaaaattaatattaataactaacatatatttttttaactgaatgtaattttttaaatgtttattcttagctttactttaattggttaaatatttgttgttttataatttctcttaactttttcatttattccatatatttgccgccttcattgccccctgtattctataagaagattatttttaataatatttttgtatttattttttattattttataaatgttatttttaatttatttgtcttgcattcattataaaattacatttaaacaagtcgctgtgtcctccgacacgagcggcgaatttggtcgatctcgtattaatataaatatttttgtagtacatatttagttttataatctaacgaatatttatttatttattattttttcattttcttgttcataggtgccattattcattaatacgaaatatatgcaatttattgcgttattttgtatttccatttgtgttttttttattaattagtttgaaccaatgaggaaaattttgcataattaagccatataattaattttttatattttagtaattcacttagacattgaacagtttaaccatcaccaattcctttttcaaattgttatttatttatctatcgatatcctttaaacaatatttaaaataaa

SEQ ID NO: 79962 - DNA, 282 bp, Heterodera glycines
  unsure (1)..(282): unsure at all n locations
atgctcaggcatttcctcctgcgccccctgcccatccatcggcgattggcatttgtgccgttttccaccggcatcaacgtcggacacttttctgctcgtgcgactccggcggcacaaaatgcgatgccaactgcgccgatggccaccacggcggcgctggcggcggcggctgacggcgacccgccgaaacagcaaaaacaccaacactttttggcctcgttgcccgaactgaagcagggccaaggngatgcggtcgtcgattttgaggcgttggacaaaaaa

SEQ ID NO: 79963 - DNA, 1139 bp, Heterodera glycines
tctaaagcgctttgagaatcccccggagccaccaagagagcgcatgcctttttattccagtaccgtggcgcgctttgagtgccaaagcgaactggactcagcggccaaaccgagaggaagagaagaaagaggagaccgagaaaggatgagccttggaatgagcggaaagcggatgttcgcaaacacgctcaaatcggcagtcgggacagtggaagatcgtccgtgtattccccctgagggattaaatcgcgaaatgctcaaaagaagaccgactccagcaccagtgccgcagtttacgacacgcagcgcggagaggagccccgtgaggaagacatacgcgccgtttcggaaagggatgccactggaacgcgcagaggaagccatctacaaaatccgcaagtcactgctcgaggccgcggacttcgacggattttcatcttttcctacccccttccccctcacaattttattatttactcattttcaaatattaaataaattagaatttttgctctttatccttttccctagtggccaaaaggggaaaagaaataaggcgaacgtttgaaaaagagggggaaagagagagagaaagagagatagagagagtaaaaagaattaaaaatgaaaaatttaagaattagttgttgtgttaattgcgcgtccatcattcaggcctcgacagcatggaattttggagggtgccgtgcgcaaattttaactgcacttcaaagtgcttcgccataatatggccagaaggaactcaaaaacccagtaattcgaacttttttttgctctgatttttttgtgcataaataaaaatttttgaaaatttgcaggctaatagcatttttcgaatgctttcgaataataccaggaatgtttaatttggatgagaaagaaaaaagttatggtcgaaaaattcgttcgacgacgtttcggctgacgacgttttgtcctactccgcctccggtgtgcctgaactcttcacattggaattgggcttttccgttgctttgcgccgtcttcagtctgctcctttccatcacttgcgtcatggctttccttctgttgcgccgtcgtcgccgcagctcttctcacatttccttttgcagacaatgccatcgcttttccccgaa

SEQ ID NO: 79964 - DNA, 219 bp, Heterodera glycines
cggagtaggacaaaacgtcgtcagccgaaacgtcgtcgaacgaatttttcgaccataacttttttctttctcatccaaattaaacattcctggtattattcgaaagcattcgaaaaatgctattagcctgcaaattttcaaaaatttttatttatgcacaaaaaaatcagagcaaaaaaaagttcgaattactgggtttttgagttccttctggccata

SEQ ID NO: 79965 - DNA, 703 bp, Heterodera glycines
ggaattgtgtgttgtgaaaaataatgacaccacaattctcaaccatcatctttcaacatcagattcatgtttatatcagcacacaaatgcgattgacacattagtacgacttggtaaaatggaaaaatatttaatttaattgactttaatttttaataattattttttaattaaatagctgaacgtaaagaattcaatgggatcagtggaaaatattttgatgctaatggcaaggaaataaagcttggcgccgacacttcggacgtcagggttcaagtaaacgttcttttaaatttaataatggattagtaaaagtaattaaaatataaatattaattaatgaaatatattattgctattcaaggacaaattatggattgaatcatcattaatttgcaatgcaattctcggaagaaaaacggctacagagtcaacaattgaaaattcatttaaatatgccacaatattccaataattataagtagtttctcactgaaaatctttatggcaatttaagcattggaaatattatttttaataatgaaaatttgcaaatattagaggctaccataaaaaaggaatttatgattgagtaattttatttacaataataatatttcaaattgctaaaatttagttgcatttttttctaattattttattaatttattttgaattttaaaattgcaaaacgatctggtaa

SEQ ID NO: 79966 - DNA, 815 bp, Heterodera glycines
atgatggaattggtggatgttgtcactgaccttggcttacaatttggaaatgcttcattaatcgtaaataaattataaaatttatttttaaattttaaatataaattctaaaaaccaatttagaatgatgttaatgtgttgcataaacacatagcaaatggcttagaatttgcaatgatcacggaaattttgaagcaagcaattcaaccaatttggcaagaccagtcaattcaaattgcttttgaaaagcgatcaaattatcaaatccaagacagcgcacaccagtgagaaatttttttaataaaatatttttattgtaatttaatcaagttattattattatttaaaatctgatcaatgaatattaaagcttttttgatcaaattgagaggatagcaacgagggattacagaccaacaaatatggatattttgctgactcgagtgccaacggcagggggtaagtgccggatgcaaacacaaaaagaaattgttttgttttttggaggaggctgatcccgagcaattttcgaaataacccggaataatcccaaaaaaattccaacgaaacccagactcatcagtgttgtatgaagcttaaaaaaatgaattttagtgttcagacttcaattcaccttgagggacatcgatttcaagtatattggttttaatttagcaaaaatatttttatatgcaattaattagatgattttaagtgtctatgatgcaggtggacaaagatcccaacgtagaaaatggattccattcttcgatgatgtattatttaactaaaaagaattctgtatttttaataaa

SEQ ID NO: 79967 - DNA, 513 bp, Heterodera glycines
atgggctcatgccaatccacggaagcaataatagcccgagaagcatccaataaaattaacaaaatgttgcatcaaaaaccagaaagatatgttcaaaagctgcttcttttgggtacatatattttttgtaaaaataaaattggaaattcaaattattaaagaattcttccattataatttaattgtttttcatgattaagggcctggtgaaagcggaaaaagcacttgcgtaagtaaaaattatatatttatttatattatttaaatgtgaaatttcaggtaaaacaaatgcagcatgtttttaattaaataattttgataatttaatttattatttaaaagaattttacacacaaacggattcactgagaatgaagtggaagagagaaagtgcatcattttttcaaatacaggtgcaaaatattatttcttcttaatgtatataattttgaattttactgtgttattttcattaaatttacactaaattaaactaatttttattttaataaa

SEQ ID NO: 79968 - DNA, 1306 bp, Heterodera glycines
  unsure (1)..(1306): unsure at all n locations
atgccaaaatcttnntaccagctccaaaaatcanttaattgtagacccgcaaagttgatactaccgaaaatgtttcctttntaggatttcttatttggtcggtttgatcgaaggatttttcggtcgaagggcttcgtttaacttttgtgtgtccaatgcgatgaaaaatgacttggaacgccgctggggtgtgaatgctatcaccgtttatgaccgtccgccnaaattggttctccaagtaaatctgttagcattttcaaagtctttgatccatttttaagaaacacgagctccgaagaaaagataaaattcttgcattgctttacgtcggaaacactgagcggactcaccgagggtaagttgttttgctaatagttcattttatgcttacttaaattcaatttttagaatggaaatttgttcacgaagaagctgatggaactctcacgcttcgtgaaaatcgaccgtttctcgctgtttcttccacaaggtatgaatggaaggaataatgcaccaatccatcactgggagggaaggggtgctagagggctttagcccttcggacccgaagaaaataaaaatttttcattttccggcgacggtggggcgggggatagatcaaaattcaccttgggactttcacaatgaaccacttattgttagctggactcctgacgaagacttctccattctgcttgatgcgcttgtccgcctcgaccaacgaatggccgacgtggaaacacagaggacgtccaaaacacacccgaaaattgtggtggtcatcactggtaaagggccgcagaaggaattctacgaagaacgcattcggaataccaaatgggagaaagtgcgcattttcactgcttggttgtcggcggatgactatcccaaggttcccaccaatgcttagttttctatttactatttgccccttttcagtttctgtcctgtgccgaccttggagtttctcttcatacgtcgacctcgggtgaatagctgatgagtttggactcgtttaatttggtttccctaaggatttgatttaccgatgaaagtcgtggatatgctcggcagcggtgtccccgtgttggccaagaactttcccgccatcggtgaactcatcgatggaaccaatgggctcctctttgatacgcctgaagaattggaaaatcttttggccgacctttcgcttggatttcctggaaattcggttcttgtctattttctagtgatgctcgagaccaaaaatttcccgagaccgagactcgaccccgagactcgagacccaaaaccccgagaccaaaaa

SEQ ID NO: 79969 - DNA, 1487 bp, Heterodera glycines
atggagaaaaacgaaccttatgagaacagtgtcgtcgaagacgatgaatttcatgtggtgcagtcacacaattcgttggtccattcgggcagcgcacttttgaggaagccgcggaatttgggaaagagatggacctggaaaagtaagaatgaaaaaaaaacaattactgatttggacagatggaaaacggatgtacccaaaattttgctgccaaaactttaaaaaattttcaaactttgaattctttcaagaaaaaaactgtaaaaagtttttataagatatcacaaaaagtagtaatttttttttctgaatttttttttgcgacgaggtttcggccggtgacattttttcctgctcccttcccccccccatcccctcgcgaaaaatttttgtttccgcaattccttagaaaaattgttccttatttgggcacagaccccgaatgatggtacacgcccccgacaaaccttttcaattaatgcaaattgttgccgcttttgttgctcgttcagtattgttgcacggtccaattggattggtcggcacaaatgtcttcttcttcgccatcctcaaatcgcgatgaatgttgccgtctccattttttgtcaagcgtccgattcgggaagggtgggccgatgcaaagctattggaacaaatgtgaattattaatagtaatatatttaaattttgaaaaaaaaaaactaaaatttatccgccggcaccggcgctacttggcaaaacaggacattaattattctcaaaattctgtccaagatttaaataattgatttttttggacccatttttcatgataagtcaaaaacaagtttttgaatgaaattttcgtttttatttgctcatttaccgagaagtgcacgctgttctcaaccggacgcgaccaaaaccaacttgcgcgggtgggcagcagaaacaatacgacaaaaggcaacggcgtgggtcttgaataagaaaaaaaaattgtcagcggcattccgagtgcgttttttatttgagaaaattaaattgtttaaatttgacaggcccaaagccaggaaaaaaagttttcagatggggggaatttgaatttttttgggccaaaaattcataaaaaaaattatcccaatgttatttttaaaatttgctatttttcgtcaaaaaatgatgactaatgtctaagaactttcaaatgctaacaagtttttttttggatttggacataaatgaaaaaataaatgtttacggattagtaattcataaatagggcattttggaatcccataattaaggatatgtatttcgctaattatttaaaatccagttacgtctccagccctggttttaatttgaaataaaatatattaattaaaattcaaatctcaggtctacaagttgtgctcaaatccattctgtgtgcgatggcaccactgcttcaattgggctattggtgctgtttgcaattgtcatttttgccatcatcggattggtca

SEQ ID NO: 79970 - DNA, 551 bp, Heterodera glycines
atggcgaagaagaagacatttgtgccgaccaatccaattggaccgtgcaacaatactgaacgagcaacaaaagcggcaacaatttgcattaattgaaaaggtttgtcgggggcgtgtaccatcattcggggtctgtgcccaaataaggaacaatttttctaaggaattgcggaaacaaaaatttttcgcgaggggatgggggggggaagggagcaggaaaaaatgtcaccggccgaaacctcgtcgcaaaaaaaaattcagaaaaaaaaattactactttttgtgatatcttataaaaactttttacagtttttttcttgaaagaattcaaagtttgaaaattttttaaagttttggcagcaaaattttgggtacatccgttttccatctgtccaaatcagtaattgtttttttttcattcttacttttccaggtccatctctttcccaaattccgcggcttcctcaaaagtgcgctgcccgaatggaccaacgaattgtgtgactgcaccacatgaaattcatcgtcttcgacgacactgttctcataag

SEQ ID NO: 79971 - DNA, 292 bp, Heterodera glycines
attcgaaagctcttcacaggctctattagcctactaaaaattacagaaaatttcgaactataaaaaaaagatagaaataaaaaacttcgaaaattctgccttttttgcggttttcaactgacaacttttttgagagctgattaatcactgagaaatagcttataaatatcttctaaacatctagggctttcgagtgataccatgattgtgaagtttggccaacaaagaaaaaagttatagctttttgaacattgctgagatggagttggccagacggagttgacccctaccg

SEQ ID NO: 79972 - DNA, 326 bp, Heterodera glycines
atgccatttacacagagtcccgaaaatgaactcctttatcaaaaaggtgccgtgtgtggcaaaaaagttttttgtaagaagtaaacggaaagaaggaggagggtcgagtccactccacaatattaatgtttttatttatttttctttaaaaataaaatgattatttttgaaaatatttttgaagctttattaattgatttttttgcagccgaattggatgaccttgacgaaagcttttctaagcgaaaaagataagcgacaatgcactataaaaaaattgtgggccttgaaacttttatttttgaatagcgaaaagttgtaataaa

SEQ ID NO: 79973 - DNA, 102 bp, Heterodera glycines; identical to SEQ ID NO: 51993

SEQ ID NO: 79974 - DNA, 736 bp, Heterodera glycines
atggagaataaatttattcttgttccttccgacttgtacaaaaatttattaaagcctgagtctggcgagattaacgttgaaaatgctaaaaataaattgtcatcacttttgaagcagagaaaattagacgctacttcaaaaaatttactttataaccaggaattgaggcgtttcttaaaacttaggaaggaagttgaagaaaaaccggtaaaggttgagctttcagatggctcattaatggtgtttaaaccaaaacagcgtgaaagagatagcaaaattcctactcaaattgttaatgacgaaggattggatgaaacaggctctattccaacacttgaagacccttacactactgctgaagagagtgatgctgagtcaacaacatcaacaccaaagacgagaccactgataagaccaatgcgtgttggaacaagtaaatttcgtcaaaaacaaaagtcttttgtagtcaagaaaaaaggaaaaattatgtcaattataaataatgaccctgagaaatttggggttggctctaaaggacatatactgagagctgatggaacggcatatttaaaaagtaatgttaatcaagcattagagcgaatattgagacggtcacccgagaatgctccatcacccataggtacaaaagctttagagcaacgactgagaaacgacccgaggactagtggaatattaaaacaaaaatttaatgaacaatcgggatcgagcgttaaaa

SEQ ID NO: 79975 - DNA, 402 bp, Heterodera glycines
atgaaggtagcccgaattaattcacaatatattgttttaatgtctgctccgaatgctgcacttcaaatacgtaatttgggcgttcaactgtttccaaaaaatcttacatttttcctaagtgcctataaagatgcaaccgcatcaccgtatggatatttattcttggatttacacccagcttcgagccctttgctgagaatacggacaaaaatatttaaagaagatgaagaaaaagcattgtatattcaaaatgattagtttacctaaaaatgttattcaaaacttggattttttaaagaaattgacaaaaacaaaatcttttaaaaagagacaacaaatatttaaagaggctactagtgaacaaattgcattattaattgaaattagttataatatattaaa

SEQ ID NO: 79976 - DNA, 786 bp, Heterodera glycines
atgaagtcggagcctgggaagcgctacatcgccaagctctgcctcaactcactctggggccgcttctccatgcggaaccttctctcaaaagcaataattgacaacgacgaaagcctaattcatcagtataccgaagacaaaaagattgagctaatcgacttggaaatgatggatgaggacaacgacgtattcatgctcacttacaaaccaaaggaggagtttgtcgacgaaaataagtactccaatgtagtcatctccctcttcacaacatcaatggcgcgtctatacctctacgatgccctcaaaaaagtggccgacacccccggatgtgaaattctctactttgacaccgacagcatcatctacgttcatcccgaggacaacgacccactaccaacaggaaagggacacctcggtgagctgacggacgaaaaaccagaccacgacattttggaattcatcagtgctggctgcaaaaactacggactgaaacttcaacggaaagacaatgctggaattgagtatgatttgaaaataagagggttcacccttgatgcacaaactgtgcaaatgatccattatgacacagtaaaagagcaaattttacgttatggttccgatgaccccgctgaccccataattgttacatatccccattttattcgtcctaatcttatccaaggcaaagtgtttactcattccctcacaaagcattatcaacccatattcacaaaaggtattattaatgattcattccaagtcctcgaatttggttatcgaaaatga

SEQ ID NO: 79977 - DNA, 1284 bp, Heterodera glycines
atggacaccggagagacgaccccgccaccgctggccattgacgagcgatcagagcgcatcgaacaactggagaagcagctcaaggaccgggacgacaccatcaaatttctgcgcgagcaggtgcgcaatcgagaagcgctgatcagtgatctgcgtcggcagctggacgagcacatggtaccaccgatggcaccaccaacaagtgagtgaaatttttcctttttgaatttcataaaatctgatcattaaattttagcaccaccaaacagaggatgaccgaagaaaagactggatgaactgcagcgcagcgccaggcgcgacatcgtcgaccaaattgtggacgtcatcgatcgtgatcgctcacgttccgcgagccgcgcatctctgtaccggatccaccgagatatccggcacaaattcgcgcactacacgccaaagaagggcaaggagcggaaggaggggatggacgctgaggatgggcttttgctgctcgctcaacttggaacacagaaggcgtacaagcggatgaaggcgattttacggccattgtttgtgcaccattgctgccgtccatcaattttgagcagatgctgttggctccgttctatgtcttccaaggcctcggaaaatgctctgatcaaggagttggaagcgggagaaaatgccgaagtcgcccagaaattcttcagacggataggggcaaggagggaagcgttcagaaagcgagacatgacggggaacagcatccggaaaatcctcgtccacgccgatcaaatggaggcccttttcgagacggaatggggcaaaacaatttgccaaacgatggcacatttggggaaaatccaaattttcaccaaagtgattgtcttcattttttgtgtaaatattttttaatttaaggcccatctattgtccccaggtgatttggacggactggagacggcagttgatcagttcaaggcatttctcgacgaacaaccaatggtgcgaacccttctttcaaaaaatacaaaggcccattttctgcttcaccactttgttccatttgcgcgccaacaccgatttttggggcttttggatgagcagggtgggaccatatcattttttgggttcaattttaaatgttgtgatttttcaggagatgaggcattgcattccgtgtggcggcgacttgagcaactttggaagacgatgccggactctgaacaaatgcgacagcagctggagcatcatttcgtctcgaattggctgctggacaccggcagactcgacgaattgaagctg

SEQ ID NO: 79978 - DNA, 326 bp, Heterodera glycines
atggcaaaaagaaaattattaagtaagctaatcggcagagaatctgtaaaaaagcgctggaacaagcgagaggagcgacaagcgcaaacggtcaaggcgagacaagcctatttggccaagagaagtaattttttcaccattttttacttaaaaatctttttttttgtattccagccgctccacagccgaatcccaatgccgaaatgccaccgcaggacgaagcagggccgtcaacatctgctgcatccgtcgaagaagcgatggaaccgccgccatcaactccaggaccagtgccgacgccggaaatggacgaggaaattttgtaa

SEQ ID NO: 79979 - DNA, 1234 bp, Heterodera glycines
atggccttaaatctgacctatcttttaaccctgagcttatactgctccaactccatgcatgaagttggagctgtacaggtttgttgagaacccagagaccaaatctaaagccatattcggactcagcgtggtcaatttacttagtttaattaaattcggaatttccaaaaccacttttaaaacattttgttatttgatggtcttgaaaaatgccgtttttggagaccatttttagactcggccctccaataattcatttttgaagtaataaaatttttttcttataattttttatagtcctaactttgctctatttactcacgttttctctgcctctgtatctcttttcattttctttaaatcagccatcaaaaatacatacctcgaaaatgaccatttttacattatcaactctaactccttaaatacttttctaatgggatttatcccttgcccgataaatagcaaactcattctcaataataatgtcagatatttcggatcatgattgtggttttttaaatttatattcataaaaaaattctttaaaaaaagttgtgcggaaacttatgttacaccctaagtatcaaggttttttatgttcaaggggtcgagcgatttatttagttgtttagatatgaaaaattattataatactttataggcatttggcgccaatgcgaattttggccaaaccggtgggcgttttcccttcatttagctgtaaaatctaatttcgcttacatttttataaattcggattaaaaattgtcaaacaaatttattaaattttttcaacaaataatgttttttttaaaagccattccggattcttaagctttttgagtccggtttttgagcatccgacccaatcaatggggccaaaaccgcacaaagatttttatggacccgtagcccgaaagtttttacagactacggggttttatttttgggtcgaaaaaaacttttaaaacgaaaacttttagaaaattcattttgccagtgtataaaaattagaaaccggaaatttcaaatgtgcggatcccgctgcgggattggaattcaaaattttttgcgggacgggatcccgcgggattaatcccgcaaatcccgcatttaaaatttgcaggatcccgcgcgggattgcgggattttggaaaattcgaaatttttttttattaaatttcaaaaaatttccaaaaattaaaaaatacctgaagttttgaacaataaa

SEQ ID NO: 79980 - DNA, 489 bp, Heterodera glycines
ccgtaaccgcctccacaaccgcatccacctccacatccacctccaccgccacaaccaccaccgcagccgcctcctcctccgtagccgaagcctccgccaccgcagcctcctcctcctccgccacaattgacgatgattgggcctccaccgccaccgcatcctccgccaccgccaccgcaacaacatcctccgcccccgcccccgcctccgcaacagcagcagccgcctccaccgccgcctaaacttaatccgccaagtccacctccgctaccaccgcaacaacatcacccaccgcctccgcctccacaacagcaactctgctgcggtagtccagtgccatcggcatgttcgctgatcagcgtaaccaaaaaggcggcgaacataaaaggcaaaagggttgaagagaaacggcccattgtttaattatcacacactaaaagggaacaaacgaattttattgggtgaatgagcaagtttttcagggtttta

SEQ ID NO: 79981 - DNA, 709 bp, Heterodera glycines
atggcggcgacgagcgccgccaccgctgccgccgacccatcagcagcgaataaagtgcacttcagctccgccgggaacaactactgcaacgtggtgaaggagcgcgtgtggtgccaggcggtgtcgatcagtgcgtgagcaaagcgatcggaaaaaagtgatcagaggaggaggaagaagaaggaaaatgcaaaatgatgatcagcaacacctcacaattgatattataataagtttttaattaaaaaaaaaatatatattaattacagttaattgcatcgcttttgtcagttctttgttaggataattattataaattttccatgtgtaagtgtaaaatcgtatgtgtgcaaaatgagtttgatcagagatggtgtcatttgaatttaaaaaaaacatctcgtcagttgtgatgcgttcttgttaggactcaacctcttggataatgtgcgctaaaagtggtaaaaaatgagcaatgcacttttttggtcacagtttttgaaaccttatgaattttaagaaatttggagtttataaaggacattggctaccgctaatgccaaatttgcttaatttatttgcttcagagaaatattttacgatttgtcaaaaaactcgaaatggcgaattttatgaaagctcaaaagtaggacaaaatttttcgtgatattgaacactaatttaagtaacaatttataagtgccgcaga

SEQ ID NO: 79982 - DNA, 1047 bp, Heterodera glycines
atggccgacgatggaaacggagaggcggaagataatgaaaatgagaacgcaagggacggcggtggcgacgacgacgccgacgattattggacggtggcggaggtgggcaaagggtggggggggcgaagttggactcatctgtttcagctcctcaaagaactcacccgcgcatttcttgacgaattggcggcccccaaacttttgcccgaaaagttggaaatggcagacaaaatggtagcgcaaatgggacacattgacaaaatcataatggccagctcgagcaaaaacagtttgacgtgctcagcccatcggatggaactttaccggacggaacacattgtaaattcctatttgaggtggaaattcgaaaattggacaaaatattacttagattcattttcagagttcgactaagaaaaattgaacagaacccggcactcgctttgcgcgaccattcggagcgcattaggcgggcgctgcaggcgcgacgagcgggcgggcgcgtgccggaacagcccgcgctattggaggcgcgtgaggtgcagttcgcccagcgactgttgagcgcaaacaacacactgctgcgggacgcctttctctcgcaccttcccgccagcatgcagcacgtgccggtgccgcactcactctccgcccactcccagcgggtgtttgtcgaagtgctcaaagacaatgtcagtgggtggtctcgcgggatacccaccccaattaatgggcataaattgatagttcatttgtcaaaaacatcctaatactttgaagttttgtatgattgtaagtgcgattttttgcagttggaccgtatcccggtgccgagtctaaacgacccaaatgcggatttgctcgtcacattggacaaaggcacacggcacatgcttccctttcactgtgtggaggaactgctcgaacttggccatgtccgtctgttgtgacattttattctgtaatttcttgtctttttcattttttataatcacttgtcgttgaataattatttttggcttttcatctaattttctttacaataaa

SEQ ID NO: 79983 - DNA, 2498 bp, Heterodera glycines
atgagagacgacatcccgccactgttggagaaagcgcacagaaagaacattgaatcgcatgccaaagagaccgaagaattggacggcgaagtcggactttctgcaatcggaacattcacaaaggtaggatttttgaagttttaaatttgaatgaatgttttaattttagtccgatgagagccaaaaatcggagcagaaaaacacacgggaaacggcaaaattagaaaacggagaaataagccaaacggaggcagcaaagaatcagcaggaggagaaaatggacaccgatgaacaacaacacgagaataccgaagaaagtggaggagcagaaaaggacaaggaagaggcggttgtgagagaggcgaaggaaatgacgacggaagccatccaagtggcggcagcaacggcactcggagcggcggcaacaaaagcgaaatatttggtgggggtggaggagaagcgaatgaaagcattggtggcacaactcgtggaagcgcaaatgaaaaaagtggcatttgaatggtttaattattgttcaacgtaaaccaaatgtttagttcgaactgaagttaaagcactttgaggagttggagcaattgatggaccgggaaagagaaacggcgagttttttctaattggagttttattctctctcccctccccaaattttcagttggaggcccagcgtcagcagctgattgcagaacgacaagcattccatttggaccaacttcgctatttggaacaacgagcacggtcagatgcacaacaccaactgacaaatgatggacgaatgccgacaatattaccaccgggatttgaagtatcattaaacttaacaccgcttgaattagaagaatgggcacgcattatgttgcaggttagcaatcccacgcagccacaagcggtggtcgcaccggccggcattccgccgtctcaatccgctgcaaaagcacagcccccgccgtccgttcaagcagctcaacagccgcttccgcccgtatcggtgcctccacaacaaactcaaccagtaccaccaccagctagtggtgagacattgtccaatgaccctttctttatcctgcaaatatttcgatatgttgggtaatttttcatttgcagatgattctggctacggttgttcctccgtcaatggggctccgttgttgctcctcctcagccccctttgactttggccactaatactgcagcggaagtttccactgctgcggctacgacttcgacgccaaacactgcgcccattgcggcggcgcctccagcaccgtctccgcacgcgacggcaagcagtacagccgctccctacgcaccgcaacagccaccgacatcagcaccaccttcaattccaccacaacaacaaatgccaccaccgccagctcaaggccaacaaccacaatattgtaattgtttaagcagtgaataagattttcttttatctcatgtttgccctgaaacatagattatgagaactttgttggatttcagcccaaccgcctctgtctaccgcctattacccgccaccgtctgcgtatcccccgccggttcacaatcagtcgtacgcgccgcctccgcacaatgcgactgccacatacccaccgccacaggccttcccgccacaagcggccccaccacctcagcactactacggaagcgtgtcacgtgcggcacaaccacccgcgcagtacggacagtcaccgcaagcggtgggaccaccggggcgacccatcgccaactatcctcctcaggttttacaaatgtgtttttgctatctaattatgttattttcagtacgattattacgccggctcggctggacaaccaccgccgcagcatcgctacggtcaacaaccaccgtacgcgtcgtatggccctccgccaacgtcggcacctcaacaacagccacagcattacccaactcctggacaatcccaagtaaagaaaacaatgtaaattatggggatgtaaaattttatttcagtattatgcgcggctttctcacactcagcattctctgcagggccaaccgccgccgcctcaaccgatgggtcttccgccatccgctggaccacaacaaccgcaagaaatgattgtcggtgccggcagtgttcatcaccatcaacaacaacaacatcatcaaggaccaactggtggaatagttcaaactgcagcggacgcgacgagtgcgacaccgccaatgcatcagggtgaggagggggaggagagggacattttgaaaaagtattgcgttcccggatggcaatttttgtgttacgatataaacaaatgcaataaaaccaaaaatggatctttttagttcaaatgtattaatatttcattaaacttttagagagcaacaaagaatgctgacgatgaaaatgatggaaaagaaagtcggaagtgacttgctttttctctttttgacaatggctgcaaccaatatttgttttaaattctcacttttatcaatccccgccaataaa

SEQ ID NO: 79984 - DNA, 546 bp, Heterodera glycines
atgccaccaaagtaattattttatatgttctatcttaacaaatatcataatgttcttaacaaatatcataatgtttctattgaagggggtttaaacgaaagagagaagaaggatcggaagtggccgaatcagttgatcttgaccggattgatgatgacgaaaacagtcgtcttacactcactccttccgccataattaaaagtaatttttgtttcggttcatgcttttgaatttccaccaaatttcattgcaactaataattaaaaatttagcaaaggacaaagatatagaaattggctattcaaagcagcaaaaactaactgaattggatgatgatggaccggctgctaatcagctcgacccaacccaaacgaatttatcttcgacagtcgaaccgcagacccattacattattgtgccgtcctattccgcttggttcgattacaatgcaattcatcaaatcgaaaagcaggcacatcccgacttcttcaatggacgcaacaaaagcaaaacacctgaaacgtaaacttgactttgaagattaaa

SEQ ID NO: 79985 - DNA, 674 bp, Heterodera glycines
atgggaagctcaaaggacacttatggaggaaaaaatggaagcgaaagaacgcgaaaggcgagaagagcacgcggcagagaaaaggtgcagacggacggacaatcggacgaaacccttaaaaacagagaatcgttgcgagagatgtcccggcgagaagcagaatgggctgacgaacgaacgcaacaccgtcgcgaggtggaccaattgcatgccgagatgcaggagacgcgtaaaatggcggaatgccgcgaaacggaactgatcagggaacacacgcgtgccgacgaggcggaacgcgaggcacacgcgagagcgaagcgagtggaggacgaaatgacaacgctggcggaagcgcaaagaaaggcacgcgcgcgagcggaagccgaattcgaagcagaaagggcgcggtcatgtgaggtaacgtgacagcaattaataattatataatatgataagtttagctgatggcccaacggactcatttggagacggaaattgagaggaaagacgcggaactaagcgaaggtcgcgaaaattacgaagaagcattgagagaacgagacaaattcgcacaagcactacatgaagcgaagctgaaaaatgcaatgacaaattcggaatgtgaaagattaatggaaaaactgcggagggaacggaacgacgccattgagtga

SEQ ID NO: 79986 - DNA, 506 bp, Heterodera glycines
atgtcggtgccaaatttggtggaaaatattggcgaaacggacgaacgcccctcgaattcgcaaaggtaaaggaagggacagatcactcactttccgatcactcagtgatcagagaggcgatcactccttggaaattcccaaatcgttttctacagattttcatcctttggcatcagcgaattgcagcaaatttcctccgacctttggttcactcgacgtcgaattgaggccggactcaggtcaaaaaaataaataaattaaataattaaatttttttgtttccttttttagggaacaacgaaaacaaaaagcgattcttgagcatgtccaagagcaggcgagaaaagggacggaaaggagaaccccgtgctttcttttattgcctttcagttgcttcgttcgcgccttcggcacgcgaattggcgaagcgcgcggagtcattcaccgccaaattcgtcggcacgatcagaagaaacggagcggtaaaagaaaatgaagcaaataaa

SEQ ID NO: 79987 - DNA, 1287 bp, Heterodera glycines
atgaattcaaatcctcaaaactaccgtatgtcgcattttacaagaagttctgattcactgatccattttctgatcacggaaaaatgcaatttgttcagttggttgcatcattagcagcaggaacgggaaggtcgttctgtcatgtgttcgttcgtccgtcgatttgaccccccggggggtacaaaacaaagcaccaccaattttcaaagataaagaaacataagaacagccgaggataacaacaataaaatcacataatattcataatctttggttgcaaaatgcaaaaacaatcagcccccggcttttaccatttacgggattttaaaaatactttcattcgtgctcaatggatttaaatttcaaccgatccttgttttgtaataaatttataaatttcgcagatgataagcaaaagttttcccgtttcaaatcacatttatcacatttactttctgatcaattcaagattcaaattctcagtctctccgtgtttaagcctaagccaaggcctagcctaaagcttctaagcaattgtacgagttgtctgtgtacaagttgtcacgacacccgaaagaaactgttaaattttaaaaaatttaatagtttattttgaaccaagataaatattttagtttatttgtttcattatttttcaatttttatagtttttgtaaattctcgtaaagctgagttgtcctcagctgactgatcctgtcgcgtccatattaaccggtccatttgaaaccaaaaacaacgattggcttatttgaaaataattggagtttaacttttgcttatatgaaatgagaaaccaattttaaatttttaaaaatattttttaacttttgttttgaattttttgtttccttgtaatgtccggttcccggtcccgaatgaaaatccaggtcccggcttttcgactcccggcaattccccacccgattctgctcagaattccgggtctcgtgcaattaattctagttcaaataatgaatttgtaaagaaaaagagtaacaattcataattgacattgcaggcatatgaattcaaatcctcaaaactaccgtatgtcgcattttacaagaagttctgattcactgatccattttctgatcacggaaaaatgcaatttgttcagttggttgcatcattagcagcaggaacgggaaggtcgttctgtcatgtgttcgttcgtccgtcgatttgaccccccggggggtacaaaacaaagcaccaccaattttcaaagataaagaaacataagaacagccgaggataacaaca

SEQ ID NO: 79988 - DNA, 344 bp, Heterodera glycines
atgaccggacagcgaatccgcgaatttttgccgaaaaacaccgaagctggcattagcactaacataaagacacggaaagcgaacagttcaaagaaagcgatagaaacgaatgttcaaaaattggcccaaaatgacgacgaaaaaagggacgaaatttcaaaggatggaagggacgtgaaaatattaatcaaaatgagaaggaattcatcggaaaacgttgaacaatttggaaaaaaagacaacatcaatgggccaaagaaatgccaaaaatggaaaatcggaaaataaaattgaggaaagcaaagtgcggcatttgggtattgactttctaaaaattgagatta

SEQ ID NO: 79989 - DNA, 805 bp, Heterodera glycines
atgagccgaaatatacggaacttaaggacccgccgtttcaaaacctttacggaggtaagcgatggacggaaagactaatgattttttgggataaaattcaaaaaaatcccaagaattttagtggacaatttccacgaatggatgagcggcattcaccgaatagtgagcagggcgattggaataataattaacttcaattattttaattaatttcgtaagggactcaaccaatttacggatgtgaccagaaaggagaaggctttcttcctcctgtggaacggattcattgggaagagaacaaaccgccaactcggagtttgtcagctttttgctcttttggtgagtgaatttaattattttttggaatttaatgtaataataattttagtgcttaaattctctatcatttttaatctgctttgctttgtctcttaagttttagattaaattttttaattgtttaaaatttacagaaacgtttcatcgatacgcacggaaaggaactgctcacgatcagaaagggcctcgtgacaaatttcattttgcattgtgccaattttgagaatttcggttatatttcaaattcggaaagggccgaacttatggattatgcggcactcaaactcagctcattggcaaaagaattcgaagggaaaatgaaacggggaaagtgaaaagagtcggaggagagaaacattaatggaaacgaactgttaattgttgtaatttaaggaaatcgaccttcactttcgctttttttttgtatttcgggttaattgggataaaattaagagaaaaaattaaa

SEQ ID NO: 79990 - DNA, 405 bp, Heterodera glycines
atgtgttatcatcaaatcgatcatgttggagttgttgccagccgatgtgctagaagatttgaaaagggagcaacaatttttagaggtgttccgtaaaatcaagcacaaccggcacatcattcatttgtttgacgagtgggttaagatatatttaatcaaatcacttctctaattattagggaaaatgtttttacgagtgaaaaatgcaaaaattccattcaaatttataacactattttcagaagatatgagtagggttgtaaattatatggattaacatattttttctgcgcatatgctatgaagaaaggggcttaaaaatagcatttctgcgttaaaattttttgatttggtgaaggtttttagtccatataaatccatattttgggggttttcgggaataaa

SEQ ID NO: 79991 - DNA, 1562 bp, Heterodera glycines
atgtataaatttttaaaacgagtcaaaagatttgataaagtatcacttcatttgctgttgattttgtttttgggatgctgccaaattaatgcaacaaatgaaaaacatacggacaaaaaaactgagaagacatcaacaaaatttcaaatcggtccaattggtctggtaaatgtaacagaagaggaccaaagtgaacgagaaaatccaagccatcaatcaacaaaaacattaaaaattcaagatgcaaaacattttgtggagcaacttcaaattccaatcactaatctcacttctcgacatgatcctgatcaggtaacgacggaaattccgatcactgaaggatcaggagatgataaacctatgacaaattcgattacaataccaatcaatagaacgaattatcaggcagattcgaagaccaaggaaatcccaatcgccggtgatgtcgacatgaaggagcctaatgagcatcaagtggctgacaagcaagatcagtccccgattggaggaaatataagacagttaatgatggctgagcttgacgaaacttcggcaaaggacaatcagcagaaaagtggcaacaatgacaattttttatcaaaatcgagccattcttcaaaatctttcgctagtcacgcaaccaacattggcactccatcaacatcaatggcacttagtataaagtcgccaaaagttggcagcaaaagttcattggttgcggtgccaaaagcttcggggcaattagcattgtcaaaatcgtatccacaagaaaagcatcatggaatatcaaaattttttaaattttcctgttcaccaccaaaacagccagacccaaattttttgtcaaatattaatataaggacaaaatcatttcgcatgacctcccgaatgccatcgcttgataatgcgacgtcaaaaaaaagtttggcacgaatgtattccaatcaaaaaacaaaaaagccaccgttgccaccattgccgccgaagccaagtcccagcgcatcattccgacgaaacggccctattttgggcgttcatgagggtagcttaaaagcagtaggcagttttagggagcaaattgaggagcaaaaaaaatatttgatccctgccgaccgaaattccggccccaccaagtaagcaaagtctcgtgtttaaatcgctatacctgttgatcaatccttttttactttttggcaagttaatctatcataatcaaatatcttgaatttcgagacataataacaattaaaaatttcaaaaatagcaaaaatagcaaatgtttgacttcgtctttcgcttaatttcaaatcatatttaattttagtcttgctgtggataatccaacaaagatgatcacaatgttgaaacaaggaaatttcttggatttggagcccaatccaaacgctgaagaattactcgatgaaatggataaatgcaacaaattttccattggtgcaatgaaaattttgcgtattcaaaattcagctcaaaccaaaattaatgaatattacgtgttcccggagccaataagcggaggagcaacttcaagagtcattttataa

SEQ ID NO: 79992 - DNA, 4285 bp, Heterodera glycines
tttgtgctcaaaaaggtgttggacgtgtccatttgtctgttcaaccatttcggctgtctccgccatgacaaaggtcagtgccccccttcccttttgtccatttgttttctgcaaaaaccccaaattcagaacacaccctcagggagttccaccgtcaatacaggtccccgaggggataagcataacaaatctggaataagcatttgttgtttattttgaaggatatgcggtgaaattggctccggtggctttggcagagtttacaaagtgagtctttcttttctcattccatcgttcactgagaaaacctgggtaattacttaggttaattgtaattaactttatcggtctgcggttgtaaaccctatttaaatggcataatttcgggcctatcgccttgcggacggacttccggtggcagtgaaaagcattcggcacaaaagagtcaatggatggacgatggccgaacggcgaataatccccacggagatttgcttcatcgaggaatgccaggatgtgcaggtcggcgtgccgattggaagcggaccttttggcttttcccatgttcttattcgactgtcccttccattcgaattttcagggcgtcgttcgtcttattggatggttcacaaggtgttacacatattttctttacttactttctgatcactgattttcattggttttttgtgccgttaaagtcgccgtggctttttgattgtaatggaacggcccgccaactttatggatctgttcgatttgatcaacaccttcggctggttggaggagagaatggcacgcggactgtttgtgcaaattgtggacaccgttgttgagctgtacaagaaacactcggtgatccatcgggacataaaagacgaaaatgtggtggtcgatttggattctgggactgtttggctggtcgacttcggagcagccgaactgctcgagcgtgctaagtaagtttagagaacgaaatcgagacaaaggtgcatgaatggtccaggattgggaagcccatcacaatcccggcaaatccgatcaaaattccgaatgtaaagccaactgaacacgagattctattttgactccaattgatcaattatcctttgttcatcaattaggcagccttagcattaatgtaaaagagaagcataccaatgttcaaaatcctttaggaaacaatgctttcaaggttcgttccgtccgttcgtttttggccatttccccaaattcgtcaggcactttgtcctactcgccgcctgaggtcatttgaatggcaaacacataatttgaacaaatcacttattgtttgattgattgttcgcaggtgttcaaaagggactgtttttacccattggagggcacagtgtggtcattgggtacaaacaattctttatttgttttaatttattaatttattttaattaattttatttaattataattaatttatttatttattttccgattgaattacatcaaatttcaaatccatgtagtttttgcaattttcaatccaagacagtcaaattgaaataataccttacctttaataaatcttttcatttttctgttcgaaattaaaattgtcgtgtcaattgtctcctcttttccaattgtccctcgtcgttagtccatttgtctttttttccgtttttttcgaattttttttttcgccattttgccgacctttcaggcattcttctgtaccttttggtggtcgggaagccgccctttcggaatgagctccaaatttgtacagggaaattgcgattcccgcgcaatgtgtcgtcaggtcccttttaaaaatgagaaaaaaatggggggaaaattggccataattaacggagaaaactcataatattttaatcaattatgttgatcagagtcctcatatattttcaaaaatgatcaaagaaacactttggcattggcattcgtttacttttctttctccccacagagtgccgtgccattatccgccgttgcctttgcccgtcccccgaaggccgtgtaagccttgaggagctccaacagagcgaatggatactgaacaatgagacgacggactcattttttgcaacttttgaagcgcaatggaggaagagaaaacgggtaaataaagtgttatccgttggaattggggagcaaacagacaaaggactcattttgagactcgcgatggggaatccgataaaatgaagttaagccgataaggaatttatatggatccaatccttaagtacggctcgctgaactcaaacggtgtctacgctttgtccgatgatggcgccggggacgatgacgaggactgttcctacagaacggaggccggcgcggtgcccggtccgctgaccattccgccacttttcggaggcatttccagcgcccatcggtcgaccaccacaacaaattcattgtttatggagcaaaacagcagttactcagaagaggtggaggaaaatgcggctgttgaacgaaatgaacaggtcgaacacaaacagggaaagtgcggcatttccaaattacaattggaagggggattatccatggttagggccaactacggtcaaataagctggcaagatgggcaatcggttcccagtcagtgttggcatcctacggcacttttccccttttctatccaatccattaatttttgttaacatttctccccttatcaacagaactcaacgccagaattggctgcagctgacacccgctcttctccctcctcctcctccttggcaatttcggacatcggtttcgagacggcaccggaatatgacgaatggaaatactccagcttcagctcaagcaattccatggcattggatatttgcaacaattccgagactcctcaacaccaaaatttccctcgggagaatcaatgttcacctctcgaccatcagaattctactcttgactttccaaatgacactttcggtcgaagagattgcgccccttccatttcgatgccttttgttcgctttgggatttgtgccactcaatcggacatggcaagtgcctccttctgctccttctcttcctcttcggacagagaagcgcgacgcaattccttcacgtccgacgattccttcaattcttcgaccacttacttttcagcaaattcactcgaaaagtttgtccaaagagaaaaagaaattttaaatattaggaaacgaatttaatccaaattattgttagctttggcgaagtgtccccatcaaatcagctgctgatggatgaaattgagaagaacgaagacgacgacgacgaaaagacccttcggacggaacaaccgaacattttgatggaatggaggaaagaaatgtcggaggaggaggaggaagaatgggacgaaacaatcagagaaaacatgggaattgggtgagaaaagagcagagaaagaggacgaagaaattggaaaggacgacgaattggaagagagggaagacgaacaacaaactgaacggagtgatgaacaatggatcgaacttgttgaggaggaacgctttggaaaggacgattcgtttgaatggagcgaattggctgaaggggatgaactgctcaaagatggtcaactgcatgaacggaatgatgaactgctcgaagaggaaggtccatcatcggattttcctccagcgcgcgcaaaatgggaaaaagagcaaacggacaaaagcctatcaaaacggaaagggggcgacagatacaggcgaaggcaaaacgaagcaaaaacagaggaagcgacgaaatttgacgggcgaaggcggcggcgaatgatatcgccacccgtaatagcaggaaattgtgattattagagatgagtttaggtagcaaaaatagccaaacagccattttcctgtttaaaaaccatattttataggattaatttgaaaaaacccttattttcgaaattttaccaaaccatgtagttaattttacatgcttatatcgatgaaaaaggagtgcagaaataggctttgcctaaaaatctcatctctaatgattatgagctaatatttcaccgaaaatttgcaattgtatcaatgaaattatgggtaaaatttacgatttttgtcgaagtatttgggattttcaatcctaatagagattctccatttttgttggagtcgagtatttggcaatcatgtcgatcattggtcccgaaagttttttctttaattttttttctgaaaatccatataacacgtttctaggggtgttttgaggcgctgagcacaaatcaggcctccatttcgaccaatttcgaacccctaac

SEQ ID NO: 79993 - DNA, 769 bp, Heterodera glycines
atgcatccgcaaggccaacaacaaaaacagcagcagcaaaagcagcaacaacaacagaagcagccgaagcactctccgcactccattccgatagtcagcagaatgggcggcgctgcgttgagtcacccccaccactcgcagccgtaccaccaccagcagcagcagtggtcaccgggggcagcggtggcgccggtggcggactttggaccttcgtccgccccttcggtcagcggatccatcattttcatgccctcagttgtcagcggcgacaacgctggtggtggtgggatgggcttctcctccaccagtgaattcagcagccgaatggcgttgctcatccgtgacgtgagttgggtatgtgttttggtgttgcacccattgcattttggggggcaaagcgatgtgtcggtcccacaaaatcaaaaagaaaaaaaattatttcacattttgacgaacgaaaaaaacaaaatgtgatagtcccaccgcatgtgccgctgtcgtgggttccccccccccacaccgccgttgttctttctccctcccctccggcgctggctgttattttcattatctttgttattttcagggtgcctccgtttatttatcagcttcctcttcaaacaatgatgatgatgaaaatgaatcagacagcgaaatttctccaaattgttggaaagaaggtaattgtcatcattttgaaaaaaataattcaaaaatttgagaaatttctcatttttttcagaattgcttaaataatgccaaatttaaa

SEQ ID NO: 79994 - DNA, 530 bp, Heterodera glycines
atgggcaaaatgttaaacctcgggtgggaatcgaacccactcatgcaccctttccgtgggcagctctaccattaagctaccgaggcacatctgccctttctttttatggatcttatcaacccccgctttccgcgttttaaccgcccagccagcttcttccttacaatataaattctcaaaaattccaacccaaacgcaaggagtaccaactttttttgcccttttcccgccttgtaaatcaaacataatttaagatttcaagcgcaaaaattttttcattgtccgccaaatgggcaaaggtatagattattggtcccgaaaattatttttaaataaagtttaagaaaattatttttaggggtaatctgaggcgccgagcacgaatccggtcttattttggctcagtctcgaatcccgaacccggactcgaacaaaagtttgagaattcaatttttcgtacttcgcagttttagttcaaaacccggctatatacgtggaatcaaacatgatcttattaatacgtcaataaa

SEQ ID NO: 79995 - DNA, 324 bp, Heterodera glycines
atgaaaaaagacgaaaggcatttgtaagcgaattttgtataaaaagtgaaatattttattagttatttcttctttattcagtttgggcatcactttcggattcgctgttaaacagcagataaaattggatcgatcaattcaatgggaaaagggcacttatgcctatgaaagcgatggctatttattgattaacggaaaaggaaagggaataaatgccgaatattcctacggtgttggcgataccgttggaattggcgtcaattcggccactcgacagctcattttcaccaaaaatggacttcgtttgggttagcaaataataaa

SEQ ID NO: 79996 - DNA, 3160 bp, Heterodera glycines
tggcgatgcgcttgtgcgtgtgccaatcctgtcgctcagtgccgagacgtgcattgggtgggtttttgatgcaatttatcatcctgttgctaatcacctttttctccgtctaatgcttcattttgctgaaactgaattttcttgttttggtaccgctctgattttagtgtttttttcgcaaaaatttcaatgccccgaattccattaaatacatttccgaatttctattttcccgctttttagacgccatttctctgttcactccgctgaacacgccctcaaaatgggcgccaggtcatccacgacatgtggccgtttgccaacggcagttacgtttcgggccgggccgtcacaaagtcgcgggaagtccaggttgtcggttgggtgggattacatggcttatcattatgcttttgattaggggtggcttgggtgaaacaatttcaaagattttttgacccattttaacctaagaatgcttttcaagttgattcgtacatattttgacttgtatgtcgattttcaaatcgaaatttcgaaaaaaaataatgttttcaccaaaaaaccgcatctttttttttcaaaatatttttatttctcagcacaatgtccgtgtccaccatgagcaccgcaactgctgctcccgcgacttgtgcctgcagatgaggggagggcgacaggctggcggtgcaacacagacaggtaaccagaaaatccgaagcggacacagggggggggggggggaaaacgaaaattttttgcatttcgcaccaaaaagcttttaaaatgacagtcaatggaataaattaagaaaacgtaataaaaaacttcctttaccccatccccaaacccacccaacccactcgggaaatcagtgaattccgaacggttttttaatttattttttgccatttttctcaaaaaaaaactggcactgtcatagccttttgataatttttttttaattttttgctagcaatgctaacatcggtgccattctttacaatttattcccattttcattattttcccccattttctgtccaggtttaccatctccaattctatccgtccaatgtgtcctttttgtcgggcctttgggagaaggaatttgagcgcacaattcgcacttacaaaagcccatacatcagcttcacctatttccactcacaggtttttattcggaaaataacaattgggtgaaaaaaaggcaaactgaaatatacaaaaaaaaaaaaaaaattttttttttataaattaattttaccaaggccaggtcgaatcaaaaaagttgtttatagtgcattttaaaacccgttttttatgtaggttttgtggccaataaaaccagcggtttggattgggtcaaaattgaaaacatttttttggattttcaaatttgcttttgctttgcaatatttactaatttcggcaatcctaacgaatgggtgtccttaatttaatctttatttttggactaaaaatctgtttcttaggatttttgggtactgattacgaatctaaaccggattagctcaattcataatcgcaaaccgatttcgaacggaatttgaaaaaatttaccaaaatatgcgttagcattctcgaaaactccatgaaacggatttagagcccaaatttattaaaaaaggattaaaattagggacttccattgattaggagtgccgtaattacaatatcgttttaatttcattaccgtatcctcccctccctttttttttgttagactttggccgaagaagcgaaacgcaacgcgcacacgctggtgctccattttgtgttcgcctttttcattctctttgctcctttctcggtaagacacaatttttcttttagcctataaaaacttaatattttaaatgaacgttttttatgcttatattgttggataaatttcgaggattgtatcgtccggcggtgctcaaatgccggcgcccccacaaaatgtccaggtcacgaaatgtccacaagagtaaaaatccattaaatgtccatgaaaaattaaagtttataaaaattcgggaaataagtctaaagtctattttagggttttcggagtcggtaaacttatttttcgggtttttataaaattaaattttatttttttctggacatttcgtgggcttgtactcttgtggacatttcgtgggtagcgcaaataccaccaaagaaatttttttttgagttttcaaaatttattttcctaatttttaagggataaaattaagaaaagccataattaacttatcgctattatatgcttctcaaatccaaaacgcaaactatattgggactaataaattccaaacaattaaaaaattaattttttgtatttccctgaaaaaggttggatacatccattagtttaaacgcatcatttttttatgaaatttagggagcagctcggttcttctcgcatcgtttccccacgagaaatttttttaaaaaaaatttgctaacttagaaatttttttagaaattttaatggtggattagttttttaaaaaattttccaaaaaaatcgctgagaatttctcgaaattttttttcttagaatattttataaaaagatttattttatttttttttaatttctcttgggggaactgatacgggggagaaatgaagtgcacccaaaaattttcttgacctccccatcgttcgtcgtaaggagggcggctgtaaaagagggtggtcgtcgtggaggggaggcgttaacgtagggggaaaatttaaaattggtacaatttccttagcgaaacccatgcaaattcaaaattttttcccggcggcgcctatcggcaccgccggaccgcctgccaccgccttccccaaaagttgaatgttttttttccaaaaaattatagaacttttcctacgaaatatgatataaatttttaaactatttttttctaatttttttactcctgtgttttgtagctacgaccctacgcaatattttataatttaccaattcttttattaactttaccctacaatttgcaggcgttgtacaacatgtcccatctgtcgtgcccacaactgttacattgactggacactgtccaagccatttctggcaattttgggtgtggtcaacgcgggcatgggcattgtgacggccatcggtctgcttaac

SEQ ID NO: 79997 - DNA, 538 bp, Heterodera glycines
atgcttttgtcacttcgtcctagcactaaattgggcgatcagagcattaatctaaattgttttctaattattatggttggaggacaatcggctcctaattttggttttaataatttttctaattatatattttttcgtttgcttgaattaaatacaaaatcaaataaaaattacaaaatttataaatgctcttttgtttataaattttttttataaattttcattaaatcaaaaactttatttttaaaatcattgtttagtttaaaaatgatgatggtgaagtggtcgaatttgacgacgatgttctaaaagcagtgctgaacaaagctttgctgtcggattcggccgcccaagctcaggccatggacataagcttcagaccgcatgattatttggtgggtatcttggaatggatcagtcgggatcttattcccttattctatcaaattcatggatatcctggatttgattttttaaaattcttttattaatgaaaaggtgaaattataatgctaattttcgaatgcataaattttaa

SEQ ID NO: 79998 - DNA, 211 bp, Heterodera glycines
atgtgccagtgtatgtgcgattgtcttctccttattttgtgcttcatttttccagtatgttttttaatggggtaaaagttttttgaagttttcatttgtagccaatcgccgtcttaatgcgccaagggtgcaccatccatttttgcattaacattttgcttacttgtttggcttggattccgggagtgatccacgccatttagtatgttaa

SEQ ID NO: 79999 - DNA, 1463 bp, Heterodera glycines
atgcccactcgcttaaggcgcttcgcaatttgcgtcggcgttgacgaagaaaatgggacttgtctgatggtttatgagaacgacttaaacgccattgaagtgaggatggtgttttccggtgtgcaaattggcaaatggtaccggttcgacttggcaaaaggcacgagacgaaattgggaggtagcggaggaacgattgccgacgcggattatgccacggggggacgcggggagtggcggaacacgcggggatcgcattcaggtgaaccacggcacaacaaggcaaatgatccgacggattgggtctgccataaaatgtttctaatgctgtttgaaattattctgctacccattggtaattcctttctgtttttagctttgccttcccattttctttgtccccaacttcaaatgttttggctgcacttggcgtgtcacttcaccaacttcttttaatgacaaaatgcacttcaatttcgtttcgcctcgattggaagcgccaggcaaaattaatttcagcgaagaacgactggccgaatggaacatccgtccgggggagcagtgttttgcatttttgacattgtattataaaatttgtttatttaaaaaatggatgccacttttcagggattgccaagggcccgggccgagcataaaaccgccgcaatggacactcgatgcagtggagcattttcacagggtatgatttgtttataaatcagtttttgtgtaacatgttaggatttcaagaggcaacccgtttccatttgcgacatttcgatacacagtgaaaatgcctcctcaaatagataaatttgaaaagcttttcaatatcttagtatccttccttttgagaaatttaaacatgaattaaaaattaaatttttgataaagaatttacggattggatgtcaagataaatgaatttttcaacaatcaaaactcattccctgcaatatcaaatttaattttaaaaagtccttcgattgtttattttcaggtcaatgttgacccattggccctctccgttctgtccgtttccctcggcgcttcgaaagaatggggcattctgctcgatttggtcattgaatctgaggacgaaagaaatggaatgggtttcattctgtgcttacgcgacggaaaattcgcttttggacgaattttaaaaaccgaaggtcacaacgacagctgctggagggcaaatgtgggcgacactgtcggcttctctttgatgttaattttccaattagacatttctccaattttcctttcagtgatgttgattgctttaattaccccgttcggttggctttgaatgttattgcctggcaatccccggcgttcacttctgttgactccgatgttctttccgaccaatttccccaagaatccttgcccgaatttccttcagttcgccttatttctaaaagtactggaaaaatggctcaacatttggtaatttga

SEQ ID NO: 80000 - DNA, 1022 bp, Heterodera glycines
atgagtagaatttgtcattttctatctgagaaaaagatcaaaccggaaaatgcagatttttttttttgcatcacaccctcaagctataggtaaaattttttttaaaaaatttcgcttttcgcatttcgctttttcgcatattttggcttttcgcatttcgcttttttttcatttcgcatttttcagtttcgcaaatttcgcttttcgcatttcgctttttatttttcaatttggcccatccctggtgtatagtaaggcaattaaaaaaaaattaaaaatgttcagcaatttttgctgcgttttcaatctttattgtttaaaaatcaaaattcgtttgtatttggcaattgtcacatttatttctgcgttgcatggatgtattgtcagtttgggtttgcttaatagtggaaacttacatggtgacctaatgatcacttgttgcttcattgactttttcatggtgtaatttaaaaaatatataaaaattaacgtgctgagacgaagtacgaaaagtgcaaggttgggcgaagcacgaaaaagtgcaagtcatcaaattaaaatcaaaataattaatttaaaaatgaaatcaaaaataattatgttaattacatttaattgtaacatttattatttaaattccgttacataattaaaatatttttttatattaatgattttatggattgctttgttgattttgacttataaggctaggaagcatggctggacgtaattacggaaattacggcctttttggaccgccgtaatgacggattacggatggccgtaactgaaaaatcgccgtaattacggattacagatttccgtaattgaaaatcagttacatccagccctgctatgaagacttccttaaaaatcaataagaatcattcataaatttttttctacaaagcggatcctgattggtggattttctctctctttttcagaaattagttttgctcttctcgcaaccttgcatacgagattatgttggaaatggtcgtttttcagtttttgaa

SEQ ID NO: 80001 - DNA, 632 bp, Heterodera glycines
atgccggcacagaagcggcgccggcacaaaatcctttggacaaggaaagtgcgcgaatcactgtgctatgcattgctgtccaaatccatgccgtatgtcatgcgttacttggtcaagtcaccattatgccatggtacactctgttgacaatatgtacaaattacgacccaattttgcaacaactgtattatccaatcaatgtgttcacttcgttatattacatatctgacgaggcaattaataaagacagaacatatttaatcaattaataataaatagaaagatatgatatatataaattaaaatatagcattaatcgagagcgtatttttcggttttcggactcgctcacaatcagcaggtgggccgtcacggttggccccgtgcttagacgaagcacgaaaagtgcaaggttgggcgaagcacgaaaaagtgcaagtcatcaaattaaaatcaaaaaattaatttaaaaatgaaaagcaaaaataattatgttaattaaatttaatcacaaaatttattatttaaattccgttacataatggaaatatatttttatactaattatatgcgtggtgaaccgaagcttcactaaaaatatactaattaatggataattacttaaaaataaa

SEQ ID NO: 80002 - DNA, 482 bp, Heterodera glycines
atgccaatgcttgtcgcggtgcttttgctggccaccctcatcaccatgaacatgttgatgttgaccaatggcttatgcgaatacaaccacacccttggatggtgccaaaatgatggagattgcctgaaaaactgtgcgcccgtggcggaaaatgaatgcgactgcgtttcggtactttcaaaaaaattatacaatatttaatatatatatatatatatatatatattaaagtgaaattttgaaaaaattagcgggcatgacttgagaattttcaaaagaataatacttgtggactacggtgcctggcgatttaaaaaatatactgtatctcccagatattagggacatttggttttgactcaagtaaaaaaaacaagcaaggttagacggtgctaatttgggggtcagggaattaggaaaagcaaggttactccgtgccgatttatgagtcagggacttttttaaattcaaatgctctaaaa

SEQ ID NO: 80003 - DNA, 1347 bp, Heterodera glycines
  unsure (1)..(1347): unsure at all n locations
atgccattgctcagcttggacactttaacaattgaacacattgtttggcccattagtaatggtctcggtttggtggcattttccagctgtactccggtgctttttctgtgcaggtgtttataattaattaattaatgacaggaaaaattaattgattttgtatattttagcaaaaaatatcgagaaggattttgcaaatatgtttgcagaacagaacatgaatcaaatgtcgttgtgccattgcaaaatatacgttgttctggcatttctgcttgaactttgtttttacattttgcgtattaattcggactcgatgatgtcatttcatttaatattttttatcagtgatcggaaccgcccactttggtgtcagccattattgctttttaatttgattagatataaaattggtggccgcctcaaacttttcaaaattttttattgccctttgttgtgccaaagctgtgtttgtcaacgttaatttttattatggcagctcaaagcattgggaaaagtttgaggaattctaattatgtcaattttagttcaaataaaatattaaataaatttttggcataattttaacaaaatgtcattatgaaaaagaaccaacaaaaaggatggttttttggtaaaacacaatttttagattttttaaatttagcctttagtggaattgatcagattgttcggtcaacaaatccattcgtgatgaaagttttttccacaacagcattttaaatgttcttcagatgtggacactaatatacatgtggacggaggacttcagaaacaaaacngccatcaaagaattggggatcgcaaaatcaacttgcgtcaatttttttaaaattttttgtaaagatattttgttaatgaaaacccctaatttaataatttatcaaaaatttcatttatgaaaatccatttaaaaaattaagaatttaaacctgaataggttgaaaattggatttatttttttgtgttcttttgtctttttgagcagaagctataaaaaaaatttggggtgctttggtcactaattcagttcccatttaagacttctgtgttctttaatggcatacttccattgctcggcttgaaccttttaacatttgaatacattaatggtctctttttgatggcatattccagctgtactccagtgcttttcatgtgcaggtgattttaattaatcaattaattttaatttctaaaaatagtaaattttcatattttagcactgaataccgcaaagcattttgcaaatatctttgtagaaatcaatacggatcaaatgttgttgtgccattgctgaatatgcgttcttctcagattcgttcttga

SEQ ID NO: 80004 - DNA, 1253 bp, Heterodera glycines
atgctccacgagatgggcctagagttggtgtacagcaaaagcttcccggacgccattggccatttcatggcgcagcgcgggcgcgaggcgcgccaactcatggagagcatgaacgcgctggagacggtggtggacgcgcgacgcttggagacggagaagggcggcgtcgaagcggcacagcgcgagtacggcgcggcattggcacggctgagaaagagcagcggcacaccaacaaccgacggggagggcgacagtgccaatgacaaagacggaagcggaagaaatgagggaccaacggggtgggggagaccacacaaccaacagcagcagagacaatggcaccagcgacagcagagacccgtggaaacaacagtggtgggtgatcattgaccaatgttggctacccaccggtagtggcattccgttttgattttgccacgtgtgatttgcaacgttttgtgatacacaatgaaatgccttcatacatggattttcaatgccatttataaaactcgttcatttttgatctaaaatcaacatatctgaaaacggggggcggagttaccaaaccttttgcgagcgaatgggtcaagccatcatataaatcgatttttagattttttatggaatttataaagaaagttagccaaagttcagaaattttccttttagaaaattaaaaatttttcactttttaaaaaaaaggttttagaggtttttcgaggcgtggggaaacgagctgttttcccttttattgaccccgttcattgttcagggaaccctatcaacatcggaatggcaagtgctgaccatgtaccgggtgttcgcatttcgacgacgcccacgccaatgccaaaccgacaaagacgacgacactcgtggcaaaaacgaaacggaggaggggcaaaacggtgccaacgacgatgaagtggcaaaaacagtgacagaagcaacagcagaagaagaagattatgcgaatgaggagaagaaggaggaggaatgaaggcaaaaacggcaccaattgcattaatcgattttttttttgaatttgtacaaaggattggaccgcaataccacttttggcgccggaatcccgagttccgggagtttttcttgacttgcggtactatccctgatttgtaccccctagggcatggtattcttacaaaatcaatgacatttaagtgagcgattatctgctaatcgtttttaaatctattctttatataatttatttaatattttcaaataaa

SEQ ID NO: 80005 - DNA, 377 bp, Heterodera glycines
atgctcggcccttccccccagcacttcgctgccttcgctgtgcgccaaccccaactttctgtgtccgcccgaaatgactttggacgtgttccgtcgctgctccctctcctcctcctgctcgtccacctccaacaacgagtcgagcccccaactgtcgcctttgccaaccccgcaaaagccaagcaaatgccccaacagtttcttcatcgagaatctgatcgagaaccaaaatggaagcggataaaaccgagtgaatggatgccaaattgtgcggtgaatatcctgaacaatcccataaatgcaatgaatttgtaattaatgaaaaataatcagccaattcctctcaatatttattgactctaacaatgattagttca

SEQ ID NO: 80006 - DNA, 1977 bp, Heterodera glycines
ttttgctcattgttctcgttgtattttgacttttcttatttgttagtataataaatttacatttttttcttttaaaaaaattttcccttgccaatggtccgacttaaattccgattttccatttcattttttatgtaaccattcaaattgtcgagtctcaaaagtccccccccccttttgttgctctttctttccatgcgtttgttttgccatctcttcgctctttccctcttttcgctgccctttccctcctccgatgccttcgttctcttttgtccttgcatgggttcgtgccgtgccaaagtcgcagcttttcattttttaattaagggcgttttggcaaccaaatggaacagtttttgggtgcgtttgcctttgctaaatcgctgaatcggactttggttttgcctcccattataaattatcccccgggcgctgaagaggcggtgggcattttacatatttcattttgaaaattaataaaactgaagggaatgatcgaattcgaccaatttttcctcgtgccgccattggcccaatttcaccgaattgtttcgctccgcgacttttcgcatggaatcgctccaaaaatttggccaatggaaaaacgaagaggtgctgagaaatgagaaaaaaaacaaatattttaacattgtttatgtcagtgctgcgatttcgaaatttaaaaaaatttattggccataagaaaattgtaagatgaaatttgaaaaaattgattgcaaattgttagtccaaaaaaagccgaaatttgttttttttctcaaattaaataaaaaacacaaatgagttaaaagcgcaaaaatctccgctttggtttatgccactcaaatgcattttttccaaatcggcactttttaattacccccccccccccttcagtgttctgttggtcccctcgccctggccttgccaatgcctcccttttgggctgtcatgccaccgaagggaatccgttcggtcccttttggcgttacgcaggcacacattttgtgggcgaagaatattttggggtgaagacgggcggattcgacacgcaaagggagacaatcagagaaaaatgggcgacggagtgagtctcggccaattcagtcccacgtgggggggcggcgattggtgggtcttacgactttcggcaaaatgccgatgaatcgttttaaccccttcttttttagtggtttcattttaatttccattgtcccattttaaattccccgcccattcttcgcctgtcctcgctttttcttctgcccccgccgcttttcccgtccgccccgaccaccgtttcatccagcgattcggccagtggaatgatcgaattaagcaaaaagcgattgaatttgcctcccgcaactttggccacggaaaggcattcgttggcattcatttgagaaatggcagagattgggtcagtttggcattttatgatcaaaatcgcatttggaatgacaggaaaatgtgtgccaatttctccgggaagaaaatgtaatgggaaaacgacaactgtttgccagtggccaatgcacggggccggaagaagagaatgggccattgacggcggacgcatgcgacccgtcgatggacatcattttggaggaggtctttcgtttggggaagcctcgaaacacattcttccatttgcacattggcccttctcaggtccgttttcacgtcgtccgtctctccgcgtccgcagttttcgtcgccagtgatcgcgaccatcgcttggcccaaatcggcgcccatttggccaaatctgtgcgttggcccgtcaccgtaagaagtgccggaggagcgaatgtgccgatggatttggcactgcttggaatggcggaccatttcatagcaaattgcgtctcgactttcagtgcttttgtggtgcgacaacggcattttggagatgagcaaaggcatcggtccgtctcttttctcgcttttcccaacgcggcgatggaattg

SEQ ID NO: 80007 - DNA, 562 bp, Heterodera glycines
atggcgaatttttctcctccttctgacaacactgccccaaaaaaatttctgtccgaccttgaccaactacaaatccccaaagaaatcgactcagacaactccattcccgactacgccaagttgcttatcaagcagcttcattcccttttaagcaccgcctccgtcctaattcattcacaggctgcggctgtcgacgcggtcgaggaggaacgacgactgagaactgtcgttgtgacaaatgtgcccgaaagcatatcggacaaagcggcggagagagcccgggaggaccgtgccgttgtggacgaaattttgaatgccacggacgtcgaccaggcaccaattgtcttccgcgtcggcaaacgaatggatggacgaccgcgcccgctcaaaatggaattcccgaccaaacatgcagcgcgacacgtcatccgcatgcgcggaaaggtgcaggcattgaatggtctccataatgtccgcgtccgcgagagcatgaccaaggaacaactgtcggagcggcgaaaattgattgaggattgtgcgaagaaaaggcagacggacagcg

SEQ ID NO: 80008 - DNA, 1419 bp, Heterodera glycines
atgggagcaaaaaggattgagttcaaaataggcgatcaagtacagtttgttaattaccaaaacggtaaaacagtttggctttttggcaaaattgtggcaaagaatggattaattcttaaaattcaatccccacaattagcacataagatcatcacacgtcaagcaaacgcagtgaggctatcggcagcgactggcactgatcatgagtggtcaaacgacgaagtgatcagaccgcttcaacaatatcttccggcaccagttcattcaccagtccgatcgccacaaggacacaagcaaaacacaccatcacccgatcatcgaatgcaaccacaagaacggactgatcagagggaccaacaacaagaaacagaagaacaaacaccggaactgcgacgatcaaaaagaacaaccaagaaagttcgatttttgagtccaaggcccactggacagcgacatgagatcagggacaaagttaagttagaacatgacggcgcactctatgttttcgaccaattgagcgcagatggacttaagaaattttggcgatgtgagtttcatggcccgtcagacaaatgcaagggtatgttaatatattattttgatgcaaatcttttaaaattcaggccgtttgcacacggatttaaataacgttgtgcagaagttggtcggagttcattcgtgcgacatgaatgctgcgcatgtggaatgtcagcgacttgtaactggactcaagcgacgtgctgctgagacgtgcgaggcacctgcgacaattcgtgctcaagtgctgcaaaacacatgcacacctgtgctagcagcttttccgagcaaaagcgccacaaaaaagtgggtttatatccaaaaacaattttgttatttttttgtttttaggtaatcaaacgattgcgccgtgatgaaaatgcaccgcggaccgaacctctcaatttggagcagttggaaattccaaatacctatcgtatttacaagcgaactgaaattggaacaatttctattggcgacaccggcgtttttcaaattcaaggacaaaatggacctcaacggtgagacatcatttatacattaaatgctgatcattgaaccggtattaaggattctcatttttggaagagcttctacggcggattgggcccatcagatgagtgacatttacgcggacggcacgttttcattgacgccaccgcttttcagccaaatttatgtgttgttggcaaagtaaagttaattgtgttatcacaatgttcaatctttttaggagagatggttgggtatttccaatttgctactgtcttttaacatcgaagtgtgccgcaatttatacgcgcatgttacagcttcttttggaacgatggccgaatttcgcgccgcagacaatttcaatggacttcgagttggcaatggtcg

SEQ ID NO: 80009 - DNA, 140 bp, Heterodera glycines
ctcggaaaagctgctagcacaggtgtgcatgtgttttgcagcacttgagcacgaattgtcgcaggtgcctcgcacgtctcagcagcacgtcgcttgagtccagttacaagtcgctgacattccacatgcgcagcattcat

SEQ ID NO: 80010 - DNA, 105 bp, Heterodera glycines
tgtctgacgggccatgaaactcacatcgccaaaatttcttaagtccatctgcgctcaattggtcgaaaacatagagtgcgccgtcatgttctaacttaactttgt

SEQ ID NO: 80011 - DNA, 2462 bp, Heterodera glycines
ggttctcggcaccactttgccccaaattgcgtggaataaggccggcattgcgaaaccgggcgccgtcatgcttagcgtggaacaaccgcgcgatgcgatgcgcgtcattgaggaacggtgcgcggagcggacggtcaattttatataattataaaaaacatttactgatcggcggtgggtcgttgattctatctattgggattgattaaattcggacatttcattttctttgattactttacttactgtatttcttgaaatagaatccatggctgatcggtctgtgtttcaattcccttcaaaagggaggctttgtttcagtgggggggggggctgtattataggaaatacggtatttaatttgatcgctttcaaacagccgttgattattcaatcattttaccaaataaaattaatgagtttgaacccctgcaattatttcattccttattgattcactgattaattttatgatcattttaattcttctgatcatcctctgctaattctcacttttgggtttgttaattattttcaaatatttaatcagtaattcttcgtcgttttattctcagatcatttattaaattaattatttaatttgatcacttttccccgcttttcagtgcccccttttcattgtccctccactcaccgattatcgttggccttcttccaccggcggtcaacggccgtttgaacttggcattgccggcccgcatcagcacatcaatgcttcgttggcactccaactggcacgcatttggctgctcaaacgacacggacggcacattggtcggcaattttccaaaaaatggaaattcctttttaggaaactgattaaattttttaaattcattttagaattttaaaattatgttttttattccattattttgtttcacaatttcccagaacatatcttaatttttcttgccttttctgaaattattgcgaaaaaaagggatgggaatttatttagactaaaattcgaataattatgatttcctaacagactaattatatttaaattaaaaactaattctggtttaagaagctgatcaaaatggcacagaaatagccaacaaaagcagcgacactaattcaaatgatctccagcaactgctccaacttgatgggaacaacaccgtcgacaaaaaagagccgaatttcccgacaaatcgtttgaacgcatttgcattgactcatggttagtcagccagttaaaaatggtaaagtggatagtctattcttcccgttgaaaaatggctttttatgaattaaaatttaaaaataaattgccccaggcgttgcgcaagcgttagccaagtgccggtgggacgggcggagtcagctgttgcgacaagggccaaacacagtgttccacttggacggcgcgcacaccccccaaagcataaaggcatacattttcagtttattttacaaattctattaatttaattttcctaaatgcttttcaatgctatttcttgcattcctctttcgtttcccttatctctcgcttcctttcttcccacagtttgtatttttaaaaaattttaaataataaaaaaaaatctttttaaaaaatcaaaaaaactcttcagttctgtgcccaatggttcctccaaagtgtcggtgccaccgtcacagcgccgtccgtttcagtcattcgcattttgttgttccattgcaccggcgaccgaagttcggcccaactgttgccaaatttaaaagtaaaaaaacacatttaaaaaccaaggccaatatttagggatgcgaaaatttttttgttatttcctaatttattttttaaaggattgccgttttgacatggcactgttctgtccggcgctgatctgtccgcccgatcgtcggcccaccgggcgctcacttggccaagactcgaccaacgtcaatttggacctgagcgcagagcttcgacgatgcgagaatgatcaacaaatttggcaacaaattgtaaattaaaaaaatgttctttttaatttctgatgaatttttccccattgtcttattattttgaaaaattacactgaaaaaaaaacatttttatgattccccatcaaatttctgtacggacctgcggaaggtttaaaaaaattatattttttatctatttgtaaatatattcctctctgtgtattattcgaacgtttctctattaaagcgattaaatatattttattttccaaaaatggtcgaatatttaagggatgatcagtttttttttctaaaaattattttaaaaaattcctcattcattttcccataggctcctggccatccctccgctgtgttcagttgtgtttcggatgcgttggacaaagtgcgtgccgtggcggtggagaacagcaaaggaagtgccggcactgagctgcacgtgttggtgactggcagtcttctgttggtcagtgattggttgggcggtggattttttcggg

SEQ ID NO: 80012 - DNA, 457 bp, Heterodera glycines
atgactttaatgcttcataacatacgaggattgtttcgtcaaaaactttcgggatgtttggaaatgtcttcactgtcctcgttctggtttggaccctttgcacaacgggagtttggtcatttttcgtttgtgagagctgtgttggaggtgccaatcagggctgcatttttctattttttatttaaagggctacccgtatttcgatttatttaagaattaaaatagatttataattttttatttgttgttgttaaggctatttgggtagttcgcctagaaaatagaggcatcacttttttgtcacacctatttctcacgcattttatgaaaattcataaaaccttagccaggtgaggggaggaattccctcccaccccctcccccgcccgaaatgaaaaattaaaaatttttacaggaaaaattgtgactttaaaattttttttgtcgatttttctta

SEQ ID NO: 80013 - DNA, 2246 bp, Heterodera glycines
atgtcctctttcgctgtcccatttttgatcactcttctcctggtaactttgacgatccaatcggacaatgcgaccaccgtggatgaccaagatggacaaatggcagcagctgctggagacaaacgcattttccgttttaagcgtggtaattaaattaatgagattcacgtgttgagaagataattcattaatttcataaatccgccattttggaatttttttttcgtaaaaaaaatcctccataatttcaaagaagtaaccaagtcaaagaagcttttcggcaacattttttttgaaaattctcaagccttttttgaatttacattttaatggagtgaatgcatttatttgtttgggctatcagccaaaaatatttatttttgattgtttttgatcaaatgtgtgacgaaagattagtcaaaaacgacggaacatggcaatatccgaattggataattaattacaattttcctgttaaaaatggaattattaatgcctatacattattttttggagtccggcaatgccgaaatgcgccgtaccggtaattattttcacatttttaagctatttctccccgatgccctggcaatggatgtgactgtaaaatcccttactgccaagcggtgtgccaatattgcggcaaaggaaagaaataaggagaaaacggcggtggatcatagaaaaacagaagccaaagatcaatttcgattttgtgttacttttaaatgatttgacgttcttctcacagctcggatttgtccttgttttagcgaggtcaaatcaaaaaaaaaactaaaaactgtgaaaaaaactactttgttttgtggtttttggattgataaatattaaatacagtacatacctaattgaatcaaaattaaaattaaaacgaaaaatttgttaagaaaagagtcaaaaaaaattaaacgattttaagcgaataagaaaattttttgtaaaaagtctcgagtttttcggtctcgaggccgagtcttggggtcaagtcttgatcttatgtctcggaaaatttttggtcccgagcatcactaaccattagcatttcataaaaattttggctgctaatatccgtggcttagcttgttaaaacatttttattaaaagtaaatttattaaacaaatggaacagtaaagttacaataatatgcaccaatggcaattgatattttctgcttcacttccgtccccacaaattgtcgaaaattgtgccgcgattgtatgccatcgaaattgcgtcagcgtaatacgattggggacgagcattgaccaatgaagaaaagtgcagcagaaaagtgagcagaagcagcagcaaaacgatgggggaaaattgagaagaaatcattttgaaataattaattaattaattagagaattaaaaaattgttttaaaaatgatttttgatgataatttgaatttgaatttattcatttggccctttcctttttataagggggaccagagcgtttgggcccccgtttttgggcccccgcgtttgggcccccgtttttgggccccggggtcgtttgggcccccgtttttgggccccggggtcgtttgggccccaacccaaaaatcgaaaaatgtgcttttttaaaaattaagattctaaaaactaagcctgagggatccctcgccacttggcataagttaggtttaattaacattcgctcattttttacaattttacttattccaaatcctattattttttaatagttaaccaatttgatgtacattctgatttggacatttttcagaaatggctaacccaattgcaaccaaaaaacaaaaagtaaaattgtcttacgaaggccacctttacaccttcgctaaaatgagttctgatgggatgacaaaattttggagatgcgagttcaaaaacagcaccgacaaatgcaacggccgaatctggacggacctccacgaccaattcattcgcctcgcaactccgcacacatgtccagcagatgcgtcacgtgttgatgctcaaatggtcacgaccgcaatcaaaaggcgcgcaattgccaccttcgaaccgccttctgtcatcagagcagaagcgcttcaaaatgtcccgtctccgtcggcaattttggtgtcaaaacaagcagcaaaagatgtgaaaacaaaatatttttcatataataaaaacaattccaatttagttaatcaaaagagctcgccgagaagtgaatgcgccccccgtcgttcctgcaaatcttga

SEQ ID NO: 80014 - DNA, 746 bp, Heterodera glycines
atgcatttgaaattgtgcctattattctgttcaatattatttttgattatcctaactgatccgatcgaagcagaaaataaaaaattggaacaaaaatcatttgaggaaatatttggagaaaaattggaagaaaaaagatatggagaaatttgtaagaaaattggggtttgtcttaaattaattaaaaaatggaagaaacaatttggaattagccaaaaatttgcactaattatttctttgaaaatcgtgactttttgaacttggttatataaaaaatttttattatatctgcgaaacaaatcaaattaattaattgataaattaaaaattatatcaaaatcaaaaaatatttatcaataatataaaatgcgataataataagtattattcaaaactaccttataaattagctaaaattaaatatggcctaatctgttttatgcaaatcctaattgagttttccatcggaaaattgtgctattactaacacccaattttcgcgcaattattttttcaattgttcttgtggccttctggttgaatttgttcgtgaatttttcttttattttttcaaattttgcaattaccgtattttctctttttatagacacggggggataaatggagaaggggggattatttttcgacagatttattttgtataaaatttttgatattttttagaacatgtcgccaaaaaatgtcatcgagtcaaagaaaaatcatttttaattgcattttttaaa

SEQ ID NO: 80015 - DNA, 2569 bp, Heterodera glycines
gaaagcaaacttgaaggacctttcaacttttccgcagtgccattgcatgggaacttcaaagatgttgaggcaaaagtgaacgttacaaatcacattaaaccggtgtggatttgcagcattaacacgcacaaaaagacgttggcttacaggtatttgttattaaatcagaaaggtattttccattgctaaagccaggctttgtttttcctttccaacggatatatgtctaacgcttaagcagcttttcgatattttagtaacacttttaatgccaataattgtgataattacatgaacaaaaattaagacttttttcgaggtgctgatcacgaatatgacatcgactgcgaccaatttcgaacccggaccggaattcggaaataatgtcaaaaaatcaaattttatgaattttgactttgtcgagttcgggtccagggtacgaaattggtcgaaagaaacggtcatattcgtgatcagagaccagaaaaatcatcctgaaattttttaaactatattttaagcacatttattagcattttaaaattgattaaatttgtatcctaaactagaaaaaatgttcctgcatattttgttactactgtttttgtatttatttgataaccaacaacacaatttcagttacgaagttccgttccaaaatgcatccaagctgatcatggacaaactcatgcggtggtaccacagcgaaaaccacgacaaacagttttcgcttgttccgcttccatttcaaaatgttggacggatgagagaagcgctgaacaaagagttggatgcgaactacgacggttgtcgggatttcgtaggtataaatattatcgttgtgctctttaattgagttatttttaaatttaattgttgttccattactatgagcaaaaaattaaggaaaacataattgttaaggataccttttttagcagtggcaacattgacttcgggatgggggctgaattcaaaaagtcgatttttaggagtgtattttcattttcagaaatgtagaattaggagggtgtgttttgcagatttgttttttcgccataaaaatgaatttttttttttcattttgggggtacggcggtgccggcggaaattttaatgcatttgattaagaaatcttttgctctttgaaagtttacacggccataaaaatttacgcaaccattaaaaatagcaaggtcatttaagctttcaaaaacttatggagggaacattcaaaaaattaatttttttattcatagagctacgcctattacaattagcatggacaaatcctcaaataaatgcccatttccctttctaatttaacgcgttgtttaggcggtgttcatttcttcaaagtgaacacctccaaactgacagctgcgctgcactataccattctgatgccaagcaacaacgaacaatccaggtaaaaaagctttgtctttgtcctgttgtgcaagtgggtagccagtcccttggctttgggtgggggagggctgaattcaaaaattcgattttggggatgtatttttgaaaatttggcctgcgatttgttaagagttgcttaaaatattctaaaaatttaaccaatttcttgaaaatttttactttttttgggtttaaggcggggaaagccccctccccccccatggtacgcccttgtgctgacgcaaattatttgaaatttaacagacaaaacagttggtacatgcaactcattaaccaattctggcgcgatgatagcagcaaaaaacagtttaaaaactaccaaattcccggatctccgccctattggtcaagcggtttcctgtcgcttcagtacgcaatcgaaaaggcgttcatcgaattggtccgtatcaatatatatatttatataatattttttaatggacttattgttaattttgtgtattttttacattgtgctcaattaaaaaaatatatagagatttcacttttttacgtgcttttaaggccaatggtgacgatgctttggcaaatgtttcgctccgtctccaccgtttgcccattccgtcgtacatgaacaagcaaatggccaccataacggtgcccccttttctgaccacgcttttgtttgtgtgcgccttttccatgctgaaggacattgcggtggaaagggagtccggcattatggtaatttaaatgggataacacatatcttcagaaaatacaaaaaaaaaaaattgatgaaaccatacattaaatcggtggtcggcccggtcgtttacgaacgaatgttagaggtgggggggggtttaattgtgcgaaggagtccttgccatgtagatcgacgagcttttcataattttttttacgattttagtcaaaaaaaatttttttttttttttggctagttgcaagactgaaaacttcttattattataaataattaacaataatgattgcgttttttaaggcttacatgtctgtcatgggcttgaatcagttcgctttctacggctcacatcttttgattgctgtgctcaaaatgttgccttttgctctgatattcgcttcactttgtgttatttatcgactcattgag

SEQ ID NO: 80016 - DNA, 679 bp, Heterodera glycines
atgccaaaatggggagacaacgactgcacaatggacggaccaacaaaattcgaacaacaatttgaacaatgtcagcatttatttgaatggcgcaaattgcatttggtgagcaaaatttgcgtaaaattattaaaaaataattgaaattttagaataatttgttacgttgagaatatctttaaaaaatcaaaatttaaaattgcaattaatttttggggtttttgtttcttttcgactttttgttcagaggcaaattcaattaaaatttaaaaattttcgaggtaaaaaaaaaagaagtagattttgccatttctttaggccattgtcgtccacaccaaaggcgcgaaaaagcggcagaaagaagcggcgtcgaattgtgcggaagtgaaatttaattgagaaatgatcggcttattggggattattgaatggacaaattgatctgctgatccatttttgctcattaattttaatgattctttccgacgaaatattttttatttctttttacttttgacattaaatgcaccaattagggctgctcaaatgagggctgaaatccccagaaaattaaccctcgtatttctccacaatgctgttcaaattcggatctccgcaagggcgtagcgaagggggcgggggcttaggaggctaaagcccaccgaaaccgaaaaataaa

SEQ ID NO: 80017 - DNA, 54 bp, Heterodera glycines
atgccgtcgtgtaacggagatcgacatccccaaggagaaggtgaacaacgacgt

SEQ ID NO: 80018 - DNA, 1477 bp, Heterodera glycines
ctccaaggaggttcaaaagcaaacagaaggaccattggcattcactttcatttattccgcctttggcattctgttgtctttgtgcactctctttcatttcttcgcgtgtattttcaccttcccaaaaaggtcctcccgtcaattccgagttttacaccacgtggttttccatgtggggcgaaaaatcgatggttcgccaggaaatcggtcctgttctgaaaacaatggattacatgtgggcggaaaacgcttcgttcagtctgtacatgattcatggagggacgagctttggtttttggagcggaagagaaacgaatgggcctgtgagtggcgaaaggggcgatgaatgacgtcacttcaggtgatcacttcgtacgattacgctgcccccattgatgaagcgggtcaaatcaccccactttacggggccattcgaaattggatcggcgccaaaaaggattggcccaatccgccgttgccactgcccaagaacagaacgttggtcccccccccccccctccttccatttaccaaactcattagtggcgtttccatccaaaatgtttttgccgttaaattgggcgatttcatcgctctgaccaattcgagttcgctgagttcttcggacagtcgccagcggtgcattcactcctccgatgggccgttgaattttgaggcgttttaccgggaccatggctttgtttggtacagcgcatctctcgagacggacggaaaaacattggaagtgcctgaacttcgcgaccacgcttatgcctttttggatgggatatttcaggcaaatagcaaagggaaaaattaagtgaaaacattggtctttctcatcgcagggcaatttgagtgtcaatgacaaaacggggggacagatgaaaatggaactgaaaggaggcggaaaaaggggacagagaatggacattttgggtgggttggagaaggaaacgcgcaacggaacgatgtcaccaattaagtggaaaacatcggccgacttacgtaccctctgaccaaaacggaccccaaagtgccgtcccccccccgccgcttttcagttaactttaagggacttttctcgccacctttcatcgatggcaaagtgatcagcaaacgatggattcagtgcggggtgaatttggacaatgtttacgccgaaatcgaaaagcgaatggccaagtcaaaaaatcgaaaagaggtcggaaagcgagggatttgaagggaaaaagcatttgccaatgcgaagaatgacttcgctcatttgtcagcccaccgacacaattcgttctgcgcttctccaagagccgaccatttttgtggccaaattccccaccgctcacatcgattgggcccaaatgcacacttttctcgactcgcgcggttggggccacggcgtcgctctcgcaaatgggttcaatttgggacggtattggccaacgcaggggccgcaggtgtttttgaattttgaaat

SEQ ID NO: 80019 - DNA, 2654 bp, Heterodera glycines
catccgacgcatatgatttgttgttttctgatgcggatgatatgacagcaaatcttccaacatccagcagctcattggcagcttcaacttcgggtgaattttataaaataaattatatatatttcaattgagactatctgacatttttagattttttaaaaaattgaaaactaaatttattaattaatatgaggtttttccaccatgacaaaatgtcgccagccgaaacgttgttggacgaatttttggatcataactttttttttctttctaaaataaattaaagatatcttgttagttgttcaaaagcattattaacacacagaattcttgataaattttttttgtgcatgattaaaaaaaatcatgggaaaaaatcttcgaaaaactaggtttttgaattccttctggccatgccataattttttgaaaagtaacgaaatttttgagatttcgcaaaacattaatatcaaaaaaaaataattagcataatcggattgacatcaaacaaagttatgaccaaaaaaaaaaaacttttttcgtcagagcgacattttggggtgcagccgaaatatttatttctgaattttaatgccaataaaaattttaattaaatttgataaaattttatatgtcaatcaccacatcatgtctaggcttagctaaccacaacgaaactgaagtattacttctcgaacacgcgattgcggaatcattaaagctgaaagagaatgaagatatcgaattggccaaagccatttcaattagcgaagtgcgaaatgattttggaaatggaaatggccacgaattgctgtccattgacccggctgaaattgacacgcaaaaagcattaatgaagcaaataaagaaagacagaaaaatgaaaatgcggcacaaacgtggggcttttcctatggtgagcttaatggacaaatacggatacggtattatagtctgtctgtatattaaacgataatagattattggcctgctgcctgtggggtgatattactgcaacagtattttacagaattatcgaaaaatttacaaattgataagggtttataaatgaagagaggaacacttcatgtattatattgactaattgaaaattttttttaaatttttctacgttttcgcaattttttcttgaatttacgcttgtatattttattgtttgcatgcattttatactagggtttatataaagattaaattaaagttttatttaaataataattgttttcaaccaattttcaatttttaaggcataacaattgtataacaactaacaaattggcaacaggaatgtatttcaagaacgatgatatagctaaatttcctagacactgttttattttcattaaatgatttttagcatacattttttcgatttggactcgagtagccactgtattcacaaattattataatttatttttgtaaaaaataacatatatgacaatgtgtcagatttaaatgctgataattagtgctaacacatttttcggtcgggggtcgttttcgcgtggccattttcgcgtggccgttttcgcgtggggtacgttttcgcgtgagtagctgtttaggactgaaattggtcgggtttgtgcaaaacatccatgtttcgaatccgaacccgcatttggacaaatttcttaactttttaattcttttatttctttcggctaatatcttctacaataatttgtcagtttggtcggatgtgcgtcaaacggaaaaaataattaaaattttataaaaatataacaaaaaaataacaaatttcagaacaaactaaggtcgcatttcatagtttcaggaaacaccaatgagaaaattgataatgttttcgggattcacattggcattggcataattgtgatcattttgggggaggtgaatgttattgatgtcgttatagagtgcgccgtcatgttctaacttaactttgtttcgttttgttttaattttttgctgctgatccatattatataatttaaatagccttaatttagtttataaactcattaaattataaaataaaaactcgttagaaaaaagagtgaaacaaattttggtaaaatataatgtgagttatgaattctcatttatatgcaaccacgcgaaaacggccacgcgaaaacgtaccccacgcgaaaactgccacgcgaaaacggccctcacgcgaaaacggccacgcgaaaacgtcctggcccgtataaatagggacctaaaataggccgctgcccgtcaaaatccctccgcgtcataattagggatacgatttatagttactaaaaagtgccaaaatagttagttttagtttctaaaaacccccaaaatagttgctaaaaatgggaaccgcccactttggcgatctccgggttttttttactgtaacttttttatttgtcaaccaaatcagcattttgttggtatcattctatagacctgattgtcatcaattagcctaaaaatttttcaaaattttgtttaagttcagaaacgttatggccagaagaattcaaaaaaccaaattttctaacctttctggccataaatttgttcaaaactgacgaaatttattgaaattttgcagggtaatagagtatctgaagggctatcgaatgataccaacagtgttggatttg

SEQ ID NO: 80020 - DNA, 238 bp, Heterodera glycines
atgcatttcccatattttcaccaaatttttgtttttgctttgataatagtgaatcgagcacatggacaggcggcagacgacaatcagattgacggaaccggttatgagaactacgattcggatgatctagaagctttaggatggagtaagtttaattttatttaatatataattttatttaatattattaaagttatgatttttaggtttttacctattttctaagaattgtacttga

SEQ ID NO: 80021 - DNA, 64 bp, Heterodera glycines
atttcaaatttaaatatatttattgagcaaaccacaggcacattagtgctcttatgtggcgcat

SEQ ID NO: 80022 - DNA, 646 bp, Heterodera glycines
atggcgaggaaagtcaaagattgttttgtgccggaagttaacttgttaaacgacgcaactgagaagctggcacaggtgaaagagtaaaacaggggtaattagcaccaattggctaattaggagtaattaactaattggataattagtagtaaatgctgccataatgccaagctcaatcattcattaggcgatcaatttttgcgctcagcgaagccctttcgacgcgaccctttatttttttgacgggaaaggcccaatccaaaagtgttcccgccaggcgttggtgtgccgcggcatcgcttcggcaccgttggcgattgggtgcccttcgggtgagagaacgaaagatgaataacagaacgccaaattaccgcaggcaaatcgttcgatccgaaaacgctgaattgtatcgctgccccggagcaatgcgcagtgctcgtgggcctttttttgatggaaaatgccaaactttgccatttgaaatgtttaggcatctgctcaaaggcccatccgacagctgttgctccatttgtactgctccaaagcgcacccaccgaagaaagacattccgaatgacgaagatggaatgcggatgcgatcagaaggcgacgagccgtcgcagcagcaaaagccagcgattgtccaa

SEQ ID NO: 80023 - DNA, 332 bp, Heterodera glycines
attccatcaaactaatcccaacatttccttttgttattctcgacaattacacaatgccgacttatttttgacactttcctttccgtttgtaagcgccttatctcttggattagttgtttagtccgcctttgttgttacgcctcaatttgaattttattcttggccttaacattgtatataccatcttattttcttttgtcccttccctaagcatcattagtccctcctcgtttcccatttttattgtttttttttctgccggtgcttccgtttattctcgtcaccgactttttcaatttctaatcacatgcataaaatacttaatttcttta

SEQ ID NO: 80024 - DNA, 1668 bp, Heterodera glycines
atgccggtgccactaggcgctctgcccggagcgtttggactcaatgtgcaggataaggagttcttccctcatttggcgaatgttgaggcgaattatgggcacattctgcagtcgctaccgccaaaagctgactacttatacggtggaatgacgcccgaccggcagcgcagatttgaccagtggtacgcggaacaccgccatcagcagttcgacctatgtgaacagctcgcagcctactgcaccaacgacacgcgcatactaattgaggcgttggttgcttttcgcacggagttcttgacgatcagtgacccgatggagcggcatggatgcttggatgatgacgacgacgacgacgaagaggaggaggagcaggatgacgacaatgcatttgaagtgatcggcggtggcattgacataacgtgggagccgatgaccatcgccagtgcctcaatgagacactttcgactcaatcacctcaagcgggatcagctcgccattgtgcccgagtgcggctacgacactacaaacacgcaaagccttgtagcgctcaaattcatggactggtacgccaaaaagaacggggtgagcattcagacgttacattcgcccgacggagagaaaaaaattggccagtacactgtggacggatacatcgcggcgaccgacaccgtgattgaggtcaacggctgccactggcacgcgcacgaccacccgcgtcaccgctttcagccccaaacagtgatggcgaacgggaaaacggcgcagcggatacgggaggacgatgcgagacggatggccttcatcacatctcaggtgcaacaagtgctcgtattttgggagtgtgaaatcaacgcggagaagcgcaacaacgacgaaatgaagcgcgcctttgcgcagtacaatgacagcggcccaattcgtttgaaggactgctaccatggaggacgtgtgggtccacaacgactacactacgaggtgccggaggggtggcggatgaaatattacgacgttcgttcactctacccccacacgaatgctgtgacagcataccccgtgggtcacacaacacgagtgaacatcattggtgaggcagagcaggcggttgactggcgacgcgccgaccaggtgccggtccgaggcattctcaaagtgttcgttgtgccgccccaccatgttgatgtgcctgtactgcccgtgaaatttgatcagcggcttcttttcccgctgtgccgtacctgtgctctgcaacatccgcatggagccgtcaatgaggactacgagtgcacgcatcgcgaggatgatgagcgggggtgggtgtccactgtgacgtcaatcgagttggaggaggcgcttcgcaacgggtaccggtgtacggcctactatcgctccgtcgagtgggacgatacgcggtggagcgaccgcgtttttcgaggctacgttgccgaattcatggccatgaaaacgcatgccagcggcttcccggacgaaattggcacagccgaggaagatcagcagcaattcatagaggaatgtgaggaaaaattcggaatccgaatcgagcgggaaaagatggtgcacaacaaggccaagcggaccatcgcaaaactgtgcaacaactccctttgggtcgattctctttacgcaacgggttgtccaaaacgattgtga

SEQ ID NO: 80025 - DNA, 1618 bp, Heterodera glycines; identical to SEQ ID NO: 15711

SEQ ID NO: 80026 - DNA, 704 bp, Heterodera glycines
atgtttcgcggtccgttcactctaattctctcgggggctaccgggagtggtaagacccgttggctattacggtttttaaaacaccataagaatctaattgaaccatcgcccaccaaaattctttattgttacggtgagatgaatgatagtattttaggattaatcggggagggtgtcgagacttttaacgggattccggacatgaataagattaaagaacaggaaaaacccctcttactgatacttgacgatttaatgcttaacatgcagaacaattttcttgatttactctttaccaggggctcccataattggaacgtaagcgtaatttttgtaacccagagtctctacggtcgggacattaaaacggcaagagctaacgcccattatctgattttaatgcgtaacccttcaggacaattacaagtgaggacactggggtcacaactgttcccaaaaagactgaattatttcatggatgcatataacgatgcgaccaataatcaatttagctatctcatgattaacatgcacccaaattctgatgaggaattcagattatgtagcaaaatttttccagatgagactctggaaatttatttaccaattgaatagtatataagaatatgaatttaaattaaattaaaaatgtataaatttagctccgaagtaaaggagaatacagcgttcctaaagaagcttga

SEQ ID NO: 80027 - DNA, 642 bp, Heterodera glycines
ttttgggttgctatttatagaaggggtatataaagggagtgaaaggaccatttgattgatacattgtatcaaaaatgcaaaaaccgataatcgtaaatataattgctctcgctaatctcggtaccggaattaaactaaactctctgacgatcaccgaatgcgaatttaagtataaccctagaaaattcaatgccgcggttatcaaatgtacaactcctatcaaagccacggcattattatgggaatccggaaaaatgatatgtctggggacgaaaagtctgatagactgtgaaaatgctattaaaaaatttatagaaataattaagggttcggggtgtccgggggcttcttacaccggacacacggttgaaaatattgtttcgacctttaaattcggacgtgaaattgaactgaacgagtttcgaaaaaatcgtcgtgcattttatgaaccggaaatattttgtggtttaaatttcaagcggggtaaaagcatgacagcgttaattttctggaccggtaaagtcgtaattacgggaactaaaaacaattctgaaattgaggaaatgtatcatcatattctcccctatttgaaaatggctcaaaagaagttagggagacgataaaaaaattttcatttatggg

SEQ ID NO: 80028 - DNA, 1082 bp, Heterodera glycines
atggtttaattttattatttttggcactttagaatttggacggcaattctttcttaatatgaccgttaaactgggaaagccattttaattaaagtattcaaattttgttccattttgtagaattctctgctctgtgcgaaattgaatgccgcagcggccacgatggctgacatttatggtgcactgcttctgcatgcgattttcgatggcagcaaagtgtgttatattgaaaaaaagaattttttattttcagttttgaaaaacagggttaggcgcaggtgttccatattcgaacccaaagtcagcgaggggtggtcagccatcacatttattaatgggattaaccctcgaaattcgacattttttttattacttttcgcaaatctatgttcgtgctgtgttttgttcaaaaaaatcacgagtatggttaggcggcgccggataaatttttttaatttagccccaatttatttgctaacttgtccagaaaatgacaaaaatgcactgcatatttttaatcaaatttgtcattaaaactttcttgggagcggggtacgtagtacgtatctatcccgcttataaaatcagcatttggccgataaaaaattataagttgcggtaattagaattttgaattattccaaataaaaaatcattaaaaattgtttttgtttttttttgcggtgctgacaaatttttggaattttgagccaatttatgtaaataggcggtcgtttacctatgcatttttaagcgtttttgtctgtaattatgcgcacacttcgttcttaattgccttcattgatttcaggattacaccatggtcagtgttagcttccgtcgcgagcatcagccatttctgtcggagtttggggcgttgtgtaccaacctcagacattttctgttggacattaaacagtacttggacgaacgtttcccggcggatttctaaatagagcccattttttcaaaagcgccgatgccgctctaaattctcgacatttgttgttgttgtttaaataagaattatcttccgagactgtctgatttgttaaattttcaatggccgagtaaagattaaa

SEQ ID NO: 80029 - DNA, 1688 bp, Heterodera glycines
atgtcgttagtgagtgtcaatataatggaaattaatgttttttgtaatgttcaatttgctactgttatgttcttcgtctttgaagactgtctgtgtttattctttatcagttattattgattaattaatgaacacttacattggcactgatatgggggaggacacatattaaagaaattgctaaaataccaagtaaccatggtgacgaattccaacaattttaagccaaaaattccaactgctacaacaacaacaatgcaattttgctacgacaaaacgaaacaaaaacaacagaaattgcgcttttgtattccagccgaactcattaatgagcttctcctttttatggagccactaaaatttttgggcgtaaagcgtttgttgagaataagcgcaattttttaccgtttaattgtctgcagaaaaaatattaaaaattggcgaaagccattctcaattattgtaagtgaaaatcgttatctttaacgtcgaaattatgctgcttttatttcccttaaaagcaataagaaaaataaattttatattatataaaaacatgtggcattattattcagccaaattcagttttttgatttctttttattcactacgacttttaaatatttcagtgggaaaactcacttttttgtctttaagttggcttttttaatgctctttttagaaaatagtattttgttagaattaatttgatatagaatcgtgtggtaatattattcagccccaatttgtttaattatttttattcaagtgcgacttttttattgtttttttaagaaactttttttgactgcaaccttttttatttttaaatttaatcttttgaatggcttttttttcatttaaatgataataacattattttctatatatattttgtttggatttccattattaggaaataataattattatattaaaccagggtttcgatcgaaaatttttcaaaatcggggtcaaaaattcaaaattttcaaatcaggacatttctctgataaatggggacagattgaagccctgaattaaactaatctttaatttaggagcgcgaaaatgcttacaaatgtgagcttctttacccgctccaaaaatggccaattctgttgcgccttcactccaactgtctcccgtttctttcgatccacacgctggacattgcggccaagtattttgtggtcgccgaaacggactcgccggctgattatctcctcaaatttcaaattttgattgtgattgacaaaaacaaccacccatttgagcaaatgcgcgatttggtacgttggattgttacgatttttttgaatttttttaatttttctccagttttttttttaatattttcaatgcctggaaaaaagcagaaatttctgaccgttgttcgctaaaaaccacattgatttttggatggacggcggtgccgttaggcgacgtcgagaaaattttttggttttagcaatttgatcgggaccaggagaggatcccgggtccggaatttaatttattttacatttcttaaaatatggtcattatatattttttcttcttaaattgataattttttttatttttagcctcttggaaaatggtttaattttattatttttggcactttagaatttggacggcaattctttgttaatatgaccgttaaactgggaaagccattttaa

SEQ ID NO: 80030 - DNA, 915 bp, Heterodera glycines
atggcgcaaccgaacactccaaccgttgaagttggtgggggaaaggggtggggggggggggggggctgaacatggaattggggtgcactctctgctctcggcttgaaatatcctaccttgcaccttttggtttgcaataatgcataaaaatgtgtgttgtctaaaatatgtatcaaacgattcctgtcttgtgcctgtaactttgtatcaaattgtcgccggccacccagacttagctttcacaaatggcattttgccaactaaatctaaatcggattattcgccaattattctaaaatgatgtttttgctggatgaaaatgtaaatacatggttcctattcgttcttcgatgacaaaattatatgtccttgaaaagtatcgttcgaaaaaacattattttattaaaaccaatttttaaatacctaaaagttttcctaagcctaaataggccgtttttacggtattgtgttttctaagaatttttattccaaaaatcatgaaaattatgtaaatttttttaatttacagcccaattgaccagaattcggaatcgtccgattttgtataattggctacctgtccgcgtccatgacgcatataattcattttaagtcaatttttcccttattccggtccgctgatatcatggatatttttgaaaattatagccctaaaaactctcctttgatttttgaaaatgtatcatctccctcaccaagcaaagagtgacaaaacatatcgccaaaaatgactatattgttttttaatcgctaacattgaacaatatttgtgaatatgcaatttttcctcaaattatttgtttaatattggactaaatgttatttttttacatgtatcaactttaaggtccgctttttgggtttaaatttcaaacactaactagtgttaataaa

SEQ ID NO: 80031 - DNA, 394 bp, Heterodera glycines
atgtacatcgatgaaaaggcggtggcaacggcaacaaccaatttaaaaaaaggtcggacgatgccgccgcgagcagcggaaacgggaacatttgtcaccgaccgggtcggcgccgttggtaataacttttctcttaattttgtttttttcgtcattttttgtttgtaaatcaaaatttattttttgatcaataatgcgtttttttgttattttgaagctaagtgtaataatttattaacttcgtaaacggtctcttccagtttttgcattttttagcacaacattgagtcagacaatgcaaaacggcgaatttgattgtactacaatatgttgttggtcgacactcagaaatgattttatgcgttcaatgctaataaacaaatgctttgtttaa

SEQ ID NO: 80032 - DNA, 2288 bp, Heterodera glycines
atgggacgaaaaacgatgacattgacggccgtagtggtgatggtgaaatctgcaaatataacgcactcggagtttggctcgagaaccgagcaagcttttcatttatcgtttaatgtatcatttttgttgctaggacccgcaaaatcttacaaaatgattcccagccctagtaatgattggagttttattgtaaaaaaattttcgctttttcacccccaccacttaattcatgaaaaaatttttttttcattcaggttccgccgacaattttttccaaattgctcgctgttccgacaagatcgtaatgtatcactttggttgttggaacccgcaaaatcttacaaattgagccatataatgtccaaaaatctacttacaaagtacctttttttgggaggggcgcggttaccggctgaaacaccccctccccccccccccaaaaaaaattttgtttttaaattttttgttttcttaggtttttggtaaaaaatttatgaattggatattttgatcgtcgttaatgtaaatttttatggaacatggtgacaaaaccgaaaagtacaaataacctaaattgcaaaaaaacgcttatttaaaattaatgtttaccaccccaatttcttaacagattccaccgaccaattttcaattctgtggcttgctgttccagcagcagaacatgctacagagaatcacccgaaccgccgcttccctatcagcggccaattttcaaaaattggcacggtttctgggaaggttcgttgttgcaaaaaatatataggtaatattaaaaaaaaaaaatttttcaccccgaaaaaatatgaaaaaattaagcatcgctcgggaaaaattcgcaaatttgtcattgcccacgcaaaggcatttgtatggcatttttgatcaaattcaattttttgattctataaactatacttcttaatttttttatataaaaaattctttattcgaactccagaaaaaaattgaaatttttttatattttttgtaaaaatagaaatttaaaagtttgattctacaaaaagactatttttatttttattttgattctctttatttattcttttttgctgcacaattggtggaataattttttttcaaaatttcatttttttttatttttcaaagtcgaggcctcttaatgtatggacacagtagagtaaaaaatttttttattttttaagaaaattggttgaggccatgtgttcagctctgtgatggtggtgctgagtaccaaaattgaggcgtgaaattcccagagcagataattagggattgaattttgcggggaaaaaaattcgcatcgaaattcggtggcattttgggaaaagaaaatagacctctaatggctgcacaatgtagagtaaaaaaaaaaaaaaatatttttcattttttttgttttttgaggaattggctggcgcaaatggattcagctctctgatggtggtgacgagtgccaaaattgaggaggtgaaattcccagagcagataattagggattaaattttgctgggaaaaaaattcggtggcattttgaaaatctattgtgttatttaaaaaattcacttggaaaatagatatattcaagagttttgttaaacaaatttcgccagtaaaataagcattttcaacagtcgagaaaataaaaaaattttcagtctaaaattttgaaaattattcgatcaaatttattttttttctttatattccaaggtcgatgtcattatgtcctccgatcccatgggctatatgctggtcaacgagcggatgttggagatgagcccgcaaatttcttcgccgtgttagtcactaataaaacaattttattttccaatgtttacctataaaaattttttttaaaactattgtattttttccacatttgtaagccaagccaatgtgatggagttggagatgtacatcgatgaaaaggcggtggcaacggcatcaaccaatgccgcgagcagcggaaacgggaacatttgtcactgaccgggtcggcgccgttggtaataacttttctcttaattttgtctttttcgtcattttttgtttgttactcaaaatttattttttgatcaataatgcgtttttttgttattttgaagctaagtgtaataatttattaacttcgtaaacggtctcttccagtttttgcattttttagcacaacattgagtcagacaatgcaaaaacggcgaatttgattgtactacaatatgttgttggtcgacactcagaaatgattttatgcgttcaatgctaataaa

SEQ ID NO: 80033 - DNA, 690 bp, Heterodera glycines
atgaagcgcctccttctcgcctcaaccgaaatcagctcgatcggaacaccgttttcgatggacattgctgacctccttgacgaaattcgggagctccacatttttggacgtgctgacctgatgacccaagaacaaatcgacaatttctcaaataaatgctcaatggctatttcaaggcaaagatactttttttctgtttttctcattttccccttttcaagaaactttgggaaactcatccggctaaattcgacacaaacaatgccgctggattcaccccaaaattacactggcttctcgcccatggtccagactttgccaagcgttgggggtggttcgcatggatcagtgaacagggaatcgaacaccttcaccacgttttgaacaagcaggttggacagactcaatttcacagttcaaaaacctattttttgttttagtctgagcgcttcatgcggtacaagggcgacgaactgctgctgaagatcggagaacatcagacattgctcaattctattttcgacagacaaatcggtttcctttgaccaacaattgttaggaatcgttagttttattatccggttttgttaaaatattgttcacgttaatatttttgatcagataaacctttcaaacaccaattatcgactaagaattatgtttgcttagatttgatcagttgggaataaa

SEQ ID NO: 80034 - DNA, 1056 bp, Heterodera glycines
atgttttatgaggcggtgcgacaagttttggacaatataacccaaatggtgtctccatcgcatacaatgaattctaatgggacgatggcccaatctaacaatcagcagcagaaggcgccactgagcagtgcgcctccgcctccaccgcctcccccaccgccggacttcaaaaacttattggctggcaaacaacaacaggcaacctttgccgacaaacttcgggatgtcaaactccgaaagtgttctgcaggtcccttgatttagcttagcacctcccgcccccaccttcgcctttttaggaaacggtgtccagaaacgtaccgtctcgccatcaaatagtgttggctcttctaacgggagtgggtctgtctcgtctaaattccaaagccaagatttgatcagcgaactgtccgatcgactaagcaagcggaaaatgactgtggaagcttcgtcaagtcggataagttatttgatttttaaaattgccaatttagatgcaaatggcaccccaaatcaaccgaattcacagactcttcccgtgaacaatgcgaaaggctctcaatcagcgattcctcctttcggaaagtcgctttttggaaatcagcatttaattgttaaaaaaacactttcttagaatcggcttcgttgttgcatcgtacggagggacaccgtcgacagcgggcgcagcctccgctgctcatgactcacaattaacttgcgaaccggtggtgaaaggcccaacacaattaacttgcgaaccgatggtgaaaggcccaacttcatcagctcataatgacattgccaattccgaggctcgaccaaaggcgacgactacgagcagcgatttcgagcggatgaaaggcgaactcctggaactgttctcgaacgaactgcagaacttcaagcgggaacttgcgcaaacaatccgagacgaagtggccaaattgtcagccgatcggagatgactcaacttgttcagaatatgtctctgttgtacattgtcttcctttttaatgtgcagtcactaacgctcttcacctttaatggtaaccataa

SEQ ID NO: 80035 - DNA, 131 bp, Heterodera glycines
tatggcacggaaagacttccggtttccgacatttttggggtctgaattccgacttccgaaatttttgatgaaaagtcggaaattttttaaattttttttttcacaaaactagtaagttttgtacaatttct

SEQ ID NO: 80036 - DNA, 796 bp, Heterodera glycines
atgaattcgcacaacaaaatttacccgatgatcaatttgcacgaaaagaataagggaagtgagttttttgtattaaaatacaaattaattgcaatgatttttataattaagaaattatttttgttaatattttttgacaaaaaatataataaaataaaaattccaaccccaaaaagatgattttcgaatttccaaaacattttcaatcaaatttggatatgaaatttcttgtttcatcagcggcacctatcggcacagcagatccaaaactcgcttattttttgaaaaaatggctcaaaaatccataaaaaatggttaggttttttgtaaaatctgttcatgaatgaactcaaaatttacaaattattcaccggcggtgcctgtctcaaaggcacagttttttaattaaaattagatctaaaaagctaaatattaacccattttaacacaaaatatataacaatcaggcacacattcggactgaatctgtgaatggtttcatgcaaaccgctcaaaaatttaggctttataatctatttaaaaatgtgtctgtaccccaaaatcttattttatttatgatttgcttatttttgaaaatttgatcacagctttgcattaaatatatttttgtttttattcctttaaattttggaattactccctctccctcccgccggactccctgttaaaaatgacgtgttttttacggaaagccgcccgctcccgggacaatttggactcccgctcccggcgcccgcaaattttctttaccggtcttcagaatttagtgaataaa

SEQ ID NO: 80037 - DNA, 250 bp, Heterodera glycines
atgttggacaccaaaaacaacaacattgttggtcatgtatttggcgttagtgattttaacttatttagggagccaagttttacctttaaaatttttctgtttgcagtttggctataaaagattggttttagacaaggatttaaatgtcgagaagaagctggactttgtcagtaccggaaaagccgagattaagcggcataatgagtttcaaccggcatcgatatcctcggagttcattagttttttttaa

SEQ ID NO: 80038 - DNA, 466 bp, Heterodera glycines
atgactcatccgatgaaacgcccaattattaccaatgctaaggaaacgccaaaaattgttattaccgtaattgaaaatgcagtggaaaaatttgagaaattaatttattgtgaattctccgagcacagaattggatggtaaattttacactaataaataatatttattttagatgagtgtgtggaaaatgttcttctgctggccaatcattttgggctggacacaattgagaatcgtagtgtcgaatttttggtggaaaaaagcaaaaaatcggccattcaaaaattcaatttggcacatcagtacgccatcattagcatgaaggtgaataacaaatcgaaaaaataggaacacaactaatttcagaaaaaaattctgaaggatatgactagaaaggattttgttgttgctgggaaaaacatttaccgtgatttgttggaaatggaaaaaaggacacttgaaaacg

SEQ ID NO: 80039 - DNA, 639 bp, Heterodera glycines
atgcttcttaaattttttgatagtgagattttaaaataattgatttttcgacacaccgtccgaaaaaacgagaagtgtaccaataaatagagagtgccagagaaaaacattactttttttctctaattttttgtctccttttggcgtactatctaatatttttattattaggaaaaacaacattcacttcatcctgtttaacttttttcctgcttgttaaatccacaccaaatattgcaaatcgatagagaaaaaaattctgcatcggttaataggtcaagttaatattaaaataggtcgaattagagttttttttgtgctaataaataaaaatatagattctttaagtatttatggcaaaagaaaattattaagtaagctaatcggcagagaatctgtaaaaaagcgctggaacaagcgagaggagcgacaagcgcaaacggtcaaggcgagacaagcctatttggccaagagaagtaattttttcaccattttttacttaaaaatctttttttttgtattccagccgctccacagccgaatcccaatgccgaaatgccaccgcaggacgaagcagggccgtcaacatctgctgcatccgtcgaagaagcgatggaaccgccgccaaagactggatga

SEQ ID NO: 80040 - DNA, 1154 bp, Heterodera glycines
atggagacggcagttgatcagttcaaggcatttctcgacgaacaaacaatggtgcgaacccttctttcaaaaaagacaaaggcccatttgctgcttcaccactttgttccatttgcgcgccaacaccgatttttggggcttttggatgagcagggtgggaccatatcattttttgggttcaattttaaatgttgtgatttttcaggagatgaggcattgcattccgtgtggcggcgacttgagcaactgtggaagacgatgccggactctgaacaaatgcgacagcagctggagcatcatttcgtctcgaattggctgctggacaccggcagactcgacgaattgaagctggtgagttgatggaaggggctttaaaaccttgtccaactaattaagcgggaggaggaacaacgggagcaagcggaggaagacaaaacgaatgaagaaagtgatcaagaagctgacgtcgatgtcgttgactgatcgaggattaatggtttttatttcattacaagcggtagataaaatttttaaaaatttgtaaacaatttttcaatcattttggtcacttttccttttatttattcattaaaatcatcgaaatacatcaatagcatgcactgggaatcgaacctgggactccccctttggtgaccttctcacagaccacttcgccacacatacaaatcttttttggtacaggagctcagtttccggacgccgtgtatattaaattttaaaaaataagccgattttttgcaacttcttattcaagtttatttaggtattcaaatctacagagtagtgtaagtaaattgggatggaaagttgtgaattccaatgttctgaattaaaaacgaaacggattcttcttatcacttctaatgttggatcgcttttcgcaatggtacatatttatatttgatcaaattaataagcatttaaacttttagaattcgtcggaaatgcgaaattactggttgggtcaaattttggctattgtcaatcagaagaagcccattttctttgttttgcatctccaaggcattttttaatatttgtacgaatgaattaaaaagaatttttagagagtggcggtaaaaactaccgacaacacagccgagaaatgcctgaactcgttgatgaattgcaga

SEQ ID NO: 80041 - DNA, 167 bp, Heterodera glycines
ttaatatacacggcgtccggaaactgagctcctgtaccaaaaaagatttgtatgtgtggcgaagtggtctgtgagaaggtcaccaaagggggagtcccaggttcgattcccagtgcatgctattgatgtatttcgatgattttaatgaataaataaaaggaaaagtg

SEQ ID NO: 80042 - DNA, 699 bp, Heterodera glycines
cttttggtaaatcgtttgtctgaacatgccgataatgcgtctgcttctgttgctgctgacgatggtgttcagcaggacattggtccgttgctgatccgatgctctttggacattgtcgcgggtttgacaatcatttaaatgttttaaaaatgaaatctaaatttatttatgagcaaaccaacagcacatattgccttaaattgtgcatattatgaaaaatctcctaagatatacagacagataattaatataataaaataaatgataatgttcaatgtcgaaatgccgatttccgattttttgggctcggaattccgattgccgaaattttttgacagcgttggcacacatccattgtgctataaaaaatgctaaaatgttacagagattagcccaactcaaaacactaattacttttaaaaagtcccaaaatttattttgcttattggcattggatgccgttctgcagggggtttattcagatttatacgttttccagaggccataatgggcgttcgattggacgctgccaatgccaaatgccgcgaatatgtgcaggcggtcaaagagttcaatgacttggcacacatttactcgaccagcgcactgttcacgtttattccgatcagttggcatttgtttggccgtgccaaagagacgaaaaaatgtgtggccaagctgaagcagttcaccagaggg

SEQ ID NO: 80043 - DNA, 526 bp, Heterodera glycines
atggaacacgcgctggacagggaggagctgcgcgagcaggtggacacgttcatgttcgaaggtgggcccggcagggagggggagagaaggcaagtgcccggggcatcacctaccacattggggtagatccactcattcataaacccaactcatccatactaaacttatgtatatccaacttatcaatactatcatcccatataccacccaactcatccatgtacaataaatgccaaaacacagaccgcataatgcaagaaatgccacggcacggactgcatattaatgagatggatatggatgaattggatttggatttggatgagctggatatatcgatgattgagtttggatgaatttggatgagttgggcatgattcccacacatttgtcacattcataacggaatgccaattttttaagcaaaatcggttcatgatttaattaaaatttgtgaaaatttcgcaattaccgttcgcctagtcaatgaaatactttttatttgcccaattaatgaaattaatta

SEQ ID NO: 80044 - DNA, 1213 bp, Heterodera glycines
  unsure (1)..(1213): unsure at all n locations
atgcggcttgttgggttttatcaacaaattgttgtgtccgagtctgctgaagtgtggcagtgtgtgtcaggcacttcccacgacgactgcaaaaatttttttgcggaattgggcgctgtcttgcgcttagccaatgtaagttgtttaatgtgaattttcaaaaattagaggggtgaaaaattcggaaaaagcgggggattcccggtggttttcacctgcttttttgattttcatgattaatgttagttaatttaggaactccaattttctttcaaaaaggcgttttgtaagttgtccgatgaggtcctcncagcgaaaatacacggccacgtcgcatttacgcaggtttataattcatttatgttaattgttagctgactttaatttgaaaatgttttagtatgctggtggttctttgagtgttaaaggcactttgtttggactctcccgccaaaacgtttaccaaatcaacgtttacggttcgtgcatcgccatgtgttccgttcatttatatgttttcagtttacggtgatatctccaatggctccgtctccgtcggtactcctttcgcagctgacgaacagaaggttttgttgggcgagaattgccggggagggttgttttggctccgccgtttcggcgcgagcccaactcttttgactatatatttttctttgtcatctgaatttaataatcttggtatcattccacatctcttcacatgctccgttagccttacaaaaaacagacaagagctgctcgttgagttgtacttgaacctcggacccccaccccccgcccttcatttcatgttaaaaccattttcagaattcacttctcattgaaattgacacttcttcgaccattggcggcgaggacatttttgagttttcatgtgatcacttttctttgtttggtgtcaactccatcattggccgtgcgcttgttctgcgcaaacccggagaaggctcggtcccgtgcaaaaccggagaaggctcgggtattttcctctattatttgctcttcatttaatggcaattcaatgacttttagtcgctggcccatcggagaagagaatcaaactgtccgtgtctgacgagtccgagaaaatggcgtggggcatcataggcattgctgagattatgccatctgaccttgacgttgctggctgagcgagtggcggttgaaatggcaatgccatcggagaaataaa

SEQ ID NO: 80045 - DNA, 918 bp, Heterodera glycines
atgttacgagcaaaaattgccgaattggaaggggcgacgtcaattgcgagtttcgatgttttggcaccgaatggaaatggtgaaataaataaatgatttcttttttagtggattttaatgagaattaattactaatagaagcgatcaatgaaagtgacacgtgctttggaaaatttggtggtgttgatcagcagctgaaggtgagttcccgaatgtacttattctgagatttgaccttgtataaaagtcgctgggaaaattttcaaaaattttttcatgaagttttattaaaaaaacagtttttttttcttgagaaatttctaattgtaagtttgaaaatttaaaaaaaaaattcgcgcgggtggcagcaagggggaaacgagctgcttccaaaaaattacagacgaaatttgttgttttcatttagaactttcgtggacaatttgtaaaattggaaatggaattgagagaaacgaaacaaatgaacgtggtgacaaacttggaaaatgtgagtttaaaaattagacagagacagttaaaaacaacaaagttcaaattttcagaaggctcttcaggcggagttgaagcatcagaaactgttgatgttaaccgaacaaaaagcgatggaagagaaaattgccaaaatggaaaaggaacagcagaaaatgggtgggagagaattgacaaattaaatttttcaattttttgtttaattttcatttaaataattgcctatttgttccagctgatcagttggcacaacgacaaaatgatcagcaaatgaagttggagcagttcaagcaaaaaaatgcaactgatttggaacagttgaacaaatcacaagaagggattctcgtgaaaattgatgaggtggaaacgaacgaacgaacgcacaataattattaatgggaaaaataa

SEQ ID NO: 80046 - DNA, 377 bp, Heterodera glycines
atgttttttcataagaattttgagctattgtcaggttggtaatcagcgcatttttacatcaaaaaaatgaaaaaacattttaaatttgttttcctccgtgacacaaattctccaatattagttgtttagcatggtcgaaatttctattagagcccggattttaaaattgccattacttagaaaatggacagggacttggtcccgagattcacgttttccgggactcccggtattttgtccaaaaaaaccgtggacctgaaccacgagtctcggcaaaatcccggtccctacaagcttaattttatctgcgttttttggattttctccggtatttaccggtcaatacgctttgtccaatctctaattaaaagaataaa

SEQ ID NO: 80047 - DNA, 1850 bp, Heterodera glycines
  unsure (1)..(1850): unsure at all n locations
atgcaaaatgatcaaaagtttttattggagaaagtcaatgaattgaagaaagaacaaaagcagagaaaggtgagctaagaagtaaaaaaaatatattttttaaatagtttcattaaatttttatttaaacaatttcattttaaaataattttatatgaattattntaggctcttttaaatttccgacaaaattattgggatgccaatgtttgtgtaaatgcttttacttttaaaaaagcatgaaaaatactataatgttttacaaataaacgctttacttgttaacatattttattgaaaaaagtgacaaaattgaaagaacgtatagaatacaataaactaaccactacgacacagaagaaattattagtcttttttaaaataaatattatttaatttttttaattttttctttccttcaactttggtcaacattttgaccccgcccccattaccttttaaaaattttctcaaacaaatgaaaattaaatttttgaattttgcacttttttgtgaagtgcccccacgtacattttcatatgaaataattttcagtcgttagacatttcgagacaaaaacaattttaggtcggcgcataaaacaatttttccgatactgtaggttcattttcaaatttaataattgtggatactatttttcagttggtaaaaattgccaaaatagttaatttttagtttctaaaaacccaaaaaataggtgccaaagaaggaaaatcataaaattgtatccaaaaagtaacaaaattaagccatttcaatattaagatacacaattttaaaatcaaacattgtttttaataacaaataaaaaatttgtcgataaaattttgagaaatttttgatttatttagctttttctttcagtaatttttgggttgattcttaaggtgtatttttcctatttattgcattttttaaaacaaattttctgcaaaacgccaaaatagttgaaaatagttttccaaatttttggctaactcgaaaactagcttacaaattaacaacaaccgaaaaagttattttcctgagaaacaaaacaaacacacctagtttttttttgaatatttttcattactttcttgaaacttagcgaaattttttaaaattttgcgcaattgaagatatcgctattttaaaatttagttgcttttgagcaaagttaaatcaaaaaaacttcatttgatggtttttgactgattgttgtatcacacttcagatgcatctaatcacactcaaaatgataaattatataaaattgatttgttaataaacttattttgatcaataatgtgcaaattctctgctggcattataatcgcctttagaaaatgccttatttttgagccaacaacttatttttcgccagtgatttgcttactttgtaatattttcactcagtgttggtacggattttcaaaaaacgtgaaaacatggacgaaaagtgaaaatccattaaaaaaaaatcattttttcatttaaatatttctccagcccttgcttgccctccgctgagttcgccagccgacgatttgaccgtgcacattggtaacagaaaggtgaagagtcaataagcactgatcatttgagaatttaaaggaagagtattggttcagttgaaaaaaaattggtaaacggatactcagattacggtgtccgctgcttggtttatgtgccaattgccgatggtccgtcgaatgctcagcgtggaaatgaagaagaagcagcagccgtcgtcactttgaacgaattgggcatcgacatggagcagttcatggactttttggaggcaatttcgaccaatgctcttctatttccaattttgccaaatc

SEQ ID NO: 80048 - DNA, 1185 bp, Heterodera glycines
atggaaaaaacgtccgatgtcgtatattttgtttcaattaacaaccgaccatcgtatatccgacatcatatatacgatgaaactaagggaagaaatcgtaaattcatccgtggtgcaacccatgtatttggtcccgtcatgtaaaattaaaaaattcacaaaaaatttaaattttaatataaattataaaaaaattttgttttatacaatgaagtctcctctttctaatgatataaaattcaaaaggataattaattatgtgaatgattattactgtgtttttctcgagaatttcttcagaagctcaaaggttttcacaaaaattttcaaaaaatctttaaaattatcaataattttattaaaaaatttggtcaattagtctaaattatgactagagctcgcattttgaggcatatgcctttttttctgcgcacttctttcgatatattaagcataaataacgcattttccacttggtttgaggcttctatgttgacttttattatgccttttttttttgcctttttcgggattttcgtgccttttttgccttttttcaaatttttggtgcctattatagtgcctttttcgcgatttttggtgcctttttatccgagctctaataattacacaccctacacataagtaccaaaatttttattaattaataaaattcaggaattccgtgaaaagtttgcaaaaatggaaatggaattgaaattggccaaattggaactcgaaattgtgaggagttttgccataaaaattcgactaaaattaagaaatttttaaaattatttttagaaggtacttgaacaaaagttaaagcatcaggaaatgatggtcgaacagaaggcattgaaggaaaaagtgatcaaaattgaacagaaaaatgaaaaaaaatgaaagaaattgaaaaaattttatggaattcttattgaataattcgataaaattaatgacaacaaattcaaaagctgaaaaatgagtttatggttttaattggtattttattcaaaaatttaattaagctacttcggatcaactctcaaaaatagaaaatgatcagaagactctatttgaaaaagtcagtgaattggagaagcagcaaaaacagcagcacgaaaacacgaccaaaggcgggggaattttaagcgaagaataccaaaattatcaattattaaa

SEQ ID NO: 80049 - DNA, 643 bp, Heterodera glycines
atgggggaaatttggcaggctgaacgcgacccgataatgcgcataatggcggaccaattgtgtgaactgtgccacggaatgttctcccacgtgaaccccaatttgcgtgcccaatgctccagccaatgctacaaaaacgcgcaattccgcaaatgcctggagatgtacacggcactgcccgaggggcacccgggcggaacggtggaaacgaaacgaggaaaagggggtggaagggagagaaacagaacaatggcaatgggcgcagaagagtgaacggacgacggacgaagccaaacgcaacggacgccaaaagggcgacaaacggacagtgtccattgtgaaatacttgtgaaggaagggaaggaactgtgctgatactgctccgactccttcgcatttgaacacagtccatttggaacaaatacctatatattttatctcttcattttttaaatatttttcgtcttatatatatattttttgttactgatcaatgcctacctacatacattcttggaatcaaacgaaagttgaattatcacgtttatcgaatatccggggcctatttcaattcccgtcgtatctccgatatgatgtcatatctccgatacgacatcgcatcgtgtaattctgtttcaataaa

SEQ ID NO: 80050 - DNA, 315 bp, Heterodera glycines
atgaattggccaaagtcaaattggaatggacagaaaatgatcaaagagaggccagcaaattttggacgatcggtgaaaagggcgaaaaaacatcggattaataagccaattaaccaaaggcactttttcttagataaacgcccattagtgcggcaaacgctttatttggttcgccatgcggaaaagctggacatcattgacaaaagctggagcaacgacaaaaacgagttggagcgggaggactcgcctctgtcaccgctgggccttcgacaggcggacgaactcggaaaatggtgggcaaattgggggccatag

SEQ ID NO: 80051 - DNA, 560 bp, Heterodera glycines
atggcatctgtccgagaccaagggatatatgggctattgatagtcgttttttggcattctgaaaatagcacaaatttgtccaccaaaaggcaattgtcggtgttggatggacttcgatttgtgcactgttccgatgaccattcgcgaggagtgatcaaaagggatgagcagaagctgctcgactggatgggcgagcagaggcaatgcttcggcgacgctcagaaacacttttcgctgccaaatcgtttcttccggcaaattcgcagcaaaataaacgcatggaatgccaaactaagcgaattgaagaaatgtgtacggatttccaaattgagtgcctaaatcggcttttgaattcatttcattcagacaaatgttcacaattactacaagaagttccgggttagctttatccacccattccattcagttttttttttgaatagcttttgaacacaattcgtctgatatttcgtgcccaaaacatcacaattgtccaatattttcttgatatgtttctcaataacactgaacagaaacaattgggaaaggttaaaaataaa

SEQ ID NO: 80052 - DNA, 595 bp, Heterodera glycines
atggcggacaaccaaaagcagcaacgattcaaagggaaagttgtcatcataactggtacaaataaatgttatttcaaattaattaatataataataaataaaaatttatgtgtgtaagaaaaatctcattatcactgaaattaattgccaaatgcaaaagcattgattgattctttgtgaagggtccagtgcgggcattggccaagcggcagccattgaatttgcgaaggatggcgccgttgtcgttattcacgggagagatggccaacgaataaatgtaaaaaataaaaatgaattaaaatattcaattaaacaaattttatataaattcttaattcttactcaatttggagatgaggaaaatgggaattgatatcaaacttcgaaccttttttaggagactgaacaaaaaattttggctttggaagtgccggcggatcgaattttgaaagtgcaggggccaattgaagaggaaaaaacggcacagaaattggtggaggaaacactgaacaaatttggacgaatcgatgtgctggtaaagtatttaaaagtagaggagaaaatggtcattctgtacaaattcaatcacaaataa

SEQ ID NO: 80053 - DNA, 1595 bp, Heterodera glycines
atgccggagaacaacagccagcaacgacaggtcgtcaagcagtaccagcagatgaacagcgccaccgccaacgaacgccttttggagcactgcgaaagtgccatttgcagcggagacgccgaaccgatggaaaggcgtacttccgacgctggcgttaatgaagtggtaaaacaaattttgggctttttaaaatatgcaaattctcagtctgacgccgatggcaccagtgcggaagattgttcaggggcggaatgccaaagttcgggcaatcaaagcccgattttgccggttgaatcttcagccggcacaaatgctttggctgcggcggcgtgcaaagctcttctttttggacaaatggacagcaaagttttggccaaaacgctgcttagcagttcacgggctacgaacatttgcggtgccataggacaacaaaaaggtgagggaagtgtggcattcacccatcattaaaattacttgttcggaaaaatggtttaggccggcaattcccggctttagttcatgacttcttcagtaaatgcctttcccactttttttttgcttctgatcagtgatcaccgcttttaaaagtgaccacaattgaatgcactgcttctcctaagaagggcatattaaacatgatattttgtgcctgtttaccttgataatttctcagactcttccgccgatctgtccaatccgctgcaaatgcaggcgaccaatgatgagataatgcgcattttgcagcaagtttcttcattgactgatcagcagcagcaacaacaacaacaacagaatcatcaaaatgatgcttcttcaactgcggctgtttctgctgccgctgcttcgagcaaattggccacccaatgtcagctgtgcggaaaacacttcagaaaacgtataaaatattaaaccattaaaaatgggctgaatttaagagggaatttgctgaaatgtgaataaaattgttacacaatttgtattaagtatttccattttgttagcctaatattaatttatgctttacaaattcaagcacgcgacttgatcgcccatttggcaagcaatgcacacaaattccccgcttcgacaccgccggcagcaacagcgccaaactggacacatggcagcaacaacggcaccaacccattgttgcgcatttcctcagcaaacggaacgccaatggctgaacaaacgcacttacacaatgttcagcaacagcaaccgcaggaggtggtcggacagctttttaaggttggcttgaacgcacaagtttaagaacttgggaaatattaattgaccaattagttaattggtgaactcataaattgctcgctctttaaggaaatgtcgccggccacatcgctaacaacggccacaacaacacaagccagtaatttcggtgctggcgatgatggaaatcatcagcagcaattggtggccaacgaactgaaagagttgcgcaacactgtggccgaccttcggacatcggctgggagcagcaacaaattggagcaggcaagtcaaaaggggaatgatcagaagaaacaaaggatggctaagaaaaagcctacaaaggaccaaaatcaattagagaa

SEQ ID NO: 80054 - DNA, 684 bp, Heterodera glycines
  unsure (1)..(684): unsure at all n locations
atggcgggaacagtcaacagaataatggcgcacaacagcaacactttatgcacaccgcacctggcagcaaccaatcggcggacagtggcggcacagatcagcaaaacggcgggggtaagtgcaatcgatcgatcattttaagtgatttatcacccaaacataattaaaattgattagatttagtattgacattttaaaggtttcgtccttggaagcaaagacatcacggcataaatcttagtgttaatttagtttttgaagttttacagattcttataatttaacttctttttttggatattctaatctttttgagttattaatcaataatggttttgttatataggaaatgattattattttgtattatctttttaaaaattttggtttttttttgtagttttagcctttcagcaaaaatcctcaaagttggcagtgttgggtctttaagaatttttcctacaaattaggctttattgacgattttatggctcgagtattagggtttgtaaaaattgactgtaaaccctaaaataatttttaccttattgagaaaatattttaaatgcattttttttttttttgtcttttcatgcgattgaaacatttacattcagaactttgatggccccggcattctcttgtcattgngcctcgattcggctcattggatctgaaggctga

SEQ ID NO: 80055 - DNA, 812 bp, Heterodera glycines
  unsure (1)..(812): unsure at all n locations
cattatgtgttatgtgtgaacntgttttccagaaanataggtatttgcccattgttattttcncaaccgggttcaaaaaaaggttgacctgcagctgtttacaaatgtttacatttttatttttctgcattttttaatgtntcaccaaaaatgttattctttgtgtacattcatacaaatacatttttgccttctttgttcgatttataagttccattttggatttatttcacacatataaacggcagtttttaaaaagttaaaaactacgaaataatttaattctgtttaatatttacggtatgaaattattttgattttctttcatcatttgaacattttaattaattattaaatatattttttcagtttcatttgttgtgatttaatgctgcaacagcagcaacaaatttcgctcgttccacagcccggcgatgtgtcgcagcagcacccccagcacaaagcttttgtctgcgaaatctgcggcaaggcttttcgattccgttcgaatttggcggagcatcggtcggtgcacacggcggtgaagccatttgtgtgcaaattttgtggcaaatcatcgcggcttaaaggtgattttgggaggattataggaatgtttaaacgggataactgtaaatttaaagggtcaaaccaattttatttatttatttttatataataattattttttaaatttttcagggaatttgacgaaacacatccttaaacaccacaaaattgagcagaaggaatacatcggcaccgaggattacatcatcaaaaagggcaaaaaatcggtgaaagaccccgcg

SEQ ID NO: 80056 - DNA, 541 bp, Heterodera glycines
atggttctcgtcagcgaattttgtgctcaatttctctcctgcccgacaaagtcacttcgcgatcgactgaaccacccagaggaccgagtccgagttttgcagcaattgattgggaaaaaggtccagacaacatacaaggatcggaatggaatgcgcaaatctttcctcgttggtggaatgactgaacgaggcgcggcatttgaaccagcatatggacgtctgcgtaagccgttcaacattaacgtggcagcgcatttttacgctcgtcaccgtgtcaaattgcactacccctatgtgccatgcatcattgaaggctttacgcgtggtgaggaccgttattatccgatggaactgcttgaaattgtcgacgacaaaaagggagggcgattatttggtcgattgttcactgaaattgaggcgcaggaggaggaggacaccaaaagtgaagcttcacattcttccaactcttcctatttacaatttaacggtaaaggctgcaaatggtatgaaagcattgacgaaattaccaacactgggcgtg

SEQ ID NO: 80057 - DNA, 1683 bp, Heterodera glycines
atgacatcaaatagcttctttgtgtttttgccaagtaatgtatcggattaccccgacaatcaaccgaacaaatatagggtacgtcttccaaaacctctacattttagtgggtcgtgggtttgtgggttgcatagcatcagctatccctactcatggcactctacaattggtacattggatgaccaatggattgacattcatttcaccaatctccattccgttgatgaggaccgacagcgtgtcatcagagtacctgtcccacaggcgtcgcacaaaaaagttgagcaactcagggattttttacaagcaacattgaagagtcaagaaaaagtcagacttaagccgcttgcgcatgaagaagggtacttcgataaaccggtagtgctcggctcgcctccacacgccaagcgcctcaagagatcaacaattgatgatctctcttcactgccctctcccccgagatatgatgagacagatgagcaacaatcacggcagcagcagcagcctcagtctccccccagattcgatgagacagagaaagaggataaaaaagtcaaagaagcaacacctcctcctgtcactaagcaaccgataccgccggctccaacacttgctcctccttcacatcctccaactgaagcgccaaaggcaccaaaacaggcagctccaaaatctgctacagtacctccccaaaagccaagtgtgacacctgctacaaccaaaacttccccggctcccgctcccattccacccattaagcaagctccatcggccccgaagccttctccgtccaaaacagcggctgtgccgaagccaactccaacacccactccagcatctaaatcaactattccgactcctgcttcatcgaccaaggcgcagaatatccctaaaataccaccaactctggcagctaaaccaaaggagccaaatgtcgcaaagaagtccactgtaccaactaccgtatctacaacatctatttctaaattaacttctcagatcgaatcatcaccaacaacaccgaaaccaccgccgcctcctattaaacctattcctacctcaattccggcaccatcaccgcccccaaagagtatagcaaaggacataaaacgctcagtcgaagctccaaacgaaagcaaaaaggaatcaaagagattggatgtggatgataggttttttggcggtttagctgccggagacgagtttcccgacgacgatgacaaagagtccgaatggccatatgatcctttcaaaaacattgtcgatgatgtagaaatacaatatcttgatgactttgagcgattcaaggtggtgttcaaaaatccagtgatcagccacttgtcattctcacctcagctaggctatgtgcttggatttgaaaacccccaacacgttgggcctcaagaaatctcaaaatacggctgtgacttacggggtggcttctcaagtttcgcagtctactcaaaaggactgaccgagaacatgattgttggtaattcgttgagttcgctgcttcgcgtggtgtcggtgagcggtgccacacccggtgactacaatgagaagatttatgattcgccaatatacgctcgagtgctgccacgggagatcagcgaaattgaaattgagctgcgcacgatggacaagggacgactggtgccattcgcctatggcacgaccatggtg

SEQ ID NO: 80058 - DNA, 2797 bp, Heterodera glycines
agtttttaatgtcaaaaattttaaattgtcatttgtaaaataatttactttagcaaatggtgcaaaaaaaatcagggatttgttaacacaaatataaaaatgatgaaattttattttactattttaaaattattttagaattttgctcaatgttgtctgcaatacattgacgaaaatgcgcacgatttattcctctcaaaacactttttacaaattgacaacgaatttctaactgaaatttttgcgcgtgaccaattgcagacgaacggagaattggaaatttggcaggctgtaaattattttaaaaaccattaatttttcaattaaacatcattaggcactccgttgggccgatgcgcagtgccgtcgaaatggcacggaatgctccgccaagaagcggcgcgctgcgcttggcaaggcacttttcgaaattcgtgtgcccctcgttgacaaagaggattttactaccatcaccaccatctcctccacctcatcaataccaccatcaccatcccagccctcccgatcagcaatcttcctcgtctgacgatagtcatccgcctcgcccccctcgtccaccacgtcctcagagaacaaagaaaaaccatcaatcttctataaaacatggtcggttgaaccaatggaagcaaaggcgtcgtgacttgcaacaacaaccggtagtacgtgatctactcgctgaggcagcagctgctcctttacctgaaagtgacgatgacgatgaacaaatgctggaaggtgggtatctgctgccaacaccatcacaaaattatggagacatgccaatattgcctgattatgcagatgaaattgaggaaatggacaccgcccaacaaagacttgcaagcagaagaaagcttaaaggagaggagggaatagataaaaacaaaaaatacaaaatttactattctcctccaccatctcccacactaccacccgtgtacaaacgaccagaccatccccctcctccgcctcgttctatacccaaagttgaactgaaaagggatccacaaccaacaaagttgaaaaaatccgcctcgccaccgcctccaccattgcctccacatcgcgcaaagagagaaccaaaaatagagctcgcccctcctccacctcctcgcaatgtctccaaaagggaaccgaaagttgaactagctcctcctcctcctcctccgcgtcacttcaccaaaaaggaaccaaaatttgaagttgacccacgaccatccacatcgaagcaagccgggtacttcccgcccccgaaaatcaaaaccgagccaaaacatgagttgcaacctacaaagaggccagtgccataccgtatcccgaaaaaagagccaaaaattgaagaaaagccattacagcagcagcaacaacaacctcctcctcctccagctgttgtcgtcgaagaaatgccctatattcctccgcctaggagggggaccaaacgcacctacccccagaatgatgatgatgaggtgcacataagaaaacgagtgaggcaaccgagaagggtaagagtacagtactcgcccgagccagggccatcaacatctgcacaaagtgaagaagaacgacaacaacaacgtgagctgtttgctattccgtcaaatcaactgaccatgacacagagaatagaacgattatatctcaaatgtaaccattatgccgatcgtatgggtgttcgggtgaatacaattaacaccgccaacggcaagccgttggcgcatagcaatttgcgaatggccatcaagtatataatagaccgaagagcgggccgtcccaccattaaaccaccgggagcagacctattggaggagcggcttaggcgggatccaattttgtattcatggacggctccaccaaagagaccatcacagagcaaaaccacccggacggcacgggcaatcaagaaggagtttcgcccgaaaaaatggagctgattaacaccactcttgacaaaatgtacaatgacccatcctccccagcggcgtttgcaggtgttacagcactgtggaaagaggcacggaaaaagattaaacatttacgaaaagaagaagtgcagagatatttggagggacatcgcacctatacattgatgcgcccccgcagggtgcggtttccaagagcaaaaactatagctgctggattcatgaccgatgtccaggtggatttggctgattttcaagccctttctcgtcataatggaggccaccggtacctgctcgtggcggttgatgtcctgtcaaaacgtttgtttgtcgtcccactgaaaaataagagagccgaggagatgctggaggcattcaaggagcttattgagcaaatgcccatggccccccatcgaatattctccgacaaaggcactgaattcaaaaacaaactggtcaaagaattctttgaggagcacgagattgcgaagcacgagcccgttcattcgtcagtgaaagcctcagttgctgagcgagccatcagaaatgttaagcagcgactatacagatattttgcggaaaagcagactctcaactgggtggatactgtacagcaaattgttgatggaattaacagtgcaccgtcccgtgttcacgggatgcgaccaattgatgtcaattttcggaatgctcagaaggtgtgggaacgaatgtatggacaacaatcgtttgttaaaaaaacaccccgcttccgtaaagacgattttgtgcgaatgagcagagagaaggggcagttcgagaagggttacctgcccaattacggcgatgaaattcttgaggttgacccaagtgct

SEQ ID NO: 80059 - DNA, 80 bp, Heterodera glycines
atgaaggccagcttcggccggtgggctgatcaaatgaaagaatgtttcggagacggcacattctcattggcacctccaat

SEQ ID NO: 80060 - DNA, 421 bp, Heterodera glycines
atgaaaaatgaatataagcaaaaaagaaaatattcgccaaatgaatgggagaaaaattatgccgaaatttgtaagaaagtcagagttagccatagaacaattgaaaattggaagaaacaatttggaattcgctgtaaaagaataacggatgaacaaaaaattgaaaaaatgaaaatttattggaaaataaaaaaagaaaatccaaaaatgagtgacacggaaattgaaaaaattttgaaaattggtaaaacgaatatttcaaaatggaagaaacattttgtggaagaaattttgaaggattgaaaaaacggaaaaatttacgaaaattttgataaatttatttaaaaaaatatctgcgctctaaaaaatagatttatcatataaattttcaaaaagattgtatttgtatttgataaataaa

SEQ ID NO: 80061 - DNA, 3127 bp, Heterodera glycines
  unsure (1)..(3127): unsure at all n locations
cgccatcattaaattcggagtttcaaaatgtttggcctcactgaattgcgtccaattcgtccgcgtttgccgaaggcgaaattcgttgtgtgctgaagcggttgtacagcgatttcattgtcatcgaaattccgtccgatggccacgtgttgaggccgaacagtgcggcggcgccagcggcccaaaacgtgcccccggcacggaatgtgaaaagtgccaagaagatgcaacaacgactacgactgtgcctccgtcggacgatggcaaaggggagaagccgacacggctcactgatcagcaatttgatcagatgcaacgggtggccgctgggacagacgaagagaggaaaatggacatcgatttgaaggttttctttttgttttttggacgattgttggagttttcaactttcaaaattttgtagggcttttcgaggtcgttggtcacgaaatttgacattcattagaccaactcgaatgccgaattcgaatgagaaatcaaaatgttttaaaatgcacacttaattcaaagaaattcgtttaaatttacaattagcaaattccgattaactttttgttccaattagggttcgcattggcgacctttttcatttcaaattgatataccttgacgcatcattttgctgggtctttttgggtcgctcggttccgactcccgagtctcggacccgaattcttacaaaaaaaaaagggagttcgactttttaccccaatttgggtcgcagttccagaaaaaaatttttttcacccaattacctaatttttgaaaagaacaattttttttcttttttaggattggtcaaaagaggagcgcaaaaatttgtaccaattcatccgggccaattttgacgcctccgcattggacacggaatgtgtggacggacaactgacagttcgccgaatgggcgccaatggacgaaggtttggcaattttcaaaaaaaaaaaaaattttttttttttttgggtcctttaattctttgttatggtgtagccctgcagaaattcaatttctccaaaaacaatattgccatttttcggatgatttttgatgacaatggttcgttgcccttttgatttttagttcaacaaaacggtggtcacagtggccaaaggggcgcggcgattttgtgcactttaccatggtcaaacggaacatggactcgcaggcggccgtccatctgattgcacggaatgccaggtctgtttttttgaaaaattggaatttgattcatgttcgggtgagttttcctttcgcgggcgcaaaatgttgggtcggactatccatccataccctcatactccaaaaaaaaaaaatttttttgtttgtttcttttgcaacttaaaaaaaattttcacaactttctttgagtttttcagggtttcaaaaaaatcattgttttacgaaaattatataattagaaaatcactttaaaaaaaacttccggggccggctactcccccaaaaattcctcatttgaatttgtgaaatttctgcatttttttgcgccttcgttttatgtgtgtgtgtttcgtccctatattaaattcgatacaaaacgcgtttttaccccccccccccacccaccccctcttggcacaggttgaagccgtccatgttggcactgagcggcaccaaggaccggcgtgcgatcaccgcccaacgcgtcagtgccttccgcgtcgagccgggccgcttggagtccgccgcacgctcattgcgcggcatttggctgcgcgacttttgctacgccagcgcaccgctgcgcttgggcgacgcgtgtggcaaccgtttcaacgttgttttacgggacaacatttggagaacaaattttacggaaatttgtcttgagttggtaccagtatgccgcgagttgagaaaattgttgggtttgatgccaaaagaaaaaaaattcatatcgaggcggtcacaaaattttagtcggtatttgggacgataaaattttacggttgccgggattttttttagacttttccgtccagagcagttaggaaaattaacaggatgccctcctcccccctagaaaaaattttttttaaaccaattttttcaattaaaaaataaatttgaataattttacatcaattttttcttttgaaaatttctaaccatgaccatgttgattatttatatccttaaactttttttttgtgtgtgttaaactctgatttcatccctttacccccccccccccccccgaaaanatgtataaattttattattctcccacagggatgtcgatgcgtcgtccgtcgatgccgcccaactcggtgctcgcattgcgcaatggacgcgcgatgggttcctcaactattttggcacgcagcgcttcggcacctgcggcgtcgacacggcacacattggccgtctgttgctcagtgaacaatgggaggcggccaccgctgcgctgttggccccgcgggcggaggcaaacggtgcgcgagggatggaacccagaccacgaaaaatttctaaacggattccaaggcccaaaatttttttcaaaaatcggaagtttggaatggaatttcgtgccatccccccgggaaggcatcacaccttcccaacaacaatttacaacgaattacaaacatatttcaaacaataaatcattctcctgtgcttgtaccacgccggagtaggcacaaaacgtcgccgggatataatgtcgccgcaaaataaaaacaaaaattcaagaaaatttaaaaaaatatatttttttgcttgtttttgtttttctatgattgggggggcctcattaaacaacaacattttgtttttgtccaggctcactcaacgcatgcctgcgctgctacgccggctcgtccgcgaacgcgtcggccgcgttgcgaatgttggagcgcagcaacgcgtccgccggcgccaccgtggagcgtgcgctgttgtccgcgttggccaaatgcccggctgggcacaaggcggccattttggcattgcatcgcgacatgcggacaatgtacggcgccgaaaattatttttttttttacaatttttttctataatttttgccttttacaggtacatccacgcctaccaaagcttggtgttcaacagcattgtgtccag

SEQ ID NO: 80062 - DNA, 347 bp, Heterodera glycines
gacattcaaaaagacaatattttgctaagccatcgcattgccatggaacgaaagacgcgaaagcaattgagcaaattgggagtggaggaattgggacaaataaaggacgaattggacaggaaggtcagcagaaccaacaaacagttggtgggattgctggaggagagggacgccctttcaatgcggagggacgccctcgtggtggaagcacgggacttgaaggaatggcaatgccaacgacggaggaatggcactgcggaggaagggcaatgccagtgacggaggaatggcaatgccaacgacggggaattgcaatgccaatgacggaggaattgcaatgccaatga

SEQ ID NO: 80063 - DNA, 1838 bp, Heterodera glycines; identical to SEQ ID NO: 15737

SEQ ID NO: 80064 - DNA, 707 bp, Heterodera glycines
  unsure (1)..(707): unsure at all n locations
atgctttttctcctttttatatttgtgttcttaatcataaacaattcaactgacaaaacattgtcagttaatctgtgtaaaaaatgtcgaccaacttttgctgaaatatttggcgaagaatggcaaaatgaaataataattggaggagatgaaaatgaaaatgagactgatcaaaatgcaaattttcatcaaaatgatcaaaatgaatcaactgatcagaacgatcaattggatgttcaacaaaaaatcgaaattattcacaaatttcacgcaattagagaaggaattaagaaacggggaaaatattcggcaaaattttgggttaaaaccgagcaaaaaatagcggaaaaattgggaattagtcgacagaaaatttacaaatggaaaaaagaatttggaatttattattataaaaagaaaaaacaggaatttattgaacgaattgatgaatttaaaagaatgtccaaaaatggaaaacagaagcaatttgcgaaagaattgggcattagtgaaaaaacattgagcaaatggaaaaaggaatttggcattgaaattggcaaaagtaaattttaatttaattttncattttattattaatattaaattttattatattcttaggtcgaattcgattcaccgatgaacaaaaaatgagcaaaatgaatgattattatgaaatgaaaaaagcaaatcctttctttaagtga

SEQ ID NO: 80065 - DNA, 801 bp, Heterodera glycines
atggtccgggattcggaattggtaaatgccggattcgtggtctgcgacctcgaaaacctttagaaacatgttttcatgatttatgaaaagaaaaaaaacttgaaaagttaatggggacaaaccataatagagtcagaaattctgttatttccctgaattgaacataatagataatttgatatatggaaactgtcaatattattgttatttgttatacattgatcattccgttaatttaggttgacgagcatgcggttcgtattgccgacaacgtttttaagttcgttgattgggccacttttgtcactgcgcgccgtcatttgaagtctgacccgaacattcgtcatttgttttacagtttggatcctgcaactgctcaacagcttggcattgcgttggaaccgaaaataacgacgaccgttatcactttttggtcggatgtttctacccgttaccagtctattccttatgagttcttcgaattctaaaatgatctgttttgttattcatgaattttgttgcaaacaaagattatttatattttaattttgttgtggtcccttggaattccaaatccttgaatactctaatttgcttttcaacaatttaaacgatttgcgttttccacgaatcgccatgcctctgtttgttgtcatatacatcgagactaagaaagtcaatagaaatatttgaaaaaatctaattataaaaaggaagaaaatattcagagaccggttaaaatagttttggtacattcatattcaacttttttgttgtttggtttatttttttaaaccaaca

SEQ ID NO: 80066 - DNA, 162 bp, Heterodera glycines
tcgcttcgtgcatttgagaaattacgcttgtgcgctgcatttgtgaaaaagtcgtggcgcaaattgtaaaagccatgctcaaaagaagcaacaacaaacacccgtaaagctcatctccgtgtcttctgtctaattggaaatattccatagcttttgattttt

SEQ ID NO: 80067 - DNA, 701 bp, Heterodera glycines
cgttagcagtaaggtcaatgagtcggaaagctacgacgcgaccacgcttggtaaattgatgaacctcgacgccaaagtggttgaatggctcgagaaagggccatatactgacgacgatccgctcttggttcttgacttccttggtccgtttatcaatcttcatggcgactacaaccaaaacaaggcctttttggtgcagaagttggtatgtcttaacagcaaattaacatgaaagcgggatcaaattcaaaataaaaatttcaatcagaaagtagaaaatttcatggaaaatttgagggttttatcacaaacaaaaacgtgtcgtgctacgtaattgaaagtaacataatagaacactacgtagtacatattatggttggtataaatcgatcatttcgttattaggttgccgctggaggggctataatcgccgcgaacgtggacaacgttatcaaatttgcgacctgggacatgttttacgaagcgcgtcgcattttgatggcggacctggaagtgcgtcactttttctacaatccaaatccggcaattgctcttcaaaacaacattaaccaatttccgatcgtctctacaaccgtggttacgttttggtcagatgactcgcttaaattgaagacgcagccgtatcagttcttcgagttttaaaggatgatccattgttcattcatcattttttgttgcaa

SEQ ID NO: 80068 - DNA, 293 bp, Heterodera glycines
atgtcaacgtcagaagtgaaaccggaagataaatcaatggatgaaactagcaagaatgaattgcgggctgaggacacttccattaaggacaaaggcattggaagcgttaaaggttttattacttcgttatcaattttctttcgtttttagaaactgaaacaaatggcgcaataactactgacaatgaacctaagattcacgcagaaaagaacgagactggtgatgctgcagttggccaaaaatcaaccgaggaacaattcgacaaaactgacgagaaagcagagcaacaaaat

SEQ ID NO: 80069 - DNA, 342 bp, Heterodera glycines
atgccggctaagcaaaacaacgatgccaagcagggcaaggtcaatgatgatggcattttcgctgtacaacaacaacattccgccgacgacaccaccgacgacggttgggaggaggatggcatttttgctcagtgccaaaaattgccgccgtgccaacagcaaaagtcgtcgttgctgctgacgccggccgccacgtcgtcttcctcggcaatggtggacagtgtgatcagttgccactcctcgttggcatcgacgtccgctttttctacgcagcaaaggtggcaccggcacgacactatttatatttgtccatgcatttgttttttaatttccaaaatttag

SEQ ID NO: 80070 - DNA, 744 bp, Heterodera glycines
tgttgggcagcgccgcgccttcatacgcaatttgttcatttgatgggcacgcaatgcgcggcgcactgctcgccgatggtgccgacatgcacttgttgtgggccgccctgtccatctacggaatgcattttgatcaaccgatggcattccatttgttctccattcacaaatgtggtgatgatgatggtgatgaaacaaatgtgatgatgacaggacaggcagaacaaattgttattgattgatgagaagatggacagagatcaccaaccatttttccatttttgtattttattgacttttttgttttactcaaatttcttttcacgccttttttaatacagattccaaattttggcaatgaaatattttttgttggccatagcatttaaataattattttttaaatttatttattatttttttttgctttcctttttcattcatcaaaatcataagtgaccttacaattaatgagttggttcatcataatcattctgctaattttcttcatttttctgcttgttgtcttcttcagtttgccaaaatcattgccttttgacccttcgggcaaacactgtcttatcactggtccgttttgagttctattcaaattcattaatttttggatttctgtttattataaaaaaaattattcagagtggcaaattaagtacatttcatacatttccaagattaaaaagaagatacgatttttggcaagaaatttttgtaaacagaaaatga

SEQ ID NO: 80071 - DNA, 1293 bp, Heterodera glycines; identical to SEQ ID NO: 15744
  unsure (1)..(1293): unsure at all n locations

SEQ ID NO: 80072 - DNA, 120 bp, Heterodera glycines
atgtgtgcggtattaagtgaggagcggaaaggaggaggcggaggaggaaagaagaggatgagcaagagaaaagagaaggaggaggaaaaggagggacgaggaaaggagagggaggaggag

SEQ ID NO: 80073 - DNA, 2115 bp, Heterodera glycines
caacaaaaaaaaagaattcgtcttccattggccaatccgtgcccaatccaaaagattgtctggtcctcctttgactatttgcgggggcccgagttggaatttgtttgggaggccgactttttgccggcaccgacggcggaggaaggcgccgatggggagcaacaacaaaattatggccaaaaaagctattgttgcacaaatggcggcaccgatgggacgacaaatgccattttggaggacgccgaaacggtggcggacgtgtcatgtaccaacagcagcaccgactcgtccttttcaaaggtgtccccctttttattgcattttcgattttgagactcagaaaatcagattaaaacatttccaaaaaatatttttgtgtctgtaaatttgttctcgaatgatgctcccaaaatattagtttttatcacaaattccaatgaatttgtactttcaaatttaatttatttccgctattttaacccaatttttcaagaaatgtttaaaaaatattttgttaatgaattgtctttttcaagaacaccggcgcatcgggtacaagcaccgcacaatacgaagagattgacgaattttataatgtaaatgaataaatttttcttccgatgtttgccccctaaatttttttggcggtattttagacgctgaatatgaattatgctaacgcaagcaaaaagactggtccatggaaagttaaactttacctaattatcggtataatgtaagttcattagcgcatgaatgagaagaaggggactcaaattgaatgacatttttacaatgttactaaaatgtgccatgccttcgcctcacttttatacgaagtgtaagctaattagctgatcattgatcagagcactcgaatgtgtcaatcacagaatatatatgccaatctctttagtttcatctttgctcactaataataggccgtctttttgaatttttaatcaatgctcattcacttatctctgtttcttctgataataacttttcacggaacatatttaaatttgcgttagcataaaataaagatcagattcgttttgcggtgtctaaagttaccctaaaaattgtcaaaaattatttcatagggttcacaaaaccctaaaatgtaccaatttttggtataaattcctttcctatttttagaatgaacttttgcagctgtccggtgacacctttcataatgccggccaatttttggtttcttcatccacctccgaacattgcgctggcggaccttctgtaaattaaatatttgttttttgggcccattttcgtttttggtcctctggacgactgtatttccctatctttattttaatcagcaaactttactgcaatttccacttcaattcctgccccccccctcattttcagcaacaacgtttaaccgacgagttgagctccctgaatttatcctgtcaaactgacgacactttgcgtgccgtcccttccgccagcagaaggacggacaacgccacagcttacaacagccaaaatgccgacggagatggtgaagttgtggcagtaacaacagaaacagattttgctactatcaccaccaccaccaaccacaataatccgccgtcctcgtcgtcgtgtgccgatgcgatggtcacttcgtgcgtggactccggcattggcggcacagtttccattgagagcaatttgagcacgtacacaaagccggaacacagagaaggcatggaacttggggaggggggcaaggggacgaaaaaatgttttcttgttaaaaaattttttagaattttcctataaaaatatttaatttttattgaaaaattgcatttgaaatttaaaaaaaaatcagtggcgaacgaacccgacgaaattttaatggcaaaattttggggcgcactcatttttttgctaacacaaaattcaaaacacagatgaagtgctgttcaattcggatgaccagcgctgcagcatcaaaatgcgcagcagcagtgccagcagaggggacgtgttcgactatcacattccggaagcggaggaggtcatcgagttcagccaggtctatgccgacacgtcgtccggcgaattcagcgatgggaacagtcccaatcgcaaaag

SEQ ID NO: 80074 - DNA, 570 bp, Heterodera glycines
atgtacattgagacagcccaagaaaacttgggcaaagagctgacggaccaaagtgtccgtgcagatcttcttgcagggagacaaaatctctgcaaagcaatttctcttttggagaaatacaatggaaaatgggaagccattttcctgagagtgaagggacaagctcttcaagatgaagagcaaaactacagagactttaagcctgaagggaaggctttcatgcattgggtcgaccaagcccgagggcttgtcgacaccattgaaggggccttgggcctctcagagctgggggatgcaattccccagccaaaccagccagcacaagtcgtgcaacagccacaacttgtgcatcagcgtcatgatgtgacgcttccgccgataacattgcccaaattctcgggggaaccccgagagtggcctttattttggaaactcttcgagacttccgttgaaagtcttcagattgaagacttcaaaaagcacatttatttgctgggatgcctcccagagaagtcagttactaggagagcaattgacttgtatccgccatcagatgaaaactacccaagg

SEQ ID NO: 80075 - DNA, 2375 bp, Heterodera glycines
atggggcataattcccagaactgcacctcaccccgcaggtgtagtcaatgtggtgaaagacaccattttatggtgtgttacggagaaaagtcccgagagggaacctctcggggccaaccaaataatcagatgaaaagagaggcaagaaaatcctctcaaagtcatctgactatgtgcgagcacgctcataaaagcgtgtccggatcagaagttttcccagatgttgaaagcttatccatcactacaaatgtgatgacaagcgtgatggtgaaaaagcctcacgcatttctaatgaccagaaaaatactggtcagatccaaaaataatcgaagagtttggatggaagttccatttctcttcgacccaggaagtcaaacttcctacgcctcagaccctctcattgagaggctcaagccaccgaaagtgacttctgaagaaatggaagtctatggcttcggaggagagagaaatggaccaatgaggttccattctcccgtgtactccatccaaatcagaagaacggatggaaaatgtgaagaaatcctactcaataggacggaaagaatttccacgccattcaaaatggcagaatggaattccgaggaattcccactcgaagaaatggacatggccgacgctatgcgtttttctcgggaagaacccgaaatactcataggtgccagacatttctggcaattcttccaagcgaagaaagaagtttctccagggttgtttgtaattaaaacaactttgggaccgttggtaaacggagagtccgactttgggccggaacttccgaacccaggattatcaatgatggccattgatgagtccaatcaagggcaaatgcccaccgctaaagaaattgaatatttctttaatttggagtctttgggaatcaaagacgatccaaatgaaaatgatgaccaaacagcaatgagtctgtttaacaagtccatccgccgagataaggacggacggtactctgttaaatggccatggaaggaggaggttcccgacctcccttccaattaccgcatggctttttccaggctaatgtcgacttttggaaagcttcgtaattctccagatttaatggagcaatacgatgcgaccattagagaccaattggaaaaagggataattgaagaggccaggaaagcccctggcactcttgagcattatatccctcatcagggagttcttgccaaaggcaagaaattgcgcgtcgtttacgatgccagtgctcacaccagaggaacaaacagtctcaatgcctgtttgtatagaggcccggtaatactgccggacctggtcggaatgcttatgcgtttccgatgcccaaaattccctctcctctccgacatccaagctgcatttttgcaaattgctttggaaccggaggatagggaagtcaccaaattcctctgggtgaaggatgtcagtaaatcactggcaccaacaaatctgatcacttaccgattttgccgtgtggcattcggagtgatcagttctcccttcattttggctgcgactttgcagcaccatttgaagggatacgattctccagtggccaatgaattggcccaatcattatatgtggataacactcttcttgagtgtgaatccgcagaagaggctttgcataaatatgcagagtctaaagcttccttgcctcattatttgaccctcttggtctaatggggccgtgcattcagcctctaaagcttttcttccaaactctttgggaagaaaagaaaggctggtacgatgttctttctgagaaagaacaaattcaatgggcctccttccaagaaaattggaaggatcagaccctcaaaatcccacgaagagcaatgctgcaagggaatccttcccttcaattgcatgcttttgtggatgcttccatccacacatttgcagctgctatttatctaagagcagtagaagatagccaaatatcagtttggcttatcttctccaaaaataggctcaagcctaaaaatgcttcaaaagcattaacaatccctagaatggaactcatggccattctaatagggattcgcggtcttaaatttgtcgccgatcaaattcggcgacccatttctgaactccatctttggggcgattcacaaatcgctctgagttgggtcgtttccaaggaagcacagccaaaattcattgagagacgagttagggaaattcgtactctcaatgaatgtgcttttcactttgtccgaacagccgaaaatccggcggacatagcaacccgaggcgcaaaaccaggagaacttaaggataagtctctctggtggaatggcccttcctggcttaaggaagaccatgaccaatggcctaaagaaatggaatttaaa

SEQ ID NO: 80076 - DNA, 384 bp, Heterodera glycines
ggcgtgttcaccaatccgatctactgcaccatttgggtgttcactctcatcgtccaatttgtaatcgtcgaattcggcggtcgttggttttccaccgaaccgctgactttggaccaatggctttggtgcgtggccttcggcgtcggctctctcctctgggcccaagtgattattccctcccctccgtttggcttttcacggcttttcctttaggtggtcacatcaatcccaaccaaaggccttccgaagagtttgaccattggcggtggggaggtggagccggacaccgccaacattctgtcgggcgacgagggcggcgaggcgcgggagaaacgctccgggcaaattctgtggatccgcggactgacgcgccttcagactcag

SEQ ID NO: 80077 - DNA, 893 bp, Heterodera glycines
gtgtacactttcaactccgtccgaaagtcaatgtcaacggtcatcgagctgaagaagttcgaatacgattcttccacctttggctaccgcgtgttcagcaaaggggcatccgaaatcattctgaaaaagtcggacggatccaacggaattcgctgattgttgtgctcccattttacagatgcaaatggatgctcggaagaaacgggcatttgtcacaatttggcagcaaagacttggaccgtttggtgagagaagtgattgagccaatggcatccgacggcctaagaacgatttgcttggcctacaaagactatatagcggacggaacagcacaagtggagggaaatcagctggcatttggaggcgaaatcgattgggacgacgaaaatgcggtcattagtgacttgacagtcgtcgctattgtgggcattcaggacccggtcagaccaggtcggcctctgtctgtccgtttagcttcttaattacccatcgtccatttcagaggtgccggaggcaattgcaaaatgtaagcattcatttgaaacaccgaaagcattgcttaaggcaaatctgatgtccgtttttttaggtcaacggtccgggattgttgtccgaatggtcaccggggacaacataaacacggcccggtcgatcgcaacctcttgtggcattttgaagcccggggaggatttcttagcgcttgaggggaaggaattcaacgatcggatccgggacgagcacggcgaagtttgtcaggagaagttggaccaaatctggccgaaactgcgtgttttggcaagggcacagccgacggacaaatacattctggtcaaaggcatcatcgacagcaaactgagcgctaaccgcgaagttgtagcagtgaccggggacgg

SEQ ID NO: 80078 - DNA, 512 bp, Heterodera glycines
atggccataaaatatggacaacaaatcgcgaaatatggacataaaatggcaaaaatatggacatacattttccaaattgagggtgtaatttctcaatttttcttcaaattcgctaaatgtaaagtaaaacgttcaaaaatggctaaatatggtattaaaaattattttagaggaaaaaaacaagacacagctaaaatttactcatttttggcgaaaaatcaaacctaaaagcgaaattttcgtttttttactcatttttgatataaatttatcaatttttaagaaaatttaaattctttaaatttttcaagtttcaagaaaattttgctaaaaatgatttttttttggaaaattttctggtttttggggtcaaaacggaaaatttagctgatgggggccgttctaatagaggttttttagaaaaatgccaaaatatggacataaaatatggacaaaatgccaaaatatggacaaatatggaaatatggacaaatatggaaatatggacataa

SEQ ID NO: 80079 - DNA, 132 bp, Heterodera glycines
atgccaagtctgctgctgaacccgggcccgtcaacaatgaactttttctcctcctccctgccgttgccttcctttttcttccgtaaccgaaaaaagtgttacgatttgaacccggcggaagagagccaccaa

SEQ ID NO: 80080 - DNA, 3001 bp, Heterodera glycines
  unsure (1)..(3001): unsure at all n locations
atgttcttcaagcacccgttcaccatgtgcgtcgccggatgcaccggtagcgggaaatcgcagtgggtggaccgccttctttctcacattgacctgatggtcagtgaaggccctatcactggcgtgctctactgttatggggaagtgaacgacaatgtgctccggctacaacgtatggagaacaccgccaccacttcaagtgacagcaacaccacggagggaaaacattctatcagaatgtgccacggagcgcccgaggagagggatgtggagcgggaagcacgcgctacgggcggacggcacctgttggtgttggacgacctgatgtccggcggtctacgctgcagctttctggacacggtgttcacccgtggctcccacaactggggcgtcagcgtggtgctcatcacgcagcatctgttcactcgtgagcttcggatagcgcgcaacaactgtcactacatggtgttgatgcggaacccggtcggcgcacttcagatccgcaacctcggcgcacaactgtttccgggcggggcgctacgctacttcttggaagcgtacgaggacgcaacggccgaaccgtttggctacctgttggtcgacatgcacccaaccacggagcaacagttgcgcctgaaaacgcatatatacccgggggaaatgtgcgtggtgtacatgccacgagcgcgcgcgaattttaatgcaaacgcttagcacaattagcaaacagcagtcgacaccgaaaaaaattgaaaaggcggagccaacaacaacaacacattgaagaagaggaccgaagggtctggcgagaaaagacgacccagcagccgcaagctcgccccatctcgccccccagtgctgagcgaacacgtgaggcgccacattgatttcttccgacaactgaaggcagcacgcagctctcctacccgctgccaagcgctggtcgccggagccagcagcgagcagcttctctgccttgtggagagtgcactgaacatcttacgcgcgcgtgtgcccatccaacgccgtcatctggccagcctcagacagcgtgcgagcgacgtccgcacactgagcagggtgcgtagcacacgctccgcccgtcgccttctgctcaacgcccacgcaccgtcaacagcgcaaactggtcgtggcataccgactctggtcgggttgctcgccagcgtgctggtgcccgtgctcgtccaacgcgttttcgagacaaccagcagtagtagctgaaaggcacccacacgcacgcttgcccacgcagaaacaatgacgttgaagcacactgtacgcatgctactcatccccgaggatgtttatcgacgtctgatggacaaccccagtgcagcggtggcgacgtcttctaccacgtgcatgaacaagttgccacgcccgcaactcccattgagcgcacggcacgcaaaatggtggtggcgtcgagcaagcacatgaacgatgacgaacgcctcatccactaccaacaggagttcaagcgctaccagaaactgctggaggaggaggcggaacgaccgctcaacgtacagctatcgcaacggacaacaaacgcactgcgtgacactgtgctacagaaggctgcgcctgcaacagcgacgacgacgccagctcgcccccaacggaccacacctctgtccaggcgacgtggcttacagcaacaaaaccaagcgccgagcgcgtcttcctcttcttcgacaaggccaacaaaaagtagcagcagcagcagcagtgacgagcaacaacaaccgctcccccagcagactgttgctccacaaaaaattggcggtctgcctaagcaagctgagccgcgtatgcatgccgcgatggcgtacgcgcaacagaacccaggcttgcttggcgtcggcggtgaagacggtcagcaaattttgcaccttgcccagggcgcttatcgccccatccggggcagcaaccttgacacgctgctccgctaccactttgtgggtcgtcatcagcagcagcagccgcggtcctccactaccacccccaccgccagtgtcgctaaggcaccaccgggctacaaaaccttcgtcaacaatgcgcgtgacgatttacaaatgtggcgtttgctgtttccggatgaaagggcggcagcggcggcggcgggcagtgattcagcgtcaacagtgggcggacaacctcggcgccaccaacctctgcgcggacaaaagaaaactggcgcgggccgcttttccctgagccgcttactacagcctaatcatcatcatgcacataaatctgttcaaaaaagtgcgacgagcaagaggaagcccaacactgcggagcattctactgccaaacgttttaagcctcaattatggtgattggaagcaacgccgtccgctcactgacggtggaaagtcttttggacccgatttacaaggacgaacggtcgccagcttgcttcaccagcgttgagcccctgctgcgggaggcgaagcgccggcacccggacgcccgtcttacgcgcgcggagatcagccgctacttggcgggccaacgtgtctacaccctgcaccgacaagtgcgacgacgcttctgccgtctgccgactctggcctccggtctacacaccgactggcaggccgacctggccgatttccaacgtctccgcgcgcaaaaccgtgggtacgcctacctgttggtgtgcatagacacgctgagcaggcaggtgtatgtgcagccggtcaagagcaagcgctcggacgacatgatcgcagcgctcaagcgcacctttgcccgctgtggctacacgccgtggcgtctgttgacggacaagggccgcgagttcaccgcctccgctgtccaacgctacttgcgcgacgaggcggaggtgcgtcaccactgcatggaaacatcgccactgtggcacgctgngatggcggagcgtgcaaaccgcagcatcaaagagcgtctgtaccgttacttcacgcaccgtggcacccatgctggnacgcgg

SEQ ID NO: 80081 - DNA, 1204 bp, Heterodera glycines
atggattcattcggaactgtcgcctggattctgcgaccaacggctcagacgacaggcactgctgtgggctcaatggagttcgaagaggaggaaaacgggacaggaaagttggtccacagtgacacagctactgtcaccacacctaccaccgtcgagtttagactggaaaaaagccccctcctccaagaaggacggtgctgaagaggcagcgacggccacggcacactgctgttcatcgaatccgatgatgtggaggaggaggatgaggacattgaagacacccccgtcgccacagactccccctcggctgcgacggcaaccgttgtggatgactcctccgacactgttaaaggggtggagcagcagcgctccagtgaacacaccgacgtgacggacggagcgggcggtggcggtggaagcgaaggcgcaaaactgctcggcggaggagagaaagaggaggtaggtggaggccagctaattttctacctcccaccactgtttgtagcctgttcgaatgccgctgctcaactacctgtgcgcgttcaacgactgttcaatgaaggagctgcaactcctcttccacagtgtccacgcacgacagcgtatggtggcgcatctgcaacaacactgccgacttcataccgcgcatctgaaaccggcggagcgtaacattgcgctccactgtcacgacctcagcgtgaaaaacgcgaaccggacgttcgcctgcggtggctatctggagcttaccgtaagtcggtgagtgtgtagaaccagtcatggtgcggccttctgtccaggttcgacagtacttcttcgccaaacacgggctaaagctgaagcacccgtacatgccgtgcatgatcgagttcgggggcggcacgcacgcctcctactatccgtaagcggggggtacgcaaaaatgggggaaatgagcgtaaacgccttcagcctggagctcgtccatgtcgtgctggagcgtacgaagcgcgccaaacaggagacggtgaagcaagaagagccataccgtcgtgaatccggcgacgtggctccgacaaagtcgatggcaatgccggaacgacattggtgccgctgttgctgtcgatgcgctaacaactagctttttgagagacatggtcattgtagatttgcgtgcgtgatcacgtgacttattgtgctgttatagtttttgtgcactttttttgaa

SEQ ID NO: 80082 - DNA, 1090 bp, Heterodera glycines
atgaaccacaaaaaacttgaacatgaaggtcatctttatgttttcgccaaacttaacgcggatggttttatcaaattttggaggtgtgagaacaaaaacaataaggacatgaagtgccgagggcgtctgcacaccaatttgaatgacgtagtgttgaaacaagtcaatgagcatgtctgtggagcaaaccctgcgcgagtggaagcacagcgcgtcgttacaggttaggttatatcaaatgctcaagattttgcatgcatatttgacaattttaggaataaaacgtagagccattgaaaccgccgagccgccatctacacttcgctcaattgcactccaaaatgtaagaacccctgtgttgtctgaagtcccaacaaaaaatgcaacaaaacaattaatttctctgcgctcattgtattgccttttttagctaatcaaaagggcccgcaatgaaggaattactcccgcaatgccgcttaatctaaaccagttacaaatcccacaacaatatcaaatttatgcacggaacgaaaacgaaactgaaaactttttgctagccgattctggtacatttttgttgaatgaaaatggacccccgcaacggtaggcaatgcgttttgttcgattcaccattacttttttttgttaggattttgattttcgggcgcatgtctcataatagctgggccaatcaaatgacagaatgttacgctgacggaacattttcattaagcccaccactatttttacaagtttttgcagttcttgcccggtaggctttaattaaatttttgtagtaaatgttcagttttttataggcgcggcaagtgggtcttcccggttttttacgctcttttaacatcaaaaacttccgccatttaccaaagaatgttcagtatgatcaaagcagtttggccggccttttcacctcagtccatgtcgttggattttgaaattggtttgatgaatgctgtacgagaggaattccctaattgcaatttgcgatgttgtttttttcacctcgtcagaaatttcaaaaagaaaatggccgaacaaaatgttattcaggtcccattcttccccccaaaaa

SEQ ID NO: 80083 - DNA, 506 bp, Heterodera glycines
atgacttctcaagtgattggccctgctttgttcgttttgcatggaaaaaccgaagctttaatttggttaccgagaaaggaacaacattttttcattaatgatgaaaatgttggcagctacaaattgggcgattgggttctcttcgactacaacagggaaaaaatcattgaacaacagaaagagactccgtatgaaacgaaagtgttgtattcgaaagttgtgaagcaaaagttcgtccaggtacagagcaatttcaatgaattttaattattttcaattaaattaacaattttagattaaagttccacttgtttttttctcggataaacattcctcagaagttatcgcctattctcctggctttggacgtgttggtgcctttgttccgaatttggcgatggatacaatgtgtttcgcttggattgctttgtatgttgatttttcagctcataattcgcaaattttatactatgtatgggtgccaaataattgaatcaaattacaaa

SEQ ID NO: 80084 - DNA, 542 bp, Heterodera glycines
gaaaactgagagtaatggagaaaaaaaggtcattcgttgcgacttggacaaatcaccgccaaattgggcagtgacgccaattagaaacaccgtccaggcagttgaacaacgtttgcacaaaattttatctgcattgttcaagatcgaactgactgcctttgtcccgaggaaatggcgtcccgagataattgcacccgaaagtcgtatggtaccgacaaattggtttgatgaaatgttggatttcggaatgctactgaccgaagacatggcggacaaaagtgttaaggttttggcggaaaggaacaaggttaagaacgctattgtgagactgacgttacttttactttttatttaagcattcctcaggcaaaacctggcacctggtgaaagtattgggagttttgtaagaagaagggtcgatcgagaaaacttgtttctaatatattattattgtttctatattcactcttacacactttcatttttaaaaaatatgttcttttcgctttataatatttgaaaaaaaaatttcatttcaatga

SEQ ID NO: 80085 - DNA, 1108 bp, Heterodera glycines
atggatgcaatgaatttttcacacactcgtctattgacagatgaagttctgtcagcgaataaccatgaatatgtgcttcatccggatgatctttctgatcataaaaatgtgcacagacaaaaaactaagcgttttaaaggtttaattattattttgctagcgctgttatggttttagataaactaaatgatgtctattaaagtaggctgcttgaccttcctggttagaaagtttccaaaatataattatagtagaaggtacatagccggtaattcacgaggcttacgtttagacagtaacctgtttaaaatttattgccgagggtagcatggatggttttgaatttatgaaaagcgggaccgagtattaccgatactagaaaaaccatgaactagaccaaaatttttcaagggggcttaaaacggttcgggcctaccgggaacaaacttgtaattttttattaaaaaatttacataaattcttttaaattaaaaaaattattcattaaaatattattttatttgaagcatcggaaaatccaatttggaaaattggtctctataggaaaatcaatgacaaagagattgaatgtatcgtgtgtaaaaagccaaataaaggctgcgaaggtggtcgcagaccgaccaaagcaattcggcaccttaaaaccgttcacaaaaacagccattatgtacataaatatgaggaattgctgaagccaactatggagcaagtggaacaaatggtaaataaaataaaagtggaaaatggtaattttttattattgttagtaatattttttattatttgttcttatgggataataacgatgcattcgacttttttttttaaatgagtgatgaccacggcagaagtgccaaataacaaccttctggagctcgaacccatgaaacatattctaaaaaattagatattatttttacttaatacttttatttttaatatataaaatttttatttaattataccgttaaaatatggattaaaaaaattttttcaaaatacatttattttctcaatgattttagaagctccacgaaaatgtaaagcccaagtaaaggaatctgaacaggaaaaggaaacattgtga

SEQ ID NO: 80086 - DNA, 2588 bp, Heterodera glycines
atgccaattacaccaccaccagcagcagaacagcaccaacggcgcagagattcgtcgcccattcgcagtgcgatcagcagcacattttttgctgatcactcgcgtcgatcactgaattcgatgttgaacagcatcagcagcaattctcgcaatcgatcggcatcggcatgtaagcaattaaattttacattcataaaaataagttttgaatatttaattttaatttatctaaaattttaaaaaaatgttttttttttaaattttattatggaatatttttttaatttttgaatattttgatttgttttattattttaatttttataaaactggttataaataattttaaaatgattaaaatgaattaaaaatataattttattattcttttaatttaattttataaaattgtttatataatcaaaatatttgttattgaaataaataaaaaaattttatcttttaaataaggaaatattgttttttctttttatttttttcaatactttaaaaaaataataaattttaaaattttcgaaattcagcaaatgcctcagccccaagaccaacaattagcaagcgaaatgagcaactttcggatgatggcaccactgctcgtccgttgaacttaacaaattgcaacaaaaagtgtgaagcagctgaatcaatcattgaaagactgtcctatttgggctgttcaaaaatgggcgacccgacgagcgaaagtgaaaaaaaatattgaaattttatttaaacaaagaaaaatatcaaacaaaatccacttcgaccaattctgaactcgaacaaaaagtcgaaaattcacatttttgttccaaacagcttaaatacaaagaaacaaactgaagtcatcaagccttgaaaaaaaagatcatttaaaccaccatttttgaagcaagtgcgaaatttgaaaatttgaattttcaacttttgatttcattttcggggttcggaattggtcgaaatgtgtgatgttaacttcatgttcagtgatcccgtaaactgtcggaaacctgatttccagatttgtgaaaaattcaaaaatgggcgatgaggtacaaaatgcactgacctccctctccccaaaaaagtttaaaaatagagaggaaaatttggtgttctgaagagcaaaagaaaaaaaaatggtcagattcgggtactcctagcctctccaagccgatatcccgtactgaaaccgtcactgattcagagatgccaaaaaatccccaaaataatcaattagaaaaatatgccccccccccccctcctctgttcaccccatttaactcacaggtgaaatgcttggcattgttgctgcaatgaatgccgaaaaggcacatgatgcggtttcggtcaccttagtcattcctcatggcccaacaggcattgttaggtgactgtaaaaataaattaaaaaatatataaattatttttaattaaatataatttttaaacagattttttttcagacttttggaaaccggcaaagaatgcccggccgaaatttgctcatttccaatccaaaggattcgtttttgtgcacgaggcaaacccgagacatcggaaaggtcctaaaaatgaaattatttattatatatattttttatttttcttttttatgtatgtaggtatattatttattaataattaatttaaaacgaatttagtagctgtttcgctctttcatttacacaattggcgggcaaaaatgctacacttcatcaatgccacgtttttcgttgcgtatttccggaggaggtgaatgaattgattgtttaatctaattttttagaaaaaaaaattgtttaatattaaatattattttttacattattttttagatttattgtttgttttaaaaatagtttaactgttttttaatttttaaaaagagaaaatcactatttaattattttataatttaatacattctttttcatatttttatttttaaatcataatcatagaattaattcaaaaaaacttgttatttaggaaaataagagttctttttattccaaaaaagtaaaaagaaagttattttttatttataaaaattttgttgttcaatttaaagataaattttttttttaatctaaatatttatttttttaaaaatagacaaaggtttaatctcatccatattggattatttacaacattatatttattttaactgaaaaagacattcatagtttttatttctcaccaatttaatgaaaaaataattgaaaatatatttttatttaataaaattaattaattttcaatgttatcttaattttgcttagaccgctcgtgcattgttctgttttgctcaagcattcaatcgtcggcaacaacaaagcattggcagcgccgcttcatcaaaagcgccgtccccgtcaacaccggtccaattccaattgccaccatcgacggaacaatgtggcacatctgaagagctgttcgaattcgaaacattaatcgaaattaaggcacaaaattttaaatattaatatgtttaattggaataattttttgttaaaaatttagaaattaaaattaaatgatctcttcaaagaaataaa

SEQ ID NO: 80087 - DNA, 138 bp, Heterodera glycines
caaaaaaactcagtgtgggcgatccacaaaaatctcagtgtgggcgatccacaaaaaaactcagtgtgggcgatccacaaaaatctcagtgtgggcgatccacaaaaaatctcagtgtgggcgatccacaaaaaatct

SEQ ID NO: 80088 - DNA, 241 bp, Heterodera glycines
attaaactttaaaacaaaaatagaatgttgaaatgcagcgaacaaaaggaaaacatttttcatcgaattgtgtcggctacttgttgttcttctcccctgtaatattccacaagtgtcggatgcgttggctcgaacaccttttcgtcctccaaactgaccaattggccaggctcgagtccaagaaacacttggtccggtcttttttgttcattttcgaaaggcggtggaccggtgaccaatg

SEQ ID NO: 80089 - DNA, 1670 bp, Heterodera glycines
ggaaattctctctattcttcgttgctcaaagggcttcactccgttttgccgggaacttcgcctaaagttgaaaataccgtgaaactcgaagctgaacctccacagccacacattgacgaacccatttccaaggccgaatcggtgggcattccttcgcttttcgaatccgaccaacaacaacgcactgacggtaaacaatttctcggaaatgaacgctattttggtttatcctttcgccctttcctattcagattacaacaaatggcacatggaattctacggtcggcccagtcccttccttcccgggcatccgcccgtttgccaacgtcctgtgccggactcggcagtagaatcggctatttctgtggccgctaaatacgttgcattgcacggcgcttatgccgaacagagactgattggttgagttgtcttattatttttaatttgtccagaagattttttcatatttaccaatccctttgaacagaacacaaccaggacaaagtgcactttcttcaagcgagaagcccttactacaccttttaccagtcccaagtacgacaaatccaatggaaaatcttccagcaaagtcagcaaaatcgtcagcaagcgtttcatgctccgcaactgttcaccacaccatttggcaacatcgccgccgttccatcgcctcctccgccaagcgttgctgaattggtgaaagttccgagtggtcggcaaatggcggacacaatggaaaaaggggaagaaggcatggaactgaaagaagcaggtacaaaaaaggacaatttgatagttatggctaactttaaaaaatggctaaactgctattgaattcagagccggactccaaacaattggaacgccgtgaaaaggctcgactgttcatggaaagaattctgaacgaacggatggcggaaaagcgtcggacaaaaactaacaataagccaaacgaggaggaggataattggtgaattttggaataaaaaatcattttcccttttgattggatgtttactttcagtgtcactgtttcggaaacagcttcaacttctgctgctgcttctgttggtggcgtcgctattcagccgttgccaagcagtgcattgtctccgctcgcattgtcaaaagccatctcctgtctgatcgacgagcaaataaaacggacattgggcacttctccgccacaagcgccagcagaggcgaggaagaaaaagaaggaaaagcgaagggaaggcgaagagaggagacgaagaagaaagaagagacggacacgttcatactcatccgaatcatcatcatcttctccatcatcatcaaccgattcaaatgaggaggaacggagcagaaagaggaggaggagaaagagcagcaaaaggcggaagaggggacgcgagcatggaagtgaaagcgaccacagtgaaggggatgaggaggagaagagaaggcaaagacggaagcaaaaggggcaggaggagggggacagcaggtggaccaaccgagcaaggcgaagcagcgcaatcggagaatgcgagcggacctttgccattaatgcactttttaaagtactatttgtccccgtttcagtctttcccaccgtcgtcatcaacatcggagtcggtcacgttcgccacgtcgatgaaggaaaggaaaagataatttctgactga

SEQ ID NO: 80090 - DNA, 1253 bp, Heterodera glycines
gtaaatcatggacttctcagtactgaccaacatacctgtgcaaggaggtagtcaaggggggggggtcatgacgtcgaacataaggggtcaacgggtgtcgaacgtaagaaatcggggggggggggtcaaaagaggaaaaaaggagagagaaaagaaaaagaggaaggaaaaaagggagaaaaggcagcgtcgaaatcaaggaaagtgccgtgaattacattcactaatcctgaggagtgggatttgtcgaacgtaaaaaatggagacttgaaaattaactaatttccattaagaaatatcattaaaatattcaaattcattcgacactttccttacgttcgacgaattctgctgaagaatattcgtcgaatgtaagaggaaaggctgaaaaattcctaaaattttgctttctttttttaaagatttcattaaaaattcaaatatttttcctaaaaaggttggcttataatcgcaaaaaacctaataattttttggtaaaaaccttaattgtcaaaaattttccctgaccacccccttgcacaggtatgctgaccaatgaatgaattattcttcaacacccattacctccactgttttgcattcgatattcattgcgaccgtcgaacacctcaaaatcgtcgagtgcagccgcgatttgttcttcctcttccacacttccaccggacaatgagccgacggacgtcccttccgccaattcgtccgcgtcaattgctaaatgcttcggcgtactttaattggtctgactcattgggcagcacctgattcggccgactcggcagcgacttcgctccctccagtggtaattccgagttggtcgagcatccgaccgtacagcgcgtgtcttttgaaggcggggaaaaagcgctcttcactcttcagaatttcgacaatcttcagggggtgtttcgttatcaaaatgggcatcggattgcgctttgggcttggtttatttgcctgttcctgaatttgctcaaaccatccatccgatggttcgtcgttgcgcagccgggccaaaaacttgttgacaattgcttcgctcaacggaactcgagtgattgcctgagtcatcttcgtcttttgaagaccaaaattgtttagaggttcacttcctgtgacagatactgatggtacatgaagagagccgcttctcgaattgtctcccgcgcgtcgctgtccaaagtgtcgcccgaggccaaccccctcaactgatgctccatggacacgttgaaacc

SEQ ID NO: 80091 - DNA, 1776 bp, Heterodera glycines
atgactcaggcaatcactcgagttccgttgagcgaagcaattgtcaacaagtttttggcccggctgcgcaacgacgaaccatcggatggatggtttgagcaaattcaggaacaggcaaataaaccaagcccaaagcgcaatccgatgcccattttgataacgaaacaccccctgaagattgtcgaaattctgaagagtgaagagcgctttttccccgccttcaaaagacacgcgctgtacggtcggatgctcgaccaactcggaattaccactggagggagcgaagtcgctgccgagtcggccgaatcaggtgctgcccaatgagtcagaccaattaaagtacgccgaagcatttagcaattgacgcggacgaattggcggaagggacgtccgtcggctcattgtccggtggaagtgtggaagaggaagaacaaatcgcggctgcactcgacgattttgaggtgttcgacggtcgcaatgaatatcgaatgcaaaacagtggaggtaatgggtgttgaagaataattcattcattggtcagcatacctgtgcaagggggtggtcagggaaaatttttgacaattaaggtttttaccaaaaaattattaggttttttgcgattataagccaacctttttaggaaaaatatttgaatttttaatgaaatctttaaaaaaagaaagcaaaattttaggaatttttcagcctttcctcttacattcgacgaatattcttcagcagaattcgtcgaacgtaaggaaagtgtcgaatgaatttgaatattttaatgatatttcttaatggaaattagttaattttcaagtctccattttttacgttcgacaaatcccactcctcaggattagtgaatgtaattcacggcactttccttgatttcgacgctgccttttctcccttttttccttcctctttttcttttctctctccttttttcctcttttgaccccccccccccgatttcttacgttcgacacccgttgaccccttatgttcgacgtcatgaccccccccccttgactacctccttgcacaggtatgttggtcagtactgagaagtccatgatttacgccttcgattgctttataaatttcgttgtttttcaagtgtctgcaattgccaatgcaaccaatggcacttcagtacgcatcgaaatgctcggcgttggccaacagggacgacagcttttcgctctttacaatgtgcgggtccatcggacagccaccgatttacgtaccggttcttcgtcaaatgtgaccagacgctattccgacttccattcgttgcataatttgatcgttgtaaaggtggagaaaatatttctttttttaacttttttattttacagttcccaaacctacgaacgttgagctttcctggcaagaaaacattcaacaatttgaacaaaaccttcttggaaaagcgctgcagggcactcaaccagtacatgcgtgtaagcattgaaatgggacagggcggaatagtcccttttacaagtgaatgtttagtgcatcctgcagccgtctctttgggccgctaaccccggccttgaacaattggttttcgattttctcacccaaaaactgtacggtggcgacaaagaggggttgtcgggtgcgatgaacacgatgctcaacccactgatgagcggagtgaaagcatttggcaccgctgcggcagcgatgccgtccgacttaatcgacgggatcggcaaaatgggctccgagttgaacaaggctgcttccaatgtattcaaa

SEQ ID NO: 80092 - DNA, 772 bp, Heterodera glycines
taccttttcttctgttcagggctcttccaccagacaccttcattctttctcggggtcgttccgtctcgtcctccaccggcaatttgcccgactccgggcgtgtcgccgcccatcttgacgagaatgttgagtccgcatcggatttcgttcacctttcttttcttttccaggattccgtcgaaagcattccgcttcgtgtgctgcttctgctggtcgacgaagtgtttggactgcgtgccaaaaaccaatggttccgtcgtcggctcgtctcattgcttcgccaattcattcacgcggcggtgggtcagtcgatcaatcggcggatcattgacgcagtcaattggctgacttcggaggagcaagtggctcaatatttggttgctttcaggtattgagaaggcttcggcggcacaattgcttctaaaggctcgctgccccccccccttagagattccttttggtccgattccgccgctggctcttcgtcccgtgcagataactcgccccaattagactcgcagaaaacacgcttcctcgcccgtttcctggtgctttccgcagtgcctgaacagctgcgcctttttgtcggttcctcaaccgttcagtccggcgttgagaccgtttgcgaggcgttgcagaacagacacctcaaccgacgcctttgctatgtcatgttggagaggtgagcacgaagtgataaaaacaatcccaaaaccatttccgcattaactaccgtatatgctctaattatagcccatgggggattattttt

SEQ ID NO: 80093 - DNA, 494 bp, Heterodera glycines
atggtcgaacaatttcaattagaagaagcaaggatgaagaaacacatggaagaggtgcggaaaaaaatttaatattcaaaaaattgcaaaaaaattttttgtcggaaattggcactgccaccccttttctccctcagaaaattttaatactttgtagatttttgcatactatgaaactgatttttgtggatttgggctaaataaaaatttaaaaaaatgcttgatgaattgtgggctggcgattccgctaggtgccaccggggaaaattaagattttttaaaaatgaaatcataccttttttagggggttggggtcgaccggatggatattttcgaaataaagaaacctgcgagttctgataaaatgataattattaattaaccacaaacagagcgaacagaagtgggccgagattttgctaacaaacggaagacaattggagaagggaattgcgaattctgaagaagagaattggagaaaacaaatggaaggg

SEQ ID NO: 80094 - DNA, 241 bp, Heterodera glycines
atgaccggtgttttaaagggtggtgtcattaccgctgcagacgtgcaggatttgaagcgtggttggacccagcttgagctggatgcgaaagttggagcattgaaggcgaaaaatgaccggatgtatcagtccatttgtgcgcgccttcaaggacaggccgccacaattcagcggctgcgggcgacaaaaggcttgaaacgatctcgtggagacaagagaaagacttcagttcgtggaaatg

SEQ ID NO: 80095 - DNA, 615 bp, Heterodera glycines
atgcaggcaaagacgtgcagtctggtaagtagttttaattttcttgcccgaagaagaagaagcgtggtaccattgatgatcgggaacattcccgttggtaggtcggtcggagcagaagatcggagagatgacgaaacccccgccaatctggcccctttttccttttcttcccagttttctcctttttatttaaatcatcattttcaatttcatttctcattatccaatttgtccaccatttcacatctgcattttctccatcattcttcgccccatttgcattttcacattcattcacattttcaaattccttttgttcggcccgattggggatccatttctctaaatgtttatttcgtcctcatccaggcccatctcggtgatgctgcgctcggaggactgcgcaagaacgccatcgggattcaaatgctcgggatccgtgggcacgatcctgactctgttgccatccgatcagtttatctcatttctgatgaggtcagcccagtacgagctcctcagggcagttcggctacgtttgagctcaataacaatggtctgtgtgccaaaaacggagaattggctccgttcctatacggtttcaacagttgcggttaa

SEQ ID NO: 80096 - DNA, 954 bp, Heterodera glycines
tcatcaatgatgatgagttgtgcctcacgaatccttcgctttaagaagctctcaagcggaatgcttggatgcttgtccagtgacacatctctgaccagtctgaaggtggaatgggctgtcttgccatacggcagcaaaatagctgcacacccaatggatgccttaaggataacggccatcggaccacaagcagggctcggcttgtttccagcggaaacacttgaaaattggagcaagttattataacgcgacatgcgtcgcacaaactctttccctgttttggttggttttcaccaacgataagctccataagctcttgagggtgtggttcaattttggcaacacaacccttccttttcggcagcataggctgctgtcttcgtgtaggaagagaagagctccacaatgggggcatttgtggtcacaaagatttccggaatgagaatattccggaaaatgttttgctgcagcagcagcgcagtgccagccgttgtgcaccataaggcaacgttttgttaacgctgttgctggccccagcacattagttcgtggccgaactgttagtgcgggtgaaggcgaacggcttgctgatgccgaaagccttttttgaacacgcaaagaacgccctggtggcgttttcggcctgagaaatatctcattgtcatgacaggagcccgccgctgggcatcttttaaccgcaactgttgaaaccgtataggaacggagccaattctccgtttttggcacacagaccattgttattgagctcaaacgtagccgaactgccctgaggagctcgtactgggctgacctcatcagaaatgagataaactgatcggatggcaacagagtcaggatcgtgcccacggatcccgagcatttgaatcccgatggcgttcttgcgcagtcctccgagcgcagcatcaccgagatgggcctggatgaggacgaaat

SEQ ID NO: 80097 - DNA, 81 bp, Heterodera glycines
tataaagcatttgcaagtattgacgttgatatagtatgtaataatactgataggcttttacacttgggtgttcatccttga

SEQ ID NO: 80098 - DNA, 829 bp, Heterodera glycines
atgaaacgacgagttcgagcagtcattgaagacgaagaggaggaagaaaatggtaaaaacggtggtgggaggagtgggccaatggtcattcacagcagcagcagcgaatctgaggaggaagaagcggtgtttataagatttaacatgacttcctttatccctgctgtttagactgatgagggttcttccgatcggcgaaagtcttcttcctcctcttcgtcccagcaaaggacgccgatgaaagcgaccacaaacattcagcgaatggtccgctaccagaccaattactaccaggttaattgttgtttgtttgttttttgttgtctaacgaggaattttcaataaatttggtcgagttttgggtcttatttactttacgttaccttaaaagctgacattttttaaaacgttctttaaaatagcttttcactgcctaaagcacgctaattgaaacacgaatttgaaattatcgcagtgtttaaaatacgaatccattttggacatagtcgcaactatcgaaatttagggtacttctgtttgggggccgcacattcaaattttaaaaaatgtcaactaacaataagagtgtgctgaatattcaaaaatagcactaatttcattttttattgtttttaattaagaaaatattggtgacttttacttttgccaatcttttaaatgtaattttctcggaaaaatgcaaaaaaattaaatgtactaaatttttagagtgatgaggaggatttgatcggtgctggctcctatgacgaagaagaagaagccaattttgttgtgccggacgatgaaattgaggaggacgaaggcgacg

SEQ ID NO: 80099 - DNA, 363 bp, Heterodera glycines
aataccgttgaatcatcctcggaaaagacagaaaaaatagtcagattaataagagcagcgatggaatgcatcggttttttgggtgccaattccaaagagttcaaagagcgaaaagccgacaaaataaatgtgaacgaattctttcaatggctagagcaaaacattccggaaaatacaacaaaatcaatgttggaccatttgaagtccgttaaagatggaaaaatgaagcaatttctggtagaaatcgaaagtgaatgtgccgagtttaaaaggcacatgtgggagcaaatggagacaaaaggacgacagaggagcgacgaatccatgggacaaatggtcgaacggaagaaatttgtgttgtga

SEQ ID NO: 80100 - DNA, 1647 bp, Heterodera glycines
ttaaaaaaatccaaatttcgtctaacttttttgcattttctcccacgaaaatgccattcttaggggtgtatatttaaccccgaccccgatcggggttaagggtcggggttcggggttgtcggggtatgaagcgtcggggtcggggtatgaagcgtcggggtcggggttgcaaccctacttatattaattaatttttttcctccctttacaaaaatgcaaagcaacaaaacttttatttggataactcgaaatgatgtcaataaaacacacacacttgaacataagtcaatcaaaaaactttagaggaaaaaaagtaagagaagaaataagcaaaaaacaaatgttgaatcgtctgatcatcatcttccgtccatctttaaatgatcagacaaagccaaagttgcgtgctttgatcgcaagcgaaagtttgtccctcaacagcttctttgacgaatagatgggcaggtacagacgagaaatacacctgttgaaaaagcaaattaaattaaaaaagagttaaaatatcacaattttttttttaaattttttttacgtgttggccgttggcaaatgctggtcatcagccgggcgaatcatgatggttggcaacggtcggaaaccctcctgtaaagaatgtggagaggagggatttaaacagattcgttgcaaattcgaaaaaaaaaatagttgaaaaataaattcattacttaattgacacacacatacctccgaagatggcagatttggagaaccggtccaaaagaagcacagctcctgcaaaaatgagagaaattaacatatacatcatggaaatgttaatgttctaagattaaaaaaggctaacaaaacaacaattgggcaacaacaatgagccaaatattatatatttcaagaaccaccaaaatttaaaaaatcccaatttttcagcttaaaactttgtttgtttgtttgtttttgtttgtttgtacatatgtgtctggtgccctaacgctagacatttgttacaaatgccttatagaagaatggtgttattgctgtatagaaggcgaactagaatcttctatgtctataatattatagaaaactcaattcgactacaaattttttaataatagggtttcttcgaaatctccggatgatgaaaatttaaaaatatttcgacattttggttgtggggttaccttattttgggctttcttctcatgtgtttttttaatccacaactttcaattgaattttccattttaattattattttttgcttttcccaggaatgagtgttgtcactttggccaacgaaattgctcgacgcgttcgcattttctgttggattttgaccggcaaacagaaccaccaaaagcgggccattcacgtgaaggcgacttgggcaaaacggtgcaataaatttgtgttcatgtcatcggaggacgatccaacattgcccgctgtgaatttgaacatttccgagggcaggtggcgtatttaaaaaaaatatttccaaaaatttgtttatgcgtaccagagttgtttcgggtcactcgaaacccaatatttttctcgtcccgaatcccaacccgatgattttgggcgggattcgggacaaaataagaatttatattaaatttttttgaaacgattgtgttcaat

SEQ ID NO: 80101 - DNA, 391 bp, Heterodera glycines
gcaggagctgtgcttcttttggaccggttctccaaatctgccatcttcggaggtatgtgtgtgtcaattaagtaatgaatttatttttcaactattttttttttcgaatttgcaacgaatctgtttaaatccctcctctccacattctttacaggagggtttccgaccgttgccaaccatcatgattcgcccggctgatgaccagcatttgccaacggccaacacgtaaaaaaaatttaaaaaaaaaattgtgatattttaactcttttttaatttaatttgctttttcaacaggtgtatttctcgtctgtacctgcccatctattcgtcaaagaagctgttgagggacaaactttcgcttgcgatcaaagcacgcaactttggctttgtc

SEQ ID NO: 80102 - DNA, 173 bp, Heterodera glycines
atggatgcccttcgtctgctcgtcggtgccaacaatacttcaaatttgagtgccgttgttgacgaacaacaaaatgccatcgacgattattcggacggtcagcaacaaccgccgcaacaacagcatcaaacggttgaacaactgatggcccccggtcatcgacttcgggagcc

SEQ ID NO: 80103 - DNA, 1116 bp, Heterodera glycines
atgttaatggaattatgtgaaagtagaagacaaaaatttttagaaattaaaagcctatttacagtacgatgggctgcgtctgagcttgaagcaataaaaacaatacttagattgtggcctgttttgcatgaattatttcaacacattagtctacaagttaaagaatttgacaaggaacaaagaattcgtgcatatagttattttctgtctttatcgcatctttctttttatgcgttagtttcttttttggctgatattttagaaattcttaacaaggctagtttgaattttcaaataagcagcgcatcactgattggacatggtagaaaaatcagaaacttgatagatcaactccaatcattaaaagaagagaatggtccctatatgcataagttttttaattcgataacttgcataatttccgacagaaattacccacagcatccatgtcatcaaaaaaatattatggataatgaagaaggatattcacatgttcaaagaatgtatttaactggttattcgggctctgattatgaggccgattttgtttttgctacagatggaaggaaatatgcaaatgcccaatttttaatgaaacagcaaataaatacgcggtcgtccgcagatgaaaatatagttgtaggaatatctcctccaatccctgagtttaatagaagaattcgaaggcaattaattgacaatgtcgtagaagaaataaaaaattattttccggtcgggaatataattgatgatattgatttactcgacccttctcgtttaccaactcaagcatcaaacataaataattacgcaaacagtattaaaaaattggctatatattttaactatgacgaaaatttgatttatctggaattttcaacaattctatctcaaatcttgaatgatagtcgtttaataaatttgaaaaacaaattatcaccacagagattttggaaattaattattgagcaattgggtgacaattttggaaatgaattcaaaaattttttacaccatatgcttatacttggcttggggtctgccgacgcagaaagagcattttctgttttattttatatacggggcaagaggtataaaaatgcgtggttttcttga

SEQ ID NO: 80104 - DNA, 813 bp, Heterodera glycines
atgcctccggcgtcaatgcccttgtgggcgcgccaatggcaaaaatttttcgttgaacgtgccggaattgattctttacacttcggtttactccttcttatgcttctttcactgctaatgctttttgttagttaaatttaatggaataataaactaaataaattaaattttattttaaattattcttttttgattttaattatattaattgaatagtattttataatattaaacttaaaattttattaaaatacatttaaaatggataaaaatatttaaaaaaatgaaaaatcgatataattatttgaaaatattttaatttttatataagttaaataaaatattcattcataaagttgacaattatgtccgtctttattcggttctgctgttgtacgcattgtcctcctcggcatcgaaaatgttcaacaacggaaactttgacaaatcgaacaccatcaaatggcggctttttctctggcactaacgaagaacgggtcaaaaaacaaacaaaagaattaattacctaattcactatggattttttaactatctcagcggtgccttctccagccgaatggcatttgtgccggacaaacgcaacaaaaacaacaaaaaaatgccaaaacagaagaacagcggaaaatggagcaacgcgatgggcaagcagtaacaggaacgaatgttgttgatgatgatccagaacaatcggccgcccaatcatttcagcaacaaccaaaagcaacagaaaatgttacgatagttgatgaaacagttacggtggcaattttaaatattctgttagaaagttaa

SEQ ID NO: 80105 - DNA, 137 bp, Heterodera glycines
aatgaataaaaataaatcaaatgttaaaaattcacaggtgattaaaatatagtgtatatgtggcacagaaaatttcctactcagaactcattgcttttagtaaacccttgaattcctttgccttattaatttgcacc

SEQ ID NO: 80106 - DNA, 629 bp, Heterodera glycines
atgacacagcttaccaaggagtgcccaatctgccgtaagaacatcactaagacggccgaattttacctgaagtaaaagcaacagatttatggggggaaaaacaaaaattttgggcccccggccgttgatgaaccaacttttaaacacggatttgaaaacagccccctccaaataaggacaggtcttgggaaatttagagtttgcaagaattgtgcgtaggaatattttttggctaacagtacgaataaaaaatttaaaaaatagttcatccctttcaatcattatacagaaaagaatcaaatatcggtgataaaatatggaattctttggggagaaaaaaaagcaatgcggaacaaaatatcgaacaattacagtgcctaaaatgcaaggaaaatatggtaagagaatgttaaaattaatgtccacttaacagtgttctaatttgctgtagcgccgtgttgtattttatccatgtaagcatgccagcgtctgtgtgcgttgtgccaaagtaatggcgaatcctggaaaagctgaagccaagaagtgcccaatttgtaaacagaaaattgaaaaaatactccccttttatctatcgtgactttataacactttagcggttcgatcaggga

SEQ ID NO: 80107 - DNA, 220 bp, Heterodera glycines
tccatcagaaagttttatgcatttgttgatcgaaatgccaatgccgaaaatgaacccgaaaatggaggaggaaattggcagggcccaattttggacgcaaatgcgaacaaaacacccgaagattgacttaatcaggggccaattttgaccaagccaacgcattttcactattcaatttttactctctttccctatttagaaacataaagggaatatttta

SEQ ID NO: 80108 - DNA, 166 bp, Heterodera glycines
tttttctacgtaaatcgttacagcgaatgtctcatcattatctccaactcagcatagagatcactaattgccgtgttcatctattatatccgatccatttgtttttttatttcattaaaacataaaatgtacataattttttgtttcaattaaaattgaggtttag

SEQ ID NO: 80109 - DNA, 3394 bp, Heterodera glycines
  unsure (1)..(3394): unsure at all n locations
atgaatccggatggttatgaaatggacagagccggcgaccgtgttgggtatttggtccgtttttgttgcctcattttactcaatgagtctcaatcaaaatcttccagggtcgtgccaatgcgcacaacatcgacctgaaccgaaacttcccggcccgttaccctttccacaaagaggcgaccggcggcactttgcctgagcctgaaactgcggcgttgatgaaatggcttctccaatacccttttgtgttgtccgccaatctccatgcaggtaaaatttttaaatgtaaattttttttaacacattccgttaaaattctcaaaattttccccgactgggcctaccctttataggctcattggttgccaattatccgtacgacgactcggacacgggacaggacggagtgtacacgccttccgaagacgacaagctgtttgtcaaattggcctacgactacgcacgggcgcacacgaacatgtggaagtcgggcagacgttgtggcctcagcgacaacggcgacgtttttctgcacggaattaccaacggggccggatggtgtgaataatgggggaattgtcttaatacacttgtttttcgtaggtatcacctcgctggtgggatgcaagtgagcaaaacaaatcattttacaaaaataatgaaaaataatccaatttcacattcccaaaaaaaggattggcaatatttgcactcaaattcgttggaaatcaccatcgaaatgggctgcttcaagttcccctatgacgacatggtgcccacgctttgggctcaaaatcgcttctctctgctcgcctttatggaggcggtgcacggcggagtgaagggattggtgcgcaatgagaaggacaaacccatcgcaaatgccatggtagctagtctaactcgatgaaaattttattaggaaaatagcgaactttattttcaacaaaaaaatctaacaataagcagttttttaatttttcggaaaatttatgcctttgacttgcgctgcccttcttcaggttagcctcgttagcggtggaactggcaaaaatgtgaccacttcaacacttggcgaatattggcgactgttgcccccgggcaattacaccgtaacaattgtttatacttttgaattcatataaataaattagtaattgcatttgtcagatccaagttttgcaccaaaactacaaaccgtaccaattcgacgtccaattggttgtgggccagcctaaagaggtcaatgtcactttgaaacacatggaatgtgatggccaaggttttccaaccgaacttttctttaaaaatgtgacaaattctcaaattcagacaaccncaagcaaacagacattcgtccgaggtcaaggcaacctcaaacttgttgctggtcggaattgactcgtcgtccagggaattgctcactcggctggccgcccacacgtgcccggtggattccgaacaagaaccntgaacttgtacgactcttattcattcgacaaatttcatcgttaaatttgtgcactaaggcccatcttttacacgaaagtgtccaactgcacattgtggcggagtacactcaaactgagttggccccctacttgcgcagtgtgttcgccgatgctttgattgtgttcgcctcgggtcctccccaatcgattgtattcagtgcgggcgaatacactcctcggctgttcaatgaacgaacgtttggagaaagtttgaaaaagtacgtgcaatttaggggtcgggcagaaactgtccaaaatcgggcgaaattttttttaggtttggcttttcaactgctaccagaatttattttttgttattttatgcattttagagtctttgcacctcattctgtcgacaatgaggacgagcagcaattggtgttggcgaccactgaaaactgtgaggaccgacttggtcaactcgtcagtttttgtccaaatttgttacccattatctccttttccccctcactcttttccaattaatcttgcgcaggtgtcgcagcaatggtcgatcagatgggcctcgaccgcctttttcagttgggcgttggcatcggttgcggaaactccaccgaacgggacattgactcggccaagttggacgtagcactgaccgccatcattgaggtgatttccgcgcacaattccaatgccgacaattaaaaagccaactttcaaatttgttgtatttattcatacaattcttggtttcgctacttactcttttcgggttagtccattcattttatgttatggcgggttccttttttgtgataactaacttaaaaacgaggcttaaattatttgttcctccttttttgctgtttatattcttaattatcttttttgtcccttcttaaatcgcaattgtattattaattctccaacaatttctgataaaatttcttttaattttattgtttctatttggattttatggtaggatagtgaaataacttcccgaaaatgttgtccctttcccttcagatgatggtcaacgtgctgaaaagggacgaggttcacgagttttcggtggttgtgccttctgtcgccccgaccgatcacttcactccctcgcaaattgcggcggtcacttcggttggcttcgatcggttgtctcagtccaccgtttgttccgcccgactgattgagtcggccgatggcatgaagttgcacgccgtcggctctcatcgcggcccacacactttggtgattgcggtcgaaaaggtcatttcctaaattggcattgtttggcaacgctttccatttgcatttcagaaaacgtctgctttggtctaccaattgggggcccgtctttgcgatcaaatggatgccgaaatggccgaagcagtaacagcgcccgcctatttagaggaggaggacaaacaattggcacgcattttggccggctccaccatcgttttggcacccgaaatcccacagtattatttgcgaaatataatcccatctgatcgtgagactcatttagcactcagttgaactgccacgactacgccacaatttctccgttcattcctttggtgtccaacattttggggactgtgccggaaattgactttgtcattgtaattgccactggcggtctcaaggcaattaagactaattgagtaaaatgggacattaaagacaactctcaggttcgttttatcgatgtgctccgccccggggaggacaacggaatgctgaagaacggcacggccgccccatttgaggaggagcaggaactgatgggcacggagcaaggaatggcggaggagaagctgcccgagggcaattggaccgcaacgccaatggcatttggccaaatgtacatcaaacaccatgaacagatgcgacaggtcagtgatgaaatgatctaa

SEQ ID NO: 80110 - DNA, 1510 bp, Heterodera glycines
tcccattcatccgttgacaaagtgagtaacagaaaagcatcacattttcttaatgtttttggtcaggggataatgctaagcggcgtaaaaatgcgaaaattgccgacaaaccgagaaaagggcggcaatttcgtgctgagggcggaagtgttggaggcggcgataaaagtggcaaaagcggacattggaaagggtcaaattgtccgattttataggaggacaaagccaacggactgacccctttcattttggtggtcaccgtcggcacgactaacacttgcgcggtggaatcgtgccgcgagttggggccgatatgcaacagagagggcatttggatgcacgtcgacgccgcttatgcaggtgagaaacgagaccaaagacagctgagtgaaattaatcagaactgatcaacagctaatcactgataattgttacttaatcaatctaatcatctgctcttagctaatcaatcaacctatctaattagctaatcattgataattaatcagtccatcactttctattcatcgtctttatatcagattaatcgtgccttattatattattggatattggctattttaggcagttttttcatttgcgacgaattccgccatttgtcggacggtgttgaattggcagattcgttcaatttcaacgctcacaaagcattgatgatcaattttgattgttctccgatgtggtaagctaagaaagaaaaaaggaaatttggcatttgtcaattgaggtttaaaaacggagacgaagcaatcgcatttttcaacgtcgatccggtttaccttaagcacgaacatcaaagggatgcgtacgattttcgggtgatttttctccattttcccgtccttcccaaatattcgtttcgctttccttaattaattaagcatctccaagttgcgcttggccgtcgcttcagggcactgaaaatttggtttgtgtttcgtgcgattggcattcagcgaattcaggactttttgagaatggtgcgtccatttgggaaagtttcaaattttctgtattttccattagcaaaacaaatttggcaaattgttcgccgatcttttgctcggagacgaccgttttgagctgttcgttccccagcatttgggcttggtctgctttcggatgaaggtataatcactcgttaaaaggaatcactaagactaattaatgacaatttattaatgtgtcaatgccattgtctggcaaaacatgccgtggttactgtatgtctagtgataactctgtcgtggttactgtagggcccagttttttttccatctctttgcccattgtcccttctcttgagaccagcaatgaactgaacgagtcgctctttttggccattaacgacgatcgccgcattcatttggtcgcttcgttcactcacggcacttttttcctccgtttcgtcgtttgcagttcaaagacacgcgaaactaacatcgaataagcggtcgaagtgatcagagaaatggcggacaaagtgacg

SEQ ID NO: 80111 - DNA, 2056 bp, Heterodera glycines
atggccgagtgcaatacgaaccggccaaagattttcgtgggaaaagtgagtgggttagtggaaataaatccggcaaaaggcagaaaattaatcaattaaatttttttcaaatttagtgttggagctcgtctattggcgtgacccccaaaagagcggtatgaatcatttgaaaaacagtgtaaattcgaaattcgttttcaaatgccttaggcaattaaaattcgttttgactgactgcactttaaattgggcaattaatctttgtttatttgacaatttccctactgttcaggtgccgttttggcctctctctttctctgcgtttacgttttccaacacttttccgtcctttccgttctcataaatggcgccctttgccttttgcttgccaccgtcggcttccgcgtgtttaagctggccgaagcccacttcaaaaagttgcccgatgccagcgccaacccgtaccagcagtacttggacatggaggtggccgtgccaatggacaaactccaccaccatgtagacttggccgtggaatacgcactgttcctggccaagaaaatccgtcacatttatctgtccgatgctttgctcgactcaattaaggcgagtcaattgtgttgtcccctttccattttaaattttgcccttttcagttcggtttgattctccactcgctgtcctacgtggccagttggttctcgggcctcagtttgttcgtcctctttattctggccgttttcacagttcccaaaacgtacgaactgtacaaagaggtacattgatttctctaataatcactcattgttaaatatttgccgtttaagcccattgacggttacgtgaacttggccaaagagcagttggaactcttcagcaatttgtgagtttttccaattacaaaaacgtaattaaattgcattgttttaaagacttcaagagaagttgcccttcctcaaatcgcccgtggcagagaaaaagggagaataaatgaatgttcggaaggaaagggacaagcggaggagaagcagagaaaagaacccgccaattgcgcttaatctctgctttatgccactgacaaaactttgcattttcgcatcggccttttcctccctttgttgtcatcaatgcttgggatcaaaagacaaaatgagggattgattggaatggtgggctctaatgcagtttacgcgtccaatcgacttttacgcgtccaaccaatgaccatcctcagtttcttaagccataacttttttcttacttggtcaatccatacatccttggtatcaattgaaagcttaaagtctcgggaatttataaatacaagaaaagagtaaatatttgcattacgaaaaaaatttcaatgaaaaaaacctgaattcatcatttttcgcgtatattcaacagtaattttttgtctattgcttttatccaggcatttttctatacaaaaacttcagtgaactttaagctctcgattgataccaagaatgtaagttttgaccaagtaagaaagaagttatggcttaagaaaccgaggttggtcattgattggacgcgcaaaagtcgattggacgcgtaaactgcattaggagccaaattacttagactaggtaggcctgtttttggcttaagcctaggcttaggctttttttgcaaattttttactttctgttaacatcattaagtgtacttagggttgcttttgcacatttcgataattacgattcacaaggtatagttttgattgatggttcgaaaaaaactatttttgtgacgtctaaactgttgttgggacgcgcaaaatatcatgggacgcgtaaaatgtcacgggacgtgtaaaaccgactagaaaccccaaattaggtttaacatgattaatgttattacgggttcataaagctggcagtgacgacttaccatctgtttacggaaaagaagtcgattgttgagcactttgcgcgtgtgcaatgtgataacaccaccttcgaccattttcactttttttattagctttaaattaaagttgaaaaaatgtaaaacaaaaatatataaa

SEQ ID NO: 80112 - DNA, 1029 bp, Heterodera glycines
cgccgtcctttccctggcctttctgctctttttgctcacctttcccttttcgctgcttttctgcgttaaaattgtccacgaatacaaacggatggtccccctttgccctttggcactttccttcccattttggcacttttaggtcgtttttcggcttggccgtttgctcgtcggccccccaaaagggcccggcattgtctttctgctgccatgcattgaccaccacacccaaatcgacctgcgcgtcaaatcgtacgacgtcccttcccaggcaggccagagctttcgctgcttctcccaaatgagtgaccaattgacaggaaatgcttacaaaggattccgtcacggtttccgtcgacgcggcagtttatttccgcaccagcgacccaatcgcggccatctcgtgcattgtggactcggcactgagcacaaaacaattggcacaaacgacgctccgcaacattttgggcacgaggacattgaccgaaataatgctggagagggaaagcatttccaaagtgattcaggtggacattggcacaactgcagagggcaaaatgaatcgtttaggagattttggacgaaggcaagtgttggcatggcattcactggtcaatggaatatcttttatcagctaaaagcacgcttaagggactcacccgtggggcatcaaagtggagagggtggagctgaaggacattcggctgcccaagggccttctccgagcgttggcagccgaagcggaagcggccaggagggcgagcgcgagggttgtgagtgcggagggggagctgaacgtaagcagtggcaaatgccaatgtcaatgccaatgctcagcatccccaaaatccgcaggcctccgcttccctacgcgacgcggccgaccaaatttcgggttcccccgttgccgtccaccttcgcttcctgcagacacttactcgcatttccaccttccgaaatcgcacttttgtggtgccaattccgacagaggcaatccgaaaaatgatgggaatggcacacaaaaaagac

SEQ ID NO: 80113 - DNA, 1010 bp, Heterodera glycines
atgacttaccgagtttatttatacaaaattgtgaaatgtgagtaggatgattatgccattcagcttattttatttgcttttccttttatttttccctttgtttttttcttttgcgcccccggcgataaatgtctcttttttattttttggtttatttctttttaataggctgaactattaaatttaatgggagcagttcacagcaacaaaaaagatgagagtaaactgtcactcgctgatcgacgttaccgcgtcagtgccgcctcaaaaggttgggaaacgaaagcaaaatccatgggaacggtaagagacaaaaaaaaagaaaaagaaaaaaagagaataattacggtaattagtaaaataaattccgttttaattgcagttgctaattcaatgcaaaggagaagcacaaggaaattgggaagtgttgcgctggaagttcaacaagaaaacgaaagtcagccatcggaagggaacagcagcaaaagggacgagggaggagaagaggagagggaggaggagcaggtcaaagttggggaacagtatcagcagcaacagcaggaggaaaacaacagcacggggacagggagagatgacacaaaacagatgagagagtgagtgggatggagaggaaaggatgacaaaaaacagatgagagagtgagtgggatggagaggaaaggatgacaaaaaacagatgagagagtgagtgggatggagaggaaaggatgacaaaaaacagatgagagagtgagtgggatggagaggaaaggatgacaaaaaacagatgagagagtgagtgggatggagaggaaaggatgacaaaaaacagatgagagagtgagtgggatggagaggaaaggatgacaaaaaacagatgagagagtgagtgggatggagaggaaaggatgacaaaaaacagatgagagagtgagtgggatggagaggaaaggatgacaaaaaacagatgagagagtgagtgggatggagaggaaagggggaaagggtaaa

SEQ ID NO: 80114 - DNA, 439 bp, Heterodera glycines
atgcccaggtatcctcaaacttgaggtgtcaaaccgctttgttataaaaataattaaggaagcatttcatcttacattgcgaagaaaattccaaaatatgcatcctccattatcaaagtaactattgaattttaaaaaataagacacaaagtacacatttttagattaattttagttttgaaagaggaagaaagaattgctcaagacaaagttaggacttatgagttggacccaacaagcggtttgaatttgcaacctaggcgaaggacatactataataatgatgtggccatacgcactcttgtcactagatttgatgcacttgcaaaccccaaaccagaccaaattatgcatcacttaagagcccttcaatatcgcttagcatccaatggatttgacaatttaatccatgaataatgattttatattttatcgatta

SEQ ID NO: 80115 - DNA, 1277 bp, Heterodera glycines
ttttgaaaattcgcttttccagcaaagtgccgtccgctccatcccgcaaattgccgcgttcgtcccgcatgggttcgtcaacaaacggcttattcctgtgctgcagagtcaggccccgtttttccaggagcacattccggtggaaaagcatttgccaattatctaattaatagtcaattaccgaaaaattcccccactcatttgtgccggtttagcgccaaattgacctgttggttgcggtcgcgcacctcagcgaccgttgcgatgcgcaaacattgcactatttgctgacggtgacatcggtgtgttcgacgctgcacccggccatagtccactcaaaatcacgtgacatttttaaaatcctattttattttttcaaatttaaatttcaatttccgccactttttaattggcaaacaaattcttggcaaatttttttttaccaattttgacttttttttaatccaaaattcaggcctcgtccaacgcattttgacctgcgatgtcagccgtctgcgcgacccgttggttattgcgcatcatttgctgaacccggtaatgaattaatgagtttgggttgtttttggaaaattattaaaagcaattaaagggcagtaaatattgaattaattaataattaacataagtattcaaatttttagcttgtccttggccttgcgttgcccgaactgtcaccggcacattttgatgatgtgaaaacattcaattgcatttgaaactttaataaatttctccaattttgaggtgatgagctcctcgcgcattctgttggacattgtggaacagttgcgttatgaattcgatgacagccgaatgaaagcggagaacggcggggggaggtgggaaaaaacggggagggagcacttttggcattcaaaaattgcgatgccaaaaatgcctttgtttccattttcattccgtccccttttcttccgctgagcagtcatcgtttgtgcaaccgtcgcgtgtccatgtcctccaatcacttgcctcggcttctgatcactgccgcgcgcccatccatcggcgacggacgcaaaatgtcatttttgtccgcggacggacggttggaggaccgccgcggcagtaggcgcgagtcgaaggactcgcgctgctcgttagagtccgaagtgtcgctgcgaatatgtaattgatcagcagagtgaccaaattgatgagtcatcaataacccaatcaatggctaactcaattttcggccaaaatactgaattctaacatttttcttagtgttatat

SEQ ID NO: 80116 - DNA, 1880 bp, Heterodera glycines
atgtacgtggacatgggctaccggacgaacccggcacggactgacaccaaagtgccgtcctcgccatattcattatcaagacaagaaaaggcggcagatacgcgaaccaagcgggatcagcagcagcttaagccgaatagagaaaggtgggacatattttatagaattgggaaatttttaatcaaatgccaaaaaaactgatcagcgggcgggggagggaatgatcattgctttcaattgatacgaggatgatcaactgacttttgatctgatcagcggtgaccacgataatcatttgaccattgttgatcaactggcactatcaaaatagtgaccaagatgttcaattggtaccaagatcggtcaattgaatctccgttaacttatcaatctaacacggtcaattggtctgatcatgttttaccaaattgatcagtgggaaggaagtatttgtcattttctgatcataattttgtattttttaattccaggataaccgaggaggaagtgcggatgttcggcatggatgtgactgatcagatggacagtggtgatccgacggagagtgatcagatggagagtgatcaggaggggaaagccgagaatttattgcccaagactggggttgaaaatcatcctaatttggcggtgaataattgcgccgttccgtcaattgcattcgatgaatgttcacttttgtaattactagcggggaaagcgccttcggcgcatcccccgctacgtagtacgatgtattattgagctatgaataataaaaccgaaaatggctcggccgcttcgcggcctgggactcaattcttcggcattccaatcacttggaatcactcaatccacctgcattccaatcaccaacaataaatctcgccgattcttctgcataccaatcgctgggactcagttctacgacctttcaatcaccgttactcaatccatcagcactcgaaacacctggactcaatctcaccaattctacataggcaaaacattttaacattctactggcctttttgtttcttgtcatttcttaaacaaccctcggcatttcaatcatcggaactctatctcaccaattctccggcattccagtcactgggaccaacccaccagcattccagtcactgggactcattctcctgcatttcaatcaacgggactcaaccctccagcatttcaatcactgggactcaattctccagcatttcgatcactgggactcaatcctccagcattccagtcactgggactcaattctcatgcatttcaatcactgggagtcaatcctccggcatttcaatcactgggagtcaaatctacggcattccgaacactgggactcaattctccagcatttcaatcactgggagtcaaccctcatttcaatcactgggagtcaattctccagcatttcaatcaccgggactcaatcctccagcattccagtcactgggactcaattctccagcatttcaatcactgggactcaattctccggcattccagtcgccgggactcaaccctccagcatttcaatcaccgggactcaacccaccagcattccagtcgccgggactcaaccctccagcatttcaatcactgggactcaatcctccagcattccagtcactgggactcaattctccggcatttcaatcaccggcactcaaccctccagcatttcaatcactgggactcaacccaccagcatttcaatcactgggactcaattctccagcatttcaatcaccgggactcaatcctccagcattccagtcactgggactcaattctccagcatttcaatcactgggactcaattctccggcatttcaatcaccgggactcaatcctccagcattcca

SEQ ID NO: 80117 - DNA, 317 bp, Heterodera glycines
atggcacagtttgacgaagccgaattcaagacaacggttagtgccaacgccaattttcgctttattactgccatgatgagatgttattatattaattacaaaatcagcggaagtttcagcaatccaaagagcttaaaagaagcgatgaaataacaatataccatttagcaataaaaagcaaatttatttatgcaaaagagaaaaaagtccacaaaaaggagtaatccacttactctgcggacatgtcatagattaagtcgtcctcgagtaatatggatcaacaattaaacaaaattaaggaatcacaacaaaattaa

SEQ ID NO: 80118 - DNA, 87 bp, Heterodera glycines
gaaatgttcatttattactgttgccgaacaactgaaaaatgtacatagcaacttcaaagtcttgcaatggaatatcgggcgagccca

SEQ ID NO: 80119 - DNA, 1053 bp, Heterodera glycines
atgtaccgtatgcaacatcaaattgacgccaaaagaaacaggtcaacgctacaacatgatggccatctttacaaatttgctaagacaagtaccgacgggacgattaaattttggcgatgtgagttcaaagacagcggtgtggacaagtgcaaaggacggatttggacttcacttcgagatgaattcatccgcatggcgacacctcacacatgtgaacggaatccaagtcacgtcgttgcgcaaaaagtcacgactgccatcaaaaggcgttctgttgagaaagctccctctgtaattcgtgcggtttctactcaaagcattagttcgcctgcactttcagaagtgccgtcaaaaaaggcaacaaatttggtaaatcttttcaatcataaaatttgttaaaagatctttcgcttagatgataaaccgagcaagacatctagtagatgcgccaccagctgtgccattgaatcttgaacaacttcaaataccgcaaagttaccagttttacgaaaaaacgatgtacaagaacgttttttattctgctaagctaacttttgatgctgatcaaaaaagtcttttacagcaacttgatcagatcactcctttatagtgaccgggacaccacaaaacacattgaaaatcggggaaatttccgaaaagaatccctagggggttgtgaaaaattttctgtaaaatttcagtaggccagtcagaaagagcaaaaattctctacaattgccttttaaatagtgagtctacgactagaaaaggcaaataataatggatcgaccaaatcaattaattatcagtgtttattttaatttgaatgcatttattgatcaaattcaaattttttattttatttttgcataaattggattacattactgtataagcttatcttttacatttaaaaaagaatttataaattttgtttttctccaaattacatataaaaataattaatgtaataatttgtttttgcttttcaaaaaaaaattttgaatttatatttaaaaaacggaatttttcatcgaagaaatgaaaaataaa

SEQ ID NO: 80120 - DNA, 634 bp, Heterodera glycines
atgtctttgtctgtggttgatcggatgaagcggatgttgagcactggagaggacgcggatgtgcactttttggtgggggaaggagaggaaaaggaggcaagtttgaaaataaaagtattaattaattaatttttatttaatttaaaaaaaaagcctttttaagagagttgcagcccataaagtaattttgaagcatgcttccgaagtattcgaggcaatgttccgttttgactcacagaatcaaaacgtagaaaatggtaaaaatttgatgaataaattaattggtcaattaatttgttagcctgcactaattgtgtcgtggaagtgcccgatgttgaggcagcagcgttcaaagtgatgctcagcttcatttatgccgacgatttgagccaattggacggagacaacgcaatggcagtgctttacgctggtcaaattgtttttgtgaaattaatctaacaatttaattattcattaattagccaaaaagtacaacatcgttggcctggttgtcccatctttgcaaattccaatttcaaaactgcacaatgttttctttgcctatgcccaggctcagctctttgaattagaggtgggatgacagagcactcaaaagcatcactctttcaataga

SEQ ID NO: 80121 - DNA, 832 bp, Heterodera glycines
atggcattggatgttcagcagagaatcgccgtaaaatgcttggcccggcattgttcaaaattcgcttttccgctcgtgtcaaaagaagaattttcaagaaatattggtaagaaactaaattctacaaggaatttaagactttaaatgttcgaaaatatattcccattaaatttaattaaaataatttaattaattccgtttccaatttatttatttttcagttccctccggtgtgttaactgtggaagaagtgatcggcatttatcagttccattgtcatccgaatttgcacatggtttccgagctgtacccattgaaatttccgaggcagggaagaatttcggaccgaacagaagggacacttcagctggaaattgaaaaaatgtcggaatttgcgggcgaaactgtggggagctgccgatacagcaaaactgtgcacatccgagggcttccatttgaaatatttgcaaaaataaatgcgacgacggaaaacgatgaaaattttgttgggaaatggctgggcattttcctttggtgcacagcgccaacagaaggtgattataggcgcaacttttagtgaaaaaactttttttttgctcaattgttttgaagaaaggagctcaaaaaacgcatttctgcgttaaatttttttcatttggacgtcatttttcatcactgaaatcactattttggcgtttcgtcacttaaaatagtgaaaattctctttttcggctttttgtcactgttttttcactttttcgacattttttcgtcactattttagttaactatcgggatttttcgtcactaaaagttgcgaccctagtgatta

SEQ ID NO: 80122 - DNA, 503 bp, Heterodera glycines
atgggacggagaattgcacagggaaacgcattgacaatgtgtttaacagcaaatcaaacagcatgggattccccactttcattgctttttgggtgagggcttattataccgtacttacggtattagaacccccctctgtattagaaccccctttcgaggggggttgaaaatagaacccccgggagtactaactaattcagtaattacggtattctaatgagaatattttaatcttctgaatgatacgaagaatataaaacgtctccgactttcagcaattttgccattatttttcatttcccctggcaaatttaagaaaggccaataatggcagaaatggagaaacggcccaataaattcaaaaaagctaccaatcgattcctctcgaagagttaatttgtaagcacgaaaatataggtctccagttgcggaaatgcaaaaaaaaactgttttgaccggtttaaaactcgattgagcaaatttggcacttctaacttttttaa

SEQ ID NO: 80123 - DNA, 421 bp, Heterodera glycines
atggattacctttgttttcgtgctttgctcctcgagaggaatcgtttggtattaaaatttgcgccattttttcaagggcttcactatgatatatccaaaattaagcaattgatggatccgagaaacggcttttacgacagagacgaggacaaagtgactttggccattgatgtcattgtggggcaagcagaaatggacagagcaatttccgctgatcagagcaaatcgaaagggacactttttatggacattgaaaaagtgtcgcaatttgcgcgagaaagcatttggagtgagcgcaaaagcgaaactgtgacgtgcttagggggacttccatggaaaatatccgttcaaatatttacgattatgggaagtgccgtcaaatgtttgagcctttttctttgttgtaccgctccaaaagaag

SEQ ID NO: 80124 - DNA, 67 bp, Heterodera glycines
atggcccgcgctcacccggcggcgctcacctggctggcgctcagttggccgtgcacccctcccatag

SEQ ID NO: 80125 - DNA, 316 bp, Heterodera glycines
atgtcgtccgatgacgaaattcctccgttcctcgacgggccttacacgcccgtgcgagatggcgatgagccctttgaggatgctccgccccttgtggaagtgattaaccaattgcctattcaactggtgaaaattatttgaaataaaataatattattaatcaatatttagattttggatgatgttaaaggaaaaaatgaacatgtgacaaggagcgattaaacttggaagaatttaacggcgagcatttcaaatgcctggatgccgcacaagcggagagtggaagattcaaaggttgattaatttcttcgagcaa

SEQ ID NO: 80126 - DNA, 700 bp, Heterodera glycines
atggctgaaacaattttaacacactttgaaattgtcgaccaaagcaacaaagccaaagagcggccatcacttcttgaggaatcgtttgttattgacatcacggccatcgacagtggaggaaagagacagaagatggcggggaaaggtgggcgtcgccgtgacttcaatgttccgtacgaccttctggagggtgcaacatacggattggagaacaacgatgcgtattgcttgttccgcgccttcgaattccttcgcatgaagcatgtgatgccacatcagagattttctgaatataaacgtgatgaaggacaacaacttaacaacgtgacttctttattccgagagtgcgacatccaaatgtggttgcagttttattccattgaggaatatggaaacaaaattcaggtaatttaaaataaataaatttaagattaaaattacatttaaaaaatactacaacgaaatgcaccctgggatgttccgtctcttctgctttgacacctttggcaagatgaaacccatttggaagtccgccatgagtgattaccggtatgagctctgtgttctttacacgagggagatgatggagctgttggacactatgacgcaatcaaatcaattggaaaaaatttcggctcaaagaattactgattgtaaacttgattataatccctagtgtaagtaaccgatattcatacaa

SEQ ID NO: 80127 - DNA, 1429 bp, Heterodera glycines
atgccatacattggggagacaaatgatttcaaatttgagcaaaaggatgttgaacaatcattggtgctgatggacgatgatggggccacagatgtggccaaatcgtcatttgatgtggaggataaaagtgcaatttaattttaaataatttaattaaaattaatatttaaaaggaaaaaaaaattgaaaatatggaatcattaacatcaataaaagcagtacaatggaaacatcttcagttgaaataattatgacttcacaaaatttaaaaattgggcaaaattaaagtaaatattaaaaatttttaattttctttcttaaattgggtttatttatgagaaattttttagattattctataaaaatgctaaaattaaataaattaagatttataaaaatcaatgttttaaaaatattttaataatccaaaattattttattgaaaaaaaaaatatttttttttgaagatacaaggccaaagagtccgaaaaagtttaaaaatttaataaatactttaaaaaacagtacaaaacatcatgctttttaaattttttaaagcatttttatgaatccaaaacaattttatttattttttcaaataaaaaatagttgttttagcagcacaaggccaaagagtacgatcaaatcgaagaagaattagtacatttacaactccatcgacgacaacatcattatcatcatttccaacaagtacaagtccacaactcagcagtacaactaatggcgaagagttttggatgacaacaaggagtacggtaatgacaccgtaccaacgcgtggccacaacaccgtatgacattgccaagttttaccgtatgccaaatggaaactcaagacagcgtgaaacaggtaaattttataggcacacaccccggtacaggactaacttaacctgaaaatatttcaacgcttatttgatttaaaagattttttcaaaattctgagttttccattatttgatttatttttttttgcaaattaattacataaatatttttaagaaagtgcttctgatttctgacaaaatttagctaataagccaaaaaaaaagagagaccaatattaatgaatttgagtttatcctctttttataagagttttatataaaattgaagttctattaattttaattaatcccaatttataaaagttattttttttaaataaaattgaagtgctaacattttgctcaaaacgtgccgccatccgcgactcggccaacatggtgatcgcatgtgccggcgaagacggcgacgtttggacaccgttgcgctgtccgcccggcaccgactgtttgccggccgccgattcgacattcagaatttgttgtccagtggcagtgggaaaaagataaaaaataatattttatttttattattattaatttatgcattttatataccattca

SEQ ID NO: 80128 - DNA, 811 bp, Heterodera glycines
tgaacaatgtcttcgctgatcaaccttttcaactcatttgaaatgtatcatgaaaataacacgaggaatatgcactcttcctacaaacacaagtgagtggaggactgaccagaagtgatcggctcaatcaaaggcaatatttaatcgaatggcctttgattggtccctttgcctttgtccctaattacccaattaattattcgcgcggtgtttaggtttcaatttccctatgaacggattgaggacccggcgggtttgactgcgtactttcagaagtattgacatcaaaccatcacaattggcattttgtactatgttattgtgagcaatttatttattttttaaaacactaataatataattattgaaaaggtaaaatccattgaatggacaatgcgtgacagaaagccgtttgatcttcggaattgtctgtttgtttggaacacggcattggcacttttcagcatttgtggattcatccgagtgggagaggtcaaacagattttagagaattaaaaccaagccgttgttaaggagtcgctcatcaatttaatatacgagggattcactttcacaatttgccacacggtcaatgcacgcggcccgggcccattttgggggtttctgtttttcctttcgaaatttgccgaattcggagacactcttttcattgttttgcgcaagaaaaggtcagtgtcccaagcatacatttttccgttttcaactttcaatgcttttttgaattgaaggttaatcttcctccactattatcaccacgcggccgttctgatttattcggctcatgtcggtg

SEQ ID NO: 80129 - DNA, 516 bp, Heterodera glycines
ttttgcgcccgaggggtacggcctttttatcctcgccttgcccaactgtcccacccgctggagcgccgttttcgaatttcgattgaggggagggtagtggatgaggaggtatagacaatccaaagaattgggagggaagttaaatcccgtcacgtcgatagaatcattcaccaggatattccttcgttgactgtttagttgactgattgcgtgtcttttttgcagaataagtacggctgtcgtgtgatccaattcgtccttgaaaatgtcgtccaactcgtccatggcactgcgaatgccaacaacagcttggaaaagtgaattgttctttttttggcccgttatcattcgtaaagcttaagggaaatttccatccaaatattgcatgttctcatggagcccattctcaaaaatgcgtattcggtggcacaaaacgaattcgccaattacctcgtccaatttattatcaaatcgccctatctccgccgccaacgctgttacatcatcaaaactcac

SEQ ID NO: 80130 - DNA, 1491 bp, Heterodera glycines
atgccatcccatacaaaccgcacccctctctctccccctctccaaagggtcgtttgtgcgtcacccactcgcccttcgttgctccctttggtcgccgcggggcaatcgtcgccgcaggcgttggcggacatcgcacggcacggactgctcgcgcgactgtccgttgtgcaggcggcggacgcggcggtgctcgcctcgaccaacttcacctttttcgactgtcaacagctgagctcagtgcgttcgtcccactttgcttcctcccaatgcttttcctcccccttttttagtgttccgcttgcgcttccgcgcgtttcccctgcgattggtgcgctttgtccgcgcgatgtgtgccaaatgcggaggacgtgtgccaaggagagacgctggtcaactcgatcagcgtaggctttacttcgcaaagccttcattattcgcttcccatttagcgagttggcccttcttctcgccgtggccctgagttttgcccccatttcactgtccccggcggtgatcagtacctttcgtccggaaagcgtcgctccgtgtcagtgaaagcgcacaatctccacgaccaaatgagcgcgttcaaatgccgttattcactggaatcgtcggctggcgtagtgcatgagaaattggcacaacggcaggaggacaaaataatgtgaggggggggggggcgagaggggaggggagggtgaagaggaaaggggaggaaaagggcattcgctgcattaaaagaaagagagagaaacatggaccaacagagaccatttcgttcagttgtgaagacatgcttttcgaattttcgggtcccggtgatggcaatggcactgttgtcgcccgtttcgacatcctttgggcttcatcgtccgaccaaaatgccaaccaattccatccgttggacaatgcgcagggaatgcgaatggtccgtagttatttttttccaattacaaactcacttttcactcactcattcattgctcagatcatctacaaatgcgcacaattggcatcaaattgtggcatttgtttggggttggatgagcgccgcttcgactgcggatggtgcgacgaggagacgcaatgtgtgccgaaggacaattgcgacaaagggggtaagttttggagggggggggggtggtgagttttgatgatgtaacagcgttggcggcggagatagggcgatttgataataaattggacgaggtaattggcgaattcgttttgtgccaccgaatacgcatttttgagaatgggctccatgagaacatgcaatatttggatggaaatttcccttaagctttacgaatgataacgggccaaaaaaagaacaattcacttttccaagctgttgttggcattcgcagtgccatggacgagttggacgacattttcaaggacgaattggatcacacgacagccgtacttattctgcaaaaaagacacgcaatcagtcaactaaacagtcaacgaaggaatatcctg

SEQ ID NO: 80131 - DNA, 531 bp, Heterodera glycines
aatttctcgcacttttggaatggatcccatcggctccaaataacccaattgtgccagacaatggaacggccttcgctcctggaaccaatttgtgtaaattgagtatgcaattgacaaaatgtaggtgagcgccacacagattttcatgttccttaaattaatgagaataattttcttaaaataattcaacaaatcattatttattctatttaaaaatttaatttaaaatttattttaaaaaaggaattttaattgaaattagtaatgcttaagtttttatttgaattcccaaaattaacggacggacttttcgcagcaaattgtgttgtaaaggcgtgggaacagaaaagcaatgcatcggttgaacgccaattcaatgtaaaaagtgtcaatgcaaaaattgacaaaacgaaaaagaaaggcatccaaagagaatttgacgatgagacgagtgccgatcagatattccagggaaagccaaacgtactcgaacagccagatcagatcgaacacattcttaaagaaaaatga

SEQ ID NO: 80132 - DNA, 96 bp, Heterodera glycines
atgcaatcgtttctccttctcgtaaatattttgctttgttcaattgtgttgctacatttattgtcaaatgaacatggattggtcaatgccatgccg

SEQ ID NO: 80133 - DNA, 372 bp, Heterodera glycines
caaatggcaacgaatttgggaaaaaccggtggattttttcttgtagtacgaagcaaccatatttccggaggatgtccaacgggacgaaacaccgacctttcaagacaatttatcattaatgtcccgaaattccgcctctttctcacattggcagcagttgtaccggggctcagtgctgagcaggcctcacttttgtcggagattgcccagttggcgtatgaaatcttcaagctgtccagcagagtccaccagctggacatcgagtcagtgttcaagttgccgttgcccgacgcttcgcatgtgccgtactcagtgacgaacacaggcaaacctttagggaagcagtttagatggagaagaagcttcccttga

SEQ ID NO: 80134 - DNA, 1573 bp, Heterodera glycines
atgtgccgactccaagcaactcatctgctcgctcgactctttctgctttttgcgctttgcactgctctcgttagctctctcactgctgttgccccgccattcggccaattgtccgtttccggcaccaatttggtcggcgccaacggacaacccgtacagctgatcggcaactcactgttctggcaccaatggtacccgcagttttggaacgctgacacagtgaaggtaccataaaagcactcacttttcaaaatggattaagaagccaaacatatttgatcaaaatgtgcaaagtgttaatgttaaataggcactcaaatgcaattggaatgccaatgtcatccggggggccatgggcgtggacgagggcggctatctgagtgacgcgaacacggcttacaatctgatggtggcagtgatcgaagcggccatttccaatggcatttacgtgatcgtcgattggcatgcccacaatccacatccggacgaagcggtgattagtgccgagactgaggcaaatggcaaatttgaacattctcaaggtcaaattcttcacccgaattgctcaagcgtacggctcctaccctcacattttgtacgaggatttcaacgagccgctgagcgtttcgtggaccgatgtgctggtgccataccacaaaaaggcgagtcataagagaacatttttggtgaccaaaaggaacccatctgctgaaggtcattgctgccatccgagctattgacaagaaaaatgtgatcattctcggcactccaacatggtcccaagacgtggatgtggcatcacagaacccaatcaaagactaccaaaatctgatgtacgttttcgatcagttttacactgaaagtgtgccaatatggggggggggggcaaaatgaacgaccatcaaaacgacaaaaaacaattgtcaatccccttaacaacgacatcccttttaaggtacactctccacttttacgcgtccagtcacttcacgaatgatcttggtgccaagctcaaaacagccgtgaacaacggcaagtgctaatatttgtctgggacgtgccgggctcctcaagggaagcttcttctccatctaaactgcttccctaaaggtttgcctgtgttcgtcactgagtacggcacatgcgaagcgtcgggcaacggcaacttgaacactgactcgatgtccagctggtggactctgctggacagcttgaagatttcatacgccaactgggcaatctccgacaaaagtgaggcctgctcagcactgagccccggtacaactgctgccaatgtgagaaagaggcggaatttcgggacattaatgataaattgtcttgaaaggtcggtgtttcgtcccgttggacatcctccggaaatatggttgcttcgtactacaagaaaaaatccaccggtttttcccaaattcgttgccatttgctggaactaaacgaattcaggcgtaagctgtagcggctcaagttccggcagctcttcgggctcgagttctggctcttccggttcaagttccggcagctcttccggctcaagttcgggctcctctggttcgag

SEQ ID NO: 80135 - DNA, 1087 bp, Heterodera glycines; identical to SEQ ID NO: 15811

SEQ ID NO: 80136 - DNA, 967 bp, Heterodera glycines
  unsure (1)..(967): unsure at all n locations
taaattttaaattttacttttcaaaactncggaccaaatttaaaaaatgcactgattgatttaaaaaagaagggtgtggccttttgtttaaccctaaaaattcaaaactcagcccaaattatgtcttcctggcgcagtgtgttcgattccgtgctgatctcattcggcggttggccttcgctggaggcgtcctcagaaccgaacattcgaattcgcatcgaacgcctctacggaataatggcaaaataaaaataaaaatggaaaaatttaaaaaataatttaggtaattaattattgttttttatttacaaattcccataaaagtttatggtttaaaattttttttttcgttttctagtcataaattattattgttttctttttaatggaagggcagtaaaatgtaaatatacctaaattaaattttaaaataaaaatgaaaacacttttaaattaattattttttttctaatttcaggtggccaagttcagagccgactccctcttcaaagcgacggtgcaacccgacgacaaaaactcggacaaacacgtgcttttggtaattattgtacatttacctaactgatcattttaaggaaagtataaaattcaaattttaaaattatttgaaattgttaaaaaaattaaattaaattttcaaaaaatattttttcaattttcttttcttttttattttattaaatgggaagaattttgcctcttcagattgaccagccggcactgaacctttttgcccgcgacttttacatgcttttggagacggaggacgaaaggctggcctaccggacattgtaaatttgaatatatgaaatccattaaattttcaaattttttgagttttgtagaattcgtgacgttttggtgctgctgggcgctgacccgcgaattgcggagcgcgactcgctggagattctgcagtttgagacggagttggccaatgtcagtt

SEQ ID NO: 80137 - DNA, 1166 bp, Heterodera glycines
atgaattttggcggcatcggagtggtaattggacatgaaataacgcacggtaagtgccgaaaaattctgtaaattactgtaatgcagttatattttttgtataacaattaaaaaataatctccacaggttttgacgatcggggccgactctacgatcagtatgggaacattcggcaatggtggtaagattttttgcattaatttttgttggcattttgtcacttttttaatttaaaaaatttgagggacaatgcaacaattgtcaaatttgaagagaaggccaaatgcattgaagatcaggtgaaaatgaatgagggaatggtgtaataaaaattcaattaaaatttgagaaaattaaatttcttcctcagattttatacaaaaaaaatgagttaaaacaaataaattggaattaatataaattttactgattttgtttttttagtattccaattacattttggaccaaatttcaatgaaaatcaacgggcggagtacaaaaggggaaaacattgcggacaatggcggactgaaacaaggcaattaattaattaataattaattaaacataattgttttttcattttttcacccaatgcttcggttaattaatgtaaaaatgatcttaaattatttaccattttagcttatcgtgcctacaaaaagtacgaacgctttcacacaatgccgcagcaattgcccggcgtcaatctgacccaggatcagctgtttttcctgaattatgcgcaggtaaaattcggggaaagtttttccaatttgatttaatatttaataaaatttaatttaaatccacagatttggtgtggcattatgaacgacaaagaggccattcgcaaattgagaacgtccgaacattcgcccgggccaattcggtaattggacgggcagttttttattttgcgggaaatacagtaattgaaagtcgggacagaaaattttgcaaaaattttcaaaatttgcaggctccaagtatttttcgaccaggcacatagcaaatttaggagggagaatccgaataccttttgttgctcttcggatttttttttcagtattattttaaaaatggcagtgccgggaagaaaaagcaggcatttgtatccgcttttcgccaaaaaatgaacaaatttctgccattttgggtttaa

SEQ ID NO: 80138 - DNA, 2093 bp, Heterodera glycines
  unsure (1)..(2093): unsure at all n locations
atgttcactgtgtactcaattgtccacctcctgctgacgtgctgccttttgctggccataacagacgtggtcattagtgatccactgccacaaaatgcaacggttgctgatcaaccaacagaaacgctgaccaatcagactgtcaccgcagaaacaacagcagcaactgaatcaaccgcggaaacggtaattgcagatcaattactgtagcaacaattttttctcatcattcaatgccttccagacaattgccacaacagcaactgatcagcagaacgttacggtcaatgagagcattgagacggtaagagaaaatatcagcatataaaacaactgatcattgaaccgtaacccattttaagacagtaactcaaacggcatctggtccgactactgtcatcaattcgaccagcactgaaccggtggaactgatcgccgatgtcgacggcggaactgatcaagcccttcaaacatttaatacaacagcgcaacaaagtgatctgggcaacatgcaactgttcaggtgatcatgatgctggtatacggtattgatcagccataaaatcaaaaatttcagtcaccagtgcttacatccgagattgatcagcagaatgttacactgcagaatgccaccgttattgaacctgttgctttgatcgctgcaactgtaaacggcactgatcaagcagccgctcaaacacttttcaatgcaacagctcaacaaattgatcagaacaacaacacaactgtaatggtatgatgtgtttaatcacttttttacagtaaccgattttcgctcttttactgtaaatttagtacggtcacgatcagaaattgaaaaaaaacacctttaagccgttgcttgcttcgacaaatgagccgaacattacgctcaatttcactgttgaatcaatgcatctgatcacggacaatgggaccgatcagaatcgtactgatgaggccggagctgcgggtccttcagttgctggtggcgaactgggaggtatattcttgaaaaaatattcaataaataattttaacaaagtaatataatttaattaataattccaattaattaataaaaaggaattttaacaacttcatctcatggacaattaattatgtacttagttcattaataatttaataataaaataaacattggattcaacaataattaatggacgctcaataattgttattattgttcaaaaaatcatataaattatgatcaaaaataaattgttaaatatcattaaagaaagcaaaaattatgattaatagaaacgaattcaattaattataatttttttcttcaggcgaagtgccgcttgtgtcttcagggcaggcggacgaacaaaatgccaaaaatgagagtgccagtttaaacgggactgccagcgctgtgtcatccggaactgtagttgacacaaccaaattcataccacatggggacgacgattgttggacagaccaaaatggggaggacacaccacggtggtttgccaacggggaccaggtatttattaacattaattaggtataattagtcaattaattaattaattatacaccaatttatgtcctattcgcacagattgagcgcggcattgtgtggtacgagtgccaaaagggaaagcttgtgacacaaggatgtattgacgagaatgggcaagtttaaaaataattttattacaaaaagttttttttacagtaagcgcctgaaattaaacggtacctaccagttccgggcgttaccgtatgaaatgtatgccgtttggcgagaatgcgcgtcgacaagggatccggctgtgtgccggacggacaattggacaaaacgtacctgcggggcgaaaagttgngtgaacagcgaggtaattagcaatattttaaatgggcaagtaaaaataataattaaattgtgtgtgtagaaacaaatttggtggcaatgtgtgctggaaaatgcgtggcttggcggttgcgttgatgaagcaagtggcaatcggttaaatgttggcgatgccattgaccgcaatttgactacgtatgaatttatttcatttttcaccgttttgccaaaattggcattttga

SEQ ID NO: 80139 - DNA, 1133 bp, Heterodera glycines
atggacgaaaaagcagtgaaaagagaacagaagcagagaagaaaaagcgaggatagaagagagggtgaaaagaaaaagagcgaagagagagtgtgggaacagagaaataagcaaatcctcccggggataaactcaattttttaaatttggacaaaaatagaaaaatggggaaaagcggaagaagagggtgattttctcggaatttttggtggtcaagataatttcaattatcagaaagcagcccaaatcctccgtgggaaaaggattggattttcgggattttaaattcaccgagcagaattgcagaaacttcgcgccggaaatttaccattttttattaaacttttaaaattcgtatcgccagacccaaaatctcaataatttttcatttaaatagactcaaaatttaataattttttgataaaatctattaaggttcgttaccctctttctctttctgatagtttttggtgaaatcattaaaaaacccttaatttgaagcatttttgtttaaataaataaactgtaaatttccctagaaaagaaaagaaatataatttaataactagccagatgaaaaaaatcaacaaaatctatttgaaatttaataaaaatatcacaaataaattctcagtctgtccattttaaattaataatgtaaaaagaattgtttaattgattgggtttattttttattcatttcttgaaaaaatatcaagttttgaaaatgtttaaatagttcgaatcttttttgattcagattatcattttcgtaattttccaatcatatcccgcatataaattatttatttttaatttgttttatttcaattgtcaccttcataattatttcgccatatttattattttgttaaacaatgctaattttagaagcttatccaaatattcattgtttcttgctgttttttatgggttggggactgaatttaatcacaattttaacaattaaaatcataaaatattgtcatttttggactaaatttgttcgcaaagtgcactgaaaatttcaaaattttccccggcggcgttgactcaaaaacgcgcaaaaaaactaacgaattttttgttttgtgcgttttgaaatgataaatattttaccaaattgaatcaaa

SEQ ID NO: 80140 - DNA, 69 bp, Heterodera glycines
tgacataaacatttatttgatttattttaccatattcacaatttgatcaaaatataggtggtcaaaagt

SEQ ID NO: 80141 - DNA, 494 bp, Heterodera glycines
atgaccaaaagaaataattttgattttttattggctagcaaaatggtaaaatgagacttcttttgagaaatttcttgtttttgagcaggtttgtttcagtttatagaagaaaatatttttggcctgggatattttgaaatatgtatatatttggcttctggaccagtcagccgaggacaactcacaaatcagctgacagataattccgctgatggacaactcagccgtacaataaaaattacaaaataaatcctaagcttaagcctaggtccaagcaagcctaagcctatgactcgcctaaagcttaggtaagcctaggcctagcctaagcgattgtacgagttgccttttgtaaattctcgtaaagctgagttgtccatcagccgaattatccaatctgctgagttatcctgacacgatatatttttcataattggcgtttttttagcaaatataaatccgttcaaatataaatccgttccttggatataaca

SEQ ID NO: 80142 - DNA, 363 bp, Heterodera glycines
taaaaaaataatttttaaaattaaaattcttgccacgaaaatacctttttgagaaaatttcatttcttaggagtgctttttgaaattttttttgtcgattcttaggggtgtattttttttttttttttttttaggtcgattcttaggggtgtattttttggttttattgcatttttgttaaagaattttccaaaaaatgtcgaaatagtgaaaaaatagtgacaaaacgccaaaatagtgatttttaactattttagtgacgaagtcgccaaaatagtgatttctagtgacgaaaagtgacgtccaaatgaaaaaattttaacgcagaaatgcgttttttgagctcctttcttcaaaacaatt

SEQ ID NO: 80143 - DNA, 348 bp, Heterodera glycines
atgccgggccgggccgggctggtttttccaggagtaaccgggttccggtcccggcctctcaaaacccggtcaactcgaaacccggtcaacccggcttttcaaattgccgggcccgggaccgggttggtaaaaattttaattttcacatatatttcaactccaaaattgaccaaaaagcgggtcaagtgttaaatttctgcactatttcacttcgggcgtaaataaatgacatcttcaattataaacctagaatttttcaaaaaaaaatcttagaaaatttttctatgagaatttcaagaattaaaaattaaaattttatagcgatttttctaatttttgtaatgaata

SEQ ID NO: 80144 - DNA, 344 bp, Heterodera glycines
atgagcgaaattaatgcttattgttctaccggcacaattccgaccaattctgatcctttagagttttggaaggaaagagccaatgaatttccgggtattttaatgtggttaatttattaaccggttctaaggttttacacattatttagctttggcagaagaagcaaacaaatttctttgcattccggcgacgagcgttgcaagtgagcagttgttttcaacagcgtgcgacacatacgactaccgtcgccgccgcttgcgtccaagaaaggccgaaattctgatttttttgaatcgaaatcttccaaaaattcaatataaatattaaaaacattttactgtta

SEQ ID NO: 80145 - DNA, 195 bp, Heterodera glycines
atgatgaagaaaagggtcaaaatgacgcaatcattcaaaaaacaattcttctattggaggtggatttggttattttctttttatttgtaattaaaattattattttttaatatttttgaaaagtttttctcttggaggtttttattaaaaactatctatctctttattttatgcctttccattttcaggttgtaa

SEQ ID NO: 80146 - DNA, 1928 bp, Heterodera glycines
atgaaagtgtttgtgctcttaatttgtttgctgttcataacaaaggcagaatccgttgaagaaaagcagccaaattatgatggccaaggttttgttttaagcaatttttaattaatttttaaataaattttaatttattttttcagcaaaatcttgtgacaatttgttctttttttgagttttagattttgacaaagacgatattcaaacaatttttgaagatgcggttgactatgcccaagctttggcattggtcactttgccgcacacacatgaaggaaggtgggaaaaatgcctaaaaatgtctaaaaattatatttaattttaaaattttaattttaaagaggtgacgaagcattgattcacccgtttacgctctttccgactccatttccacgacaactttacgagcaggcgatagaactacaatgggtggggaaaaagaccaattattatgggtcaaaaaaatatttaaaattttaattcaattaaattaaattaataataattcgtctcattaggcgtacaatttgttgtatttccgaatttcaaatgacttcgattttctcattgaacattatgaaatagcagcaaaaacaaatgcgcacgtcagacactatttgaacattatgaaagaagtcaaaaaggagggcattaaacagaaaaaaacgctgcttttaggacgatcggtaaattttaaaaattattcggttaattaaacaactttttcatcataattaaacattaggctaaatttgtttagagagtgtagcgcccaacgggcatttgcccgtttgacccagtaaattttgagaaataccgggcctgctgggtccggtcattttgactggtcttttacgggcttaaatttggcttacgaatctgtcccatatttaaaattaccttgacaaaatatctttaattcgaacttttaaagatagaacttaggatttttttaataagttgggacaaattcaacacagattttagttgtcggcaccgccggtccaagatttcattattatttaaaaaaataaaattggggctccttaagcaaatttacttattcatttaatataaaaaatccggtctcctcctttccagaatttgaagaaaaagcgcgtcgcaaaaaaacatttcgaaaagcaaaaaaatcagcaaatttttgaatcttatgaaaaagaatttaagttggattcttgaaaattttcggtctcatccctgttatattatgattttcttacaaaaatggaagccttaaagtcacaaaaatgttcctaattaagctgacaaatgagcttaaaaattaaaccttttaaaatatgtgaattaaaatttttcattcttttacattaattaatcttgtactaaaacagaaggttaaacgatttttttttgttaaattctaacacagacccggcagtttcaaaatcccgtgctcaaaaacttataaaaataatattaataattttaaatccaaaaatgttttaggattatatgtgccatgttgtgaaagacgagaactcagaaaaaggagaacgttatgagctaaaacaggcaaagcatcaaaataagccatttatttcccgcaaatcgaaatttcactttttaattatttcagattgaatttaatactggccaacttggcggtgtccatctcgcgcgtcttctcacccaactgcaccgtcggacaatgcaaaaagcgggccttgaagcatccaaagatcagcttctgaacaatgggtcggactttgtcatcgccgaagcgttattcatggcctggtaattttgggaataattatttttttttgggataaataacatcccaaaaacaaaaggtaattttgggaattgtatttttattttttgaaataatacccataaaatttaatttctattttaaatatttaatacctattttcgaccta

SEQ ID NO: 80147 - DNA, 1827 bp, Heterodera glycines
  unsure (1)..(1827): unsure at all n locations
atgaacaacgaagtcaactactgtaaggtaaacggtgaaattgttacaaaatgcatactgtaaagtacaataatagtcgattatcagaggaaccttcacaaaatgcctttatggttacaattctgctattatgggttatgagtaaaattaaaaaatatagtttttaagggtttgatcacaatatatttttgcagggttccgctcatgacatttggtcggaggtgaatcagttgcggcacgtggtgccaaccgggggagcggcgcacaatcgtacggctcgtcaagcggcaggctatggcgaagccgcagcgccatccagcggggtggcaggcggccagcagcaagcggccagcgggggcggctgcgacgcgtgttgcctgcctggcccgccgggaccagccggcacgcctggcaaaccgggccgtcccgggaaaccgggcgcaccgggacttccaggcaacccgggcaaaccgcccacccaaccgtgcgagccagtcacaccggtgaggctggaattttgtgttttatcaaaattaaaaatgtcaaacttcttataaaaaaactaatgaaaaataagaaataatttataaaatattacaaaaaatgattatttatattttctanataacaatgtaaaaccaaattttcatgaattgcaaagaaaatattataaggttaaagccagtgcacagctttggtgttaaaccgtgtcgattatagaaagaattgcgctttggcgccttccattgaaattttaattaaaattgggcaacatttagccgccgtgtaagccttgccctgcaggcccaccgggaccgcctgggcctccaggaccgccaggagacgctggtgggcctggtcagtctgggcaacccgggcaagacgcaccgcccggtgagcccgggccaaagggaccgcctgggccgtcgggccagcctggacagcccggagcacccggggagcccggacagccagcacagtcgcagccaattgttcccggtccacccggagaacctggtatgaaagttgtaaaaattgtccatccatcactaaaaaaattgttaaggtgatgccggaccacctgggccccccggaccgcctggcaacgcgggacaagacggactgccgggccaacctggtccgaagggacctcccggcccgcccggatcgcccggcaacgatggccaacccggtgcttctggtcagcctggacaacccggcggacagggcgagaagggcatctgtcccaaatattgtgccatcgacggcggcgttttctttgaggatggcacacgacgccgttaaagaaaacaatcaatggaaaatatgttatccgaaatggagcaaaattaaagcacttttagttaaatacaacgaaattaatacattacaattcagcagtaatttgggaacagtcagaaattatgccaaatagtacagggctcagcgattcaaactttctcagcactctgaatcattttgaaaaaatatagaagaggagattttaatagattaagtgcctcgagcatcaatttgcgtcttaaaatgttattttttaaatttttaacggtagtcttttttgaatttctaattagggaagggcgtgacattaatccggaaaaagtatagatgttatagaccattggataaagcaggttcgatttgtgttgtgaattttttttgaattcagaacatgtctgataaagcagaataattcgccctcttattatgtgaatttttctttttggtggccttttaaacattaaaattaattggttaataattgcaaaattaattcattccaaattttatcaaaaatttaataaa

SEQ ID NO: 80148 - DNA, 745 bp, Heterodera glycines
atgaatgaaattcgaatatgtaagagagaagaagctgattgattgctcatttacagacggacaatcagcaaatggaagagcttcggaagcaggaggagcaattgtgggaccaaatgagcgatgtgaaagacgaaaagcaaagggagaaactgaacacggaactgcaagaagtacagggcaaactgaacacaatttatggacagatgaagcaaaaaaacacggaatagagaaggagaacaatttggaagtgattgatgatcgatcgatgagacacaaaatattcgagaccgaaaaaaaagaattttctcgagtagaaaaaggaaaatcacttccctaaaggatgatgaagaatggcgaactttgctgggctcaaaacaagtttcgcttcttagaaatgtattttttccggcaaaattaatcgaccatttgtcaaacaaaaattttgcgaattgagtttcgggggtgttctaaatctctcacaaatttttgaaattaaatggaaaatttatttaggaaaaacgccataatttcggtaattcgtaaactaggaatacgatttttaggttctaaaaaccccccaaaaataattgttaaaaatgggaaaatagttgctaaaaactagagtgcagcgggaccgggaattttgggcttaaccgggaccgggaccttttctggttgaaaaccgggactagtcccggtcaaaaccgggaccttaattttaaaaatcaaaattcttgtcaagaaa

SEQ ID NO: 80149 - DNA, 1199 bp, Heterodera glycines
atggcggctgttgctgctgcggctgttgctgtcggcacagaatccatgccgaacttcaattgcccaaaagtgcgtattcgccaggcgagaatattgtcggctcatttcacatcgattcaaggatggcacgctatgtcatcgacaatgtaaattataaatcaaaatgccaccggtatcgctaaattatgccaattaaaacctttttaaagattgaagtccgactcctggacggagcggaacgaattcaatctgctgttgctgatcagcaagatgcaaagaaggaggaagataaagtggcaccggaaagtgggacagatcagcagaatgagcctgaggctgaaaagcggaagaaacgaaatgccaacaagaaaaaactgccaaaaacacgccgggaaaagcatgcaaaagtgccggaggcgtcgtcagtgtgccaacgagttgtggccggaagaaaattggatggcaacgctttgttggcagctatgccggaggaaaagcatgaaaagaggcggcggcgcttggccaggctcggcatggacaacgtggtgttcatcaaagtgccggccgtgatcccgacaatcgagagtcagtcagtctgctaatggctaacgcgtgtcatatctttgtttgcacatagatcaagctcattttgatcatccttttgggacagaaaaaatttataaatttttaaaagcttatttctcatggctggtctgaaatttgtgacagcagaaatttggataatgaataattgacgctaaactgtatactcttttttggacaaattaattttcttatactgatcagttgcagtattttttttgttaccatgatttctgtctaatcagaatttgatatacaatttttggacctaaaaaaatttcaaaacactgctcagtttttttcactatttttgttgcttgatgagactgtctgattagatgagaattgattttggcacaaacacattttattcactgtgtttgttgcaaaatttaccgggcattttgatcaaatatttaagaattaattcactacttatcattactctattcataggagaagtagcagatgatcagcaaagtgtgcagcatgaccaacatgctcaacaaggacaacgcgttctgatggagtcgccttcgaccgcgacaatccgcgcgcgacgagagccgttcattggggtcaaatatgccttgcaa

SEQ ID NO: 80150 - DNA, 257 bp, Heterodera glycines
atgaactgtcagcatataaaatcgaaaagtataaaaaaacatatttgtatattgtaaagaaatctagctaccaagtggattgtaagtttaaagtaggaaaacatgaacaaaataaaagataaatacaaagtgaggaaattatggatttctaacaaaaaaaattaaataatcggatttaatatttacttttaggttctaattataatgaatgaaattgctaaactaaagtaaatatttttaactttcaaaacaaggca

SEQ ID NO: 80151 - DNA, 699 bp, Heterodera glycines
atgaaaccgaaaaatttctttgttctaatttttccgcttttcgtttgcttttcgatttttgaagggatttcgtcttacaaatgggactcgaaaaacttgccgaacaatgtccatacatttgccggatttatggacgatctttatgaggattacagggtcaaaggacagatgggtgagtgactttattgcagcaaattcaaaaaataattatttaaaatttactctttttaaaataatatattcttaataaattggaaaattaattatttttgaatgcgtttgcttttgaatttaaaaatttttgtataaaattgtcagactttttcagacatacattggctaaaccaaccaaaattgtacacggaaaaaggattttcggataagcaaaaaagaacggttttcaatttgacatttgtaaaatgtgcggcagaaattgcccatttccaagtgcttagccaaaacgacgattcaaaagatgcttatctgaatttaaaagtggttactatcagtgaaataaaacttgtaaaagatgaatttgttggttttttgcattttgaccaaacacttggccaacaaattgcaaaaaaattcaaagacgaaattttttctaaagaaaaacaaattcccgaagaagttgtgcaccaaattcagcaattggccttctcatttgccgcccgagtcattctcagcataatgtaa

SEQ ID NO: 80152 - DNA, 1206 bp, Heterodera glycines
atgaagaaaaaggttgtacttggattattgaaaaaccttatttcgggagtcaaaaattggcccaggttcgggctccgagttttttcaaaattcattctctactaattattgtaattttttgcctcaaattaactccttaacaccattttaagaagcaatcaaattgagatggaactgtttaatgagccgttgtggaattatctgagagtttttggaattgatgccaatgtagccttgggtaaagcacattaatatatgtaaatttaaaaaacaaatagttaatttaatttatgcataatatcattttttagacgtgttcaaattttgcaaagaccttcatacagttgtccagaaaaaaattgaagaacataaaaaatctgtatttgataaaatgaatcttcaagttaaaaatgtgacaacagaaatgaaagaatttaaaaatttgaattccattcttaagttagtagaagataaggaaaactcaacggcattggaaaatttttcatcaaattataagggaaaaaatttatctcagaaaaaagaggtattaaaggaactgttggcaattttaatgaaaatctacacggactacagcaatgccagcaaaaaagaaataagcaaaaatgccattcggttgacacattctgggaatgtaactttacgatttggacaaattttatatgaaacgatagagaatttggaaaatttgccggaagaccgcgtgaagtacgatgaaaatgaacaattgctaagcattttgttaccatttgccaaccatttgcttaagcggctctatgaatttcttgaaaggtttgtaaattaagcgcttgggataatttgccacatttggccaaaagtctctgccgttggttaaaatttaaaaatggtttaattaattctgatataaatgggaaacatagaatttttaattactttttaagaaatttaaccgagaaaagcaaaatcagtgatgactttgattttgtgcaaacacttcaaacagttgccgaagagagcacggaattagaggcggagaaacggcaaatgccaatttcggctggagttaatgtgaacttgtttcaattgcttttctcattagcaattcgtttgtgcttactaattgacgaaaaagaaaaattggcaaacaaatatttgccaaaattcgtattcgcgttgaaaatgtgcacaaaagaaactaggtaaaaa

SEQ ID NO: 80153 - DNA, 106 bp, Heterodera glycines
atgaaaattgatggtaaaaatgtgcacataaatttaagaaattggcatttgccttactttgtgtataagcaaaaagaagatgaatttaaaatggaaaaagaggaag

SEQ ID NO: 80154 - DNA, 570 bp, Heterodera glycines
atgatactgcttgatcaaataggtctttttaattacagaacacatgtgaaatcctcggaaccccgaattgcttcatcatcacttactgttatgaaagcagatcttcagcaaagcattccatcttctttagttcagtttgagtgccgaggacaggagaaaaaggtgagctctttttgtaacatttctaagctttggttttattaataacctattattttttaaatgattaaattttaaaattttagtttactgatgaacagattgtgcatgttgtagtgcatcggatggtagcacaagtcatcagagatgaaatgtccaatatactaactcacaaagctattccaaacgaaacaaatgttatgaaaccgataactgatgaacagattgttcgtgcaactgtcaacagaatggttgccattgtcacatttgaagtaaatcaaaaggaactaattgcattgaaaagaaagaatagtactgttgaacaagacttagtgaaaaaacctcgtactgatttataaattgttttatgtgaattgcttgatttatacttttttgtctttggtaaataaa

SEQ ID NO: 80155 - DNA, 1016 bp, Heterodera glycines
atgaaagactataaagtcagttttgtttgaatattttgacctttgactttttttttgtaagaggattgtttcatggcaattcgttagtaaaaaaaatttttttaattaaattagaattacattttttctcaaaaaaaatcagaagaagttccctcaactgaaaaattttaattgaaattataattttttttttgtaccaaatgccattgtacgaactgccattgaccctgtggttgggcccaaaaattaaaatttcgcaaggacataaactaaatttccaatgggtttctaggacaaacaagtggatgacagcagcgatggcaaagctggacaacaacaacatccacaatcggatggcgaggacgacgagcaacaccacttcaggcattgtgccgaaaccgactcggatgaggagacagcgtcggcaaataatggtgagaaggcgccagcgtttaatttaatgaaatttttttttgttttaatggaaaaagttttttttcttttaagaagatttttttattcattttattgcaatccctctccaaaaataaataattttattattttagaaattaaaaatatatatttatttatgaaacataattgttcggaaataggttaaaaaacaggtggtaacagcccgaaaaagcttttttcgatgacaaccaaaatggagaatttttggcgctagttaaaaagcgttacattttgaaagttttttttggtcaaaaattttttttgtttttttttttgatgcagaatctgtttttttaatatatgatacgcatttcacgttatttaataattgaaaaaaaagtgaaaaaaatttcaaaaagatacttaaaaatcgtgaatatacttttattcgccataattgtgctgttaatgcttaatattcatcattatgtgtaaaaaaaaaaaaaatttcaaaaaaaagtgaaaaaaatttcaaaatgtaacgctttttaactaacgccgaatttttcataagaatttttaaaatttaagaaaataaa

SEQ ID NO: 80156 - DNA, 1535 bp, Heterodera glycines
aagtttagaaaattttcgtatgtttacaaaaaaaaaaaagtcagaggcaaaaagttcaaaaatactgaaaatcttttgaatatatgtaaatgtttataaaaaaagcttccacaattttcaggcattggccagaagggctaccaaaatttgatagccaaaaattcggcccaaattcgtgaggctatgctgcaattaatggacaaaaattatccaaatgagaagagacggcccgccgttttgccggtggaatggcgctcggctttgacattggatgaaggtggaaaatacattatgcttctacattttccctttatccccattttttcgatattaagcatttttaaagtatatatttttaattcgattttttatgtaaaatcggaattaaattatgcaatgtattttgtaaatttgtaataattactttcaaaaattattttgtaaatttgtaataattactttcaaaaattaaggtgtcactgatgtggcaacacttccaaaagtcggttttttgacatttttgacaccaaaaaaaaatttaaaaaattcagatggaatttgccaggtccacgctcaattctactttgatggacctggtcggtcgtatttccatttatttaaattttattttatttatttattttgatatctttatagatgtattaccaatcaccgttgtaccggacagagattgtgaacggtgtaattcgatgtttgaattcaatttacacaacattcaaagccaacaacccaaactttgatggtatggatggatttaaaaaaacaattttttttttgcgttttttcctctttgttggatgcctttaccggagcaggtcgttcgttccccccgaaattaaaattccaaaaattcgggttttttctaattttcgtttttttaatttacgagcccaaatgcgcgatgtttccctgacatatgtcgcatcctttcagtacaatcatgctttttattctattttagaaagggatttctcaaactcaatttttttaattcatcctaaaattttgtaaaaaatcgctataaattttttcttaaaattttcttttaaaaaaattttatagtttttttttgggggggggggggaaactgcatgaatgaatgcatttccataaacaatggttttaaccggtcacagcaaaattgtatgctttacaaacctgtcaggccccgtctccattgttggccattcacttggctccgtcattgcctatgacatcatcacgcgttggtcaccctttttgctgtacgaccaaattgtgtcaaatgcaattgaggagaacatgaacagcagtgtgtcgggcaatcagcgcaaattgtttgaggatttccacaatagcaggaaacggtgaaaaaaaatacaatcaaaaaattcgataaaaaataaaaaaaaatttttaaattttacacacagaattttggaaataccaggcttcatggaacaaatcctgatcagcccggagcaacagattggattcaaagtcaaaaatttgttttgtcttggttcaccgcttgg

SEQ ID NO: 80157 - DNA, 396 bp, Heterodera glycines
atggacacaattctaacaaaaaggaaccgtgccaagcttcagcacaacggccattcatacacttttcacaagccgagtgctgacggtgaaattcgcttactgcagaatgtggccacgccagtccttgcgcaactcccaaccaaacagcgacagcaagtgatattttattatttttcctcaaatattttttgtatatttacataatcaggcgtgtacgccgtgaaattgacgcaccgccaccagttccgaactgtgtggcaagacttcaacccggacagcgtgtcgatgcactttgagacaggggcgatcactgcgctgaatgtagtcttcacccctggaattattgctctggacatggctcttcccaacgaacttactccagtccttgactggtaa

SEQ ID NO: 80158 - DNA, 331 bp, Heterodera glycines
atgaaaataagtgaagaaaccataagaaaacgactccaatcaattaatcaaacacaagaagcagttcaaacatgctcaaaatgggttttacataatcgtgaaatgattgacagaattgccacctgttggatggatatctacaaaaagggtattcatttattcattcctgtcccttaaaacaatgtatgtaatttcagctcctgagaaattacgcatcgcactcatttatttgttgaatgatgttgtgcaaaaagcagcaagcaaaaaggataataatgtaactttggctttgcatccacactggataaacgcaactgcgatgtccaagtag

SEQ ID NO: 80159 - DNA, 1274 bp, Heterodera glycines
atggcctcgtttttggagagcgttgaaaggcatcggcaaaaagggatgaaactcatggaattgatgcaatatgccaaacagaccttcaatttgcagttgagggatgtgaccgtagtgaacgatgtatacatatttaagcgacacatctatagcacataaacgaatgttcaggcttatgaaaagtttgccgaaggaatgcgtgaaacaaaacagcaactcgaaaagatggaaaagtcaggagcgttgaccagtctggacgcaccttcttcgcccccacgagatgcaccatctccaactgctggtgatgacccattcgtacacggagtcgaatgcgatgaggcagtgggagcagaagacatggagatggatgaggagtacggacccggaccgagcagctgttttcttaaatcttccaaggattatgtcgcgtctattcccgccgtacctgaaatggacccacgtttgcaagtaattaaaatttggatatttttaggtattatatggtacacctcaaaaagtcgccgggccggtacatagcgtcgcagcaaaaaataaataatttttaaaaattacctaattttaaggtgttttcaatcaaaattattgttttttttttcggtttttgtttgagttattttattttatcaaatttcaatttctacacatgagatacaagataaaaaaaatttctaggtgtagaattatcaaaatttacctttttaatatatatattttctttatagcgtttggtgaatcaaactatttctgcttgtcaattgtccgacaacagtaatataccaatgccaagcgccagtttaagccgaacaacgctggacccccgtcaattggaccctcgtcaggctcgcttttttcctcctcctcaacaacctccgccacaattaacgcaacatttaaactttccacctccaatcattccaccgcctggtctttctccaccgccagcaacacaaaacgctacacaagatactgccgaaacactgcttaccattgataaatctcaacctccacctcaatttttttcgatgcctccgccacaaattccaaatggaaatggaaatgtcacagttctccatgaaaacgcttcaaattcgcatgggaggggctccactctctcgccaccaattgcgctttttaatccatcaaatcctccgccatcacttatggtatcgcaaaatcttattattttctttagttattttaatttcctaaacttattttcatttagcatatttcacctccttcttctcatatga

SEQ ID NO: 80160 - DNA, 249 bp, Heterodera glycines
gcggtgatgggcgcttacaacgaaaacaatggcaccatcgaagtgccattacatggttacaacgtcggaaaggcgattgttgaaaggattttgaacacgaaaaacgggacggtgcttttgcacggaatgcgcgaaccgatttcactggcaaaggccgtcgaaattggcttttttgacaacctgtcgctgactgtggttgacccgaacaccacgcaaaggctgtttttggacgaagcattgaaacggaaa

SEQ ID NO: 80161 - DNA, 249 bp, Heterodera glycines
atggacgaggaattgcatcggagaaggctgggaccaaaggctgacaccgagggggatgaagctgaaccgttgctgggaggacgcgtcacggccgagcaaatcgtacaccttttgagacaaagacaaatgagatatgccaagctaaagcttggagaaggattttaccacgacttggacaaggaactcgcaaatggcattttgcgggagagaaaacagcacggagttggactgcttaagctgacattatga

SEQ ID NO: 80162 - DNA, 415 bp, Heterodera glycines
atggcctataaagaacaaaaggtaaacgaggaaaagaatttggcatagaattgaaagaattgaatattattattcattattcagtctccgcaacaacaaaaaatgatccattgacttccgacgaaataagccctaaagaaaagaatgttggtgaagaaagaacggtccaactaattcactgtcctttcattactcagtcgtttattgggcggcagaattaatgatgcgtgccgaaaacggttcgtctacccgaaaaatcgaagtttggcatttggtggcccaaaaagtttgcattttctcgccttttaagacgaaagtcgcttagcaaatggtgagtgaaaacggcagcagaaggatgaacggccatcccaaactcaaaatgccatccccgccttaattaaaagcagccaagcga

SEQ ID NO: 80163 - DNA, 1784 bp, Heterodera glycines
atggctgtccctcaggaagtaattgacaaaattgaggctggctacaaaaagcttcaggtgcacacaatgtgtgtgttaactattctaattttgaactaactttcaggcggcggctgattgcaaatcgttgttgaagaagtacctcaccaaggacgtcgtcgatgcatgcaaggacaagcgtaccaagctcggagcgacttttttggacgtcatccagtcgggggttgccaacttggacagtggtgtcggcgtgtatgcgccagatggtcagttaaatggctacgcataatcacaaccattaaacattcattcagccgaggcttacacactcttcaaaccattgttcgacccgatcatcaacgactatcatggtggctttggaccgagcagcaagcaaccggcaacggaccttggtgaggggaagactcaactgctgacggacttggacccggaggggaaattcatcaattcgactcgcgttcgttgcggccgctctcttcaggtgtttgtttgaatttaacataccaaaaaacagtcgtattcaggggtatccattcaacccatgcttgaccaaggagaattacgtcgagatggaatcaaaggtcaaagcggtcttcgagcagctgaagggcggtatgcaaccgctaattattttctttgtaacattatgttttagatgccgagttgggaggcacctactatccgctccagggcatgaccaaggacgtccaaaatcaggttcgatccaacaaataataagccattaatttttgaatgtttagctgattgccgaccacttcttgtttaaagagggcgaccgttttctgcaggaggccaatgcttgccgttattggcccaccggacgcggaattttccataacgccaagaaaacctttttggtgtgggtcaacgaggaagatgtatgtttgtttgtttcattccatcttgatatcgattttcaattaagcacctccgtatcatttcgatgcaaaatggcggcaatgttggacaagtgctggagcgtctcataaagggagtcaaggccatcgaatcgaaagttccgttttcgcgtgacgaccgtcttggctggctgactttctgtcctaccaacttgggaacgactgttcgcgcgagtgtgcatatccgacttccgaagatcagcgcaaaacccgacttcaagtccatctgcgacggcctgaaattgcaaatccgcgggattcacggcgaacattccgagaggtaattgtttattgttctgtttttgaaacaattttcctctatttagcgctggcggcgtttacgacatcagcaacaaggcccgtcttggtctcacggagttcgaagcggtgaagcagatgtacgacggagtgaaacacctgatcgaattggagaagaaagcataatgggaggaccgatctatgatgatgactttatattgcgtaatgtggagatttgctagttgttctgaatctcttaggctttaactatttaattattgtcccaaaatcgtgcttcatccgtatgattatttccgtgcataaatttgttcgtgttctgttcgagtattgaaccccttcattgcaagtggatactaacaagcgacacccactaatttttattgattggtgtgttaaaaattggttaggaatcagtaaaatggttaaattgacggttcggcacccatgacttatgcgggggatttaaatcggtacatgacaaaatttggtgccatataattagggctcggatttttatgtgctaaaaatcctgaaatatgtaataaa

SEQ ID NO: 80164 - DNA, 339 bp, Heterodera glycines
ccggccagtggcgacggcatttgcttcgcttttgattgcgtccctttcttctcctccaatgcttttgaaatttgttccttcgcttcttttgctgagtttggtgctgtcgcagagaaataacgtaaaaaaggcaccgtaaattattcgttattttggggttttcttcgcaagggccaaaagtccgtgagggttcgctacccgtggatagcactgagcgatggctacggggaaaagggacattggcagccgaaggcaatggccaaatcattggcgaacagacaaacgacgagaaaagggagagaaagggaagagcaaaagcaaacgaaggacaacaaaaat

SEQ ID NO: 80165 - DNA, 1041 bp, Heterodera glycines
ctcgtcaagaattatttaattgttccaaattcccataaaatgcctccgattccgatggatgttgacgtcgttcctggtcagttcggcatttccttggccattcattcgtttaatacacaatttttcgattcagaagcggtaggtcaaacttttctgttcaccagcgaatcggttagcgagggacaccccgacaaaatgtgcgacattatttccgattccgttttggatgcccacctcggccaagacccaaacgcaaaagtcgcctgcggtgggaaaattgtggagaggcaaattgggttgacgacttaagcgattcagagacagtgacaaagtcgggaatgattttgttgtgtggcgaaataacgagcaaagccaatttggactatcgccagttggtcagggatgtcgtgcagaagatcggattcgacgacgagccgaacaaaggtatgacgaaagggaggaaaattgggggggggggatctaaaaacgaaaggggacgaaatgatgaagcgcgggacttgtcattatttcaccgtacttcaaattcccaaggatttgattacaaaacatgcaaaatcctcgtcgaacttgagcagcaggcgcccgaaattgcggcgggcgtttggatgaacaaagcggacgagaaggacatcggcgcgggtgaccaggcagggcactcactttgctgtttttattgttttgccttctttaagggtctcatgttcggctacgccacggacgaaacggaggaagcgatgccattgtctctgctcatcgcgcacaaactcttggccaagttgcaccagctgaggagggatggctccctcggctggtccttccctgactcgaagtcgcaggtgtgccgagtctttggccgtgccattctcattgcttttctaggtcaccgtcgagtacaaattcaacaaaggcgcctgtgtgccggtccgcgtgcataccgtcgtcatttccgcccagcacaaacagttcgatggagatttggaggtggtccgatcggatttgaaagagaaagtgatcaaagag

SEQ ID NO: 80166 - DNA, 238 bp, Heterodera glycines
cccccccccccaaacgaaaattaaaaagtttaataggcaaatttcgtaacaagtagcactcaaatttccaaaaattttttccggcggcgcctatcggcaccgccggacctacattttccactatttttacaagttttttgccttaaaacggccaaaatttggtaatttttagtgaaaaagtgcagttgttacccagcagggaaaaaaagttattggttaaatagcaaaaaaaaaaaaa

SEQ ID NO: 80167 - DNA, 1379 bp, Heterodera glycines
atgaatgtgatcgttcgtcgtttaattcaaacgctatttgcgaaaccgaaattgtcaaaactcgtgaaaatgaagctggatgagtctgaggcctttcgtacgttgtttactcccgaacttacccgactctcccaactgtttgaggggcatggattcgagattcggtgcttaatgctttttttactcttaatgtttctccaaaaaggatcgccggcggcgctgtcagagaccttttgatgggcacgcgaccgtccgacgtggattttgcgacggacgccacgccaactcaaatgaaggagatgtttgagcgagaacagatcagaatgttcaacaagcgtggcgaggagcacggcacggtgacatgtcggataaacgaccgcgagaacttcgaggtgacaaccctccgcgtggacgtggtgtgcgacggacggagggcgaaggtcaacttcaccaccgactgggagttggacgccttccgcagggacttgaccatcaactcgctcttccttggtctcgacgggctcatctacgattacaccggtggtatcgaagacgtcaaacagcggcgcatcatttttgtcggtgaccccatccaaaggcttcaggaggtttaactttgctcaatgtcagtccattgcagttacataaacagcccatttccaggattatttgcgtattttgcgatactttcgcttcttcggccgtttctccaaattggacgcgccccatgaacagaaaaatttggaagcgatcgtccgttgccgagatgggctcaaagtaggtgcccattaacactcatttttaataatatttgcctttgaatttccttcccaaagggtgtcagtggtgagcgaatttggatggaattgcatcaaatccttgtggggcggttggctgcccccgtgctgcgctgtatgttggtcgattgtggcctcggtcccctcctcgcacttcgccccgatcgagtggatgaattcgagagggtttcgcgtctgaatgcccccaacggcgacgacgggaaattgagtattgagccgagcaccgcactcagcgcactttttgcaaattcggacgacgttaacaaattccaatcgctgtgcaaatgttcaaatttggagaaatggctttgcgagacgattgtcgagcggagggaagaggcgagcgaagaacgggcgaatccgtcgtacttccgacatttcatattgaaccaaaccttcgagaggggaggtcggcagaaaggcgggaccaaatcagaatttgtttttttaggagaaatgagagaacagatcaaacgcgagtgtgtggaactgatgaaatatgtggggacagatgcgaaaatgcgcgcagagattgagcaatgggaagtgcctccgatgccg

SEQ ID NO: 80168 - DNA, 178 bp, Heterodera glycines
tcttcggccccttgggcacgttcattgcgatcagatcaaatcccccaaccggcatcggaggcacttcccattgctcaatctctgcgcgcattttcgcatctgtccccacatatttcatcagttccacacactcgcgtttgatctgttctctcatttctcctaaaaaaacaaattctga

SEQ ID NO: 80169 - DNA, 1253 bp, Heterodera glycines
atgctcgttcacctgttattttttctcatagtaataattagtaatgtttcgggcactaattgattgattgattgattaattattggtccatcgatcaattgcttccgtgatctccgctgataaaatgcttcttggcactgctttagggccaagcttgacgctcatccggtgtaccatttttggcttcgtgtgttggaggaccgtcgggagtgggaacggctgtaccgtcccgaccgactgatcgtcgaccagcaactgatgctggtgttccgatttgcgatcacgcacggctttctcgaacttgtccaccgattatggtaggaaaatttaaaattgcaatgttttaaaaaaataaaataaaacacgaatttcaggggcgatttgacagagggacaaatcgaaacaatcggtgattttttggcatttttaaactttgagaatgcttatgattttgaggtgtggaggattcggagaatttctttgaattaggagtacaaatattaaatattttttcaattaaaaacgctcatttgatttttacttttttttttaaattaatccctaattttcctaaattctttgcagaaaatctgtctcattttaattttctaaattgatcaaatttttgtcaggcttcttgtcctggaaaacgatttgcttcaatgtgcaacacaccgaaatggtccgtttcctgtgccgagtgttgtgccgaattaacatcaatggtgacggcattttccattttttgcaaataatttttttttaaatttgcattaaaaattataccaaacagtttgttaaatcacacacaaaataacatagcatgcaaaaatggcattaaatcttgcccggtgtaaaaatgccctaaaattcaactaaacccattctcgaaaacacaaaaaaaaaaaaattaaaattttggtttgtttaatgctgagatgacataatttatattggcaatttctcgtgttattaatcctggcatactcattaaaatggcgcttcggggaaaccttaccttctttaattaaagttaattgtttaattttgtagggatggttcgcctcagttgggacaatttctaccacaaagtgcaacaaacacttgaagtgaattcaaataaatatccaattttaatacatttgaatttttattttattcagtcggacgaaatgccaagggaagagcaaatgaaacgtttccacaaattggagagtctgctcatcaattggtgtcctgagctaagaaaagcg

SEQ ID NO: 80170 - DNA, 337 bp, Heterodera glycines
atgacttttcggatgaattctccgccgtccattacgtaagtttcgatgcgctcttcctttatctgtcggtgtgcttaattctttcgcttttctcaatttgatggccaaccccattcagtcgaatgctttcccgcataaattcgatgctcgccgggttcaaatcgttggcaaatgccttttttatttttatttttttaactgcaggcaaaatgaaagggccaacgccggcgaaagcgtcgaaaacgacggaattttggtcgaatttggcgaaggtttccgagtggactctgctgagtcgactgttccaaaagacctaaaagataaaaggatgaaatga

SEQ ID NO: 80171 - DNA, 97 bp, Heterodera glycines
tacgcacgaattccgagtgatggacgccgaattggtcgccggggaagcggagtttatgacggaggtggtggagcacggactgcgttaccgattggat

SEQ ID NO: 80172 - DNA, 112 bp, Heterodera glycines
atggttttggtgtctgtgacccttcgccaactttgtacgatgtcacggtcacattatgacaagattatgttcccgccaatttctgcccatggaatgcttacattggacagga

SEQ ID NO: 80173 - DNA, 1377 bp, Heterodera glycines
atggtctgcgccgaagtgaccccgacccgattggtaggttttcacctatttttttttgctgatatcatttgttcggatagacgcaaagaacacattttcttcgattaatttcgatttagagcaatttttagcaactattttcaactattttggtttatgaaactttttaacaactatttttggcttgagaaatttttaaaaaacttttttttataattataaaatttcaatatttaaattggtaccaagaatgtaagtatgaccaagtgaaaaaaaggcctaataaacagttagcatttctcgacttagaatacttgcatgaaatctgtggataaaaaagcaattaacagaaatgtgggtgctgcagaaggaacaatacactgtgttaattgaaaataaagacaccctgttttttgggagtttgacccccatgaaccgatcgagctgaatttttaactgtacgtagcaattctgaaaatattaagattctgaaagtgagaaaccgaaatgatgacggaaaaaagttttacgattttttttcaaaaatggggtgttaatttaaaatagagacacttgataaaaacgaacaaaatctcaacaactaccaaaaataaacagataaaacaaactaaataagaaagaataaatcttttttcacatttctgtttattttgcgaacagaaatatgtcttttaggcagagttatgttgaattttctaagttttcaggagaaattaagggccaaaaggcttaaatcgcctctaacatttgcccaactgaatcaaactaacagcaatcagcactaagataacgtacagacatcctttaagcattttttattcattttatgccataaaaaaggcattaaacacaaaatttttgcgggtgaaaaaatacgaaaatctgagtaaattcgaaaaaaaaattctagggggttgggaaaaattttccatggaagatgaatatgacgaacagaaagagcacaaaattctctacaaaatggcctttgaatgattgctctatagcaagtattcgctgaggggtgccttgtaaataccgactatccaaaaaatgactcaattcaagccatttttcctcatttttgaatcgtaaaacttttttacgtcatcatttcggtttctcactttcagaatcttaatattttcagaattgctacgtacagttaaaaattcagctcgatcggttcatgggaagtggtcaaactcccaaaaaacagggtgtctttattttaaattaacagtgtacaaattacctatttcaaaatgttcgtttcaaaaaattatgaccaaaaattcttcaaattttaccaatctttttttaaacaacattttttaaatttttgcatattaaaataaa

SEQ ID NO: 80174 - DNA, 654 bp, Heterodera glycines
agaacaaagttttagattacaaaaaactaatttgtatttctctgtttctgtctgttgtaccatattatgattgattgattcacattgccaaattggtgaacaacaaacactatcaaaatgttcgaattttgcattaattattatgatcattaattatcacaacccccccccccccatcctaattaattattattttttgttgcctaattttcacgtcactctctcttttcttcccctcaagattgtctcctctcattacgtcgctcttcgtcttcatcatccgtcgtcgtttgcccacaacatttcgcaatttgctcttctcctcctccatccaccacggcaccatttcccccctcttccgtgcccaccgaagagacttggtggcttttttcccgctcctcccaatcatcatttgctaatcccgaaagcgatgatgagcgattgatttgattaatcattaatttatgttttggcacatttttgttgccctttttttgtttgtttccccccgcccattccccgaaatcagcgacaaattttgtgcccttttcataataatcccgatgtttttttatttacataaaatgtatgtttattagacaacaaaaaacagactctctctccatctctctcccgtgtttctctgtgcgcata

SEQ ID NO: 80175 - DNA, 84 bp, Heterodera glycines
  unsure (1)..(84): unsure at all n locations
atggccattgggatggtcgccttgacaacttttgtgccgcgtgccgcgttgctgctgttgctgacagcccgncgggcatttcgg

SEQ ID NO: 80176 - DNA, 95 bp, Heterodera glycines
ctcgaaaagtagcttaacaacagcccaaaaatcatgtttttcgtgcgtttcaggccacggggagctcaggaaaaaaataggcttttgcctaaaaa

SEQ ID NO: 80177 - DNA, 1309 bp, Heterodera glycines
agcgatcagatcaccgtcaaattgaagaaaaatgatactgtgcaagttttgaaggggaagataatggaaaagttggataagaaaattgaaaatgtgattggacatgaattaggaatcaatcaaccgaagccgacattgaaatatcagcagaaatcacctgcagataataatgcttttgttgttgagcttgaggacagtaaaacattgaaagattatggcattggacaaaacgcaaccgttcatttgtcgtttgacaaatttgaaattttcgtcaaatttcaagaggaaaaccaaaatgaaaaaaggcgattaactgttggggtgaaaaaacggacacagttgaagcattgaagcggataatccaaacgctcactcagattgagccccaaaagcaaacactgagaagggacaattgcggtgctgtgcttaaggacacagaaacaatggccaattgtaacagtaaacacatcgtttatttggccattgatgagtttcaaatccaagtgaaattggagtactgtaacaatgaacatacagtatgggtgcacagtatggacacagttagcacagtgaaattgaagatttgtaatcaaatgatctcatatatttctgcatataagcatattagggccaacgaacaaacattgaaatacgacggcactgatggtgtgcttgatgacaatgcaacaatggcattttatggcatcggagcaggcgcaaccgttcaattgtcattggatgaaatatttgaattttttgtgaaatatgaaaaagcggaggaacagaaagaggagaaaaaagtggaaacattcagtttagaggtgaaaaaaacgaacactgtcgccagtttgaaggaaatgatcaaaaatgagaaaaaatttgtgccaaaaagacaaacactgcgacgcttttccccatatcatatgctgcttatggacactgaaatattggcaccaacaattcaacatgaaccaacaatttacttggccattgatgaatttcaaatttttgtggaatatgccagcgaaaggtacaacaccatttgggtgaagggcacggaaacttggcaattttaaagaacaagatcgcaaatgggcttaaaccatctaagtacattgatcccgacagccaagcgctgcaatacggcacattggctctgattaatgaccgtaaattattgaatgattatggcattggaaaaggtggtgcaacagtgtccttgtccattgatacattttcaattgatgtggcacatgaagaccaacaaggaagacatgaccataccatttgggtgtggaagagtgacacg

SEQ ID NO: 80178 - DNA, 1187 bp, Heterodera glycines
  unsure (1)..(1187): unsure at all n locations
atggcactgagacagtgcttaaagacgcctctcaaactttggcattttatggcattggcgaaaatgataacaacatttacattggacaagctgaatccgattagttgttgttgcaccatcgatagagaagaaggctaaatccacaaagatccggctgccgttataggacattttgaaaatccgtcatttttacgcccttttcgaaccaaaaattttggcatagcattttttttaaagacaacanaaaannccaaagaacatttgatgtcattcggtaaaacaaaatgctcagaattaggtgacaaaaatctccactaacttttcaaaaaagtagtgaccaaaaatgttcaaaaatagttaggtacatttttttacaaattttttttttaccatggctgaattgacgaactgtcttacatatcatccaaaaaagatggaatgatcgatccgaaacatttgtcgtttccccattttctttcggatctcttcagctgtcactgatgaaattgtttttgtcatttgaattttatggatggtagtgcgttttataaatccgtcagttttggttactgtaacagtaccatttgacgatccagtgaggtcagagcacatgcacaaatattgaaaagtttgattaaaactgagttcagcgtcagggtaaaaaaatgaaaaaagatttttcaattttttgagaatttttagggttttcagtttttttttaatatttttcagagaaagttttttttacaccttccatcgataaaatttataaaaaaatgaatgcatttatacatattttggggatcacaattaaaccaaattatgaaaatacaataaattgacttcgggtattgttcagtaaaaatttttgtgtttcgtattttattttagtttctttttttcgcatttcacattttattttaagtccccatttacattcgccttaacaacataactcgaaaaagaacatataaaaaatctaaattttaatcacccaactttcgaaaaaattaatttttaatttttttagacaattcatttctgaaatattggtccgcaaatgttcggctaactgatcttggattgtgttatattccattaggatatttggcactgttttcttaatttggttaacaactaaaaaaaaattagggtccaaaagttcaatgtttgatatgtattttcaa

SEQ ID NO: 80179 - DNA, 1515 bp, Heterodera glycines
ctactcgggccattcgcgttcatgtggggctgccggccaagtcgggcgtgtccggcgtgaccattgttgtggtgccaaatctgatgggcattgcgctgtggtcgcccccgttggaccgtatgggcaattcgtgccgcggggtccatttctgcaaaaagttgattgaccgcttcaatttccacaactacgattcgttggcacataacgaatcccaggtgttttttgatttattggtctatatgaatgttaagaaattttcgaaaaattgatatgtaagtgtgctagtgcgtttcttaaaaactgcaaaccccaagttctataactcaaaaaaatttttaaaaatacagtaaaaaaattttttggcaaaatttagagaagactttaaaaaagttaagaatttttatttttttaaattctaatttctagatttttctttagaaaattctaattttctctaagaaaatttttaagtcaaaatttctttcatgaagcttcattaaaaattttacacttttcagtcggggtggtccaccccattttccgtgcaacccgagtaaattgatttaaaaattttcgtcattttttcatataaatttaattgaaaattcttccgcgcaccttgacggcactgctggaataatgccacaataaaatttttcttcaattcttgaaattacttgattttttttattttacagaaatttgacccacgccggcgtgtcggtgagcgcgaaaaaactgcggtggtttcgttgctgtttgcttcaaaggctggcgatttgaacaccatcagaaggtcataaactaattatattgagttagttgatttcgaacaacaaaaactcaaaaataaaatttatagctttttttattttaaatttaaaatcgaattaaattattaattttcaacatttaaatttaaagttcaattgaattgtcagaatgtatttgcaaggctgtgacttggagatggccgactatgacaagcgaactgcgctgcatttggctgcttctgaaggccattttgatgtggcacttttccttttggagaccggcaaagttcaaccagacccaagagatcggtgagtcataatcaaatttaaaaatagtaatggcacaaaacataattatttgttgaagtaaatttaaaaataataaagctcagaaatttgtatttttatgaatctttaaaaattaaaaaaataaatgataataaaattttaaattgtttagtagcttttcaattcaaataaaactttgaatacctgaaattacaaattctaatatcttatttcaaaaatatatgaaatctatgttttccgtgccgaaacctgggcttggattccgtatttgatatgagcctgtttcttggacaaaaatcctggaaaatttaagccggacaaaattaaatttaaaaaaaaagaaaacttttgactcaaacagttggaatcggactcctcttgacgatgcccgttcggaacatcacacatcggtggcactgatgctggagcgacg

SEQ ID NO: 80180 - DNA, 1009 bp, Heterodera glycines
atggtgaatttttttgttatttttgtgccgtttttgttgttgattgtgtcaaatcagttgaaagccgaagaaacggaagaaaatcgacataaaacggaggaaacatggaattatgaggagcccgaagaatggggaggaaagtgccaaaagggcgacagacaatcgccaattgacattcacaaacaatgggtaattaattaattaattgaataagagatagcatgggtggcaaattattacttattaattaaataatatgatttatttttataattagtcgtgttaattaattatttaattttatgccttccttttcagttcattgattataaaattccggcaatttcatttgcaaattacgaaaaaaatggaactgtgacaatgaaaaacaacggtcatacgggtaaagaaagagctgaaattacggactgggacactatagtctgagccaagtttagaacatcataacttttttatttgctgaccaaatccaataagcttggtatcattcgattgatcttaacaagctctattggttttccaaaaaatacaaagatataccgacatataaaaaagttataagcaaaaatatgcaaaaaatctgaatttttggtagtattcatgtttcaacttttttagaagctgttcaatcgcttagaaatagcttatcaaaagcttctaaacatgtaaagctttcgaatgaagctaaatttataaaatttggccagctgagaaaaaattttgatgctttaaacttagctcagactataccggcctatagtgtcccccacccctgaaattaacataattagtataataaaaacataaacaacttaaatttacagtggtcgtaagcggatttgacacttgggaaaagcagccgaacatcgccgacggaggctttgggagcaaatacatgttgagccaattccattttcattggtctcaaaacgagaacggaagtgaacatacggtggacggagaacattatgacgcggaggtactgtag

SEQ ID NO: 80181 - DNA, 1388 bp, Heterodera glycines; identical to SEQ ID NO: 15851

SEQ ID NO: 80182 - DNA, 557 bp, Heterodera glycines
atgccaactcgtgccattgtttcccgttcagtgccctttttatgtccactttcggtgcccaatttcacttcggcacttccaacagttccgtcttttccaaactgtctcccttctgctattccagcttgggtatggtttctctccttttctgcttttctatttccccctcttccctaaggcgttttgcttgtcattttcatcggattgccaattagctgtgtctttaggcaacggcaaagtcaagcacagaaaaagtccgacttagtttcaatatttatacttcaaattttgttctttttcaggctgacttttgcctgcacttattttggcttggaaaaaccaatcgaaagaaagcaaagttttggcgaagagattggccaaatggaattacaaaagcaggagcaaagtttaagcttaatgttagcggaggaagcgcagcacggacagagagcaacagaagaaggggaacagataatgagcagaaggaaaagcaacaaattggagacgtacagagcgacggaagagaaacacaaagtgacagacaaacaaattggtga

SEQ ID NO: 80183 - DNA, 1252 bp, Heterodera glycines
atgttaggcaacgccaaactcatcaattcgagcaaatgccctcatgccgaaaatgtttatgccgagaaaaggaaccccggcaccggcactttgcgttgttataacccgacaaagaatcaatattatgactgctcctgtcacggtgataagaaatgcctcgctgaagaaaaatgggcacacgaccgctttctttgtccaataatgcaggtaattaatgaattaattaattattaatgtattaatgccaattaattgattaattattaatgtattaatgccaattaattaattaattattaatgtattaatgaattattaatgtattaatgccaattaattgattaattattaatgtattaatgccaattaattaattaattattaatgtattaatgaattattaatgtattaatgccaattaattgattaatttaatgtattaatggcaaaggacactgtgccgccgaaacatttcatataatactggcaatttaatttttttggccataaaaattaccattttttgtatcaaaaaagcggaatataagaaaaaaataaggacaacaagcggaaataaggacaaatatggcaaatgataaaccctcatttattaattaatctgtaaattcaaggtcaatggaattcaaatccaaaaagatcctcgatacaattggactcgtcttgatattgattgctatgtgagccgagttttactgtaccttttcaaaaatttgtttgattgactaattttacagaaggccgaagcgggtaccgtaagcttttggggctacagtaagccggacacaaaggaaatcattcgggtggacgaaatccactgtttgactgatggagtgctaaaacggttcaagagtttgcaagtcgatgaacagtcgccgatgaaaaaactgagtccaacgagtccattcttggccaataatgcttcatccctaatccacgtgttcgtgccatttgtttaagtccctctcatacatttatgtatttttaaacacataatccaccagcatgggcaaatataatttgttggctaatatctctcccctaaatacacaaaaaaaaaacaatgactaaattttgatttaaatgcatataaacaattaaacatttaattaatgcctgtggcggtgtctgtttttgtttaatttgttaatttcatttttatgacatagcaatgtattttattcatttatctaattattttgttgttgtttttatttcttattaaaatggataa

SEQ ID NO: 80184 - DNA, 562 bp, Heterodera glycines
atgaactctttttctctattgaccgtctttctttgcttggtcattaattgctcagctcctccgatacggtaatttcataagtaatcaaaaaccaataaatattttaaattttaaaagcatttcaaaataatcgagtccaagccttgattcaggcctaatcaaagcctggatatttggcctgaatttttctaatttttcaaaattttcaatttttcagccctttgtcgtccgacgttagcatttggaaattgtgcaatggcaaaaatgggaaaattttggtggaaaatggctgcacaaagtaaaatatttcaaaaatttattttaaattaactatttttaaaccatttttaggcttcttctctgctaccaaagcgaaatggccaaaaacagaaaaatcggaaaacgttttggggtgggcaaaggaataattggcaaattgaaatttgtggaatgtgccgaagagattgccgaagaccaatggcacggtctgatcattacgaagcaccaagacggagtgatcagctacgaatcgaggcaaattgggagagataaaatattttaa

SEQ ID NO: 80185 - DNA, 1808 bp, Heterodera glycines
tgccttacaaaggcaccgtttgttggcacaaccaaattccatcgcccaacaacagcaacaacaacaacttcaatcccgacaaccacggaacaacaaacattttcgtttcaaccattttccgaatttgtgtcccattttggcactaattgttcgaaaatcgttttccccgtggaggtggccaaattcattgtgaacatcaccgctaggccctaccgaattgcgtgcaatgactatgaaaaagagtacgaaattggacaattgccaaaggattatgtggcaaatgcatacaaaggtttcttcaatgcttgcatgtcagtgccgacaacaaaatgcgcaaagtgattgaaattctggcacaaaaatttggtgccaaattctcacaaattgtgttttaggcatgcggaactgaacgcatgctataaaagcatgaagccagtggtgccaagcaataatgccatcgccaaattatgccaaaaccatcttaatgaatcgaatgctgccggatttgctgtacaaatttgcatccatcgcgatgaaaaggaacagaagcttgtctttgaaacatttttgaacctttccaccacagacgaattgtatttaataatctcattaattaattattaattgggttaattaagcatcaaaatgacgcgcagctaccaaatttccattgaagaaattatagagacaaagaaaactattcccattttctttctcgaatttggcaccgatcaccaacaaagcgcaatccgtgaaaaagccaatgggaaagtgatcagcgaatcactgaatgaaaatgtgaaaacaaaatcgatttttatttatttttaaataattaattaattgaaatttaggccattggcattggcaccgttctcaatgacatcaaatcagaaaaattcaatgaaaatttggccaaaatgattcatttggtgccgcctgttgctgatcggatgctggcatttttccagattccaacgccggagttctccaaactgatcagtgcccagacgaatttgaagccatacgaaaataacccaaaagaagtggtaagaaaaattgaacaaaatccggcaaaaggattgggccaaaccatcactttttaatttaagccgagacttggaatggagccgaactttttaaaagtttttcagaaaattatcaatcatatttaaatgaaattaatttttaaaaatttacaaataattaattttatttgttccaatcatatttgtatcatcggtgggcattgtttcgcggagtgtcaaccaaaattacaaaaatgaaaattacaaaaattttagggcagatcatcaagatgcgacacatatggaaaagactgtgcagtgatcacgaaactgttgaacaaaattgaacaattgagaaactgtaaaaatgaaaccattgatacggtaattaatcaaagattttctaaaaaaatagaaaataattatttgattcttttaaattcgagaaaaatttagtttttttgaaaaaaaatgtgtatttttatttttattatttttatttaaatataatttaaattgttttctatggttgggttgttgtattcacctgactaatcctcttctcggaattctaattatttctgctccgtgtgcttaaattacgcttttaagtctggttttcgccttcccccatcggtcgatgttccgtcacctgcgataccgtacctaagtccgaccaaaacattgacgtgcttcggtgatatgtattgtaacaaagaaatactgcagcaacaatatgaccgagaacgcgaaagtaagttgaggaaggaagcattttaa

SEQ ID NO: 80186 - DNA, 961 bp, Heterodera glycines
atgcgcacgggattttgctggtctctgtccgtgatcccgcattttttcgagcaggaattaggggttagttccgcgagatctctccggtccaacaaaaccttagaaaaacggagtattggaaaatggctaggcctaaataggtatgtgatcaatcaatcaatcatcaatcaatcaaaaggatgtgggctcaagccagaaaatctgatcagccgtcggaaaaggcaatttcgtccgttgaatggaacacaattgggcaaatggaattcgtttccgatcatgatcagttccgcagaaaaaacgtaagtgattttaattaaaaatgaaagccaaaatttttataaattttaaaatccgctcttggccaatgcttcatccatcacttatccatgtgtttgtgccatttgttgaccgtccatgaaaaagagagatcagtgatcagtgaaatctgtcatcatttgaaagctttatgtgtgctccatatttacatgtcaaaatataaatgaagaatgcaaggcgtacaaaagttatattgctggcatgtggcgccgggaaagccaagaaaaaagtcggcgctacttgcaaagagcacaattttgaaaattttttcaacttttttttggacaaaattttttttgtttaaaaagtcctgaaaccaagtacccggtgattttaaaggtagctgatctaaaatatgacaattatttgattctatcgcgaatatacctataatactgcgtaatcgtgctgctaatgctgattatgctatcagagattgaacaaattgaaattgaatccgattttggacatatgcgcaaatgtttgggcacgctttttctaccttaaaagacacggcttaagaaatttctatctttatgtatttttcagtgcgaccacaattcttaacaattacatcattgccattgttagggcaaccgattatcagaacatcacaagtaattag

SEQ ID NO: 80187 - DNA, 1045 bp, Heterodera glycines
atgtctaccgaccgatatgatattgtgttgtacggtgcttcaggctttaccggccaacatgttcttgaatcattcgtaaagaatggtcatttggaccaatttaatttcgccgtcgcgggaagaagtgagaaaaaactcaaacaaacactcgaagacatcgaattcatcactggtctggtgcaaaataaaaaatcatagacatacataaaaggaatttaacaaaataattcagggaaagttttgaccaaaattccaattatcatcgccgattcgtccgatgctcagcagctcgcagaaatggccaaacaagccaaagttattgtcaatgttgttggaccataccggttgtatggtgaagcggtggtaaaagctgcggttgaaaatggtgcaagtcatgtcgacatttccggcgaaccagccgtttgttttccaccatacaaaaaataataattgcttctcatactcatatttcactctcacttcagtggattgaagcgatgcaaatgaaatattcggagaaggcaaaagagcagggcgttttcattgtcagtgcctgcgggtgggactctgtaccgtgcgacttgggaatgaattatttgaagcagtacttcaaaggcactctttcgcatgccgaaacatttgctcatattcaaatcggggaagcggtaagcccaaaatgaaaaaaacaaatatgcatttttagtcattttcagggctattccttcaacgccggcacttaccaaacattgattttgggcctttggcaggccaaaaatgatggtcttggaaagatacgacggtcgattatgcccgagaaaatggagaaaactaagtggagacctccaaaaaggtacaggcacttactaatcccaacaatttaaatgctttttctagaggaatgttttggtggaacgattcattggacgcttattgccttcctttcatgggtgcggacaaaagcattgtgcaacgatcgcaatatttcgataacattgccgacaaaacataccctgtccgtaaagcctttcggtttttcattctttag

SEQ ID NO: 80188 - DNA, 85 bp, Heterodera glycines
cgggccaggacgttttcgcgtggccgttttcgcgtggccgttttcgcgtgagggtcgttttcgcgtggttgcatataaaagagaa

SEQ ID NO: 80189 - DNA, 299 bp, Heterodera glycines
atgtgctacaaatcattcccgttttggttgccgaattggaagaaatgcttgaaaatggcaattggaattacacaaatttaagccatttaaaaatggtggaatggaaaatgctggaatttgcacttcacaaaaggggggaaagccaaaaatggaaagaaattcaaaagctgtggaataaatggagacgaaaatttatcagaaaatttaaaaatgcaaacaaaatgccaaatttcaaaaaagtaatggaagagttgaaggacaaaatggaacaattgagagcggaaaaggaagcggaatga

SEQ ID NO: 80190 - DNA, 749 bp, Heterodera glycines
atgagcacaaatgggccaagtgggaaaaggaagcgattgtttggcgatttgatgatcagtggagccatattaatttgtcagaaagtgatgaagatgatacatttgatcactacatcagtgcatggttggtactaatcgctagggatacgcttttttggtttttcctatttttccagaattcccagtgacctgaaaagcacgaaaaacattttttttcggttgttgttaagctacgggttttattttttagaacctaacctaaaaaatttctcaaaaattcaactccaaaatctatttatttattttattgaagagttgattttaaaaattgtgcttctcaataatttgacataatatttttgctttttgaatataaatttggttttacaccccccccccctaaattcggaactttttggcacatatttttccaatttttagcacctattttggggggtttttaagaacctaaaaactaactattttagcagtttttagcagctaagaatatcatccctactaatcactacttacttatctatccaatcactttcgtttttttttctcgttagtttggtggacacaacgccagtcccaagtggtcagcagaagtgaattgccgttgcgttgtccttatttggatgggcccaatctgagaaattttcaatccgatttgaaatatttgccctttttcagcctattatctactttatgttttccctttatttgttgaatataataataataaa

SEQ ID NO: 80191 - DNA, 366 bp, Heterodera glycines
gcccaattttggtgtgataattaatgtcgaatatcgactcgacaaaatctcgagtttctttttggtattggactcaattctcgggaaactttcggtctcgagcagcactaataataataatgtccactgtgtaatgaacaattaaatgagagtgactgacctccgcttatcatttgttgctattcatctctcaattaactaattaattaccttaattacccttacacaattgccaaggtcacttctctttcttgctaggtgagcaaaagttttggagcaattactacaaaacattaaacagttgttgctctatctgcagaatatatttttaaatggcttgaaaaatatgtataatataaaaattta

SEQ ID NO: 80192 - DNA, 580 bp, Heterodera glycines
atgccgaaattcaaatttgataaagccgatcgcgatctgcaccaaattggggatttatggcacggttcgcgcgaacgaatattaactccaatttggcgccaaaaactaatgccgagaattcaaaattcaaagccttggcataaaattggacttttaagccactcatttatttgacccactttcagcttatgcctaaatgattttggcgccaaaaattgatgcctgcgtctatttttaagccttgcctttgtttgcgcttctcttcccaggctttaactcaccttcttaatttataatccgattaaacactttattttcagcccatttttctatcaatattaataatttttgcttaaaaattacatcaaatggtgaagggtaccccaaagacaccgaaaacaccaaaaacaacgccaactcaaactccgacaagaacgccaaaacggaaagaatcgacgaagcaattggcattggagttgccggaggaaccttcggaaaaagttttgcaacgaaaaatgaccataaatggttaccaaaactattgcatgtgcttgtttttaggagaatgccgacagtgtga

SEQ ID NO: 80193 - DNA, 1325 bp, Heterodera glycines
ttgactggagaaacaaaggaattcggatgaaatgaattatttgcggcaagtgggtgagattttgagtcgcggaacggtgcgcactgacagaaccggcacaggaacaatttccatttttggcatgcaaacgcgctatagcctccggggaggtcaatcgaaaaaaatgaaattgtttaaaaaatggcggggttaagggaccattccattgctcaccaccaaaaaagtgttctggaagggcattgttgaggaggtacaacaacacacacttaagaaattaataaagttttcattttttagctgctttggtttattcgcgcagaaacgaatgccaaaacgctttcttcgagaggagtcaaaatttggggtaccaaattatttttaaatctatttttgtattacctacatttattgctcaattaaacataaattttgacagatgccaatgggtctcgtgcctttctcgactccgcgggtttcactgatcgcgaggagggcgacttgggccccgtttatggcttccaagtggttattattttgagagaaattgcttatttttgccttaagtggcttcactttggcgccgagaatcgcggcgcggacgccgattacacggccaaagggactgaccaattggcggaactgatccaaggcattcgtacggacccgaacagtcgacggcacattttatgcgcatggaatgttcttttttattattgatatatttgtggaaatttgtaaatttcaataaagcatttttgaaaaattgattaatttggggaccaaatatgagggccctgctgacgtagaccgcgacagaacttatgttccaccataagtaattgtttgaacttgataaaaatcagaaaatcagagggacatggaaaattttttggttctagtcggttttgacccggcaatcaaaacatcagcgtgaagaacagacttcggcattgaagctcactttggtttttgtgaccagcttgttctgccgactagcgcggttaattacaccggacagccttaactgacgatcgtgtaatcgatatgaatacaaaacgaagaaacaatatacaacgcatgtttttccctttggaggttttaggacaatcaacgtgaatccgctgaatactgaaaagcagggacatcctgaatcgcattaacaatactaatttagaaaattatagaccaaaataagactcactattcccgagctaacgccctttttcggatgcggaaggaccaccccagatatcttatgatcgcggctatctatgtaatgcaagaattattgaaacaggccccgtggtgtgctcactgcggttgat

SEQ ID NO: 80194 - DNA, 317 bp, Heterodera glycines
atgcgtttcctttatgagagagaacacaagacattggcacgtgcgcaggaacgcgaggatgagcgcaattttttgcgtcaatggttgctcggtgagttaaattttttgttcattagacctaactataccaacagcaatattcgttcattaattgccattaaaatagcatttattatttccctttgtttcaaggaggcccacaagggcaacagggacatggaggcgttcaacaacaaggacaaggtcttcaaacgttaataaggccgtttgagtttgattacctgaacgtttaccaaaaatgcttatattgcatatga

SEQ ID NO: 80195 - DNA, 513 bp, Heterodera glycines
atgccaaaacaacaccaacaccaacaacaacaacaacaacaccaagatcaacaacatcaaactgatgtgatcgaccatgatcactgctacgcgcgccccacaaaacagttatggaaattgaaaagacaaaaatacatgttgacatttaaactatgtaaaatgtgtgcacaagagatatacaaccgtaaggacgacatagcagagtgtaacgatggaggtgtggacttgaactttcaccggtgcaaacattgtacaatgctcaacatgcgactcagcgatatgaattctgtgcaatttatggcatatcagccacgtaataacaactacaacaacaccaacaacagcaataaaaacagaaacaataaaaacaacgataatgacgaaaatgacagtcaaaataacttttggtacgataattacggtcctacatactgtagaggtggtccaagaaacaactacatgcaaggaaaacgaaagtgcttggaaagaattgacatggacgacatgcattga

SEQ ID NO: 80196 - DNA, 673 bp, Heterodera glycines
atggaaaagcttaaaaatttcactcttgccgatttattcaaagtattggctctaccagacaaagaattcgaagaatggctcaaagaacttaagcttctacacaccacccgtttttgcgactgtggcaatgaaatgagctacaaatggaagcaagatcgacaacaaccgctttggatatgctattcgaaaaagaatcacgacggcaaacagccaactattggcttttacactggcactttttttgaaggagcccatttgtcgcctaaacaagttttaaatacccttaatttacacgatcaattgatattaaggttttggaattttcctactattgggcacgaaaattttcaaatgatgaaatcagttttcaaatgcaattgggacgtgatacagtgaccgattggaaaaacttcatgagagatgtgacatcagaattttacagcagaaatccaatcaaaatcggttttttgtttgcttgcaaatgttttattaaatgataagtttaggcgcagcaggtgcgacggtggaaattgatgagactgtttctgattttttgtggcgtaagcaatttggaggaccggatattttttataatttgtggacccaaatcgcggaattgtacccaataagcacgtaaatctccttttatttgttatttaaagcaattccgaca

SEQ ID NO: 80197 - DNA, 90 bp, Heterodera glycines
ttaaataacaaataaaaggagatttacgtgcttattgggtacaattccgcgatttgggtccacaaattataaaaaatatccggtcctcca

SEQ ID NO: 80198 - DNA, 632 bp, Heterodera glycines
atgcttcacattcgaaaaaaggcgatcaaggaactgcgttcgctgcccccgcgtacctacgatgtggttgtacatggctctactagtcagcatcagcctccccacttcaaggaggtgccagcgctgtactctgactatttgacatggctgaacagcgaaatagtaaaagtgcaaaacaatgaaagggaaggcggaatcttgcgatttgcggcggaagtccataataaattggttagtaaaataaattataacagtctcgtgaaaatagaaatttgtaccacataaataacagaaaaaatcaaaaccgttttccacaggtcaaagcccatgtttggggcgatggtaatggacgaaccgctagggcggtaagaaatattgttttggagaaatgccaacagcaccaagtgtcgtttgaaaccgttccgcatgccgagtacatgcgagctgttggcgatgcgctggacggaaacccccaaaatttcgaaaatctgctggacgggttgttgcgcgctgctgaggacgcatatatgactgcggtacacgggaaaccagggccaagtgggcatcagaccggctgagggcagcgaatcaacagttcggaaaatgagcgaagcgaacgaatgggaaataaa

SEQ ID NO: 80199 - DNA, 228 bp, Heterodera glycines
tttccatccatcttcatttatttgatggtctaaatgccaagaaatatcaaatggctttttatgcaacattttgatggcattccgttccaaaaattgttggtgtacaatacaaacgcacatccaacacccaaatttgaatgtcttccgtcagttcgatggtgtgcctcccgttcagtttgtagttgagagtgcgcaacccgctcaaagtgttccgtttacgcctcctct

SEQ ID NO: 80200 - DNA, 892 bp, Heterodera glycines
atggctgtagcaaggcctgacctcgtgatgaaggcgatcattcctggtaagacagaaaattaaaaaaaaaattttttttttagttatgagttttttcaaaatggcatttctttaatttttttaaaatttctggtttttttgatagatgcctgtagggaaggatgaaaatttcatttgacatttttcaagaaaattcgaaaaaaatttgcgagatttacaaaatgtcttatattgaaaattgttttgaacaaacaaggagaccttatcggctgtaaaaaaacaaaaaaaaaatttttttttgtcatattcttgaaaaatctttttttccattctctcccttccccccttaaacaaaaatccaaaaattcagtggtcatggccggcattgtgggattctgatgctgatcttctcggaggtacggcggcggtcggtgcggggcgagggagtttcagtaaggacaagtaccgggattttggtttggaaatggtaccgaaacgaaaaaattataggttttttagaaaatcctttgttcctgcagaaaatttttaaacctttggggtgtgtgcgttcgattaagtcgtcgttcagtaattcaacaaaaaaaaggaattttgttaaggcaccaacgaaagtcgaacggtcggaggcggaggaggacgtttttcaccaagcacaacaaaaaacggaggaacaccaaaatcaaagagaggaaagtgcaaaaggaacgacggaaagggaggagaaacaatcgccacaacagaaacacccgatgccggtgaagaagacggcgtcattcatgcggaaagcattttggcggaagatttgcagctgagtgagagcagttcggaggatgaggaggacggagggagggacagcgaagacacggactga

SEQ ID NO: 80201 - DNA, 1973 bp, Heterodera glycines
tctaattatccaaccatttctgatattgaatttgatgcaggtgaaatatcctgtatgctgaggactttaccgaatagagaatctacttcccctgatgaaatttcctttaaatttttacgtaattgttaccttcctcttacaccggttatttcggaactttttagactatcaatggatacaggcaagatcccttatatttggaaaaaatccattgttataccactctttaaaaaaggtgaccgaaatgatccacataattacagacctatttctcttacctgctgtctctgtagggtttttgaaaaaattttagcaaggcatatatacgattttcttcataaaaataaattaatatctgaacaccagttcgggttcgttaaaaaacgctctaccaatactcaacttatctctgtacttgaggattggtatgacagcatatatggtaacagaaatattgactgtgtttatgtggattttaaaaaagcctttgactcccttcctcatcacattatggttcaaaagttggataatatcggaattaagggaaaactgcttaattggttatctgagtttttaaaggaaagaacttatacggtaaaaattaataacaaatattcaaaatcttatccgattaagtctggtgttccacagggatcagttttaggcccactgttgtttttgatctatataaatgatcttccgaaggttattccttcggaaataaaagttaagctttttgcagatgatgtgaaactatatgtttcatacaaaaaaagaaatgagcgcattaagctaaacacagctttacaaaacattgaaaattgggccagtttaaacggtttaaaaatctcacccgataaaacatttattatattttttggcaaaaacaactctaaacaacaatacaaattatgcaacaaaattatcaatgaggttgaatcgattaatgatttgggtgttttaattgataataagttaaagttttctgatcactatcttaaaattactaaggctgcttatttaaggatcagatatatagccaagtttctaaaatcccgctcaattcgggtatggactactgtttacaagacgtacattcgccccctccttgaatacgcacctgaaatttggaatcctaagttaaaaaaggatatcattaaaattgaaagatgtcaaaaatattttacaaaaattgctctcttcaaatgtagattaccttatattccctaccaacaacgtctcagttttttcaagatacaatctttagaggaaagaagaaaagttatagacctagtccaagcatttaaaatcattaatggtctaacccatctcaaaaaaaatatttttcctttaatttccgatcactttccatacaatttaagacgtaaagttgtgttaaaatcacaatgcactaaaacatcccattcttttattaatagaactgctctaatttggtccaaacttaacaaagtgttaacagatgccccgtctgttgactgcttcaaaaagcgaatacagacgtggctggaggctaacaaaatttaactctaaaagtacccattcttccataatactactactattttataattcaacgtgtaagtggtcaccccttcgttggattttattttatttgaataaatattttttcataatcacaattctgaagcgcgagactaccagtgtctttgtccggtaatagtttagatggtacccccccttttttaaaaatttttttcaactttcaaaaaatcataaaaacatgtttctaggggttttcggggtcgctgatcacgaatccgacatccatttcgaccgattccgaacccctgacccggattcgaacaaaataaaaaaagcagtttgggaacaagactgaaacatacgacacctatttcccagaatttatttggcgtcagcgttttggagaccgtgaaaatgcgttttacaatttttggttgcatgtctctgag

SEQ ID NO: 80202 - DNA, 799 bp, Heterodera glycines
atgaagaagaaactgggagaccaaaatctgactcaggttgtctcaatttttcaattcaatattctcaactttattgattttaagcgttttaatacggatccaatttttgccgagtcagcaaaaatgctgacattgattgcttttgttcaaattggcgatcccacagaagcagtcaatgcattggatgttgcgttccgaaatttaccagaaatacaaccgatgctcgaatggtttgttttttgcagtcattaacatgcaaatatttactgcgttcaggttgatgaacaattacacgggtcgtccacgcgcagatgggtcgcgaacggaaccacgtttcaaagccgaagcttggaatgtctacgagagaatgctgagcaatgacgacagaacgaacaattttgcagcccacaaaagaatccagtgtcatttcaattgtcaccctactctttggaacttcattgacgttcttcgaaaagcccaaacagtgattaaatttattgcttatttatccgtaacattccatttaagactacggatgccgattactcaaaatttgtcaaaggaattgagccgcctccaaaaaagaaaaaataccgtgataccgattcccgaattctagcaaaggttcagaactattacattgacattcccaacaacaatgctcacaattatgttaaccgtcatccccgtatcattgagtatttgaaaggcatttctcgcaattaccagatgaatccttgatcaattttttttaatattggtattatttatggaaatttgttagtttcaaatttcaata

SEQ ID NO: 80203 - DNA, 774 bp, Heterodera glycines
atgaaacaccggtggattataaaagaaaatcgccaacagaaaaataaaaataaaatgatggggcaagaaatgggagccggaaaatccgacactggaaaatccgacaccggaaaatccgacactggaaaatccgacacaagcagaaaatccgacaccggtggaaaatccgacacaagcagtaaatccgacattggaaaaaccgaccccaactttaaattttaaaaataatttttgattgtttgagttagtaaatatttaaaatacatataataaaagttaaatacttaagttatttaaaataaatatttttattgctataaaatagatttaaagtagacatataataatcatattatttcaatgttctttttgatcatctcaaaaaaaattgtaacaatccggcaaatggaatcagatgaaagggcatgaagcataagaaagtgaacgtggtgcaagacatgaatctcacagagatttatgcgactcgcaacaatcgacatcaatatcccatcgaatggcagaatcaattaatttttttaaatccaaatcgaaaacttgataaacttagccagatattaactcaaacaatcaaaaatattttttaaatttaaagttggggtcggtttttccaatgtcggatttactgcttgtgtcggattttccaccggtgtcggattttctgcttgtgtcggattttccagtgtcggattttccggtgtcggattttccagtgtcggattttcctagagcccgcacaaagtgcctatatctcca

SEQ ID NO: 80204 - DNA, 791 bp, Heterodera glycines
atggcaccagccagtaagtgccagtagtacatattgttgctcgaaacaaaaaattcccaggactagagagtgattctgattgagaaaattcgagacttttctcgagtcgaggctcaagactgacactttcgagcagtactagtaaaaaaaatagtagtggtagtgtgtgttggtttgtttcgtaaaatccgccattttaacttctttttttcgacgaaatatgctatatatataactttgtttaaaattagtcaaattttgtattcttggttctttgatagcccaggtttttctctattagcatgcaaaattttaaaaaattttataaattcgaaaaacttgtatgaaaataagtatattgaatttgatatttaatttaaaattttgtaaggctaatagagaaaaatcagagctatagaatggtacctgtcaaattttgtaacttttaagcaaaattcttatttttggcgtattctcaggattatggcacgcccaagccaaatgctccatatccgccatatggccaccattgagatgctgtgccaaaatgaaatgggcaatggatgaattttaccgtgataaaaaatgagtgtggggaaattagagtccgtaatttttaaaaatcggggatgggattgggaatcaggccgggatgtgatttaaaatccaatttttggtccgggaaaatccacacgtcctatcccatccgggccctattactcataattggttagaatttctcaattggtgattttgatgtgatccgcgatttcaaccaattaatatgataa

SEQ ID NO: 80205 - DNA, 492 bp, Heterodera glycines
  unsure (1)..(492): unsure at all n locations
atgcccatttttatggctttcagcggaacaattgccattgaaaaggcaccggtcaaaatgcaagacgatgcttctgatcaaactgatcaatcacaaccgcaacaaaaacagatcatgttgggcgtcacaataatggaacttggcgaagaaacactgcacgagcgcatttatggcaatccgacggattttaatgacaaaaatggggcacaaaaattggacaaacaaatccgagaaattgcaaagccattgaaagaattgcacaaaggcaacaatataatattttggcatttgtgtgtttttacagggcaaattccacataaattttcataaaatttatgttttaaaattaagaaaataagcagagattggcctggatctggacccaggcctggatttttcctggctccagaggcccaggtccaggccattttttggcaacctagatttttcctggaccttgactntccttggatttttgtccaggaaatctag

SEQ ID NO: 80206 - DNA, 855 bp, Heterodera glycines
atgcgcagccaacaggccaaagtgtccgcttctgaggccgcaaaagtgtcgcgcgggtcgggcgccgcctcggccgaatcgctggaggagcagtgcaaatgtgaggtgatgcagcccggactgtacgacatcgagacggagatgtgcacgccggaattggacgacgccaagcagttcatccccactgagttgcagaacaacgtcatggacaaaacaccggtggggagaaaccatcaacaaaatgaattaacttaaataaaattgaaaaattaaaaattttataaaaaataattgcaaaaaagcatgctagctagattaggttagttccaaaacacagggttcgttttagggcgagaacatttattttgtgtattcgaatccaccccagaaccagaacgaggcccaaattttttggcaaaaaaatgttacaaatttctgtatttttttttttgctctcccgcgctgaaattttttaaaaataacactgttttccgtgtctattattccggcgtgtaagtattttgctgaaaaaatggatatatcgaattccatacagatttccatgttcatcacggtctatcttatggacttgcaaacacatgccaacgagtcctacttgtccgcctttgggcgtgccattcttcaacggcggatggcacaaagcacggtggcatgttttctgatggggcttgatgtaacgttggccactgcacagcaacaacaacaatcccaagctcaacaacaacaaatgccggtggcaatggaaaaatgaatttaaaaatgaattattatttttctatacgatcgaatatccgcgcctaattagtgcaaaatttttgtgcattgctaagacaa

SEQ ID NO: 80207 - DNA, 226 bp, Heterodera glycines
atgatttgctggaaatgtcctgatgcaacggcaaaaaaaattgataaatattcaatgattattttcccggtctgttttattctgttcaacgtctggtactggttcatcttcatggggtaatatttcttttttttaattaaaatgtcattttttatatttttagccgtttacgatgaggacatattgcattttaattgaattttatcgttttaattttaataataaa

SEQ ID NO: 80208 - DNA, 559 bp, Heterodera glycines
  unsure (1)..(559): unsure at all n locations
atgctctctgcgctggacggtgttacatttctttacatcttttgtcatcacaaactcattcttggccctttttgcacaagcccaacaattggggaagaggagcatgtcatcgatgtgcatggggaggagggggtaaatgggacctcaggcattaaaaattcgattttgaggccccataacttttttttataatattgctaaaatattcattcattaatttttcacatggaaacatttcaaaattctggtgaaaaatgttttcggacaaaattgcagcagatttactggagcaacataatatagacacggatgtgaccaaccaataaatgataaggttttttttttaaatgataaatatttttagttttgatggactatattaaaaaaactttagaaaaattgtttaaacaattgaaatgaataatttaatttaactaaattaaaaatacaagcaacaataagcaaacatttattcaaaaaaggtgtaatgtgagcacatatttatttccttattttttanacaaaactttttatacattggtgaaaatcaaatgaaaaa

SEQ ID NO: 80209 - DNA, 173 bp, Heterodera glycines
taccccctcctccccatgcacatcgatgacatgctcctcttccccaattgttgggcttgtgcaaaaagggccaagaatgagtttgtgatgacaaaagatgtaaagaaatgtaacaccgtccagcgcagagagcatttttgggaacgttcacatcaattgagttacggaaggct

SEQ ID NO: 80210 - DNA, 1098 bp, Heterodera glycines
gactcaatccaccagcattccaatcactgggactcaacccacctgcattcaatcactgcgactcaatccaccatcgttccaatcgtcggggctcaacccaccaacatttcaatcactgggactcaacccacagcatttcaatcgccaggactcaatccaccatcgttccaatcgccgggactcaacccaccagcattccaatcagtgggactcaacccaccagcattccaatcactgggactcaacccaccagcattccaatcgccgggaaccaacccaccagcattccaatcgccgggaaccaacccaccagcattccaatcgctgggactcaacccacagcatttcaattgccaggactcaatccaccagcattccaatcactgggactcaacccacagcatttcaatcgccaggactcaatccaccatcgttccaatcgccgggactcaacccaccagcattccaattactgggactcaacccaccagcaattcaatctctgggactcaattctcaagctttccaatcactgggactcaaatctccggcattccaatctctgggactcaaatctccggcattccaaacattgggactcaaatctgcggcattccaatcactgggactcaacccacagcatttcaatcgccaggactcaatccaccagcattccaatcactgggactcaacccaccagcattccaatcactgggactcaacccaccagcattccaatcgccgggaaccaacccaccagcattccaatcgccgggaaccaacccaccagcattccaatcactgggactcaacccaccagcattccaatcgccggaatcaaccctccagcattccaatcactgggactcaacccaccatcgttccaatcgccgggactcaacccaccagcattccaatcactgggactcaacccacctgcattcaatcactgcgactcaatccaccatcgttccaatcgtcgggactcaacccaccaacatttcaatcactgggactcaacccacagcatttcaatcgccaggactcaatccaccatcgttccaatcgccggaactcaacccaccagcattccaatca

SEQ ID NO: 80211 - DNA, 1292 bp, Heterodera glycines
gctggtgggttgagtcccactgattggaatgctggtgggttgagttccggcgattggaacgatggtggattgagtcctggcgattgaaatgctgtgggttgagtcccagtgattgaaatgttggtgggttgagtcccgacgattggaacgatggtggattgagtcgcagtgattgaatgcaggtgggttgagtcccagtgattggaatgctggtgggttgagtcccggcgattggaacgatggtgggttgagtcccagtgattggaatgctggagggttgattccggcgattggaatgctggtgggttgagtcccagtgattggaatgctggtgggttggttcccggcgattggaatgctggtgggttggttcccggcgattggaatgctggtgggttgagtcccagtgattggaatgctggtgggttgagtcccagtgattggaatgctggtggattgagtcctggcgattgaaatgctgtgggttgagtcccagtgattggaatgccgcagatttgagtcccaatgtttggaatgccggagatttgagtcccagagattggaatgccggagatttgagtcccagtgattggaaagcttgagaattgagtcccagagattgaattgctggtgggttgagtcccagtaattggaatgctggtgggttgagtcccggcgattggaacgatggtggattgagtcctggcgattgaaatgctgtgggttgagtcccagtgattggaatgctggtggattgagtcctggcaattgaaatgctgtgggttgagtcccagcgattggaatgctggtgggttggttcccggcgattggaatgctggtgggttggttcccggcgattggaatgctggtgggttgagtcccagtgattggaatgctggtgggttgagtcccactgattggaatgctggtgggttgagtcccggcgattggaacgatggtggattgagtcctggcgattgaaatgctgtgggttgagtcccagtgattgaaatgttggtgggttgagccccgacgattggaacgatggtggattgagtcgcagtgattgaatgcaggtgggttgagtcccagtgattggaatgctggtggattgagtcctggcgattgaaatgctgtgggttgagtcccagtgattggaatgccgcagatttgagtcccaatgtttggatgccggagatttgagtcccagagattggaatgccggagagttggttcccggcgattggaatgctggtggggtggttcccggcgattgaaatgctggtgggttg

SEQ ID NO: 80212 - DNA, 773 bp, Heterodera glycines
atgccttcgtggatctttcctcgagttgctcaacaacagcagcagtcgccgtttccacagcctccgaccactgccgttggttcttttcaacaacatttccaatcgcctggcagcagaggagcaccgttaccgccacacattccgccccaacctttcttttctgcagggcctccgaatggcactgtatgactgacaattgtttgatagttttagtgatggatggtagctattctctctatcgaagactcccttttttcatggcttaatttcttcacgtttttttaactatttctttcccttttcagatgaattctacgccagcaatgaacaactttggcactgacggtgctcagctgcacccgtcctttatgtacgatggacaagtgccgaccaacggcggtgctggtcacatgcttatgaacggagcgggcggccctggcgggacaattgacttcaatgaagacttttctggggggatcaatggcacaatgcctgcccaatacattctatccgacgaattgatgggaaagattcataattcgactaaacgaaaggtgtgtttgttataataaaatatgtttaaatagccgttttagacgctgttggaactgcagattggatttgagcaaattgcgtacgacgtgtccaacatttttgagacttgggctatggtgatcaaagagcgtttggttggcagtgacccgttgtcgtcttccgacttggagatcggcgccgccattctcattgaaatggtttcaagaaactgctattaa

SEQ ID NO: 80213 - DNA, 719 bp, Heterodera glycines
atggtcaaagacactttggcaaaaatgattcattttgtgccaccatcgaatgatgataaaatgctcccatttttccaaattgaaaggcccaaattttcaaaattcatcaacaacgatacggatttgttaccctaccaagatgatccgaacaaattcagtcagtaaaaaataaatttaatttttaaaattaattttggcactttttaagacaatcctgacccctgtgatgaatacggcgcagattgcgtgccgatcaaaaatttgttgttgaaaattgaggcattggcaaactgtaccggtaacgaaaacaatgcggtaaagacagaaaaaaatattaaaaaaatatatatactaaaataattttagattttcgaaatgccaaaatgggccccacttcctccagcgatgccatggaaaaagcgatccgaaacaatgctatgcgatggggatttgttttgtgacaaacgaaggctgcacgaacagtacaacagattgagggagagtgagtcacttggaaattaaataaattaattaattaaaaataaataaaactaaaaaatctaaattaaaattcagtttgtggacttcagcctgaaaaagtggaaagtcagcgtaaaaaacgacaatacaatccaaacgagaaatggaccgaatccccgatcaaaatcacattcaacaaaaaagctcgtaataatcttaccacattatacaggatttga

SEQ ID NO: 80214 - DNA, 1942 bp, Heterodera glycines; identical to SEQ ID NO: 15881

SEQ ID NO: 80215 - DNA, 397 bp, Heterodera glycines
atgtgctcttcattttcgaaccctttcttcttccatttcccacaatcaccagcatcggcaggtgtcaccgtttcgtccgatagaacggaacgattgttggcgaagaatgccacgccaaccgttggcacaagggcagtggaaaaagcagaagaaggagaagcagtagatgcatttgaagggaccaaagaaagtgtagaagaggaagagggagaaggaagaggaggagcaggaggaagaggaagaaaaggaggagttggagaaggaagaaaaggaggaggaggagaaggaagaaaaggaggaggaggagaaggaagaaagggaggagaaacggcccatcaacaacaacacacagaattcgaaggcgaccaaagaatgtggccgcgacctgtgctgtgtg

SEQ ID NO: 80216 - DNA, 1722 bp, Heterodera glycines
atgccgcccgctacacaccaaatctattcacagaatttggatgcaattcctcacgtgccaagcacttcgaaatcatcgatgccgttaatgaagcaggaacccatctctgagcaagtgagtgatcatcatcatacatgaaaaagggagggtgggcggttttattttataaaaaaaataattggccgaaacatcactgctattttggagaaaatatcttatttattgtttatgttaataattattttcaggaacagatcaacctgcaattgggcttagacgcgccgaagtcgtctcgcgagtcgagtgttgccagcggatcgatccattttaagtatcacaaagaaggcactcaaccttctgtcagttctcttaggcctcggagatataggataaagccggattcggagaagcagaaccctttgtatcggataaagaggcaaaaggtatgtttgacatatgaaaatccatgtttttgacctctatttactggaaaacacattgattagggttgcagcagatgcgcgataaaccctcagaactaaaaattatttaagtccgaggatcttcaaaatataatcgaatctttttatggtaaaatttcttaatctaacaataagtgtcggtgaaataaaatttccagacaacccctccgacatcgccggaccttttttcgaaactgattttaaattaaaaaaagaaattattatgagcgaatatatttatttgatataatgaacttgtttcagaacaatgatgcagtccgacgcagtcgagacaaagcaaaacgcattcaagaagccaaggaaagcgagctgaagctcttacaagatgatgtaaggacgaatttcctcatttatataagcttactgggttttttatatcattaacatagaacggattctacgcttttacctatttagacgttttagtgccgcattttctccgcccaattcttgaatttagcaagaatctaaaaataattttaaaatttatacctattttcgcatttcgaaaaatttcttaagcatgtttttcccacaacggatatcggcataagcgaccccaatttcgaaccccgaattcgaacaaaagtcgaaaattaatttttcactaaaattctcatgtattgtccaaaacaggttcaaatgcactaaatggcagtgatctttattttctattgtattccgtccatttgaatagatttgggacaataaatgtaaaatttggtgaaaaattaattttctccttttgttcgaattcgggtctggggttcggcattgaccaaaattgaagttagattcatgattagcacctcgaaaaccacaggaaaggcgtttttaacaattttaaaaactcagaaccgcataaaaccctttaatttttttaggaaccaataaagtacatgattacccaaatttacataaaatgcttataagctttattttttagaactgtcggaaagccgaactgatagaaacgctaaaagccagcaacgcccaactgcaaggagagaatttgttgctgagacagaactgcaggtgcggtgctgttctgcgagttgcaaagcgttaatccgaaattgagcggagggaggtacttgagaagttgccgaaatgcaatcggacggattgtcatgccgcgtttttagatttgtgattactcacttgtgaaacgtgctttatttaagcaaacgatcatacacaattaacgggaactaataaa

SEQ ID NO: 80217 - DNA, 675 bp, Heterodera glycines
atgcttctgctcttggcattgttcactttggcattgtgtgccagtttctgtgacggaatgggtgacaagaacaataaatcttttggaaaaaattggctgagtttgggcgacagtaaaggaaaaagtaaagcgtccaatgcatttaatagcaacagtggttcaacaacgaactttgccaataatcacaatgcaaacaattctttgtccaacccatttaatagcaacccatttggaagctatcaacccaaccagccaaattgggcaagtgaccaattccatcagttggacagttcatcgaatccaactcaaagtcgtggccaaaacacctcaaccctgggccaagacttccttagcattggtggtaacaaaaggaaaagcaacaattttggcagccaacaaccaattagcaaccaatcaaaccaatttggttcttcttctttctctgcaaaaaataagggcaaaaagccaatggattcaaataaacctccgcttcctcctgtctattattcaggtgaaaaagtttatgaaaatggatcaaccgaattcattgaagaagtgtacaaaaagacagggggagactttcctgttgtctatcattcaatggaccaaattcatgaaaatggatcagccgaatccattgaagaagtttacaaaaagacagggggaggccattga

SEQ ID NO: 80218 - DNA, 238 bp, Heterodera glycines
accctttgtaacctaatcatcacaactgcaccattttctcgaccaaaacactcgcttccaccggtaagtttgaacccgattttggacgttctgttggctttaagaaattggaaaacagttacatattgtagaagtggtgcaatgtgtacaaaagcattgagcagaagtacaacaccgccactctcgcccgccaagtgcgcggcgtcaatgctcactcactcattaatgagtatattta

SEQ ID NO: 80219 - DNA, 578 bp, Heterodera glycines
atggattgtgcctcaaaaattaaactccctgatgagtttctttccgaattggccaatgcctttcgtttcaatttccgttggtccgttcttcgaatttcttcctcagtttttaattactttctcgccaaaagacaacaacaaattcttcaaaatgttgatttgaaacttcaaaaagtaattttaaggaattattttaattaaaaaaaaacttcttaaattttatgtctcaaagtctccctaaaaactttagagttctttaaagaaaatcaaatgttcttaaaaagcttgaacatccaattttctcatacttcctaagaattttatgtaagtctcggttctcgattacttgaatcttgaaattttctctgcttcttttggagtctcggtctcgattttttgggaattttttattttcggtattatcggttcattttcagatcgtcaaatcgtacgaacagcgcgaggggtttagcagtgttgaaaagatgtccatcgttattaacaaaattatagcatctgtggtaagaaatgtcgccgaagctgtactcggggctcgcgctctgatcaacttacatacg

SEQ ID NO: 80220 - DNA, 1101 bp, Heterodera glycines
atgcttcacaacattgccattgattgtcaggcaccacagcctgcttttgatgatgatgaaatcgaaaatgagcaacaagaaaatttaaatgatgaaaatatcgcattaagtgctgaagctgttcggaccgattatattaatcgtaatttttaattatttttaaattaaaaataaattatttgactccacaataaacccgggtttgcttaacccgggtttacttaacccgggttaaagacgagcaacgctattttcaaaaatttttaacccgggtttacgaaacccgggtttaatcgttaacccgggtttactaaacccggagacgagcaacaggcccctggctggggagttcctgcgatcaccaaggcagggctcctgtggcgaggctccaccattgcactttcggtcggggctgacctggcagggcggtcccgaactgggataggcccacagctaaatttttgagtgcagggaacggcgttcgcgcctcccctttaaaagctttgcttcatctatttgcttgccgtttatccttttcaacactccgagtgccgtgccgcgttgatgaattctaattgtttttctcataattttaaatgttggatgatttaaagtcgttaagaaaactttaagaacgagaacgaaaatgtccccctgccgtacaaaaacgtctcccttacggaaacaaccataacgaccctgaccgtgcacttccggtttacctcagttgggccccagcatatttttggactatatatattttttccattagaaacttaacgatattggcatcattagaaagctgttctagtagccttacaaaaaatcaaaaagatattttggcttttgaaaaagatattaagaaaaaatttaactttacgcaattttatttcttggcgttctgtcaaaaaccaaaaaaaaatacaatgaaaaaagaatttgcttaattttgttgactcattgaagtggatatgaacaagtttttgccttactcgtctgacaaaaccataaaaaccacttttccaagaaatggcttcttctgctgctggatttgccattgtcaccggtgccaacaccggcctcggctttgcattttgttaa

SEQ ID NO: 80221 - DNA, 108 bp, Heterodera glycines
ccaggggcctgttgctcgtctccgggtttagtaaacccgggttaacgattaaacccgggtttcgtaaacccgggttaaaaatttttgaaaatagcgttgctcgtcttt

SEQ ID NO: 80222 - DNA, 478 bp, Heterodera glycines
atgattcggtccgcactttcgtctcccaactcgacgagcgtccctatcaaaagggcagtttgcgattgctcgtcaacaatgccggcattatgggccatccctttcaattggtcgacggcgttgaggtaggcagacaaaaaaattaaaaaattaaaaacattttccctgggatttcgaggtcgctgctcacaaatatccatttgtaccttaaatacacggaaacaaacataaaatcatgatcagcaacccctgaaattttaggaaacttttttatgacatttaaacttttctccccaaaaagggggttgacgcgatcttaattaattgtattcccaaatgtttatgcattgcgaaaaaggaaaattccctctaacaataaaaaaacaggattttttttttgaaaattgcaattttcaaattttttaggtgcatttcgcctccaaccatttgggtcattttctgctcacaaatttgctga

SEQ ID NO: 80223 - DNA, 1030 bp, Heterodera glycines
atggacaaaaagcggttgcttggcactgagaaaaggtaatttttggcaaaattttgttggcataaatgcattcaatttgagcagaagaaaactagaggaattttgaaacatgtcggaaaaatccaggatcctcgaggttttgatccagctggacctgaattttttgaaatttgttttaaagagcaaacaaatgttagaaaagaaatcaattcattgcttaggaattctaaaaatatcttaatacatgtttttttctggattctccatgctctaaatagtgggaaaatacatatttttacatatttcggggtttttaaatgggaacataaatgcgttgtcatttcctcacagcattcgtaatcactagggctgggatttttatgttttaacatattttttttgcggcttagttatggcgagagaagcccaaaaatagcattttctccgaacaatttttgatttagagcgacttataaaaacataaaaacacatattttggcgttttggcacctaaaaacatatcgcacatatttcggggttttggcacatattttgcacatattttggcatttttgagaaaaatcgtaagaaaaatacaagaaaatctgaaaatgcaccctaaaaattgactactttacgtttcttaagcatttggaaaatttctttatatatttaaatgcctaaagcagcccaaatcaaacgctgtgttaaatcgtcactggatttcaaagtgcccggaaggaacttattcaactgatggaaaaattatcttttgtcaacggtgccttcaccaagtattagttttgacaacggaacagcggcatctgatttgcatttgttctcacgaaattgataaagactgatattaaatatgatttttttttgcgtaaatacacttggtttttccaatttttagcacatatttttgcattttttaacacatatttaggcctttttttggtttttagcacatattttgagtttttttagcacatattttattacatatttcaggatttttaccacataa

SEQ ID NO: 80224 - DNA, 950 bp, Heterodera glycines
atgatcaactttggagctgtattatgtttcagaggtcagtagtcagtgataaaactccttagtccaaaaacaaaaaaaaataaaatatttaagaaaaattaggtaagaattttgaaaatttgaggcaattccaaaatgcataaatttatttttgttactcaaatgtaatttatttgcctaattgcagtaatggacctctaaaaaaacttatcgcaactttggaagaaaggatttccgagcagcagttcggaatcatttaaagcattttggccatagccgaagaatttctcaaaaatgccaatcgaaatagggcacaaatttggaacaaatttttatatgatgacctttaatctccaaaatgtcaccgcccgaaagttccgtccggtctttggtctcgcggcattttgcgcctcccccgttccgcttcattgttcccaattcgccgcttcatctcgaaacactgtgacaaccggcaatttggtaaaattaaatttcggcaaatttgtggcgagggttgtgaatgatggcacaccaaaccagccggcactttgccagagggtggcacatggcgatgaaatgccaaatggcgcggcggctgagacgacggagtggacagaataaaagaatagtgggggtatgccgacggcactttttggctcagacgaaattcaaattttcattttccaaaaataggccaaacaatggcaccaccaaaaaacctatacaacagtggcaacaaaactgcagttaaaaggtttattttgcatttttgaagtcattcttgaaagaaaaataggaaaatacaagaaatagggcagcaaattaatttttaccgtatatttttcaggtgtcagaaaattggaccaaccgtaaattttgtacaccgaaagattggacagcccaattttacctatttttataaatatattttgaaataagaattaaataaa

SEQ ID NO: 80225 - DNA, 394 bp, Heterodera glycines
atgtcatttttttgtggcaatatgtcatttatggcgaaatgtcatcggcaggcaatgccaaccccaacggcacaccgtttggccgtttataagcaggccatgttccaaacaaatggacaaatggcctcattttcactcatccatacatctgtcagttgcacttgcattttgctgagattttggcggtgttatgatcaaaataaaaaatatttttggttataactttgctaaaaagcaacaagattttttattcttgatatcatttaatagcactaaatattcttaattatccagccaaatttcagaaaattatgtaaagttttcaaaaagttatgaccaagatgttcaaaaaccttgtttttgagttcctatggctctaactttttgatagtta

SEQ ID NO: 80226 - DNA, 1156 bp, Heterodera glycines
atggccaagctgatgctggcacccacccagctgtggtgcttgtacgtcgacgttgtcgtcctccaatttgacggcaacgcaatggacgcaatttcgttggcggttcgtttctcactgaattattttaaaaattttcaaaaaatgtgtttttcggtagaaaaaggtttaaaaattctcaaaaaaacaagctttttgaccgttttataagttgtacggacgatagaaatgaatattttttggtacttttcggttttgtggcccggatttgaaatttaaaaaacaacaacaaatggagcatattgttagtgcaagaagtgcacaccaaaattattgcggagaaataaatgccataatttgagatattttcaaatgcctttttattaatttattcaatggaaacgtaaattgttgttttttgttgctgttttatgccgtgctgagacgatcctaaaatagtatcaatggggcgttcctaaaatagtatcaatgtgggcgttcctaaaatagtatcaatgtgggcgatcctaaaaaagtatcaatgtgggcgatcctaaaatagtatcaatggggcgttcctaaaatagtatcaatgtgggcgatcctaaaaaagtatcaatgtgggcgatcctaaaatagtatcaatggggcgttcctaaaatagtatcaatggggcgttcctaaaatagtatcaatgtgggcgatcctaaaaaagtatcaatgtgggcgatcctaaaatagtatcaatggggcgttcctaaaatagtatcaatggggcgttcctaaaaaagtatcaatgtgggcgatcctaaaatagtatcaatgataaaattaattaaaataattattattcaatgaaacaaatattttgcaagtaataaaaattgttttctacataaaatattattacgtcggaaacgataatcaatgtatgtcaatatttttttgccatataataacaaatttttaatttaaaaatatatttcccttcagtgttaaattcattctttagattgactaaaaaatgaaaatattttttattagttttatttttcccttaattttacttgattatttggaaggccataaatccggatttgaaggattcgtaaaaaatcctcaagcaatatcacttgtcaaaagctatgaaaaaaaggaa

SEQ ID NO: 80227 - DNA, 1053 bp, Heterodera glycines
atgatttctgctaatggtggcagcagcaccaccaaagtattgaaatgtctgatgtgtggccagtcggagtcccgcagcacgttcatggcacatattgcagaacatttgtaagagcaataattaaaatgactaattatactgtacctgaaaatacagtaacccatttttaaaaaattaatttaaaggaattatcgacctcaccaatgtgccgaatgcgatttccgatcagtgactgctgaacaaatggcggaccatgaagcaaccactgaacatgttggacagttaaacgtacgtctaatgggttcaaccattaattaatactaattaattttttttgcaattaattaggcataattttaaaattaattaggcatcatgtaatccctatttggaccggctgtgccattttgtgtacaacgactgcgattttggggacaaaaatgggggtctcgataaagttttgatgcgcaaattggtcagcacagcggatgaggagcagcagatcatccgccaagcggttggcacaataaatttctgcaaatccatgcctttgccaattttttgtttaaaacatgaaaaaagcaatcaaatgttaaaaattttatttctgcttacttcttggaacacaaataaagtttttagttaacaatcacaacttacgacaaacttgtgcaaattgcaacaaaaatgaacagacggtaagcaattttaaaaaaaattaaaattttaaattcccaattctttttttcatgtttcagttggatttgtaacgacgtgtggatggacattttcccatcttttgaccatgcccaacttggcctcaaaatggcactgatttccgaccgtttcgatgttttggtggacaaacatttcgatggcaaaagcgaattgacaatttggagaccaatcgaaattagcaaggatgaaggaatgtcaaaacttttggtggatcaagattttgagggatttccattgccggaccgtccgctgcccatcaaaattcgctttaagaaccttcggattgagtaattttaaacttttttgtatattaaa

SEQ ID NO: 80228 - DNA, 3216 bp, Heterodera glycines
ccaattccgctcatcgctttgctgctttttgtgccattcattcaacaaattcggctcgtttctgctcaatccctgcgaaacattcacttgggcttccccgaggcgtgggacggggacaaattccccgaaatttactgtccttcaaaaaacatcccaaaatggttgggtgagcattttttgctttgttatcagttcatttatacaatagaatttaatttgttcacgagaatgaagtttttttgaatttataatctcaattaatattttcccaatttaaatcaaaaatatttaaatttttattttataaaattcacaattcattatttctcagacggttactttctgtgccaactttcggcagcgtacggcgaccccaacgcgcctccggggcagaaactgatgcatatgatcgacgccattggcgtactatattaattaattaattttttattaaatcatttttaattttaataaaggcaatcggatcgttccatctcagcgggggagaggtgaaaaatgattggcaaaaaccagcagagagagagagagtattcactgcttctctgcttccaattgcaggtggtgttctcggcccgctattacccctccaggccctaccgtatctgggaattctacgaccgtaacatgaccaaagcatcgggtcagtggtggtcatttacgcatgggatttcattacggtatacccacccgtccttttacagtaccatgggccggctggtcccactacaatctgagcgcaatggcacggtgggaacaagtgccagctaacccggacgcaggtcggtcaaagcgcaaaaacaaaaaacgaaactttaccaaaatgccaattttcaaatttgcttccacccacacagtgccattcattccattgtctgtccctttcccatggctttagcccgcttccacccgaacctcgacttttggcgggttggccacagaattatcgcgggcaccgaagcgccctattgggtgggctacgaattcgatgttcgttttttggcatttttttaatcaagtcccattcctcaatgaataagaggcattttcacaggttccaaaattgtccaattttcgcttggcctcttttgtggaggacaacgacattttcggcacttcggcacggccttcgctgattccaatttcgatggcaatgcacgaaagggcggacacgacacggaatgccaagaatggcgacgaaattttatggggcactttcagcgcaatgaattttgatgaggagcgattttttcaggcaaaatcattttaatgtttatatatttaatttggaaggatgggaaattaattaattatttaattagaaatcactaattaaggggctgttcaccatcgactcgaacggtgtccgaaaggtggtgggaatgtacgattacggcacttgggacgcaaaagcatgctcaaaagaggacgaatacatcggtgagacaaattggcaatcattgaataattaattaggcatattttctatggaagttaatcaaaatttaaatatgaatcacccaattaattaagacatttctcaatgcatacatttcgggaattcagaccaaaaaatgcccttaagagaaaacgttttaaaagaaatcaattatataatagctctcgtgtaaaattctcccctatttcataagtgtccatttattccgtcaattgtctctccgtcattcaattagcgtcaattagcataatgcgttccttttgccgcaggtgacaaaagtcatctgcccggttacatgcactcgatcagttccacggaacattacgtcattctgccgatcacttcgctggtgataaacccgtgcaagttcaaagagccgccgcgcaccgcgggcgccgacccgcaaattcagcagggcggcctttggggcatggacttttacgacgtggtgccgatgaggtgcgaacttgtgtcaggaaagcacaacaaaaccaaagcctcggaattctgttggcattattctctgtcaggtttttggtattcgacaaacgcaccaattcgtggtttacccaaaagccgttggaagtgttcccgtcaatgttcgtcacccatcagctgaacgccttcgaagactcggaggggaacatcgtggcggacatggtcagtcaattagcgatcattagaagagggagggaaggaaaaaagggccgaataaattgggtaattaagtaaatattaatgactaaagggagggccgaaatcccattaattcaccgtaagtgtgattttggccacaaacgtacagacaaatctttaagtttcatctctgacttttggcattttgccaaggcttaattggggggggggtgattgcttctcgggttttcatttttggctttccaaagattgtctacgacagccacgacccttacgtcaaatatttctacgccgactttcttcgttcccaactctacccgaacactgctcgcattttgcgctttacgttggacttgcgcacttttcgcgtcatgtacagctatttgataccgcaggcaaattaaatcaaattaaattaattggctaattaaatttgataatttcaatccattaaggagaccatttccgccgacttcccccaaattaaccgcgcgttcgactcgcggccttaccaatgggcgtattttgtggagaatccgttcgccgggggcaacaaaattgtcaaaataaatgtcaacgaaccctcggggacaaagtgccgaattaatgaccttttttaaaaagcatttaaacccttccaaaactcagaaatttgcacttcaccccggacgaattgcaattggtgctgcacgagccgtactttgagcagaggccgggcgccacgcgagaagacgacggcattttgttggtcagagggttggagttggaggagaacaaaggcaggcgaaggaggaaaagcatttgaaaagcttattaattaaaattaaaaacagacccggggggtaatttgggatgaaatgaataaaaatgtcatttaaatttcgacaatgaattaaatcataaaaaataaataaatttgaattaatgaacagttttatccttggaattttttcaggcattctgctggtgatcgacgccacctcaatggaagagattggtcgcgcttttgtgccaatttccgtccccttcggcttccacaatcgctttttctctcgccaacagttgggccttaccgtaggcca

SEQ ID NO: 80229 - DNA, 1511 bp, Heterodera glycines
atggatgatgtattggattgtgtttggcattttttgtgcgggtgaggcggtggccgacattttcctcgcattttggttttttttattaactgttaattgaatttatttaattggattacatatattcaggtttccattttactacgaattgaaaattatttttgttttttggttgctcagtccatggtacttatttaagtttatctttatatatataaaattaataaattgcatttttcaggacaaggggcgcttcaatcttataccgcaattgggtccatccgatgtttatgaaacacgaggaagaaattgacaatttcctcgaacaagccaagaatgagtcctacagacaggtcaatcttttttaaatgaaatttggaaattaggtaaatggtactttcctgttatgaggccacaccaaaaatttaaaaaaaaatcaacaaagggagcgctgcaaacacagaggagctgatcaatttaacgaaatttatctgcaattgtttcatttatgcttcatcactagtgttacgctcgccttgtttatttttcgttcccttttattaatttttttaaatttttgggtgtggcctcaaaataggaaagtaccttaaatttgttaattttgcattggatttcctttccgttttccttgtcctagtgctttttaggtggtcagtcttggctctcgtggtttgtcttgtgcgcgtgacattgtcgcgaccgcggctctccgtggcgccgcatttagccatgtccaactcaccgatttgcaacgttcgtacagcacgggcgatataaataacgcgggaaagggcggcggtggggagagaaaaaggacgacgaccacaacaacggtggtctatcaaaaacaggcagcaacaacaagtatcgaagaggaacacctcggagacaacgacgacgaggcgcaggttcggacatggaccggctcatatgacgaatacggtaacatcgtggagaacgcaatggctgagtcgaatgaggcgacggttagtaagccataggcatggacaaaaccgtcgacggaaaggcccgtaaaatggggagggggtaaaatggtggcacagaaatcgttactttttgcagtttacatgacagatctcacacacatttttaaactccattatttatttgtccatttgcggaaatagttaattttcaggtaaaaaaggtcaatgatgaggagcttgtcgtcattgaggtttttgttttcaccactttatgcccttttccacctatttttctcgcctccttaaggaccccatcagttccaaaccgcgtcgctcggactccgtttcacggcgcagtcggtcgcgttcccgaaaaaacgacgagataaacggtttgtccggatttgagtcgaatactcttccacgtcgaagcacgcgatcgacgacacgtacgggtagcaacaattgatttattgagcaaatggaagacgaggcgaagagagatggtcatttgactgactgattctaatttttgtaaataaa

SEQ ID NO: 80230 - DNA, 844 bp, Heterodera glycines
atggtaagccttagacgataagaccgattttttatttccgcgttttttttttgttgtgttacaaatacatatgtatatacatatgcaaatagctattagtaacggaaccccgacatttgcgtctttgtccaaaagcggattcaaaataaccaaacatcactaaaattaagaaattgtagtattctagtttattaggagcttaattatgttgtttgaataattaattattttttcaaaatttttttgtgatcaaatgatcggatacaatcacattctaccgcttatttaaagctgttaaggctatcagggattgaaaaaacttaattttgaacccgattttggacaaaggcgcaaatgtcggaccacaaaagtcggggcgcaaatgtcgggacatgattaataactgatgagttttgtccttcatatttttgcactgttatttgtttagatatgcgatgacaatgatcagtcgcttcgcttggctaattttgattggttacattttgtaaagtcccaaaatgactgtgactctcagaaagaagaactacaaatcaatggaagtgaaatcgattcgtattcagaagaagacgacgatttcattgatgtttctgattgcgaagttggcaatacgaaagaaatggcggaagtgacgagaaattcgtcaaaacaacaacacattgaggatcgtatcggaagtggtgaagagacgacggaggacgaattggaagacgaagcgcattttgaaacacggaaaatgagaaatattgggctaaaaagcaaagaggaggacacttacgccgactgttatgtacactttattcaatttaacaatgagacttattag

SEQ ID NO: 80231 - DNA, 129 bp, Heterodera glycines
atggcgcacgaacggggccttttgaccagccgtgttcgacacaccatcttcgatgtaaaaggagtgagaaatgctgcggatggttcaattatgagcttcaaggaagctcgtgatgcgggaatccttcag

SEQ ID NO: 80232 - DNA, 636 bp, Heterodera glycines
atggagaataaatttattctcgttccttcagacttgtacaaaaatttattaaaacctgagtctggcgagattaatgttgaaaatgctaaaaataaattgtcatcacttttgaagcagcgaaaattggacgctacttcaaaaaatttactttacaaccaggaattgaggcgtttcttgaaacttaggaaggaagttgaagaaaaaccggtaaaggttgagctttcagatggctcattaatggtgtttaaaccaaaacagcgtgaaagagatagcaaaattcctactcaaattgttaatgacgaaggattggatgaaacaggctctattccaacacttgaagacccttacactactgctgaagagagtgatgctgagtcaacaacatcaacaccaaagacgagaccactgataagaccaatgcgtgtaggaacaactaaatttcgtcaaaagcaaaagtcttttgtagtcaagaaacaacaaaaaattatgtcgattataaatgatgaccctgagaaatttggtatcggtgctaaaggacacatacttagagctaatggaacggcatatttaaaaagtaatgttaatcaagcattagagcgaatattgagacggtcacccgagaatgctccatcaccg

SEQ ID NO: 80233 - DNA, 1217 bp, Heterodera glycines
atgtcttctacttcttcaaagaagactctccaatctgtagtggagcaagtaattcaacaagacgcagaaataaaaagcagtgagaaaccactaaaacagaatgagttggaaaagagtgaacggaaatcaacccacaccgtatataacttacttgaccaccaacgatccttttggaaattggcccggccaaagtttgcagtgatcaactttctctgcccagggtgtcgtcgaatcaactataagcacaaggaccagttcaagttgatgggagaagatgagtttcactttacccaagtgatgtgtccgggttgcgtaaagtacaatatgatgcagactgatatctataacaaacacacaaagaacccccactaattgtatttaagattaaaatttaacattatatttataattaataaagatgattgatgaaaaattttttcacttgaacgatttgaaattaaaattgccttttggcatggtaattagtggaccattccagtagcggtaaaacaacattttttctaaaatttttgagagaaagagatgagttaattagcccacacccaaaatcggtgctctattgttatggtcaatttaatgatagtattcctgtactacaaaaaatgggtgtacatgtgcacagagggtcacccacagatgaattgctgagctctctaaagaagcctctcttattaattctagatgaccttttaacaataattgatgagaaaagcctatccgaattattcattaaaaaagcccaccatttgaatatgggtgtgattttcataacccaaaatttatttgaaaaaaaggtgaaggtagcacgaattaattcacaatatattgttataatgtcggcgccgaatgccgcgctacaaatacgtaatttgggtgtacagttgttccctaagaggctttccttcttcctaagtgcctataaagatgcaaccgcatcaccgtatggatatttattcttggatttacacccagcatcgagccctttactgagaatacggacaaaaatatttaaagaagatgaagaaaaagcattgtatattcaaaatgattaatttacctaaaaatgttattcaaaacttggattttttaaagaaattggtaaaaacaaagtcttttaaaaagagacaacaaatatttaaagaagcgactagtgagcaaattggattattaattgaaattagttataatatattaaa

SEQ ID NO: 80234 - DNA, 1635 bp, Heterodera glycines
atcgaaatgagctctcacaagaaaatgaatgggaaatttattgggaagaaaaagcgtaaaattgaaaagaagtggaaaaaggaagaaggaaccaataccaatgacagcaaagggaagaagccatcgtcaacagcaaaacattcgccattggtcggccatgaaagtgatcagaaatggtctgattttgacatacggattcagagtgatcatgcaaaacggggctcaaattccaaaaaacggagaaattttgaaaattttcttcccatcgccacttaatggctttatttagaaaccaagatttttgcattaaaatccctcattttctaaggtacgagagccaatttgatgaggtcagagcagagggcagtgccacgccttccgatgaattggtccaacgagcgcagaatcggggggaggaattgctgagccgtgacatcgcccgttttgcccaatgttcgaattttatgcaaaattccgatcatttttctaggcaaaatgtttcaaaaaattggtgccaagttgtcaaattccgttttgccccttctgtggtgatgacaaaacgggccataaacttgggaaattgtaatttgatttggtcggcgcttaaatatgggaataaacgcgcatttccatggccaattcccaccagatgcgccgccacattttgccaaaatttcccaaaaatctgtgaagcgcatttaaatttcttccccatttttagcctatcggagtcaaaaccgtgccgatgccgactggctggagatggtggccaaccgtggcacttttcccgaccgtttgtccgccctccaattgcgcatccgtcgctcggctgtccacgcgttgccccaattgcggcaatttgtccaactcgcccagcggaaaggggccaaaattcgccaagcgcacacattgaccagtacgggggggggggacaaattgacattttgaatttctgagcaagggcctgtaggactaattttcggactaaattgtgcaaatttgggcggggattttgacagttccatgggctttttggggtcgctgatcacagttgtgacattcattttggacatttccgaactcgaacaaaactagaaaattaaatttttttccatttcggaaaaatttgaaaatttttgttggctttttttcgaattttgggtttggaattcgaaattgtccgaaatgaatgtcatagtcagtcagcgaatccgaaaactccaaatatggtctaggcaccccttagtgtacaaaatttttttgccgaaagcgaggggtccatcggtactagtattaccaaggtttcaaaaaaatccacataattttatttttagaaatttggacccaacttttttccatcgctctaaaaatgccatcccccatttttagaggcgttgaaggacatttttctgcacgaacttttgcctccgaaacggaaactgctcacaatggcacaggtttttgagcaaaaaataaatttaaaaaatgtaaaaattgcataaatttcagaggccattggagcaatgggtcaatccgacggcaaataacaaatcggaggcggacaaacgacttttgatgtggcactttgaagcggagctgaagcagttgtaccaccaatttgttcagggacttcag

SEQ ID NO: 80235 - DNA, 394 bp, Heterodera glycines
tgtaatttgcgttcctctgacagaattctctttgacattttgaagaaaattggcgacggacgaaaggtttctttcacttgcgacagttcgcgtgtcgcagaaaacagtcgagtgatagtcagactcaatttggaatcgaacggtaattaagcaaaaaaagacactatttcaataaccccaattaagaaataagcattcttcaaaaggaccaaagcaaaatcgaaggtgaaattccggtttggaaattcatcggctctttggttggcacttattgtgcggatgatcaatcggttaatgagttgacggaccaatggcttgcgctggcctcgtctgtccgaattgatgaactttcaagacagatgagcgttcatttgggggcacacgatttcctcag

SEQ ID NO: 80236 - DNA, 854 bp, Heterodera glycines
tgtaatttgcgttcatctgacagaattctctttgacattttgaagaaaattggcgacggacgaaaggtttctttcacttgcgacagttcgagtgtcgcagaaaacactcgagtgatagtcagactcaatttggaatcgaacggtaattaagcaaaaaaagacactatttcaataaccccaattaagaaataagcattcttcaaaaggaccaaagcaaaatcgaaggtgaaatttcggtttggaaattcatcggctctttggttggcacttattgtgcggatgatcaatcggttaatgagttgacggaccaatggcttgcgctggcctcgtctgtccgaattgatgaactttcaagacagatgagcgttcatttgggggcacacgatttcctcaggtggaaaagggatgggtcaatagtgtcacagcaaaacgtgcaaaagatacacacagcaatccagaattttgggactcagaaaattccaaggtcccaccccccccccccccgaaatgaaaatttttaaagaatttccagcaaccaccaaacgaaaatttattttccttaaaacggccaaaatagggtcatttttacccagcagcggcaaaaaaaggaagaagaaaaggtctccaggttggccccccccccgaaatgttttcaagatacgcccctattgccccgtgcattattttttaatttaagctctcaacacgccatttgcttgcccgatttggtgttacgttgttgtttttttgataccaaaacgacggctgatttgctgaattggtccagcataaaggcatccaacaatgtgcagctgtgggcgaaacgagtcgatgatgcatgtgcgaacatttga

SEQ ID NO: 80237 - DNA, 220 bp, Heterodera glycines
tgttttggacaaattgttggccgaaggacacaaattgatgttggctcagtcattttacgacgcgtcagttgtgctttgtaaggctgccgaattatcgtgaggctttttgcacgtcaatttattattttgtttcgaaatattttagctcaaaatttttcggcgattttgctcctcagtcattcttgcctcatttcaattacggcaaagcactcattgaggt

SEQ ID NO: 80238 - DNA, 793 bp, Heterodera glycines
  unsure (1)..(793): unsure at all n locations
atggactatcagcgcgagcaaagggcggcgaaggacaaaggcagcggcaacaaattgcgactgctctcattggacggaggcggcatcagaggattggtactcattcaggtgaggcacagacggaagggcaatacgcgtaatgatgggtactgaattacttcggtgtatacatgtgcaaggggtgtctcagcctaagggccatacataggaaataaaacaggcngggggggggtggtgtcgggaccgattttttcatccgaattctaaattttctctgttgtcaactttttcgattaaatttcgcggcgcgcattttctaaaaattttgggaaccagggaggggtgtggttcggcagtgccgacaggcgccgctgatgaaaattgagtgcaatttgttaacaattcgccaaaatggtcgatttttggaattttgagccaggcaacgaccatttatttcgggataggggtggccggcggtgcctattactgctattcttaacagttttctaccaaaaaaccattttgttttttaaattaatgtattttgaagtattactgctggacaaataaaatacaggattaccattctcattgtgtagttttttttattttttgcttttttcaggtaaccaactctgatggagccgcagtggaattagcaagaagaatttgccatgacaaaaaagttccatttttccggatcacgcctcaactgagagacgaaataaaaatcgacaccacagacaatgtgcaacttataaaaatgatgtggaaggcaaaggtgggagaatga

SEQ ID NO: 80239 - DNA, 90 bp, Heterodera glycines; identical to SEQ ID NO: 60804

SEQ ID NO: 80240 - DNA, 204 bp, Heterodera glycines
atggaaatgaccggcggtgaccatcagctcaaccattttgtccagcaactccaagcagaaattcagaagcagggattacaggaacaggtcgatttcgtcggttgtttaccattttattatttcttttagattttgaaaatgaacaatcgatgtttcgacctttgcatcaccgattcgcgtcttccgagcaaattggacggaagg

SEQ ID NO: 80241 - DNA, 208 bp, Heterodera glycines
atgtttatgcctatggaccacaacattcaacaacaggtccaggcctccgcttctaggaaggcccgtgacgactttttcacgttcatcgcttgtggcttcatcttggagatcggtgtgcatttatctcttttattttttatatttttattttctcaatttaggcactcgcgcacttcgttatgttggattcgattcttttctcgtctaa

SEQ ID NO: 80242 - DNA, 1022 bp, Heterodera glycines
atggcaatttgtaaagcgattgacccaaaagcaaggcccaaaaatccattcggccattttgaacgacgtgcaaatgttcatccttcgccacgctcctcccaccactgtgttcttcccagacccatcgcgtcattcgtccgacgaggattggctgctgctgtactcaagcgcaagggatgggatgagcacgacgaggtgggacacatgggaaattcagagtgtattcaaaaccttgggattatgtcgacaaattctaggaattttagaacttttgaagaaaatttaataaactgaaaaataattatatgtttgggatttcttctttaattacggattcgacagatattttcttcttattcaagtcgattttccgccagaaaatttttttatgatagctaaataattggaaaagccacagtttaaacaaaaagttttgatgtataatttcaccgatatgctccaaatgtttctttatcattttgttgttttttaattcttgtagatttgaagcaaaagtgtttgactataagggcccttccgtgctgatccttcgccaaacttcaaacgatatttacgcaattgcgacagatgaagaatggaggtacaccaaacccaacggaaaaagggcgatcgatcggaaattggggggatttgcgaaacgatttgaatcggggagccattgtcccacttttttgcgtgccaaaacaatcaatggatggactttcccatcccattccattttttaaaggcacacctcaaaagcatttggtggtccctattccgtgctgttccaattttcgccccaattcgtccgtctccaattccctccgcccgccatttcttgcaatttcaaggcccgctcttcgccgcttggcctttcctatggcaaccgtttgctgatcgaagaggcgatggccaacgtcgggggaatggaagtgtggggctgtgcaggcgcagagacactgagggaacagagcaaaacgaagcaaaggcacgcacagcaggcggaacgaaatgcgaaa

SEQ ID NO: 80243 - DNA, 696 bp, Heterodera glycines
cggaggaattggaaagacagagaagtgtcgtcattattggcatgccagagcacaacgacagttcaccagcaaagcgggcagagatggaccggtcaaaaatcaattgcttattcgattcgctggggatcgaatgcggtaccattgcctatcgcatgggtcgttcctttaacccagcccaaaaaagtcctcgcccattgaaaattctcttgccttcccgtggcttccaaaaacaggctctcgctgcatggcaaaaaaaaacaaaacaccattcgggctgctgattcgtctctgcaccatgtccgtctccgtgaatcgctgacaaaggcacaattggaggaacgccgtcgcctgcatttgcaatgcgttgaaaaacgacagaaagatgggcaagattggattgtgtatgctgggaacgttattttgagagatgaagtgcacatcttccggagtcagtcaattcgtgaatcaaatttttaaattttacaccaaatcacaaaaaaaacaaaacacttttacaaaaagagtagattacactttccggtcggaagaagaaaattcttaccaaaatataaataattctaattcactaccactaaacaaaggggatattaattctttagaaggttttatctgttgcttaactaatattcgctctataatgaacaaaactgatgaaatttcactggctttaataaa

SEQ ID NO: 80244 - DNA, 663 bp, Heterodera glycines
atcagcaaatgataaaattgtaaaacattgttctgttgaaggtggcatattttcatcagatcatttagcacagctttttgtgctgagtgttccagaaataagaccaaagcctaaagaaatttgcctaagacggtttactccgtctaatgtatcacatttaaatgctgtaatttctgctagattaagttctctttctctttcacattttagtataaatgaaaaatgctgtgccttcaatagcgccttgttgaatgccttgaatgagtgtattccaataaaaaaattactaaaaaaaagatttagctccaaaatatccacaacatttattggcatccattaaagaaaaggcaaaattatatagacagtgtaaaatttatccaacaaaaaaagcactttatgatagcattactttacatataaaaatccaaaccaaaaaaatacataatttaattgaacataaggctatttcaaagggaaaaaattcaatttttaaatacattcaaaaacacaatgtcaatccctttgaaataccaaatttagtttttgaaaataaatgctatcatgaaagtgaagagaaatcggaattatttgccattttatttgcaaattcatttaataactccgaagttgtcctaaacgatttaagtttggacaactcctatg

SEQ ID NO: 80245 - DNA, 1041 bp, Heterodera glycines
atgtcagattgtatctgggaaatttacaccgttctggataaaattaatgcagagtctgaaagggttgagacgatgtggcttgagattgaacgttctaaagatttcgatcagaccacaaaacttgaggagaaagtatttaagagtttaaacgaaaccaagaagttgcatttcgagtcccgtcggattcatactaaaatattggagcaagaaagcagttcagtctatagtgttgggatttattgagcttcacgagtaaaatggaggcaattcagtataattgtcacgtaattaacaaatttgggatcaaaaaacatattacaaagtttattttttccggtgcatctgattgtgaatttaaacaatctctagaaaaaatattagaaaatgcatatataaaagaatcaggaatttttaaaacaattctaaaactacaatattctaattttctagtagtcttgccactacgattatcacaggaaaatacaattgacgttcttttagaacaacctatattttcacacttttttaccattggatgataccgtaatttttgaaataacaattgttaattttaataatgacaactatagaccaagaaattaattttataaagacacaagtcgaaaaggcttggaaaaggggtagaaaattagttagagaagcagataacttggtatcttatgcctatgagctttcgaaaatagctgagaattatattacataactaaatacaaaaaatttgatgatttgccaacgagcagagaaaattttgaaaaaagccaagaattttttgatagctatcaaaatcaactcacaaatgttagaattgacttagaaaaattaattcaaaaaatacttgagcctaaacaagtagagcgagaaatattctttacaccctaccgtaggggacagtccaaaattaataagtcttatgaaatatattatacaccctattatacatcgacaattaaatgaaatattttacattccatatagaagggattaaaatttaaaaaatcttaattccttaaaaaactctaa

SEQ ID NO: 80246 - DNA, 1224 bp, Heterodera glycines
  unsure (1)..(1224): unsure at all n locations
atgttggatcacccagagaaagtggaaaaacatatgtatgtggtaccgttttctgtaataaagccctgggtctccgttttctgttcgatcgttaaaagtggacccctctaacggaacaaattgtagtaattatttgagcccgggagccgcgcaagatttttgtcttgggctctcgtacttacaattcaatgacattgaaatggttttaacgcaaaatcaaattgttactgagattctgacctcatatgcttttgtgccaaaattggcactgaatttgccattttccttatgggtagaattgttgatttattcacccgttttcccgttttaaacaaacacctgcaaaaggagaaggatggatttatcacaggggatgttgggctctaagggccttggaaacaggaaattttggaggctgttaaaaaatatccaaatttacaacaaaaaattcaaaggcttttagcttcatttgcggcgactgctggctttcgctgttccatttgctgccacctgacaaagttgggcttgaaattgcgctgctcagctgccgttttgacgctttggttgatgagcacttcaaaacgcggcattggacattgggcattattgaaattcgcaacaagtttcggcgttgctatcgggctaccggcaaagcggaaatggaaattttaaatgccgaaggcaatgcgatgccaattccggacagaccattgcccaacaaagtcgtcgggttcggcataatttgcacagagtaagtagtggtgatacacatatgtttacattcttattctcattgagaaaatttgtattaaatccaaaaaattagacaactcacaaaatttttagcattttgcgcgggaaatggttcagaaagttgttacaaagtatctttattgaccaaaatatcttaaagaatgactattttccgattattttttacgccgcgagtagagtgtcacgggaccgggacctggtactgaaaaacacggacaactgaataccgaagtcccggttttgaccagttttgactgggaccgggaaaagtcccggttttgccaaaaattcccggccccttgatactctaaccgcgagccctatgattatataatagataccaatgttaaatttagttgacgttgacaaaagttatgaatagggaacagatttttaaggacgaaaaagtacaaaataagggncttaaataagtgcgaaaaaaattggtta

SEQ ID NO: 80247 - DNA, 440 bp, Heterodera glycines
atggagacacaacttggccaagaaaatggaaatgatttggctgtggaccaaacgaatcggacccccattaaggagattgaaaaagccaaatctccaattggccgaagtcaaaatgcgccgcgaacatcagcacgcgccaatagggcacctcagcgattggacatggacccgtcgaagccgaagtacgacatcatccggccatgacatctcgcgcaggagggacttttccaaagaagggaggtgttggataagggaacacacaaattattgattatattttccctttctttccctctcgcattgtctctatccccgccccttgaccagtccataaatatgtctccctttcccccactccgggcattctcccagtcattccaccatttcattattttatttatttattccctgctgtcctccatatttatttgtttaataaa

SEQ ID NO: 80248 - DNA, 1139 bp, Heterodera glycines
atgccccttggccaacttcccgttttggaggttaacggcgttaagttctcccaatccctggccatttcccgttaccttggagaaacttacggtatttacagtaattcctttttgattgttgttttatgtatttgaacaaaaaaggactatcgttcaatgatccgctggaacgtgctcttctcaatatgatcgtcgatcaaatttcagacactcagaacagcggtgccttcaaagaatggccaatggtccgtttggacttagtgccgtgcggagataaggtaattaattagcaagaaaacattggaagggcagggaacagcggatttgaatcagttaagattcaatcagtgtaccatcggtcaattccatataattttttttggtcgtcgtcctttttagtcgctattttaggcggcttttttccgagaaaagatacgcccgcagttggacggatgcgcgagtttagtcgagaaatatttggtggagaaaggcgacggcattttgcttggcaaagacaaagtgggactaaaaaatcagcagatcacaatcagtgctgaatcaaccgcacatttctcttagatcacttgggccgatatttatgccgctgaatttttcgcaaaatgcattgattttggagaaaaagactgcctcgaggcgtaccctcaaattaaatcactgatcgctcgcgttcaaaatgagcccatcatcaaggaggtacggtagaaatacaattaatccgaaaaatcacaaggccaatttaaagcggtttttgccattttccatgagaaattaccacaaaatatttagagatttaaaaatattaaacaacaaattgatttaaatacaaaaatttttttttatagtaatagcataagtttcaccttcagcacattgccgcccgagaggaaaccaaattttaaaggaaagaaagagaaaaacggacggacatgaaaggataagccaaatactatgacaattgtgctaactgtttttgcacattaactaattaaaaaattttcaattcttaggggtgtattttcccgattttattgcatttttaatggaatttttcgaaaaaaatgccaaaaaaggcatttaaggcacgaaaatcctgaaaaaggcaaaaaaggcataataaa

SEQ ID NO: 80249 - DNA, 112 bp, Heterodera glycines
tagagaccgcattttgaagcatatgccttttttttttgcgcactagtttcgatatattaagcataaaaaacgctgtttccacttggtttgaggcttctacgttgacttttat

SEQ ID NO: 80250 - DNA, 847 bp, Heterodera glycines
atgtcaagcggacttcacagcaattttttgaatcgctgtaagcaaacgattggcgttttgttttatcttggccttatgcttctgcagccgctcattctgctcgcagttgtcgtttcgttcgcctcgtccccaatattttggtcaaccaaaaaaataaaaaataaataaaagaaaaatattttaaatatttgtttgcttttcttcaggttttgcgcttctctttacctcatttggtatatttcggactttgaaacgccgcgcagtggcgcccgcttcagcgaaagcatttacaattggtcaatttggaccgatttggccaactttttcccaatcgaagtgattaaaacagcggaaatcccgcccgaccgaaattatatttttaggtaacttttgtgccaagaaaaaattataaaaaaattttagtgcccatccccacggcattctcggcacatcgagcgcaattttgttcagcacaaatggactcaactttagaggactttttcccggcatcaaaatgcatcccgtgactttgggaatgaatttttggatccctttccgacgcgaatttattttggcaatgcgtaagtccaatggttttttttaattctgtaattacttcatttagggattatctcaagcgatcgggagtccattaaatacgttctctctcttcccaaggaagggaatgccgtcggaatggcaccgggcggtgccgccgaggcattggaagcccatccgggaagtcaccggctgattttggccaacagaaaagtgaattctcgataatgaattaaaatttattttcgtaatttaagggattcatcaaattggccatccaaaatgggta

SEQ ID NO: 80251 - DNA, 375 bp, Heterodera glycines
atgtcttcatcattggtcctaattttgcttgtccatttttgtctcgctaccaatgaatcggaggataaaaacaatggcatgttttatttcaatgaagagggaatatcatttatatcgccattattaccatcattagcttcatcctcttcctcattagcttcatcctcatcatcttctaatttcaatcaaatgacattttatcaagcaattcaacaattgccatttgaagaaaacgaagaacttttgctgttgtgttcattttctgaagtgaacgaagacaaagtaccaaataaatttaaagattatttaaaaatgcatttaatatttaatttgggcacattttctaatttagtactattacaaaaccaacgatag

SEQ ID NO: 80252 - DNA, 676 bp, Heterodera glycines
atgaagcccgaagcgaggaaggagggaatagagcagtatgggatgatggtgacgtacgtgtcaataacataatgccaagaaaatacgaaatggcaataatacaacaataataaaagaataaaataattttcaatgatgtgttttcatatttattttttttattttagttatttcaacaatattttgatctttaataagtgggaagacccaagacaagttgcgacaaaatgtgatggataccattgctttcttatgactgatcagaatgaagtaaacgttttggcagttcggtacttggacaatcagtacgaacgggcaaaacgtgctaacaactggtacaatgagaaagttgtcgaaattgcaaacgtcatagagtaaattattcaattataaattaaaaataattttttaaaccgctagcagtttgaacaaaagaaatagaagttttagttagcttaaagagaaaaaattgttttagttagcttaaagagctttaaattaaaacctttttgaaacattaggaaaattaaatcatatataaataattagggccgccatttataaaattctgcgccttgacacgcacaaataagcatggaaaatgggtttttagcttagtttgggatttctacgatgactttatatgaatttcggaaaaattcttaacaaaactgaa

SEQ ID NO: 80253 - DNA, 796 bp, Heterodera glycines
cgttgtcggcttcagtcccacgaggagttggacagtgctcactccaaggcattgggtgagcatgggaaggaaatcttttgatttcaaattgtggtttaagaggcctccgaattctttttttaatcctagaaattttcaatttttcccctttctttttgcttttcgtcagccaaatttttttctcaccgcaaaattttgcgtcaatttttgtccttaattttcatggcatttcataatactatacaatacaatcagcaagaaaaaaaaacgatgggttcaaagactaatcgccccaaatccatcggcggttgttccattctttcgcggacaaaacgagcgttgcaattgcggcaaaacctgtttaagtgtcaaatgttgtgtgtttttttgcacacgccgacattttattcgttttattttgggagaaattttctttgcctcggcagccctttctttgttctcttttcttgcgcaacactttgaagggagtgaaagtgaacaatgatgaaaatgaatgggaagcaatggaaaattttaaaaaatcgccaaatttggttgcccaaattgttcattttttgcacacattttcccatctattcccccaaggcatttctggacgtctccaagtgttctacaagggccaatttatgctgacggacgcgccggagggcgctcgggacgaaacgccgggggcgacgccgcaacaacaacaatgaggactgaatggtgatgatgatgatgatggttgacctttgatcgatggtcgctttcatgttttttcttcatgggggaagca

SEQ ID NO: 80254 - DNA, 1090 bp, Heterodera glycines
atgtgttggaagaggtacaaaagtgataaaagaggtacaaaagtgatgagaagaggtacaaaagtgattagaagaggtacaaaagtgattagaagaggtacaatggtgattagaagaggtacaaaagtgattataagaggtacaacagtgattagaagaggtacaatggtgattagaagaggtacaaaagtgattataagaggtacaacagtgattagaagaggtgcaactgtgattagaagtggtacaacagtgattagaagaggtaaacagtgatcagaagaggtagaacagtgatgagaagaggtacaactgtgattagaagtggtacaacattgttaggagaggtacaatattgtttaaaattaaataaataaggaaacgtttttattaaaagttaaaaatcgagtgcattttaatttaaaaattttttaataataaaatactcttttattaattaaaaacaaccttggaaattattaattgaatatttatttaatttgaaattaaatgaatttttttttacaaattcaaaaataaataatgaaattctttaatttaaaaaaaataaatttaaataatttaaaagaaatcttcaaaaattaattaaaaacattgtaaaataagccaaaaatacaaagaaaaataatgttacaccgtccggattcgaacctgctgcccccccccccctcagaacatgtcccagaatccccaatcacacagggattctgagggcttaacgatgtcaaacgtaaaatctgatcacgtattcgtgatcagcggcctaaataacccctaaagacatgtttttggaagatttttgtcgaaaaaattttttcactcaaaaatcctggtcacccccctttggtcccgaatcccaaaatcacttttatttttataaaaattcttaaaaaagtgataaaaatgccaaataaaatttaaataatagagcaaaaaactgcggatttttgtagtattttatttttccagaatatcttttcagaaccgagttatgaatttttttctgaaaattcgaatttttccagaaattctggaataacttttttccttttttagatagaaattccaa

SEQ ID NO: 80255 - DNA, 1330 bp, Heterodera glycines
agtagagcccgctctctgatggccattctgtttattgccataaccttctatcgcttaccgtccttcatggtcgaacttcagatcaaatggcagcccgtgtttcgcattcagaaacgactcgaaaccacagaagttaaaggggcgaccggtgtggaaaaccgtagtcatacggtgccataccgtatcatgggctaaggcaggggggggggagtttgcaccgtcaaatctgtgccggctgagctttcctttggcccttattggccatgccattgcaaatgctcatcgcttaatctttggcttgtcagatgctttctccctatcgcatttggctttattccgtcatcgatcccatcgtttcgcattttctgccctttgttctgatgtgcgtcttttcgctgctcacactgtgtgaaattgtgaagagtcgacaattcgcctatgctcagttcagtgtctcatgcgactcgcaaggcgcaattgtgaaaaggcgaaggtcgagcagttcaaggcgagtaaacggagaaatgttgggaaaattggggagaaatggtagaaaaaaccaggaaggatacgtgggaaaagctacatattttaaaccgaaaggcaattcactttaagccatccattgcgaaggcgaatcgacggcgtacggcaaaaacaaggcaatgtttgtgagttgggacggaagaatatgccgctttttgccgattatagtggccaaatgacattactttgcaaattgtcatttgccttttcttcagaatatcgggcaactctttccatcgttctgatcattttgctttatctcgtgctccattccatggaattgtacattttggctcggaaatggcaactgcttgcccaggtgggcaccatttcaacacatccaattgcattttccgactttatgggttctttcaaacatgactttgatttgccggctttattacaacgcattgccattttctgttcaggacgattgtcccacccgcgccgattacatccaatcgcacgtcagcaaaatcctctcggtcctttccgcctctgtcaatgcctttgtgttcatcgcattcacaaatcgcatgagaagtaaggcttaaatcaccaaacaaatcgttccggcatttcatttccgaggatatccccggggaatcttttttacatttgattgccattttggcatgccccctctattcattcttcagcttacatccaaatgctcattcgacgaacatcgcgcagtctttcgtcaaattccagtgaaccgccattacataaaaataagcgaaacacgaacagtggcatttcccgtgattgatgtttagaaaac

SEQ ID NO: 80256 - DNA, 710 bp, Heterodera glycines
atgaaatacggtggtggtggaacaccgacagcagcagcaaattttgaccaccaccagcagcaacagcaacaccaccaacgacaacaacaacagcagcaacaacgaggaggagtgatcgctggcaatacaaacaacgccaacagcagtaacaacggcggacaaatgttcgtcatggatgggcaaagctcggtaagtgatttgggacatgggtgatcactaatcacttgtcaaatagtgatctgatcaaaaggtgggggcgggggtaaagctgggattttgatcacttttggcaatatcaaattgaacacaattgatctgacccacttgatcactttaatgataaatctgatcaccttggctagtgatcaaaaagattaagtctcactcatttccaagctgatatgatcacatttattttggttgatcaatgtttgattaattaatcgattattattgttgattaaattcactaattgacaatgacaatcttcctctaatttattagtgattatccttcaccttttgctctggtcactctttgtaccaaatttcccccgtctgttcaggtgatcaaaacggcaccgccgtgccgtgccaatgccagcaatagctcgtccaccaacagtgccatgatgatggacttttcgcccaagcaggagcccatcgatttggccccgctggcacatccgtgccttcaggtcagtgcttga

SEQ ID NO: 80257 - DNA, 3614 bp, Heterodera glycines
atgcccacccagctggagcactactatgtggcttcctccaagggtggcattggcatgccggccggctacggcgccaccgctgccggtcccgcctactacgagtacctcaacgtcggctcggccgcctatccgacgcccacgcaaccaggcccgtccggcgtcgccggcggcgcgtccgccgcgctgctgcaaccgaccgcggcggcggttgtcgcgctgcagggcaccgctgggggccaaccgcacgcggcggcaccgcaccaggtcatacagagactttaagggctcaattgatcagagacgaccaattggtcactgatcaggggctggtcaaaatgatcattgctttgggtgttcatgtgaatttgcatccgggatgtgagccgatttcgaattcctgttcccggcacttttgcaggtcttgcccattcttgattctcgaactttatgtgaaagtctagtctaccaattcgaatagagctccaaattatgaaaagcgtggattaagagtccaggaaaatccagggcttggttggacccaggttcagattgagccctaaattcctattcgaaatttctgaatttttagatatggactttcatccctggtcctgcagaacatgtgcaatatttcattaatatcaaattttgtaattgaatttaattagggaggttttaacaattcaattggggaaggggaattgagcttagaaagacgggaccgaaccgccggaataagccaagttgtccttgacagcaagggcatagccaaccccttggcttcggggtgggttgaatgtatttttatttttttaataaaaaatcttaataattttattttaacaatttcttacttaattattatattttccaggactggccctacatgtcctattcgtccgtagccgcccacgccggactccaccagcagcaccagcaacaactgcaagcagtacagcaacagcagctaaacggctacctggacgtcgtcatggagcaccagcaacaacagcaacaacaacagcagcagcaacggttgtattgcggtggcattggcaccggcggcggcaccgccaatggtgcggagattttcttgttttttatttttttatatatttccctcatttttttatttttgatcattacctaatcacttttggttcggctcttcaggtgtatttaatttaggtcaagcaaattcaaattttagcggattattttggaaaatttcaaagttcttgagaagagaacataagtcgaggccaaaaaaaatcaggaagccttttgaagagcctgatcacttttcagtgggatcgtcgaaaattttcaatgggatattttcttcacatatttcaagtgaattgttgctttttgatcgctttgggcactttaatttgtccatccctattccgatcactttttgtcttgatcatttttcaattcccgatcactttatgtctttgggaccgtttttcgttcattacccaaaaagacgaggccattataattcattgtttgccactgatcaaattaacacaaagcgttgcgcaggtaaagcgatggacgcggtcacagccgcaacgctggcggtgaacgcggcgacgggcggcattggcacggtgggcgccggcggcggcggactgctgtccccggtggactcgggcatcggcacggaactgtccctgctcgagcacgccaaacaggtgagagaattgctgattgatcagtcaaacttggtccagggattctgatcacattttgttcaattgatcaaaattttaaaaacataaaactagcgacctgtttgatccacggggcagatttttctgatcagtttatgattttcctattaaaattttcagcctctgttagtcagatctgaaaagtgagaaatgctaataaggctgatcaataattatttttaccaacttattatccctgcaattggatctgacggtcttctatattgatcagatattttctttgccagtatctgatcaaccagaagatctgctctgattatctgataaaaaattctaagttgatcgctgatttattccgatctgataatttctttgccaacatctgatcaatcggctctcttatctggtctgaatgatctgatcagaattctaagctgattgatttgagctctcagatttctaatatctgaaatttgacctgatcattttcccagttgcacgaatttttcgcgcccggctgttccctggcgtccgctgccgtcctgcaacttccgcagtccgtccaagcgcagcagccgtcatccgcctcctccgcgctgcaatccgtcatccatcaccagcagcagcaacagcagcaggaactcgttgccggagtagtacaacaacagacgcagcaacagaggcgggatcacaacaacggccgaagtggagccggcagcagtgaatcggtgaggcattttttggcatggcattttggcaagaggggggccgcacgagattctcggtctcaaatctagagaatttctctgtcttctatgtctcggtcttgaacccttggataagccccgatttggtagaaagtctcgaaaaaggtcggctctcgaagagccataattggcagtgtgatgtcgggaatggaaaattcatggcactcgcgagacgcaagattggcattagcacacctgtccaggcagggaaacaaggatgggatttgtcaatcccgagaatgggtgggggcccagattttcccatttcagtccaatcaaatctctctctattcccatttcagtgccacaaattcccccatcccatttcagtcccaccaccgtgagtcccaacaccgggaacagtccctgcccattgtgatccccaaattggaaaatcctttgggctttcaatacgctttggaggcgcccatttccacgtccattcggaaggaggacgatcggatgacatatgtgaacaaagcaagtgatctgtggaggcgtttttttaattttcattaatagtttttgttcgaaaaatcgaaaattcatttttttaaattttcatttaatttattttttcctccattttcagggccaattttacaccgtttcgcttgactacatccccgacctgcactgtcccctcaaaggcttaaccgtgagggttggtttattgtttttttgaaattttcaaatttttttcgaaatagtaaaaaccggtaattgccattaaggatggtttaatatattttcccgagactcttgagcattttttttaaaacacaaacacctccttccattagagcaaatctcgaagcttttgtgactgattttccaataccggcaaccattaaaaatagcggtttcaatttctggaccaaaatccaggaaaatccagatccaggaaaaatccagggtgccgaaaaatagcctggatcttgacctagatcaaggaaaaattcaggcctggatccaggtcgaggccgacctctaattaccaaggcattttgtaattaattaattttcccattttcagagtcaaattatggtcgttttccgcgaggacaaaacgtttgaggacgagctgaggacgtggatgttgtggcacaaacggcaacattcgcacaagcagcgaatcatcgaa

SEQ ID NO: 80258 - DNA, 1660 bp, Heterodera glycines
cgatttcttcaataaacgtgttttgatggtaaatcggaaggccaaggattacttcgagggtttctttgggactgtcaatttgttcaaaatgctgcaaaaagtggaattggatggctttttaaaataccaattgtatttgcatttttcttagtttgacttggacattggcacggatgtgaacttgtctctatatgaaaatgatgtgccaacggaccataattgtgccgacggcgaacgagcgactgccgccgccgtttggggacattttgggcggggacgggcggcacaattcgaccgaccacagtgctacaacgacaacatttggtatctgtgcgatgttctgcaggagttgttctgttcgtttgtcggtgcaaaatggtcagttcttttgtctgctcaccaaatggacatttcgttcagttatttgactcctccgaacacttccgcaattgcgccacattgggaggacaacggtcgaaaataaacgattaattaattatattcacaaccaatgctttttagatgcctttttgcttcaaatcgaaggacggaaatattttaaagtttattcccccgcaagtgataaggatacttcgccgttggattcgagtggcacaatgagtgaatcagattttgatggacgcgagccaacttttgaaggatggctggaacaaggcgacactctgtacatcccgaaggggtggattttcaaggtgaaacctaaatattagcaaaacaaaagtccctttattaaggcgagtgccggtgacgtccattcgctctgtgttttcggtgccttttccttcttttcctttgtttattttcccatttttaagtgtccatttgtcgtggccattctttcaccgactttcttgagaaggcttccgccgaattcgttaagacaatggtttcgggctcaaaacatcttcgtaagaatttgcctccgcttttgttcgacatggccgggaatagcggaaacgattacccgggcgaagaaacgctcgaggagaagtgggacttcttagcaatttgttttgctatttcaatattcctcctttgttctctcagaattattcccgtcgctgaagttttctctcgtaaatttggtgagaatttcgctgccttcgttccctcttacatcgatttgatggcccgcgaattcttccgtttcgctttacctccgcttttgacccctgaggaagaaacaaaaatttgttttggcggtgctattgactcgtcgttggacattgggaagaaaacggaggtcagattggtgcgaaagcacacccaacggtaagagactcctctgaaatcaatcccgaaaatcgattccatttacttttagacttctttttgaaaacgctgaaaaggcattcattgttcacagaatggcaaattctcgaagttgtgaagaatatcccgaaaaaacaattgattttcccattgaggtgaagagactgactgacagtcgtcggcttccaataattaattgcccgttcctttcagtttgaggacggattcgtgactttggtcgactcttacccgaattggttggaagtgggcgagttgggcttggaatcgcaagaagcgaacgtcgaattggccaaacttttgttcactaatggcattttgttggtgcaacgggaaaagagttttggag

SEQ ID NO: 80259 - DNA, 131 bp, Heterodera glycines
atggaagtgatcggaggaaggaaagagaaaggaggaatgtgggagagaaagaggagactgaccgaaggaagaaagggaagggattggaggaaaaaacgaggaagcctgatcaaagaggaagagaaagaagg

SEQ ID NO: 80260 - DNA, 159 bp, Heterodera glycines
atggctccgttgtgtcgtcacgcgtccttcccaatcggatcggctccccctgcgaggattccctcccttattgtgccgtatgggtggcctccaacgaacgaatttgtgtcgattcaaaagcgacgatggaaagagaatgccggaagagttgtctatttt

SEQ ID NO: 80261 - DNA, 530 bp, Heterodera glycines
cagagcagagaacacacgcaaattttgggcagtgaacaagcggccaaagtggtcatcggattcactccgtccgattgcgcctattataagaacttcctgcgcattgagtgcaaatcgcgcgatgaaacgcgcgaatattacgtaagggaaatggcacattgtcaggcatttgcaattaggacacatttttcgatttgttttaatattatacagcgcaattgagaaattcttaaaaggggcttaacaaatattaaaaatccgattttcaatgatgattttatggttatagagatatactagtaaatgaattgttcagtatataaattcctgattgaaatgactgtattttaaactgatttgtgagtatatttggaactgacctaatccttcgtcagtttttggtccatggttacggcggacgtgccgtggtggagccgacgatggaggaccgaagcgcgaacttgtgcttctccacgaacggtcaatttcaactgattgtacggtccatttcgaaatttcgtttttggctg

SEQ ID NO: 80262 - DNA, 1176 bp, Heterodera glycines
atggctgccaccggcgggtcctttgtttgtcgtcggtatttgcttaatgacgacggtaagtgatttgaaatggagtcattttggaaggtgaaaagttcaaataagttggaaaattttaatcataattaggattaagagttggcaaattttgtaatgaactctaatgacccggttcttcttcagaagtgtccgacactttcgacatgttggacatggacaaagacggacgactgagtcgcgcggaaatcgccgcactgctgcgcactgcgaatgtggaaccaacgcgcaaggagtggacttccttttccagggagatggacaaggacagtaagtgccattgactgtttaagcaagttccattcatatgggagaatcctgtacagtatgataggcatttgacgttttgtgatgctcgagaccgagaattttcctcccgagactcaagaaaaaccgagacttttctcgagtcgtgactttcaagtgcttttccacttcccccttttttgctttttttatttccattcaagagtctggcaaaatcaacagagagtcttttggtaagtttttggcattttgtacgaaattctctcccccctccctttaccttgcgttacagtatcttatctgcgttgtcctcccatcaaccgaattactgtcaaagagttgcgcgaccatttttcgtcatacgatacaaatggaaacggtacaatcagcagaggtaaaaacagaagagaaaaataattaaaataataataaaacaaacaacaaaagtaaaaaacagacaaatgaatggaaaatgggcaaaaaaaaaatacaaaaacaatttgcaggagaattgaaaaatatgctggcgaatattgccaatttgcacgacgacgacacaattggccaaatgttcgaacattgcgacttggacaacgacggacggctcactttcgacgagtttttgcggatgattcggagagagtaaaaaatgaaaatttccaaatattttggaatttattctgttaattattgtatatgaatatatatttttgatttttgtcattataaaataattctttctttttttatttttatcttttccttcttttttctcttttttagttaatttttggcgctccgccgtttaaaaaaatgtaatgaccgatcagtcgactgatttcattgccctta

SEQ ID NO: 80263 - DNA, 943 bp, Heterodera glycines
atgcacacactgctgaacgatgagtacgtgatggacgtgtgcacggagttggagacgcgcggcgatgactttgtgctgattctgactcgtagtgtaagtgagactgactctgaccaccctcgcgatcccgaccaatgctatgccatccattccttgagtttctattccatgcttttcacataatgccatgctattgcaattgcaattccattgcatttccactttttttccgtttcgcttttcattttcccgctttatctaaggtttggcttcatccgattcgccgtgagagtgacttgtgcaccgatgcactgttcttccaactgttgcccaattacctcgccggtctccccgtttctcttcgtgcggatggttccgcaactgcggcacttttggtgcatttgtcgaaaattcctttgattttcattgtttaggaggacatggcaattcttggtgctttgcttgtgttaagtgctcatcaaaatgatgcgaaaaagtcataaataattttaaaatgttttaaattatttctagtgatttttaggaatgatttgtctcttttcgtcccaaaaaatgttttgaacagtgccaatcgaattctttcacacgaccaatggcttaagcgcatttccggccgtgtccaaaggctgagctgctcgaacttcgcgtgtttatccccggcgaaagcgcggcaacgatttttgggtttgaaatgaaaaaaaggaaggaaataatgccaaaaaaaagaactcatcgaacgatggcatttgttcggcgccgccttttattttgtgcgtcgcgtttattggggtaagcggacgaacgaatgaagcgcatttaattaccaaagttaaatccgaaattcgcaaaagggagaaatgagtccaattcgacgccgggggcggcgattcttgcggaaaattgtgtgttggcggtaaataaa

SEQ ID NO: 80264 - DNA, 77 bp, Heterodera glycines
acttggacatttcgtggcctggacattttgtgggtcagcgagccgaaggcccccgtacgaggccgcgaagcggccga

SEQ ID NO: 80265 - DNA, 347 bp, Heterodera glycines
aaaatctataaaaaatttaaaaatgagaattcatgcgagattttctggaaataagcttaatagggcctagttaagctgtaaaaaaaatttggggcgatttgaaagagaatagaaagaaccaggttcgatgaagttttggtaagccaaaaaaaatgcaaacatttaaaaatctataaaaaatttaaaaatgagaattcatgcgagattttctggaaataagcttaatagggcctagttaagctgtaaaaaaaatttggggcgatttgaaagagaatagaaagaaccaggttcgatgaagttttggtaagccaaaaaaaaatccaaacatttaaaaatctattaaaaaa

SEQ ID NO: 80266 - DNA, 513 bp, Heterodera glycines
atgaaaaacgaatttaagcaaaaaggaagaaaatattcgacaaaagaatggaaacaaaattatgccgaaatttgtaagaaaattggagttagccaaggaataattgagaaatggaagaaacaatttggaattcgcagcaagagcataacggagaaagaaaaaatggaaaaaatcaaaatttattggcaaattaaaaaagaaaatccaaaaataagtgatcagaaaattgcaaaaatgataaacacttcggcaaagaatatttgcatatggaaagccaaatttggagaagaaaatttgcaattttagaagacaattgaatttttatgaaaacattgctagcaaatttcccaaaaatttcattgattgacaaattttatttaaattattttgttgcattaattttttaaaatttgcttaaaatttttttttctattaaattcttgccaaattacggtgcaaatttgtagaaaaattggcacaattcgccaaattttccagcaagggcagaataaa

SEQ ID NO: 80267 - DNA, 727 bp, Heterodera glycines
atgcgcgcaacgcacgtcggaatatggcatcaccggatgtgggactcatgcgtgttccactacatcacgcatgattcggcactggtgacttggcattgtggcgaatgcaacagacgttcttttcaaacttttgagtttgcaatgggcgacaagacagatcggtgagttaggttaaaaattttataatctttataaataaaattgactaataaagcgagttaaatttatttatttagttggggacgttatttgctgcaccaatcaaaggaacggcgccatgtcgtcaacatcgacgaagccgacgttcatcgggaattcatgctgatgcgcgggacgggacactacaaccttttttactacaactgcaagcactgggccgaagaatttgtgataaatagtgagtttaattgaaaacattttaaaaaattggaagttttttcttaaatggggcagtcgtcaatgcttagggcaatttctcgaattgaaacaaaaatgaaaagcacattttgttatcggaataattaaagaaaattaaaatttaattctatttaaattccccctccctttttctctcacttcttccttttccttctgttactcccctctctttatagacccgggactgaagtgtctaaattacaacgggactcaaatgaccaatgtattttcatgaattattattagtagggattctttttttatgtaagaaaaatcgcgaaatatgtaa

SEQ ID NO: 80268 - DNA, 1194 bp, Heterodera glycines
atgtacgaaaatatgtaaataaaattttttttaacggttacttttttggaaaaattcttcgtaaagggtgaaataggcataaaatgcaataaaaatgacccaaataggcctagaatcacattttaatactttaaaattaatttttggtatctgtttttgcaaaaaaaaaattgattttttagaggtatatttctcagtagaaaaatcccaaaatatgtaaataaaagtcccacttttgttcacaaaaaagaaagtgtttttcttactaattgggctatggagaatccaggaaaaaatatgtatttacataaaaaaagaatccctaattattagggctatttttacacgcatagaattattttgaatttatagcgtgtccctaaatttgcggctcgacaaatgcggccccagccaaaaatcgacatttttggcccgatttttgcggttctacattttttaactgttggaaatcggaaattagcggcccacaccagaatcggatttttgcggccaacggaaaagggatgataatttggcattctgttagtcgcaaaatcagattttggcttgggccacaaatgatgggtttttggggccgcaaatgtcggggcctccgatttgctgtgcataatcaattttcatttaaaaatcgattataattatttaatttttagttacggggttctggtgatgatacaaactgagctttggggcccaatttcaaactcgatttggccagtcgctgaggaaggacatttgatcatgttatgttttctttgattttctctttcattattaaatttactttttattttatttcatatttaaccgatttcatcattttattgcatttttttttatattctcgacttgaatataaattttacttttttattttattttttaaaaattaaaaaaacttgttttttaattttttatttcggcgggtgagggggtaattaacttttcctacggtctgatgtaaagggtttccgagtttttcaattttatgccgttttatgcactgtttcatttttcttatgctgtgcccgtccgatcattgatctgctgatccctttcccatctgctaatgcactcgccccaattgttttctcaattttccaaaaatgcccaaatatgaacataaaatctgcatataacttgtatcattattgatcagacagcgccgatgta

SEQ ID NO: 80269 - DNA, 216 bp, Heterodera glycines
atggacaaggacaaggacaataaggacaaaattgagcccaacggacgaagcgatcatccaaatcggccatgccactccgctggtacaaaacgggatggagtcggcacaaaaaacgggattctcccactcttcgaatccaaagcaacggcggctacagtttcggcccgcacacgatacacgccacagttcaagactttcgatgtcttaattgtttaa

SEQ ID NO: 80270 - DNA, 350 bp, Heterodera glycines
acatcgaaagtcttgaactgtggcgtgtatcgtgtgcgggccgaaactgtagccgccgttgctttggattcgaagagtgggagaatcccgttttttgtgccgactccatcccgttttgtaccagcggagtggcatggccgatttggatgatcgcttcgtccgttgggctcaattttgtccttattgtccttgtccttgtccatttggctgtggtccgtgtccgccgagacttgctatttgcctcatttggggtctgtgatcaatgtcagcgccgtgttagtgttttgtccagtcgtattgtctcctcaatgtaatttcgggttaatcgttggcacggccttaacacatca

SEQ ID NO: 80271 - DNA, 780 bp, Heterodera glycines
atgctgtcatattttcgaaaatttgtctacggatttgccgaaatacatcaacccatctacgagttgacaaaaaatgaaagcacgacagaatggggaccaccacatgagaaagccttggaggaattgaagacgaagctgatgacggctccagttttagctccaccaaaattcggacaaccattcgttgtggaaacagatgccagcataaaagcaattgccggatgtcttctacaagaaaaccgtgaaggcgaagtccatccgatttgttacttcagccgagtgctaacaaaacatgaaaagcgctattcggtggtcgaattagaagccttagcaatttgtgcttccctcaagaattttcgaccatatttggaaggagctggaaaatcgacagtgatcacggacaatttggctttgacatcattattccggcggaaggacttggaagggcgactcagtcgataccaattggctatcatggcattcgatgttgaaatcattcatcgccctggaaagcggaaccaattttgtgaccatctttcacgatacttggacgacaacgacacacaaattaattggctgaaaattgaaccaaaaatttcacaaagtgaaatgcgcgaggctcaaaaacaagagacggacacacaaaagagacgggaaactttgaagaaggatcaaaattcagaggaaccaaatgaattctctggaaaatggaaacttcggaagatcttttgtgtgcaatggacagaggagaatggaaaatttatgtgccaagcagtctga

SEQ ID NO: 80272 - DNA, 764 bp, Heterodera glycines
atgatggcaaatgtgagggaaaggatttatcggtgtctttttacgctgtcggattttttaaaggggctcaagatgttcaaccataaatttatgtggagtcaaaacgaagaagaggcgggcaagatccgcgagcatggtcagatgttcgtcgggggctttgaagtgacgccgggaacaagaatcggcggctttgagatggtgccgggcccattggttcgcggtcaactattggcttttattaatgatctgaatgatcgatttgggaatgctaagaaggattgtgtgaagctggcggtgtgggcgcaccgcgaattggtttgatttttgggagatgagatgagagggagaagaggggaggagagaattatgcaaattggttgggggggaagagtgaatgaaaatgggatgagggagatggtgtcatggcgctttgtacaatttctaaggtgcgcattcatccgttttttgacgccaatggccgcacggcccggctgtttatgaatttgattttgcgccgcgggatgcgacgcgggccggtcacgcttgatgaggggtggcgacaggagtattaccgctgcttgaggcaaagggacctcgcaagctttgaggcaaaaatttgatcaatctgcagggcggaaataattaagaatttttaaaaattttaatgggaaaattgttaaaattatatatcatcccaccccttgatttatttaatttatgttcaaccatttcatttcacatattttgtattgttatttgtttca

SEQ ID NO: 80273 - DNA, 669 bp, Heterodera glycines
atggacatagatgcgctcaagagaagggtcacgacacttgagcggcagttgcaggaacatgccaacccgcgcactggtcttccacttcccggcactttcgacggaacaacggatttttacaattatttgaaatccttcaatcttgtggcaactgcacatggctggaaccccgcccgctgcgttcaaattttgcccttgtatttgcgtggttcggccaaggccatttatgatggcttagaccaaaatgtcaagacaaactggaaggatttggtcgacggtcttgcggacaaattaaagaaagtctcttccgggctgatggcacgacaaaaattggcgcagagaagacaattcgcgggcgaaacattggatgaatttgcgcaagaaattcgaagtttggtggcaaaagcctacccggacaacacattggagatggacttggccaccttagctttgggtgatcgcgagaatgaagtgaaggaagaaaatgcaaaacggattcagcaattccgatcggaaattgcgcgcgactttttcagagcgaatatgctcccggagataaaagagagggtcatgtacatggaggaaccccaaaacctgatggaagctcttactcaagctaaacgagttgagcaaattcaaggaagcttggcgaatgatcagtggcggatg

SEQ ID NO: 80274 - DNA, 2880 bp, Heterodera glycines
aaaactaaacgataaatacccaccaatcccgaagcgttgccagtctgctgagagccgaattgagccataaaaattaatattttaataagtaagagaagtacgctgaaaaaatgggattagaaagagatgcataaaaccatcaagaaattgtctatcaatttttcaaaatcttcagcaaatacatgaaattttaggtgaggcatgtcccgaaaataatattaatttgactgatcagcaacaacaacagcgtgtactgttcggaaactgtgacgccggcgactcgttcaacgggctgttcgagaaccctgaacaggaggtggactttgtgctcaaaacgagaacgtttaataattatttgttttttttgctgtttttaaggttgggtttctgtgccgaaacagcggacactgaacacattttggagctgcacaaagtgccggaaaccaatggaagatttgcccattttccggcccgttgttcgcctcgccaactaatcgcccagttcatcgacattcgaagggcgccttctcggttaaatttactcttatgccgattttgaaatattccttgagggtcctttcctagggatggcgaggaaaagagggaatgaatggctcagttggttaaatttgcttttttgagtgaggcctgggttcaaacccaacttcaattaacataaaataagttatatttaataaaatagctctgatgaggcattaaaaaatttcgacattcattggtccttcatcataaacgctaattttgaaaaaattcaatcgatttttggggatatttcgaccaataaactgaaaattcagttgaattgacgaaaaatccccccctcccccctcgaaggcgtcgtgaaattacacacctttagtagatatataagttttttaaaacagcaaaatggatggaaaaatggtgacaattatgccagcaatttccccgctttcagctcgctctccgagtctttgccgaccatgctcatgagccggctgaacgtcgtcgactgtggaactgtgcagtgcccagggggccacggaatttaccaaatttgttcgacaggtgttattttacgaaaaaatatgtgtggccgtttctgttacaaaggtttatgtttattcttcttttttgtacaatttttcaaaaatttacttctctcttttttttttaattctcagaaacatcagaaaaaatgatcattttatatgtttcatcatcatgttttttccttgaattgtatatctattgtttttttcggtcgtttgtccatttagtttatttcattgccatattcacaaaggtcagaaatggcacccatccagggacggtcccaggaaattttggcgttgggtgggttcgcccccggacgatgacacattttttaccttccaggggtaacaatttatcaccaaaaatgataattttgttgatttttggaaaaatttcgcgaatttttttttgagaaatttacgtgagggaaaaccgaaaattttagcgaaaattcaattttcccttttctttttcaggtactcttccaacagttcaaattctttctcaacctgtacttcctgctcatggcctgcagtcagttcttcccggccatccaaattgggtctccgatcacttattggggtccattggtcagttaatgtttcccccaccattttatgggttcaaaaaatgtttcagggttttatcctgttcatcacactcatccgcgaatttgtggacgacatggtccgactgttgcgcgacagggaggtgaacagtgaaaagtatgcttgagggccgtgttctgatcaaaagcgcgtacgttttccatcgttttttttttgaatttggaaaaaaaataattaaaaaatcaaatttttcgaatccgggccacggaaagggatgaaaaatttgccttttgtcacgtaatgaatgtcactttaagcgaaatccatgttggcgatttgatcatcattgaaaaggaccgtcgagtgccggccgatgttgtgctgatgcgcaccaccgaaaagtcgggcgcgtgtttcatccgaacggaccaggttttggcgtccgaaaaaaacttgctgaatttgttgatgggtttagcttgatggagagacggattggaagctgcgcattgccatcccgtacacgcaaaacctgttggacgacatgcaaattttggacctgaactgtgaggtgtatgcggagaagctgcagaaggacaaccacgcatttgtcggcacataccgggtcagtgtcatccaaaattccagggaaaattttgaaaaaattttaagcgattttttttgggaaaatttttaaaaaattagggtaggagacgttacgggtggggggagctctatctgtggagaatgtgctgtgtgttgtgggccaacacagtgttggcaagcggtacagccattggactggtggtgtacaccgggcgggagacgaggtgagagccaaccgacaccaatttttctatacaatttttttgccaacgtttttggttgatgccgcctctatcatttacaaataaattcagatcggtgatgacgacattgcctgacagtaaagttggcctgctcgatcgagaggtgagcaaaatttgggggaaaatgttttaaatgttgaataaggggctacaaacaaaaggttacccgtcaagatttccagtaaaaggcccggtattttgaaaaaaacccaggctatttaagacctggttttccgagtcgaacccggaaaatttgcttgttaccccaccaaaattatcattcatttcgttaaatgagcccccccctgaacaggcgaacaactttaccaaatttgcttcctgttcgtgctcactttgtccgctgtgatggtgctgatgaaggggca

SEQ ID NO: 80275 - DNA, 1597 bp, Heterodera glycines
atgggtggccaaaaaaaaatccacttggtgtacgccgacaaacctgtcagtgcactggaggaggaatttaatgccgccgggaagctgtatggccagcctgtgcctgcactcggcgcgtacaaaaatggccgctcaactccaattgagccgcggctggactattcggcgcagtccaacgctgacgaccacccaggacttggctacaagtgtggccgttggcaggttaatggcttttaacaattaagctcttaaaaatgtgttttttttgcactccaggtcgagggcatggtgcccgaaattctcgaggaggacattggcgaacgtgtattttacacacaagcccaggtggagcaaatgctggacgactttaaggtagcttttaataaatgggcgagatttttttaaattttcattaatttaaaaaagcatttttctacgattttattactttttttaaagttatatgtgggtcaactccacagtgaatgaaaagttaacaaaatgccaaaaaagactatttttagcgctaattcaattaactgatcatgatcattgcctttttgtgattttattcactcataactgccttcttaatttgattactgattcagtcataactagggatgggatttctaagtttttacttatttttctgcggctttaactgaacgagaaatacacgaaaaacacattttttgtctgaaaattttgcgttttcacgcccttattcgaccttagaaatccttatttttgatgttcgcccttaaaataagtttttgcccttattttggcgttttgtccaaaatttattaacaaaaatgcaataaaaaacgaaaaatacacccctaagaatcgacccaaaaaaatttcgaaaaaatacacccctaagaatcgacccaaaaaaatttcgaaaaatatacccctaagaatcgacccaaaaaaatttcgaagaaatatacccctaagaatcgacccaaaaaaatttcgaagaaatatacccctatgaatcgacactaaatttttcaaaaatagaccctaagaaatgaaaaattttttctaaaatatagcttatttgtaactgcaatcagtgaataaaattgtttgccttagtctgaaattatttcatgtaaaaaacagcaattttaaaaattataccctaaatttgaaactttttcgaccttattttcgcccttatttcgcgaatttttcgcccttatttacggccttattttggactttttcacccttaaaaatcccatccctagtcataactatgacatctaaaaatatggatgaatatcgcgaaatttagccataaaataatgacaaaaaaaacgcaaaaacatgaacataaaatagcaaaaatatggtaattttgcaaataaggttacaatttaaatttcttcagatttgttaaatattaagagcgaaaaacaacctgagaaatgaaaaatacgcttttttgacataaatttataaatttgacgaaatttaaaatttttcaacatttccacgaaagtttcaaaaaatatttttgtggtaatttttttgaaatttaggggtcaaaaaaaccaattttcagacggggctgttctaa

SEQ ID NO: 80276 - DNA, 387 bp, Heterodera glycines
atgacaaagaaggtgttcgtcgagacggatgctgcggtcgatgggaggcgggacgcaattttggctggtgcccgccgtaaagcggcgttttatcagctgaaaaaaggtgtcgtcatgaggatggacagcatgtatcagcaacaacagcagacaggccaaattggacagaagggggagaatgaagcggagcaacagcaatggggcaaagcgcacacggaggaacaggccgcttttgaatttgtcgacgttgttgtgcatcccgaggaccttttcgtcaacgaaacgcacagcacttccacctttgtctaccaagccggcgacaaaattctccaaaacaattcactgcggcacagaatggcgagatttctgttgccaccaggagaattg

SEQ ID NO: 80277 - DNA, 629 bp, Heterodera glycines
atggtcgctgacggtgtgctgagcgagttggtgctgtgcgagtcgcgtccaacagtcgccgacgcggcggcgtcagcggagaacgctgggccaccagcaggcacaaccggcgacaatgagacgtcgccacaaccgcaccaccagcaacagtgccatcgaccgcagcgagtgtatgacgcgttgcggcaacggtcggccgaagttgcggactttttgatgcccactgacaatgaggcggaggagttgggggagggcggtctgttctacgcgtgtggcgacgtgaagaacatgagcagagagttgtgggcatgtctcagcgatattttgcagcgcgagaaaggcgagcgttatttggctgacttaaacagggacggcattgagcccatggttttggttgagacaaatcccgaatatccattcgttaaaaaaccccaaggtcgggcccactcaaaatccctgtggccgcaccccaattcggcccctaacccgacagggaaatcaggatagatttggtcgacttgatcagaccgaaaattattttttttccaggcttttcccctgtcgaagcgattcatttgttgaaaaaactgcgtgaaaaggagcgcctaattgaagatgtttggtcctag

SEQ ID NO: 80278 - DNA, 287 bp, Heterodera glycines
tcctcttccaatacactttggcaatgcggtgcgcccattccaactgcttttggcccgctgttgcgcacgcgcgtggtgcgtaacgaatgcgtcactcggacggacacgggccgaattggcaaagcaaaatgggagttggaattggcactgatcaccactgatcaggatggtgctgatgatcagcaagaacaacaacagcgtgaactgctcgaaagctgtgatgccggtgactcgttcaacgtgctgttcgagaatcccgaacaggaggtggactttgtgcttaaaag

SEQ ID NO: 80279 - DNA, 590 bp, Heterodera glycines
atgatccctaacaataaaaacactttttgcggagaaagagagaaaaagagagatcagcagagagaagagaaaagagagagaaagaccgagacatggaaagtgcaaagaaaatcttatgaattcataaaataataattattgtattattttgtaaaaaatgcaccagaagagttaaatgaagaaagatgggatggttcacttatatttatgatggacggcggcgagcacataaaataataattcacggcaaaacggtgacccaaaaaagaaacaaatttgaattggattttgcttatcccccaatattcccattgatttttatttcagcaaaatgatgacccaaaaatgtggggagagattttctcaaaagaaataccttcacaatgtgcaacagatagagaattttgtacacaatcaaatgtcaagtgttcaagatgaaaaattgaaaaatatttaaagaaatttagagaatacttatatttaaaaattttttgattaaaattaaattttaaaagataagattcataaaactttgaaaaatattccataatattaaaatatcaaaagaaaaattatcaaaaaagaataaa

SEQ ID NO: 80280 - DNA, 62 bp, Heterodera glycines
aagtccatgcgctgccccaactgctgcagtatttgaagcagcgcccgcaaggccgctgatca

SEQ ID NO: 80281 - DNA, 538 bp, Heterodera glycines
atgagcagaatggtcggacacacaaaaccaacctcggaaaaaagaaaccggtggacgcgggggaaagattaataaatattaaccatttattttcaaaaacgtttagaatgaaataataaaaataaaaagtatacatattatattaaattaatttaaaaaaatatataacttatcaaaacaaagaaaaattaaaaatataaaaaatttaatgaattttataaatttttacatttaatttgttgaaaacagaataaaagtttttgacttgcctcctcaatagcataatctatacaatacatatatttatttattttttaattaataaaaaaattataaaacatttattgttaataaaaatcgttttttataacagttgtttagatgttaccgaaaattaaacattttcataattaaaaaataataataatttaaaaattttagaacatccattatattcaaatctttaaaaacagctagatttatactataattagtaaaaaaatgagatatttttttatttttctgctactttattaaa

SEQ ID NO: 80282 - DNA, 57 bp, Heterodera glycines
atgttcacatctattaatcctctcgttctttttcttctgttttttgtggctggcgac

SEQ ID NO: 80283 - DNA, 181 bp, Heterodera glycines
caaacgcagaattaaagtacaggctatagggaagctattcccgaaggattcggtctccccataaatctgagcgcatcggttcggggggactgccccgaaaacaaaaaaatcgattttttcaagtgtccgtttggggtactcaaacaattatggggagcaaaaatccaacgcagaaaaacta

SEQ ID NO: 80284 - DNA, 770 bp, Heterodera glycines
attatttttaatggcaccgcccgtcaaaaaaaagaaaaagttttcctccgacaatcgccgcctcatttcttctaccggaattggtgaacatgaacaacaatcgatgggttcacttacgacatcgtttggaaaacggcaaagtctttttcgacatgcaaagaaaatgaacaaccgaattttgaggaaaatgtgagaataattgggctaaagttatgaatttcaatttaaagtctctcaaaatatttttcccgcatttagctggatttgcactgatatttggatggacactttcccgttctttgaccatgcccaactcggcctcaaattggcactgatttcgccacgtttcgatgttttagtagacaaacatttcaattgccaatctgaattgacaatttggagagaaataacaattgtcaaggacacaggatcagaattaaatctaactgtacggattggtggcaaatctgtgcaatttcctttgcccgaccgttcgctgcccaacaaaattcgctttgataatcttaatattgagtaattaaaagtttcatggcattattaactggtaaaggaattcatcccgttttcagttacattgaccattccgtcctcgtgtttctccgtgccaataagcaaatttgggacaaaggcaccaatttgagtttgtatgtgtgctggtcacacaaccagaacgacaacaacaacaatttcctgccaatttgggatgtttttgtttgtaaaatttggcccatttttgcgccaaacattcg

SEQ ID NO: 80285 - DNA, 91 bp, Heterodera glycines
taccgtatatgctctaattatagcccagtctctattaatcccgcagtctccaattatcccccagtctacgaggtgttttgaaaaataatcc

SEQ ID NO: 80286 - DNA, 465 bp, Heterodera glycines
atggaaaccgatttaataactttggtaaaagaaggcgattttgaagcgggtaagttaataaaacagaccctaaaccagtggggaggggcggcgaaggggttgcgtattgcacccctaacaaattggtaaacatagaaatttctaaaaaatttcaaggaccaccgaagcaatattatgtcgattactcaatttttttctaattttcatcaaaaacccaaaacctctaacatcactggcatggaataggttatgtatacatttgcatgcctttcagttaaaacacgtgtggacagcggcgaagattttcagtccggggattttagacgcaaaacgccgctaatgcatgctgcgagttctaaccaattacaaattgctcagttccttattgaaaaaggagcacaaattgacaggcgagacaaatccggtgcggtttaatcagcgattctcttgcttcagctcaataaa

SEQ ID NO: 80287 - DNA, 317 bp, Heterodera glycines
atgcttaaaaatgagaattggaattactttaatttaaatcatgttaaaatggttgaatggcatttgttggcattggcacttcgcaaagatggacaatgccaaaaatgggaggaaatcgaagacaaatgggaagaatggaagagcgaatttaacctttcatttggaaatacgaatgaaagtcagaaatttcaaaaattaatggaagaaattaaagaaaaaatggaaaatttgaaaaaaataatggaaaagcgtgaaaaggaatgattaaatgactataatttattttatcggatcatcgcaaatgaaaacaaagatta

SEQ ID NO: 80288 - DNA, 117 bp, Heterodera glycines
atgcgaatttggccctcccctttcgttcttccgtcccttcccctcgcacttttcctgcccatttgcttccgtgtcgttctgttgttgcgcttcggcgccggacgcgacgacgccgcg

SEQ ID NO: 80289 - DNA, 417 bp, Heterodera glycines
atgtccttggatttcatgaattttccccgttatgtccttgaaaatcggcatacccgtccttggaaacggatcattgacgatgagagccctgctttaaatgttttttgatcgattcaacacttttgaaaatttccaacgtttattcctattcatgccggtaccgttctattctacaaattgaaaataaataaaataaaattatatggatcaatttttaaggcgcttttaaacttcgaacaaaattattgggacgccaacgcttgtcacactgacctagaaatcattggtgacaaaaatttgacggttcattataaggaaagagcatctggtaattttattccaaaaataaaattaatgggctaaatttaaaaatgtattttttacttcgaaatttaagcgaattgaacaatacgttta

SEQ ID NO: 80290 - DNA, 814 bp, Heterodera glycines
atgatcttccgctctataaaagatttcttcaaaaggttggcgtttcgtcttcgcaaaacatccatttttgctgggcattggttcatcggacattttttactttgaaatttcagtaaaaaatgggggatggtaaacgtatctcaaggatgtataattttaaatttccatgaatttcagtggcgtctgcttcggatttggcgtaaaaaagcagccaaaatcggacgaaagaatgtatgatggcgagggcttctacacatatgattccaacggcattttttggattaacggttcatacaaaggaatgtttgagagaaatgcttacggtgttaatgacattgtcgggtgtggcgttaatttggcaactcgaaaaatatttttcaccaaaaatggtcatagaatgggtaaatttaattttacaaagtttttggatttattttaattattttcaggcgctttcgatttcgattcattttctgatatttaccaattgtttccattcgtttctttgccttactggagcgaaagaatagaggcgaattttggcccattttaaattcaatttaaatgtgaaaaaattcactaaaatgttcttttgtaatttttatgatcattggacttcaaattgtaaggatttttcgaagcatttctctcaatttattttaaacttcaatattattctttttttcgctttgatttatccaaccaacaaaaagcgattaaaattatatcttcagtcatttgattcgtttgggattttggggctcagtcaaagggcccatggctttccccgattccctcccaaattcaatccgga

SEQ ID NO: 80291 - DNA, 884 bp, Heterodera glycines
atgatggacaaattggtgcagcaaatggacaaagaaatagatgaggtgagcttgaaatgtgcttaaggaatttataaattaaatttaagctgtctttaaacatcggtgctggtcacaatgacaacaaaatcattggtgaaagaatttactgttaaataaattataaaaatatttaataattacctatattttaataagcatagaaatatttaataacattttttcaaagcatatatttcattttaaaggaaaaacaaaatgtcaacaagagtccgccattatgccaaggaaaggcaaaaaagtgaacaatgtcagtgatttgctacgtgggcgagaaatccaccgccaaacttccaccgtttgggtaaaactttgatgccattacgttttataaatatgccaatggtcagcaaatctaaaaacaaaaataaattcacatattatttaaagtattaatttttttgtccattttaaacttattattttttttcgaaaattaattaaactattaagagaatacttttttatctaataatagaaataaattaacattaacattcatatattaaaaaaagaatatgggatattttttattgatactttttcaaaagattttgagattttttaaataacatattctattgtacaacacttaaaaatacgaatatcaataatataaatttttgatgtttttaactagtgttattaattttattaatggactaccgtatcttaaggcgtttagtagagttcgacctggacctaggtgcaagcccggattttccctggttcaaggtccaggctattttcctggacatggatttttgttcacaaatttagcccctgttgaaattggataaatcattacatgctttttctcatga

SEQ ID NO: 80292 - DNA, 508 bp, Heterodera glycines
tactgttggaagacgtacctcggcccgttgctcgaacaaccgaagagcgacgatgaggagaagcccaagccggaaggaggcgaagaagcgacgaccgccggcgacaaggaggagaagaaggctggcagcaagggcgacaagcacaagaagtctggcagcaagggcgacaagcacaagaaggacaagaagtctggcagcaagagcgacaaggacaacggccccgctgacgaaaacaaacagccgcaaacgagtgcttatgtaagtttatcgcgtcttaaattaccgcacataattaattttttatcaggcaactcccacctaagaacttcaccaatgacgcattcgactgaatagaagacaacagatgaaaacaaattcagtaaccacaacaacagccaaaagcaaaccaacggaggaaaaagaatgggaagcgatggaaacggattcgaaatgatatttaatgccacaaaatatttgtatgtgtattatacataggtatatccggtca

SEQ ID NO: 80293 - DNA, 1880 bp, Heterodera glycines
  unsure (1)..(1880): unsure at all n locations
aaatttataacaggaggggaaatctttgaaagatttaaaaatttaccccagaaaactctttanncagaaganaacgaaaatataaactatgaagaagaaaagaaaatcgcagaaaatttgtataagtctatgaacgctgaccaaaaaattatttacgaaaataaaacaaatagcatcaggcaaacttaatcctaaattaatttacattgatggcccgggtggcacaggcaaatcatttacattgaatgcattatatcatttagtacgtagttataaaaaacatatgactagggctggtaaaaatatggatataaaatcgcgaaatatggccataaaatatggaccaaaaatcgcaaaatatggacataaaatggcaaaaatctcaaaatatggaaataaatggcaaaaatgtcaaaatatgtacataaatttttcaaattcccagccctacatatgacaaacatggcattttcaggaattgctgctacattattaaaaaatggtagaacaatacataatcgatttaaatttccgcttaatcttaatgctcatattatttctggagttgttcaaggcactaaagctgccgaagaaataataaaaagtgatttttttgttatagacgaagcgccgatgacaccacgatttgcacttgatgctatcgagaaaaaattgcgtgaattaactaactgtaaacaattatttggtggcaaaacaataattcttgcaggtgattttagacaaacgttacctgtaaaaaaatttgcagtaagaagcgaaattattgacctgacaataaaaaagtcaatattttggagtaaatttgagcagatgaaattaacaataaataatcgggctaaagaccaaattttcgctgaacagatacttgaaattggtaatggaacttttggcgattctattcaattacctaataattgtatcatagccaacgattcaaatttaatagatgaaatttatgatgatgtttttaaagaacgtaattttaatgaattaaaaaatcgtttgatactttcaccatacaatgatttggttgatcaacataacacagctgctttagaaaaatttcctggtgaatgcgtgacttacctaagcatagatgaagttgaaacaactaataattttccagttacaccagaaataatgaattcatttaatgccccgggattccctgttcatgaattaaaattgaagctaaactgtaagataatgcttctaaggaatattagcattgaaaacggactttgtaatggaacaattttacaagttaaagaattaaaaaacaatgtattaaaatgtataatacttggtggtgataaagatggttctgaagcttatattcatagaatttctctaataactgaaagcgaatttcctgttccattaaaaagacatcaatttccggttcgcttagcttttgctgcaacttttataaaaggacaaggtgcaacatataaaaaaattggagttgattggacgagacaaagtttttctcatggtcagacatatgtagctttatcgcgtgttggttcatggcaacaaattaaagttcaattatcacatgaaaatctaaatgcaaaaattgataacattgtatggaaggaaattttataattttattaaacatgaaaatacgaaaaacaattaataataaaatatttggaaaattgaaattgaaaaggagcttttaaggtaagttaatcgccacattaatgaggggggtgtggtgtgtgatagggcgggaccctattgtccctctaactatcacagaacccctcggctcctttgacacccatgctttggtgcgttctcgccgcgggtgtgatagtaggcttaaaagccgaagccaaaaccaaagcaaa

SEQ ID NO: 80294 - DNA, 474 bp, Heterodera glycines
atgctatttctttgccttctacagtatttattactaataaatacagtaatctatggacaagagtcaaatggtggcggttacggtgaaagttatggttattgatgacccgtaaaaacccaaatgaaacaaaaccaaatttaagctgtaaatggcaaatttggagaaggaaattggcaaactggacgattcgaaggccaacatggccaattcagaggcagaaattggcaaaatggccaaaacagagaacaaaatggtcgatcggaagttaacattttgacgagccaaggaggaggcgcaaatcatcgtcaagcagcatcaaattcttgtgatcagattcggaagagcccgtcaacagcgatcgaacagctgatcaaaggcagactgatcaatccgatcgaggacaattcacagcgttatacactgtacgcagcggactttgccaggacgaacaagtccggcggatgttttcctcag

SEQ ID NO: 80295 - DNA, 3383 bp, Heterodera glycines
accatttgactcttgtccatagattactgtatttattagtaataaatactgtagaaggcaaagaaatagcatatttttattttgttttctaaaattacatttttattttattttctaaaaattttaacgaaaaatccaaattttatttaaatttaaatttgattttttgaaatgaattgaagatgaccttaatttgtttgtgtatttttaaacattttttggcaataaaaaaatatttttcagttaatttatgtgtcaacaaattttattaacaattagggagggctccgactcaatttgacaaattacccaaaacgaaatgaaaagaatgcgcatagacaaaagaaaatgaattaattaattggtgaaaatgggaccaaaaaaaaatcattagtggttttaaaattgtcaaaactttttcagaataaacacaattaattcaattgcctaagtgtattcttaattggcctaaaaaatgtcaaaacggtttcaaagtttaatcaaaaaaaaaagtaaatttttgaatcttttatccaaaccttttttagggtttgaaaaatttcttattgaaaaacaggaaatcgagaacatgaagtcggtcgaacattggaaagagtacaaaattctctacaaaatacaaaagtccacatctctacgacttacacccatgaggtatgggcacttcaatttcggtgttgatcatttctactgtaaactgcaatattttcttaagaaatacagtactttttgtagacaccgaaattgaagttgacatatctcagcgggtgtaatttgtagagacctgaggtcttttacatattgcagagctttttgtgctctttccaatgggtctactcaaaattttcaaaaaaaatttcccaaccccctaggaatttttttttctaaaatgttcccgattttcagtattttggggtgtctagatcactatgaaggagtgatcggatcaacttgttgttaaatacttttttgatcagcatcaaaacttatgttagcatgaattatttcagatttttctgtgctctcaaatttgagattcaaaaactggtgttaaacatatgcaccactgaaaatggggtatggtacacaaagtcaactgtaattcgggtttgaaccgatattttgcttaatgattggtatcatttgaaagccattaaaaattatacaaaaaatgtcaaaacatttggtcatcaccaaccatttaactttttatgaagccaaatttctcgaaaaggctagtggtgttagacttatgctcctaactgtatgcactgtgaaaaaatttttaatttttaactttgttcacaaaatttattcacactcatacataatatgcaatgaagttttgtatggaaatgtcaccgtttttgactgcctcaacttgacctcaaatttgcactgattccacgtttcgatacgcgctggtgtacaaacatttctatgacataacttaattgacaatttggagagcaatttgcaattcgcaagggcaatggaatgccgaaatcatttttcgagggcaaatcttatggattcatacttggaaaaaaaattttccttgtgcacaggttttcttaaaatttttgcataggctagactatttttgaatcttttctactaaattttattttttagaaatttgttttctaacgttgtctcctgcatttttacaagggcatttttttaattagaggtcgtttttggctggcatttcactctagtaattgttttctttgtcatcacgcgtgttttttgtttatttttaaagttctgtgctttatcaaaatgcaaacatatggatgggcggagcgagtgagtaattgaaggctaattaatattgctgttcgagattctcggggtcaagtctcgttctcggaaatttttctgtagcgttactaattaaccgtaggtttgggtaaaactgcagaattgcagctcgcgccaattaaaaaaaatgcgaataaggcaatacgagatgcactactctgaattatgcattttattttaattctgcgcataaataaatttttggcattatgattcatccattacattagcataaactagcggtaggggtcaactgcgtctgatcaaacaaaattggtatcattcgaaagttctatatatttagaagataatgcaagtcttttataagcaattaagaaacatgaaaaaaagttaataattgaaaactgcagaaaagccagaatttttgtataccgtaaatccgctatttgaaggcccgggccttctattgttcaacccctcccaaaaggggcctttaattggagggggccttctaccagagaggggccttctattgttcaacccctctataagtcaaatgtgaattgcctattttttgtacctctatttattcattataagcatttttacattcaaatttcatggtaaatttgtaattttgaatcaatttagttaaacaaatttgcttataccaatttctctataagatggacccatcaattgaatgtggcaattcaactaatttagtaaagcctcgtttcttattcatttgttcgaataatttttattaaggtctgctgcttttgcaacaaacccacgtctggtgctcacgctgtgtccctttgttttactgcctaagaagagacctgtgcctgagattgtcaaacgttttaagaacgatttagtgttgtgctggtgtggccgtacatggatggacaacgaactaacgacaaagtttttagaggaagtgcgaatgcttatttatgtctttaaagaaattatgtaattaaggtgcttggcggttttgcattcaggacccggcttctcgtttgggacagctttcgttgtcacatcagtgacgataccaagcagacactccgacgtttatccatcgaatctgctgttattcccggtggcactacgaaatacattcaagtactagacaattcaatttaaatcaaagaaaattattttagccaccaaacgtgtgttggaacgcaccgtttaagaacaaatcaggcaaatttacgatgaatggatggtgaatggagagaaagaaacaacgtcatccggaaatatgaaggctccgccaatggagacttgatttgggacaagacgaaagcgatgtctctgtcgacgttgctaatgaataatatattgatcaaatttaaaaactgtgttttagggggcctttaattggagggggccttctaccagagaggggccttgtattgttcaacccctcccaaaaggggcctttaattggagggggccggccttctaccagagagaggccttcaaatagcggatttacggtattttattttaaattgtttttaaaggggctattccagtttacgcgtcctatcagtgaccat

SEQ ID NO: 80296 - DNA, 893 bp, Heterodera glycines
cactttcacagacgcgttacggtgacgcggccattcgtcgcgcggtgccgttggccctggcgctgctgaacacgtccaacccgcagttgacaatcatcgagacgctcagcaagtacagccacgacgcggacacggagacggcacggaatgcaatctttgcgctcggattggtcggcgccggcacaaacaatgcccggattttggcaattctgcgccagcttccactccaatgaccaggtaattattgaaaatgcagtaataaatgctaagtttagtgcagtaattagtaacaaggaggattttgtttctttgccactttttataaacgggaacttgggccctgacaaattccaccaaaagatatttcaatgatgatgatttttcatgtagagcatggttgatttactattgccaatttcggcttttttggctccgttgccgaaagtgatcagaaaaaatcgatcaaatgaaaattcaaccaaaaataccttaaaatttagtgccattttttcttacgttcaaatgaccatttttcatgggttcgggtccgttcggcagacgatgaattattttgatttttcttctaggtattattccacctagcaactttggtcgattttttctgatcacttttggcaccggaacaaaaaaagccgaaaattggcaacagtaaattggcaatactctacatcataaaagtgtcagcaattaatttttccatgaatttctcttgtttttaaaaaaaacattattttgcacaaatgcacatccaacacacagaacacgatgatgctgctacggatcacccagggactgatgcatttgggcaagggcactcaaacgttgaacccattccaatccgaccgtcagttgatgtgccccgcaattgtgcc

SEQ ID NO: 80297 - DNA, 1315 bp, Heterodera glycines
tgttcgtattaatatgcaaaaggaggagatgcatgtgatacgaaatggacgcaatgcgacaaaacatgacgaagtgcactccgttgacgaggcacatgaccatgtcagtggtgcaggtggcggtgcgcatcatgatgaagtaaattaattattattatggcgatggaattcatggaatttgaaaaatggacgaataaaatccaaaaagaaaaaaaagaaaaataattgataatgtaaaatgaccatctattttatgattttattttcagatgtcaattaatatttagaatgaaacaaataaaatatttaatagaaattttggcatttttaagtcaaattaattattatttaaatataaaaaaattggccacatataaactctcaattaaaaaaaacggaaatgatatgagttgattttaattagtcgggctgggacaaattaaattttttcatttgggtgtcatttttcgtcaataaatttattgttgatttttggaaaaaaatatttcatttttttgcgctttttcaaaaattttccctaaaactttttcattttaattgtttttaaaaagtttttccatttttgttatttattttttcttgacccaaattttaatttttgtaattttaattattttggaaaaatgcattcaaaaaatcgaaaaaatatcattatttgcaattgtaatccatgaataattttttataatgttatgagcagttaattattttttacacgacaaatttttttatttttcttaaatttggccaatatttctgacttttttcaatatttttgtcaatatttcggcattttttcgtaaatatttatttaaaaatttaaatatttcggtatttttaataaatatttgtcccagccatatcaattaggtccccctaatccctaaatttctcaaaataggtgcttattggtaaggtctctttataaatcacgaataatcaaatgaattccgattattttttttagtctttcggcgacattatggtccaccagtcaattcacaccattgaatatgtgctcggctgtgtgtcccacacagcttcataccttcgtctttgggccctttcacttgcccatgcgcaactctctgaagtgctttggactatggtaaataaaatacagtaattttacagtttattttttaaattgtttttttgcattaaaaattgtttaattttcaggtcctcaaaaatgcttttgcctttcacctcggtgtcgccggatactttgtgctttacttcatatttttcgcttttgctgttctgaccttttcaattttggtgctaatggagg

SEQ ID NO: 80298 - DNA, 1846 bp, Heterodera glycines
atgggactgttctccatccatgccggtctgctgtacaacgacgcgtttgccaaatcgttccaaatttttggcagcgcatgggcgaacattccatataagtaaaagaaaagaaatattaataaaaaaaaaacttaaatagtaaaacgaataaaaattgaaaaataataaaataaaattaaaaaaaaaagaattagaaaattaataaaaaataaaataacaaaaataaaacttcaaatcgtaaatttatttagaaaaaataaatattaaaaatcatgagctaaattagaaaaataaaaaagaaaaacatttaaaatgtttattaaatacaatatattagaaaaaaagtaaataactttaaaataaaattctttaagtaaaacaagagaaaaaattaatttaaaatttcataaaaaataaataatcataaataaaattaaaaaatatataataatgaaatttgcagtgacaccgaaattgattcatggctgagtaaacccgaagaagcggggaaggaaatggaggtccatttgaatccgatgactgcttatgaccgggctagaggaccatatccggtaaattacatttttaataattaaaaaattgccaataaaattagcacgaattaattaatgatcaatttagtttggaatggatcccgtgtggaatttggcggataataataagctaaactttttgaattcaatgaaaatgaagctcagtgtgattgttggcatcacacaaatgaccttcggagtggcactttcatatcgtaattataagtaatatttcttccatcaatatgatttttttggaaattctattttatttttcaattaattttagatttttcgaatcgccaattgaagtgttcaccgtgttcattcctcaattggttttcatgtcctcaattttcatttatctgtgccttcaaataattgccaaatggctgttcttttgggtggagccgacaacaattttaagtaaaaagcatctattttaaaataatttaatattttttattaattattttgtcttttattggaataaaataatattttcccattttagctcaagattatcccggaccgcactgtgccccttcacttttggtaagaaaattttttttaatgaacttaagcgaaaacaagagatgcattataaaaaaaaactattaaatgaattttgataatttagattatttatattcacaaaaacgacatttataataatattcagaggtcgtaaatttttattggcacaaacgaccacttctaagacctagaccccaaaaataagattttcataaatttcttcgcgcgacgtttccactctattggtactatctattatttcgtccaaatcactaaaatttttgcaccatttgaatcaaattttttaagaacaattaaaaatagcattgggaatttatttgcataatttaccaaaaaatgcatctctcatttattttaccaaatatataatataataaatatttttatttatttttttagattggtctcatcaacatgtaacgttttttctataaaaaaatcttttaaaattgcattaaattgcccaaatcaggttcatgttcaagtctcgcgatgctggttttcaagacgacaacgggaaggaattgcctggttgttacctaaaccaatggtaccctggccaggtgtgaattttataaaaattaaaatttaaaatttttaaaatttcttagtcatttgtcgaggctattcttgtcattattgcggtcctatgcatcccgattatgctgtttggcaagccgttccacattttaatgcatcagcgacgtgcaaaacgtgcagtctccgataatatg

SEQ ID NO: 80299 - DNA, 1995 bp, Heterodera glycines
atggttttttatacaacgccctttttcatggtttttattaacgactcagcaccctatttaagactaatcttatccgaatccgaggtaattggtaaatttttatgaatggcattgaccatggtcatccttttattatttcagaaaaagaggaacatcagtatattgaatagaaaaaacactttgcaggtcccaaatttcaacagaataaagaatttaaaaaaatttttcaatataaaagtaagtgtaatttgaattttggtggaaaagtgctaatcagttggaaccaaattactaatttaagtgaattatgaattttattcgaaaagtgcttaatttgtgttactaatttttggtctctatttaggatcaatcttaaattcttgacatgcgactgctaactttgctttgtgttgcgttcattattcccacagtattttcggctccaaaaaaggataaatcggttaaacttttaaaataaaaagggttcactatagagatgtgatttaagatgacttagataaatatattgtggttttttggtaggttgataaaaaaattcaaaatgaagatttgaggattaccgatcaacccggatttcttgccagttcacatttctttaaggttttttgagccaaatgagaatttttttaattcattgaccaataatcacatctctagtttaatgcccaatttaaaagaataattttccgaaaaattttttcttggtgtatttaactgttaaaaaatatattcttacatattcttttaagagagttttcatagtggaaaacgctggtggccgtactcaagtaacttaagagtaaaacaaatgaaaaatatttttagcttacagtgatttttgtttctttagattgcaattccaacaaatcggatgagtcaacaacaaaaagtgatataatcaaataattaccattattaatcacttaatgatctcttcctttaagcaaatggaagaagcggaccccgctcaagtgattagaatacaatttaaaaaaagaaaatgataattgcaatgtttagcttgtcaaaaaagcgaaaagcgaggataaggatgagatacttgaagcaatctctaaaattcgggaaatgctcgaggacagtctaaaaggtaacgcggacgaacagctgatcgacgaattggtctcagccgacgttttggatgctctcgtcgattgtttgtccaaagaccacgcgtcacggcccacactcatggcaaatgccatggcggcactcgcaatcattgtgacacgaaaagaaaagcttgtttttgaaatacaaaatgttatggattatttgaattattggctaatgaattcgacggacgacgaagtgaagaaaaatgctgtctcaattctgaagaaaatcatgcccaatgttcggattttggctgggatatgagatagagtatttactgaatttggtctccttgaaaagggggggggggtatttccatgggagaactctaaattctaaatcagggaggggctaattttttcaaattcacttttaaagacaaaaaaattatttagagaaaactgcaactgaattttaaagaattttaattttaaaaatatattttttggtgggggagactttatttttaacgctcgtctaaagaggtttttttgaggggtgggggacgtggttcttattcattagtgggagctctaattcagcaaatacggcaaattattcaaaaattttagcttattgcgaatgcaaaaagcagagatatagaagagagacttgaagcaatctctaaaattcgggaaatgctcgaggacagtctaaaaggtagtgatgttcgagagtctcggtctcgagtctcgactcgagaaaagtctcggttttttttggtctcggtctcgagtctcggtctcgggttttcagtctcggtctttgagactttcgagactcgagaccgagactttttttacacccctaatgatcggctttttgtaagttagaaataaa

SEQ ID NO: 80300 - DNA, 113 bp, Heterodera glycines
ataaaagtcaacgtagaagcctcaaacgaagtggaaaatgcgttttttatgcttaatatatcggaactagtgcgcagaaaaaaggcatatgcctcaaaagtcggtctctagtc

SEQ ID NO: 80301 - DNA, 591 bp, Heterodera glycines
agagtcagcaaaggccaaatctgaaaaggaggaaagaaaagacaaaaggaaggacaaaaggaaggacaaaaggaaggacaaaaggaaggaaaaaggaaggacaaaaggaaggacaaaaggaaggacaaagggaaggacaaaaggaaggacaaaaggaaggaaaaaggaaggacaaaaggaaggacaaaaggaaggacaaaaggaaggacaaaaggaaggacaaaaggaaggacaaaaggaaggacaaaaggaaggacaaaaggaaggacaaaaggaaggacaaaaggaaggacaaaaggaaggacaaaaggaaggaaaaaggaaggacaaaaggaaggacaaaaggaaggacaaaaggaaggacaaaaggaaggacaaaaggaaggacaaaaggaaggacaaaaggaaggacaaaaggaaggacaaaaggaaggacaaaaggaaggacttactcggattgagagtcaaaagtgaggacgaattggaggaatgacaaagggcgaagtgacggagggcatttcgcaacgaatacctaaggaagaagaaggcaaaagtcaacaggggaagaagaagaaaagaggaagggaaaaa

SEQ ID NO: 80302 - DNA, 884 bp, Heterodera glycines
gtctgtccgtctcagttgccttctctctccgtctcttcgtccgtctccgattgtgcgccctcgcgaattaatttgctgtggtctttgaactcgcgcgtcccctctctgctgctgctccaacaaagggcccacaaactttgccttctcccaatcgaagtgccattttcggtgatcgctcacagcacggaactgttcaggcaaagcaaaaagagggcatttccattccatcgcattttaattttattatttccatttttttaaattttattttttcccttcctcttttcttcttcttcccctgttgacttttgccttcttcttccttaggtattcgttgcgaaatgccctccgtcacttcgccctttgtcattcctccaattcgtcctcacttttgactctcaatccgagtaagtccttccttttgtccttccttttgtccttccttttgtccttccttttgtccttccttttgtccttccttttgtccttccttttgtccttccttttgtccttccttttgtccttccttttgtccttcctttttccttccttttgtccttccttttgtccttccttttgtccttccttttgtccttccttttgtccttccttttgtccttccttttgtccttccttttgtccttccttttgtccttccttttgtccttccttttgtccttccttttgtccttcctttttccttccttttgtccttccttttgtccttccctttgtccttccttttgtccttccttttgtccttcctttttccttccttttgtccttccttttgtccttccttttgtccttccttttgtcttttctttcctccttttcagatttggcctttgctgactctctttactccgacattttatactttt

SEQ ID NO: 80303 - DNA, 1259 bp, Heterodera glycines
attttataatatgtgtgcttttttacaaaagaaattttgcattttgttgccatggaaatgggaaaagggaaaaagaaaaagtcattggaaatgacattttcgacattttgaaattgaaattgcatttccaattacataatttgctaattgccccccaaggcgtgcaatcgagaatggagtggcgattttgagaaggagttcgccatgaatgcctccgacttttacgactttccgttccatcccaaagtgttggactacggccaattcttggcctactgtcgattggccgaccgacagacgcaatgtttcatcgaacgctgtggggatcaggtgggatcaggtggaggaggggggggggattaaaagattaatggatttagtttaaaaattaaattttattaataaataattttaatttccgactttccctctttttgtctcccaatttctcttacattcttctgttttgtcttttttcttccagcaaaatgctaattgctttttccccacaaatatttttgttttccctttttcccatggagtgccgaccattttcaccaatttttatattttatttttaaattcttattttttccaagagagtgccatttgatttttccccacttttttaattttaaatttgttctatctttcccccccccctttcccatagagtgccgaccgcgtcttttccccgtccaactttttgtgcactttcaaacgacaacatttcctccgcgctcgttcttgtctcgaggacagtgagcccatttcctttctgcgctgtgatcagaaatgccatccgccgaaggaagggactgaaaatgcggcgaaggaaagggaaagggaaaagggcgctgaaatgggcaaagtttactcgggggacgaaatggacgggtacgagagggagctgggcagagtgtgcgcatttcagcactgctacagccaatgccaggagcaaattgcgagtaaacaaagcgaagggaaaccacggcacaatggccaatttgtggccaaaaaaataaaaacggtcgaaactttacccattaatttcagcccaaatttgccctccgggcccagccacgctggctgccgaattggtacgcacttatgtgcaatggcattcggctgatctgctggactggcacattctgacgggcaacgaactgcggatgccccaaagctgtgccaaattggccaaatcaatgacaacggccaagggacccgacccggtgctgaaggcgatgctggtggcagtg

SEQ ID NO: 80304 - DNA, 2370 bp, Heterodera glycines
atgccgcagctacctatggacagagttcggcggcgcattccattcgaatcggtgggccttgactacctcggcccgactgtgaccctcgacgcgaacggacaacgacaaaagacgtgggtcttgctgatcacgtgcctgacgacgcgagccatttacgtcgacgcaacacgagacttatcggcacaaagcttcatctccgtcctgcggagattcatcgcgcgccggggtgccccgagtcggattctcagcgacaatgccccgaccttcacagtgatgggaaaaacgctgtccgacttcggcatggcgggagatgatccgcggcatttttcggactcccgtggcattcagtggcgtttcactccccagcacacaccgtgggccggagggatatttgagcgagcggtccagctcgtaaaacgagctttgcagaagacgctgggcagtgctgtgctcggctatgacagcttcgccacgttactcgctgaagtggaggcaacggtcaactcccgaccaatcacttacgtcaacagcacggcgggagagcctctcccgctccgcccaatcgacttcatccaagagaatgggcggctttgggtggacccacccgacacgactggtcaggcacaggacgaacggcgggacccgccgcacaagcagctagccaggcaatggcgggagtcacagcaacgactcgaacatttttggcgacgatggcatcgcgagtacctaatgacattgcgagaaaaagccggatggaaccatgctcagcggagggtgaacgcacccgggacaccgaaggtcggagacatggttttggtggaggataaatttcacccgcggaacctatgggccatgggccgaatcgaggaactcagaggatcggacgggcacgttcggagcgtgctgatcagaatggcgaacggaagaatttgggggagaccagtgaataaaatttgcccattggaagaagcaccgccaaaaatgcacgaccaagctgatcaagcagtacatgaaccatgcggagacgacgcacgggcagttgagactcagagcgaagagaggagtcggaacgaactctcggcagcaacaaaagaagaagaaaatgaaggaaatgtgagcgaagaaagtgccgaaaagcgaggacgagaagttgaagctgtacagcccgacggaagggtcaatcgagaaattcggaacgacaattctctggggaatggccccgacgatccggacgagaaatgcgacgacgcaacggcgacggagaaaatggcagttttcgaaacagcggcagaagtgccttcggcagcaccaggagaaacgggatttttggcacacccgcattcggctccgagacatgagaaaaaatatttgggagatagttcgacggccccaggtctcctcaatgttcctacaaagtttcagccgaatccgacgagatctgaaggcggagataggtttggtgcagacggacctcaagcagttcagacagccgaaagcggggacgaatttcccgaagcaacagcggtcgaacagcaacaaaacgaattcgaaagaactcccaacaacccagaggaggaagtacacgacgaacaagacacccaaggagttcaagcagtacctgaagttgaacccaggaaatcgaccaggactcggagaaaccgagcagtttggtccccggagcgtcatgtaccacgaaaaagggggcgccggtcccccctggtcgccttggcagtgctgctgacgctgctctgcccagctccatcatgggcgtgtcagcccaccctacgagcagcgccgcaagaaccagcggagccaggaatgtcaactacgatgctgccatgccacatgcagtgcacgaggcgcggtgtgaggacagtcagcggacaactaatggagaagatcgaaatatgctgcccggacggttgctggacgaccataccgacgtcgacagtgatcaactacgaactaccggacgaaatgctcatccacggctactcctgcagcggccaatgctggcgggggttgggccccccggtcaacgtcacacagcgatgcccagcgagggcagagtgcgaattgatcagctgcgccttctgctgggaacagctagccaacccgacgtgcaatccgaggtgggcgtctaccctcttcgggttcggcgcagcactaatgctggcagcgctgggctgctgttgctcaattgcctcacgattctggtcgggagcgacacttttctcccgagcaatcgcatggggagtcagctaccccatcactttcatcaactgggcgacaggacgacacctcccaaggccaacggcgaaccaaatcgagagtaaagtgcggaagggagcgagagtcgcacgtgcagag

SEQ ID NO: 80305 - DNA, 588 bp, Heterodera glycines
atggacgtgccattggccgcaccgccttaccagcggatggcatcactgccaccggtgctgccatccggccattcatcatcagtggcacaaatgccagctggcggcggcggcggtggtggcggcatcagttttggcaccaccattcagcaacagcagcaagtaaatgtgccaaaagtgtgaagaattaaaaccgggtgtaacgggagaactccgcgcgggcgaagacggcacgagttttcaatcaactcattgatcagtaaacgggattttgccccgacaatccctagtaaatatatttttggcccgacaatccctgtactggtctctaaaatcccgaaaccctttccggggtttacccaaaatcccattttccctgatttactgtgtaaaaattgaaaaaaaatcattgattttccaaatattttaccaaactcacagcgcccatatcaactgtaccatcatcatcatcatactgttcagcaacagcatcaaaatgggatgccgatgatttgtggtggtagtggcaacagtgccacaaatggcaacacaattaatgggaatgccaacaatgactatgcggcatttgtg

SEQ ID NO: 80306 - DNA, 701 bp, Heterodera glycines
atggaccagcagcagtgcgcccttcaactcgccgggcgcacggccgcgcaccgcgtgcccgccgtccgccgttttatgcgcgtcctgcagtccgatcagctcgtgcgcgtcgtaatggacgcggaaatcccagcggcatttcaccgtacaaagaagccaaagcaaaatccagctgaacaggtagaccaggtcggcaaccaggcaccacagcagcaacggacgctcctccttctggcaaacaaaaagggtggcttttatacggaatttggaaaaaaattgggagccctgaaaatttcgaaaaaaattccgggttacctacccgtccttcacccgaggggcaggcaattaattgttatgaaaaatgaatgcaaaattgggtttatccagtttggtgtccatatccaaagccaaaaccggtcatgaggggggaggggagggaggggaggatttttgtgagtctcggaaaatcgggggcataaaaattgaactacgtgcctttgccagaggggtaattaatttttgaattttttcttttccaatctttggtacatttccagaaaattgcctgataaatcaatccgatggcataaaaggcgggtgctttgatggccgcgattgttagcagaaggacaatggccaacacgtggggtgtatatccgtcacagatgatctcacgcccataggaccaaccaatcgaaaaa

SEQ ID NO: 80307 - DNA, 80 bp, Heterodera glycines
atgaaggacagcttcggccggtgggctgatcgaatgaaagaatgtttcggagacggcacattctcattggcaccttcaat

SEQ ID NO: 80308 - DNA, 1516 bp, Heterodera glycines
atgccggacggcactcgtgtgaccgtcaatgctggcaatgatgagaattggctgggcgaggtgaagaatggccaagcggaagtgtgtggccaaatggcacgcttcagcgacctgcgctttgtcggcaaaagtggtcgcggcaaaaatttcaatttgaccatcactctgcacacgcatccgttggcacaggcaaaaaaaatcaaacatttttacggaaaatcgaaaattaaaattatatataccccctcaccctcaccctgttcaggtcgctattgtgccaaatgccgtcaaagtgaccgtggatggacccagagactcgcgcaatgcctcggttaaataccatttaaacggtgcggtgtttatttaatttcttcgataccgtcgagaatctcgaaaaataattgatatttttgaatttattttcacggaaaattttattttctatgtacaagaaattttaaaaaatatatttaaatataaaagcctttgaataattttagataatttaatttttagaaatcttttaaaataaaaaattaatttgcagaaatattttaaataatttttaaatgctttgaataattaaaataaatttttaaaaaatagtttaaaaataataatgttaataaccttttaaataaaaaatcgaaaattttaaattttaaggccaacatgtgccgcgaaaattgcgttccaatttggaattggatgccatgatgggacagctgaagaaggccgcccaacaacagcagcaagtccagcaccggaatggcatcttcaaatccgcgccgccaccgccacactttgtgcatccaaattttttcttgaccgcggcacgccaaccgcagttactgagatgtccgccgacaatgttgcagcaacaaaatggcaccggacaaccgccatcatctcagtcccatttctccccgctgtcagtggccgtgccgtccttgccaatgatgccgttcatgatgcccgctgctgcatcgctgcattcatttgcactgttgaacggcaacaacatgatgagcaatcgaagtacggtaacatcgcagacatacgtttaattaccgtaatatttggcttacagtatgtgaaaataatcattgcattgccataacgagtggaatgcttattattttctgtatagagttattagggctgcaaatatgccataaattttaacttgacagcaaaactctttttttaagcagcctttcgacagccgacctgtgcatttggcaacaacagcttgcttgacgcaaaactcgccgacgctggcatgacgcctccggcaactaccgtaactccggcggtatcgtcggcaccacgcccccagcagggcttcatcgccgccagcccaccattacgacactgcgcaactccgtccgcgttccgcgcactgtccatttttccggacccaaaaatgatggcatcggcagctggccctatttcacggctgcgccccggccgcggtgcctgcgtgcgcttctgccgccgccgacaatggccagtg

SEQ ID NO: 80309 - DNA, 2162 bp, Heterodera glycines
atgaaggcgcgccccttccccatcggcacaccgcacgtgtggaccggagagcagctgtggcaggcgggcgcccatgcgtttgaaggtatttgtagctgctgctgctgctttggtccatattggaaaacagcattttcagcttctgctccacctccagcagggctttgtcctcctcctgctctgccatggcgccgcccggaggacaacccgttccgcggcttcctcttctgccgcgtgctgccgccaacagcggaggagctgggcgatcgcgagccgctgctgccctaccgcacccaggcggatggacgtctcatcttcggcctgtgcgcgcgttgcgccgagctgcgccagcaacgaatctgtcatcacacggagcgtgagcgtgcgtggaccgctgcctacacgcacgtggagctaaatcgcgcgctgtccatcggctaccgtgtgctgagcgtccatgaggtgtggcactacgagcgctgggcgtcaccggacaacggcaacgggctgttcaccgaatacgtgaacaccttcctgcggctgaaggcggaggcgagcggctggccggccggctgtgacaccgaagcggcacgcgcggagcacatccgccaatttgcggagcaggagggcatccatctccggcccgacaacattgggcacaacccaggtctgcgtcagttggccaaggatttgctgaactccctgtggggcaaaatggcggagcgtccggagcgcgacgaggtggtgtacaccaacagcgcacgcgacttccacgagctgctcatgcgtccggagcaggaggtggtcagcttcacccacctcaacgaccagctggaccgctgtgtggtgcgcaagcgggagccgttcgcacgggcgccggagcacaacaacttggccgtcgcatgttttgtgacgtcccatgcccggctgtacctgtacgactggttggaggaggtccgacgggtgggcggtcgatctctgtactgcgacacggacagtgtgctgtacgtgaagcagcgtggcgctgaaggtgtgcgcgagggcaacgcgttgggtgacatgaagcgggagctgcccggccgtcgcatcatcgacttcttcgccgccggcccaaagaactatgggttccaacacgtggacgcgtgcacgggcggcgacctgaaggcggagcgcaaggtgcgctcttttgagctcaactatgcggcggaccagcagctgcagtatgagcgcatgcggcagctggtcatcaaccactttggcgtcgggtaaataatatgacaccactcccctgttgggtcgaggggggggggggggcactgaggcactctgaacacacacacacacacacattttttgatgattttcaggcagcaccatcaacaacaacaacaaaggggtcccgcggctgatgctgctgacggaagcgatggccaggaggagcgcaccatctctgtgccatgccagcggtttgtgcgcaaccgccaggcggacatcttcacgcgtcgctccacccgcgtgtaccggcccgtgtacacaaaggggcgcgtgcttcggcggggtgcagcagagtgtgttggtgagtcacaaaagaaaacagaataaccaaaagggagaatagcaactagattaccacacacacacacacacacacacacacacacacacacacacacacacacacacacacacacacacacacacacacacacacacacacacacacacacacagcaacaacaatttcaatttttcagatgaagtgccgccgcaatccatacgcactcgcccatttggatggagctgttgtgccggtgacgtggaatcacccgacagctcagtgatgaacgaggaggaagaggaggaagagcccatgcaaatggctcccgatgaagctgaccagggggaggaagaccgatggggggagcatgtttggccggaagaaattgctgatgataatgatgagccagggcctgaacggaagcgtgcaagggtggaacagtgcgtggcaccgccgccgccctccccaccaccgtcgccgcttcgcgagccgcatgcggagccggagccggtggccggctgctccacatgggatcagatcacacggcacacaaaacatatttgtagaaataatttttaattttccgccatttaaaatatgcaca

SEQ ID NO: 80310 - DNA, 322 bp, Heterodera glycines
atgaacgaggaggaagaggaggaagagcccatgcaaatggctcccgatgaagctgaccagggggaggaagaccgatggggggagcatgtttggccggaagaaattgctgatgataatgatgagccagggcctgaacggaagcgtgcaagggtggaacagtgcgtggcaccgccgccgccctccccaccaccgtcgccgcttcgcgagccgcatgcggagccggagccggtggccggctgctccacatgggatcagaccacacggcacacaaaacatatttgtagaaataatttttaattttccgccatttaaaatattcaca

SEQ ID NO: 80311 - DNA, 1369 bp, Heterodera glycines
atggacatgttccggttcaacgttcataacgctgtcaaagacaccgacgacgccgccgccgactctgctgcacacgatcaatgtcaacaacgccaacagcgcgaggttgcgtctcctcgcacaatgccgttgttggttgaagagcaagctcatgtgtcagcagcagctgaggctgctgccgaggcagcgagtgctgttgaccaaaagatgtcggcagcgccaaatgacactcccgccatcactgacacgaaaattgattttatgactgatgaacaaacagtggcggcagcgccgccgcctctattcagtgagattgaaccgacgcagcagcagcagcagcagcagcagaaacaacaacaggtttgctctaaattggtgtcggttatttaattttttatcaagaagattcaggggcgtacagcggaaatcatcgcaccgaaagtggagctgtccgccgaggacaatggtgatgatgatgatgatgatgatgatgaggctggacaacaggtcaaacaggaggcggacaggaacggcatggatgcacatcattcaaattgtgcaaaagggccccttttgttcattgatgaacaggagaatgaggaggaggagagtgaggaagatgaggacatttcaacaacgcatcgaaggcaaggcatggactcatcatttgactacgaagacgacgacgatgatgatgacaatgacaatgacgatgatgatgatgatgatgatgatgaaatggaatcagtcagcggatgtgcggaatcggacaaatgtggtcactgtcaccacccgcatcagctaccacgaaatgctttggaggtgctcaaaatgccactcattgactacctgtgtgcgctgaaccatggatgcagcgtgggagagctgcaggccttgttcctgtccaagggcgcacgtggtcgcatgctcacccatctgcagaagcgctgccttctgcgcactgtccatttgcgccccaccgagcgcaacatcacactgcacgcgcacaattttagtgcacggagcgccagtctgacctttgcctgcggtggttatctgaacctaacggtgagtcagccacccatttgaccaagaaacaatggataattaaattataatgatgtccgtccatcttcggcttcaggtgcgtcagtattttttcgccaaacatggcgttcggcttcgccatccgagtcttcccactctggtggaatttggaggtggaatgcatgcttcttactacccgcttgagtgcatccaggtgcacgtcgcggtgactgcaccggaggacgctgccagcaccacctccaccaccactaccaccaccaccaccgcatcatcgactgcgtgtgtccgcctcacaaactaa

SEQ ID NO: 80312 - DNA, 798 bp, Heterodera glycines
atgaagcagcagcagcagcagacaaaagagcaacctctccgccatcaacaagtgccccctgttttcaagcatccgttcacaatgtgtgtgtccgggtgtacgggcagtggcaaaacgaaatgggtattgcgaatgttggccaacctggacaccctggtcggccccgcacacatttcgggtgtgctctactgttatggggaagtgaatgaagacgtgcttcgattacagcaattggaaactgagtcgggggatgaggaggagaacatggggggtcaaccgcggcgacgctgggtccgcccctgccacgcgcttcccgatgaggaggcggtgaagcgggcagccaaagcgtgcggtggcagactgctactggtgttggatgacctgatggtcggcatgcgtgccccgttccttgacctgctgttcacccgtggctcgcacaattggggcgtcagcgttgtgttgatcacacagcatctgttcacgcgagagctgcgcatcgcgcgcaacaacgcgcactatttggtgttgctgaggaacccggcaggggcgctacaggttcgcacactgggcatacagctgttcccgggcccgggtgcactgcaccattttctggaggcctatgatgacgcaacagcggacccgtttggctatctgttgatagacatgcaccccaccacacggcctctgatgcgtctcaaaacgcatatataccccgggcagctgaccgtggtgtacgcaccacgtgtatcagcagcaacggtagcaacgacaagcatgttcaatgcggaagaacactag

SEQ ID NO: 80313 - DNA, 1048 bp, Heterodera glycines
atgaagcacacaacccgaatgttgttggtgccggaagagatgtaccgctccctgttgtcaaaggcgccaggtgctgctgctaccgatgctttggatattacacccaccaccaccacaacaccgattgaacacgttgccaaacgcatggcgcgcgtggcgcgcactgcacagcagacagcaacgcgtgcattgatgaacgacgatgaacgcctgatccactaccagcaggagtacaaacggttcaaaaagctgttggcagatgagcaggaacgaccggcacctgtccgcctcaatcagctgccgaatgatccggcctcaaaaggggtgttgcgtgatgcgctgacggaggccgccaaaacattgcaacaacaactaccgcagcaactgcaacattcacctccctccttgacaaagcgtcgcaggcgtacaacagcggtggtccctgcccgggctggtgttcattcgacgccgccagtatccccacagccccctgcagcagccgcagcacctcaacatccagagcggcggcaagacaaagacaaatccggcattactggacaaaaagggaaaaggaaacgaaccaccaccgcctcatcgtatacgtcagccgcttctggagcagaaaaagaagaagaacaacaacaacagccagcagctgcatctacatcatcatcaacaggcgccgtcgttgttgccggagctcagcgcctgggtgaggcggagcagcgacgaaaacagcaggcccttgactacacgtcacgtcacgcgggcacgctgggcatcggtgatggtcagcaggtgtacaagttcatgcatggtgcataccgcccgatcaaaaacagcagtttgcaagccgtactcgcctatcattttacatctgcccaacaaccacaacaacaacaccatcggctcaagcccccgcccggctaccaaacgttcatcgctaacgctaaacagcatccacagctgtcacacctgctattccccacctccagcactagcagcatcagcggtgaaggacatggtggtggtggtggtggtggtggac

SEQ ID NO: 80314 - DNA, 468 bp, Heterodera glycines
atgaaaaaaagtttttatgagcagaaaaagaaagaatttattgaacgatttgatgaatttaaaagtttatatagccaaggcaaacagaatgaatttgtgaaggaattgggaatttctgaatttacatttgtaaaatggaaaaaagaattgattccaaattaccacaaaagtaaaattatgattaattaaattaaattatgaatttcgtttaagagcataataccaatgaggacaaattgaaaaagatgaagcaatattttgaaattaaagaaagaaatccaaaaatgagcgacgaaatagtcgctaagaaattgggaatttcacaagacacgctgagaatatggaaaaagaaatttgcttccacttgatcaccgattttaatttagtaaaaatgattttcgatgaaaaaaaaagttttgattttgaagagagattttaaaattttttgacgaaaatgttttcatgcaa

SEQ ID NO: 80315 - DNA, 588 bp, Heterodera glycines
atggccagaccaagaggcggtggaagaaacccagcaaaagcacgcggtgccagggcaaagcgtcgcatcggcaacaaaagaaaagcggccgcagggactgctgcaaacgtgggttttattctgctgctgttctatgcaatacatccatcatttttttctgtttcattttttggcactcagagtgaaagccgaaatttcatcattgcttcattttgtaatgaattttgcctcccttttcaggttcaagctgccgacaggcgccccatttgtccgatctgcttgaagaagatgaccggagtccgtcaggtgcgcaccatctgtgaccacgtgttccactacgtctgcttccaccgttggctcaaatatcgcctgttttgtcccgtctgtgagcgcaactttcgcacggaattgtatcatgcgggaaacgccgtggttgagggagcgtacgccgacggacacgttgtgctccgaactgatggtgaacagagcaacagtggctaattgatcattgatcggcactcacctccaattgtgatcggacaaaaatgatattaattgtatatgtacatatatatcaacactcggaca

SEQ ID NO: 80316 - DNA, 88 bp, Heterodera glycines
atgccaacgccaagccgtgcccgggtgtatgccgatgtaaatgtaaacaaaccgcgtgaatactgggactacgagtgccatcagattc

SEQ ID NO: 80317 - DNA, 254 bp, Heterodera glycines
  unsure (1)..(254): unsure at all n locations
atgtcagccgacaaaagtgacgagctgtgccaaactgttgcagaaatacgacagggaatcgatagaaaaggtaaaaattatcgactaattaatgagcataattaaaacatttgacacaataattaatccattcaggacgctgcttgtttaattcaatgcgcagaagtgttagggccggaaagaaaagatgaattttgagaaaaaaattaatattanattattggaagaaattattttataacaaattatgaaaa

SEQ ID NO: 80318 - DNA, 1425 bp, Heterodera glycines
atgaccaccattcggtgcagccgtgtgcaccggacaaactgcccgaatactccagcaacattgtgagttgttttacacgtaaaactttttctttgtcaaaatgtctagaatttcacaatttttaaaattttgctatgggaaggctcctgaaaaaaacaggagaattcaaaattggcgatattttttttttgtttcattaaatttttgtgtcaacaaataaatggttataatcaaaccattgaactattgcgcgcagattggttggcatgtcttgggaaaattttgaatttttacaaactttttataaaattgctcaaaattttcacaatttttcatttttcccattttccaagggccatgactcctaccgcgccttccgttccgcttacgtcaattcggaggtgcgttttgaaaccaactcgtgggaacagctgaaccggcagtgtccacaaattttgctgtacgccaacacgttcaaatgcctggactttctgatgcgcactctgatgactgtcaatcggccggttaagcggggcccactgttcaaaagtacgcaggccaaacgctatcagctgagcagacacttcaggttgacaaaaagcgtagaaaaaactcaggggttggatttaagcaaaaatttaaatttccggtactccgaaaaaataagcggatgcgccgccaactttcaatttaattttttttttctaaatttacaaccgggcatttttcatttgtaaattttgacttgactaacggttcgaaccctgtttaaaaaaatgttttataataatatggacaaccaggcctgggctgcgggaattacctccctccaaaaagactcttatttattatattcaatacttttttttcaggaatgtccaattgatggcgtcgatgccccgctttctgatctcttattggatgtcattttcctcttcccatggatttcgtgtgatcagcgactcgttgcaatttgcttgcgattttttgctgcaaattcatcctgatcagtcaaatgtttggcacagggaggggggaagaaaaaccaaaattttataaatgtttaaattttaggacggcctcatccgcagggtcaggacagcgtggaaaattctgcacacatcggccgagttggacaatgcccaaattcatctgtacggggaccagcgaccgccgggcgtggaggaggacctgatgaacagctccacctcgacggacagcgcgaattcgtcctttttcgtcggactgtcccgcctcatctacatccgaaagttgcagaacgagatggtcagtgagtgtgcgtacaatgacaaaaatccttcccccaacggtcggtcccagggatttgtttcaaaaaaagttcggaaacccgattgctttttgaaattgtaagctaatagagaacacataaggctgtcgatgcta

SEQ ID NO: 80319 - DNA, 818 bp, Heterodera glycines; identical to SEQ ID NO: 15964

SEQ ID NO: 80320 - DNA, 833 bp, Heterodera glycines
atgaacggagtctgtcgctgccaattgtcaattctgtgccgacaaataatggagcagtgattgggaaagaggaggacagtggcaaaggcggcggagcagtatcagcacaaccagaagaagaacagccgaagaagcagcagcaaaatttgacacattcgccaacacctcaaattcggacaaaggcacaaagccaaaacaacaacaaagaacagaatcaacagagacagcactaccaccagcagcagcaaaagcaacgagttcaggcagtaccagcaacacaaccgcagagccaagcagcagtgacagcagcagacggtgccgactcgggcattggctccgactcgcccaggacacacacccaacctctgagtcaacacgaaataatgccagaaatgacgtcaacgtctgttcaacaagcggacgacattaaggaacggcattcctttgaaaacggacgggacacggacgaagtgcgaattgaaagacaattcgaattgtgaaagaaaaattccaattttattcaggtgccaacgttaaatcggaaaatgtcaccaccgccggtgccaccgaaaagtcgcagaaattcgtcaatggatttggatgaaatggagcccaatgacccgatgcgaagtgcctatgaagattcaaccatcggccgtgatcattccgttcttccgccgggtgcccggccgacgttcggccggaagtattctgcccaagggacggacagaatgccggagggatcgtcgagcgatgagaaaggggcgacggaagggacgacgcggaaagtgtgtccgatggtacagcccgaattggtggccatgggaaggtga

SEQ ID NO: 80321 - DNA, 1481 bp, Heterodera glycines
atgcatgttgggcagcagcggctgccgctgagagacttgccacaattcgaggaccatccgcaaaatgtgccggtaattttgggtcgatttttgctgcgttttctcaaatttctgcgtgctttttttcaggctgttcgggtccaaccgatgcaacaaatgcagcaacccgtaccaatgagagccgtgccacaattcctccaccctccgccaaatgcgccggtaatcttgagtctcgttttcggttgctttttcaaaatcccgagtgcattgtttttcaggaaattggtgtgggaccaattcatgatgggcaacaaccactaccactaagagcgttgccacaattcgcccaacctccaccaaatgtgccggtaattttggctcgtttttttttgttgcttttttaattcccgaatgcttttttcaggccgttcgtgtccaaccagttcaacaaccgataccactgagagacgtgccactatttgtcaacccgccaccaaatgtgccggtaattttggctcgcttttgttacttttttttcaagatcccgaatgcattttttcaggtaattcgtgtccaaccgatgcctcaaccgttgccgctgagagacatgccgcaaattcaccatccaccgcgaaatgtgacttcaatttggatcaaattgtggttgctttttctcagtctctgggtgtttcttcagggaattcatgttcgacaaattcaacgggaatacgccgtaccgcaatttgcccatccgccgccaaacgtgccgtatcatccaccagaaaacgttccggtagttgggtcttggttttcatgcgttttctcatattttcggatgcttattcaggcaatccaaccacggcaacgaccgcgccagctgagagacgtgccactattcgaccacccactgccaaacggacagggtaatttcagaccctggcttctacctaacaccgaaacatcttttcttaagcaaatacatgccaaccccccgagagtgctggaagtgatccgacggctgggcgagtggagaggaagaccaagggacccaagacgtccgcctcaatgaatgaatggaatttggattttgataaaatttgttgttttaattttttgaattgataagggttaaattccgtcacctaaattgtttcaaaattattaaaattttaagaaattagatgctaaacctaacctttgacatagattatgaaacaatgaaaagaaatgacgaaatttttgctttcatgtcttttgaaaacaaaaaaaattcaaaaaagggggaggggggtaccatcgacagtattaccgtaatttttatatggaaatcggataaaaataatgacaacactcgaaatgagcacaaaaaatatgaagtgaacgaaaagtggtgaaaagtgttctgttatttgtcgcggaaaacaatcttttggcaaccatttttgagtcacacgtccgaaaaaagggagagatgtgtacaa

SEQ ID NO: 80322 - DNA, 610 bp, Heterodera glycines
atgaatggaacaattacggtgggggtcggtttagtctggcgttttagtctgaggcgatgttttagtcagggggaaggtttagtctggtaagctgtttttgtgcgacatggattctaatctgttttttcgaaaaatattaaaatttaatattaaaacatatttaacaatgtatttccaacaaaaaacaaaacattgaaaaatgattacaggcgcattttataatttcgagataatgtaccaacgagaaaatcgatgatgctatcgggattaacattgacattggcttgataattgtgatcattttgtttagccgggttactgttattgatggcattgtaaccccgcaagagtcgaagaattcgcgcacaggcggcatcgccagcctgaagtccaacgatatggtttcaggtgaaaaacccggccttcttttgacaatcagctgaagcatacgtgttcatcgctgcacactttttagtgtgaaggcagtacgtaatcgaaaactccaattaattcgcctaaaacacaaaaaaaatatgaaataattaaaaaaataagtttatatgataaatatacattgtcttaaccaaataagaattttttgacaaataaa

SEQ ID NO: 80323 - DNA, 1819 bp, Heterodera glycines
ggaattcacgattgtgacaaccgactataacaaagtattgaaaatcgcggacattggcaatgcttcttcttccaatccgttgaatgaggagccattggcacaaattgtccgttggcattgggaccaaaacggggcaccgaaaatcattgaagtaagcaattttttttttgtgcggaaatcactccctgaagagttgaagacccaggactaaaatggctttggcacttaaccttccaaatggtaaaaacgcataaattgccagaaaattacatatgaatcattcctctcggcttgtaaaaacgaatccgaaagttttggacaaaaaataaattgaaaaaacttatgggtcctccctcataacttccgaaaatgcgcggagggttgcgagcggcgccccacctactggtcgccgtagttgagtgtgcgctagtttttagcgcagtaggcaaaattcaaattttcaaaattttatgcttttaccattttttcaaccaaaaactctaaaaaacgttaaggtttttgaggacccataacttttttcacgttctttacaagccgagagcaattgattgatatgtatttttctggcaatttatgcgttttaccatttatagttatggggcgcattttccccaaaaatcttttttgaaatatttatttttttgaatgatagcggcaaaatgcgtactgataccaacaattaagggttagtcccaagagatgttgcaggctttgcttaagagaaccagaaatttaaacaaatgcgatctactaaaattaacaacaaactttgttttagacaaaaacattgaacaagggcagtgaagttaattttgccatttttgacgatacttcatcatttgtaattcgaattctcaaaaagcgggagaaaaagtcggaggagaaacggtaatatactaataataatagtaaaattccgattttaccaatagaaatacttaaccaaagcattttcgggagccgagttaagtccccgtcctcccgactattaattaattaatgtaccatttttttaaaattacttttccatttttaagtgcgttcccggcgccttccgacagctcacccgacgacgatttgaccgtgaaaattggtgaaaaacaggttaagaagctaactgtggggggggggcttgactttagaagcaggcataaatgggcaaggggagggtcagaaatttgcctttatgaaatgaaatacccctcaacccgctctatcagagcaaaaatattatgaaattgaaaaaatgccccaaatttctatgacaaccttttcttcaaaaaaagttttttttttgtttcgattttctttgcccttccaaaaataagtcctggtcagataattgataaaatgattttgatcagatcactaataatattgataagatcggtgattttgatcaggtcgctgtgtccgcccattggctgatgaccgtttccccggtgatcagtcgcatgatgaaggagaagcagcagcgaatgatcactttggacgagttgggcgtcgacatggaccaattcattgcctttttagagtccatcttttatatgacaaagatcggaccttttctgcccaaccgtaatcctctgaaaaataattatcctctttttatggattaataggggataaattttcaaaaatatgaaattttaatttttggtgaacggattcccaatttgtagcaacaaatgtgctggcgctgctcaaattggctgactacttccaggtgggtgccctcacttagcaccttattttaaattattatgattcatattcatttttgcttaagggtaataaa

SEQ ID NO: 80324 - DNA, 794 bp, Heterodera glycines
  unsure (1)..(794): unsure at all n locations
atgctcggcgagttggagctgctgctaaccccagcggcggcggtgggcgaggaagacatggcacaacagcgcaacaacaacagtgggcacaacaaccaagtgaggaaatggggttaattaatggaaaaataaaaaacttaaaaaaatgttaataaataaattattcattgctcttttcaggcgcgcatttcgcgagtcagcggtgccattggtggtggtggcacggcacacactgacagtgccacttttgcaatggcacaacggaatgtgaggaggggcaggggggttaatttccagcaaatttgagggttgaattttgtaaaaattcttatttttttttgatttttttttacaggcaccgcacatgtcggatggccgtggtggtgttgctgtggatggacgcgcatcacgggtggacaatttggccggcatttctgtggcccaaccgccgacaattgctgctggaaacaatgtcagttgtggttttttttggggggggggagtttgatggctattttaaaaaaatgaaaaacaggccaacaacaacaaccacaatggcgccgttttgcagcgctcattcggcggcagcggtgacggcagcggcggtgcttttggctcggcttttggagctgtttcgggtgtgccggtgtggagtgtgagcagtgtgagcggggcttatgagtggggggggggagggggggggagaagcgaaaaaaaaggcttctttgggctgtttccggttttaatgctttttcaaaaaaaatgctttcaattttcagcgcnggtgtcaatga

SEQ ID NO: 80325 - DNA, 430 bp, Heterodera glycines
atggccacgcgaaaacggccacgcgaaaacggccacgcgaaaacggccacgcgaaaacggccacgcgaaaacggccacgcgaaaatggccacgcgaaaacggccacgcgaaaacggccacgcgaaaatggcaacgcgaaaatggccacgcgaaaatggcaacgcgaaaatggccacgcgaaaacggccacgcgaaaacggccacgcgaaaatggccacgcgaaaatggcaacgcgaaaatggccacgcgaaaacggccacgcgaaaacggccacgcgaaaatggccacgcgagaacggccacgcgaaaacggccacgcgaaaatggcaacgcgaaaatggccacgcgaaaatggcaacgcgaaaatggccacgcgaaaatggcaacgctaaaatggccacgcgaaaacggccacgcgattggggggaggg

SEQ ID NO: 80326 - DNA, 193 bp, Heterodera glycines
tttataattaagtgagtttataaactaaattaaggttctttcaattatataatatggaccagcagcaaaaaattaaaacaaaaagaaacaaagttaagttagaacatgacggcgcactctatgttttcgaacaattgagcgcagattgacttaagatattttggcgatgtgagtttcatggcccgtcagacaa

SEQ ID NO: 80327 - DNA, 2249 bp, Heterodera glycines
atgatttttgcttgtgatgaagtgacaaatttagtcgctggaacaaatgactgtgcagtaactcaagaaggaaaaattgaatgttcttatgaccaaacaacccaactctctattacacctgaacacttaacctgcttaaaactcgacaatacaaaaactaacaccactatggaaacactacaaattacaatagaaactttaacaataatttgcaccgaaaaatctgattattttacgagaggttacgaattatcttcgacatcacaaaaaagatgctcaggcgctgggaaatgtaccggccaaacttgtcaatcagtaaaaatgtcagaccggaatcccgaagtgaatgatcacgctaataatcaaccaggctattcatactgtgtaccatcgtgcggaggatggcattgtcaatgtttcctcgcaactgatggatgtctattttacagaacttatgccgaatcagttggtgacgaaattttcgaagttgttaactgtccatcttggaccattcaggcgacaattaaattgtctatcaatccagaattaacctattctgttgacttgaaacccggaattttaacacacattggtgacgagtctaatagttctatatctgtcacactgacttcgacttcaattccaccgacgccgttatttggttcgacatttattatagttcgcgaagaattaaaagcagcaatagttgcgaacggaaatttactcaaaaatatattacggtgtaaaaacaaagaagaagcgcaaagttttagttgcacttttccaccagaagcatgtcaatgccacggaggtgattccgttgtacattgtgaatgtgaaaaaagtccacttaccgaaatatttgctaggcaagagaaccttttacccattaaaacacagggaagttacgtatacttcgattcccaaattaaagctaaaatacagcaaacaacttctcttcaaatgcaagtcacacttaaaggacataaggttaaagctatttatgataaaaatatttgtaatattgttacaatatcattggaaggatgttattcctgtactagtggtgctaattggactctatcatgcaaaacatgtcccgatggtaagactgaaattattttgaaagctaatctggaatacatacaccaacaagatacaaaaatcattcccactaacaatactaatgaaaaccccactattggaatttcatttgaccaagtaactgatatattaaattttatctattcccttattaaagccaattttttcaatatatttattattatcatattcatactcattatgattttcctaattccatgtctactacctattctatatagaattatgtgtcgttgccttcctctttcgcgcgggagtgtcgcgacaacgcgaaatcctaagataaaacccaaaataaaaaagaggaaaaataaaaaacaatagaaaataaaatggggaaaaataaaacataaataataaaaaatatttttacatttattttggaaaaataatattataaaaaactatcgaaaatataattacataaaaatgaaaaaaaccttttgaaatgaataacggaaaattgtttgaaaaggaaaagtgcatttcctcaggaatgaaaggaacgaaaattaattaatattaaattgcgaattctgttaaggattgttcgtaaacaaattattaataattaatatattaaagaaattggaattgtaaagggaaaacggaaaagcaaacaattaatgggaaaatggcaaatccaaacggataacacacaaaaacatattttaattaaaatgagaaattgtagcgtactttggtgcaaaaaaaatcgtatttaaaggggtggacttttccggaaatttcagattcgagacaaacggttccctccgaagtttcccggcacccgcccaccgcctttcactgcacccggccttcgctgctctctgtctgtgcgagtgccctccctgtccgcgcctgctcgagtgccctccctttcctttgccattgtgtggccccttttggaccagccgttgcccgaatgcccttccttttcccatcgccgtttcgccgttctgaccccttttgattttgccacattttccatttgtgatttatttactgtcaccgtttttgtgcccccttttccccgttcacattatcatgtttgtcccccatttttcgtttccctcaccgtcccgattgggacggtttaattacccaagtttgaggtcgacaca

SEQ ID NO: 80328 - DNA, 182 bp, Heterodera glycines
gcacagacagagagcagcgaaggccgggtgcagtgaaaggcggtgggcgggtgccgggaaacttcggagggaaccgtttgtctcgaatctgaaatttccggaaaagtccacccctttaaatacgattttttttgcaccaaagtacgctacaatttctcattttaattaaaatatgtttttgt

SEQ ID NO: 80329 - DNA, 217 bp, Heterodera glycines
tgtcgtggcgacaaaaaatttgcgtcgaactctgcggggtgaaggggacgggaaggggatgaaatgggcgaggcgcgcagagtagccggtcgggggaacgtagggggtcgggaccgatcggagagcgatgagtcgtgccggtgttcgtccaggcaaatagaccaagttgggcacaattttaataagagtatgtttattgtgtcgacctcaaacttgg

SEQ ID NO: 80330 - DNA, 566 bp, Heterodera glycines
atgacgagcagttgcaacggtgaatttgacgttttgacgtggcaatcaggtgcagaccggacaggcagcacagtaagacgaatgggcacagcaggacaaacgggcagagcggcaggcacggcaggacaaatgggcacagcggagtggacaggcacaacagggcgaacgagcacagcgggacgcacggcaggacaaatgggcacagcgggaaaggcacggtcccgggtcgtggcaccaattcttgtcgtggcgacaagaaatttgcgtcgaactctgcggggtgaaggggacgtgaaggggatgaaatgggcgaggcgcgcagagtagccgttcgggggaatgtagggggtcgggaccgatcggagagcgatgagtcgtgccggttttcgtccaggcaaatagaccaagttgggcacaattttaataagagtatgtttattgtgtcgacctcaaacttgggtaattaaaccgtcccaatcgggacggtgagggaaacgaaaaatgggggacaaacatgataatgtgaacggggaaaagggggcacaaaaacggtgacagtaaataaa

SEQ ID NO: 80331 - DNA, 6659 bp, Heterodera glycines
atgaacaaggaagaatggaataatgaatggaaagttcaaaaaatctttcgtgaaaaacacgactaccttaaaaccattaaagaaatagatgaaattctcgatacattaaaagacgtaaatttggaggtaaaaaggagattaaaattacttaaagcaaaatcatcttcagactcagacccggaagatgaatcaaatgattatgaacatgaaaatgaagacgaagtagaagaacaagaagaagaaaaggaatatgaaagtgacaatgaagacgaatcgccagaactttctttgaatgaccaaatacaccatgatcgtataccatttgtcaattaccgatcaagaataaagcttccaccccaaacgcttacgcattttaatggcaaattctcccaatggcccagtttctgggatgatttcaaatcctcagtggacaatgacccaaatttagaaaatatacaaaaactcaaataccttcgagggctcttacatgatgaaccgtacagaatagtgtcaccgtatcctcttacgaataaaaattacactatcgtaataaaattactaaaatcaaggtacggaaacccccaattaatcagagaaaatcttcatagcgaattacgcaacctcaaaagacccactgaatccacaattgattaagacgatttattttgttaattgaccgaatcattttacaaatgaaatcccaaggggaagacataaatcaccctcaaatcaaacaatcaatcgaaacgaaactcccctataacattagacttaaattgaaggaaaaattcaaaatctattcaacaaaagaaataatggaatttttgaatgatcatacccaagcacgtgaagacatagaaagaatggaagaatcgaatcgccaaatccggaatttcccctctaatagaccaccccaaaacggagtacagagacaattctatccaaatttcccacacaatcaaatgaaaccaaacccatggaatcaacagaacacatcttcctctccttttccatatacttctgcatttacaacgaattcaaacccagtacgcctggcacagtttaaatcaaatccaacacaaactagaacacaaaataaaatattttgtcgcttttgcgaaagagaaaaccatgcaagtaaagaatgcaaaatttattcaactcccgaaaaacgaaatgaacgtgtacgtgaactcaaactttgcctaaattgtctaaacaagggacatatggtcaatgattgcaaatccacttatttatgttttaattgtaaatacaaacataatactctcctctgcacccgtaaacaaactcagtacaaaacgaaggaacaaaaaaccagagtgaatatggctcaaaattacgaaaatcgtgaagagacacagacattcatgactatggattatgataaaaatttatataattatgaggaagaagaattacttatgactactgaagtcaatgttatcaatccagacaagcctaaaataaaaaaggaaataattttatttgataatgggtcacaaaaaagttatataaccgaagaatgtgctcaaactcttcaattaagcacaattgaggaaaaattattagcaatttccactttcaatcaaaataagccaaaaatcattaaatcaagactagtcaaagttggcattaaaacactaaaaggtgaaatagagtacttaacactacaaacagtggagaaaattactgatgttacaaaaatggttaataaagaaacagttgatgtattgggagtaaaaattccaatcagtcatgcacgtcctcaaattctaattggaatcgaccattattggcacttcatgttaccaaattcacaaattcaactacttccatcaggattttactcaataaatacaaaattaggaaaaatattatcaggaaaaggaaatattgaggacacaaattgtaattcagtgacagaaaaaagaaaaagggatgaaacgaaccaaatacttcagaaattttgggaattagaaaacattggaattatcgactcaccacatatgacggatgaagatacagcaatgatacactttgataaaaatgttacatttaaaaataacatataccatgttcgatggccttataaaagagagaacccaaatttaccaacaaattttggattatgtttgggaagactaagaaatgtagtcaaacaactaattaaaaacaaaaatttggaaaattacgacaaaatattacaagagcaaatggatactgacgtaaatgaaattgcggaattaaaatcaaataatttgcttcattatcttccacatcatccggtaataaaagagagctcaaatacaaccaaaatacgaccagtttttgatgcgtccgcaaaacttaaaggaaataattcactaaatgatgaaattcaccaaggaccaaaattactaccagatttgtgtggaatgattctccgatttagactcaaaaattacgtattaattggtgacttggaaaaagcatttttacgagttggattaaatgaattagacagagacacaacacgatttttatgggtaaacaaatcgtacttgaatgaaataaaacaaaaatatcgagaaattgaaatgagagacatcgaattgagacgattcacccggataccattcggagttaacgcttcaccatttttattaactgctgtagtcaatctccatctctcaaaaatagatgagatgtttgaaaaattcaagacacttaaagttaacggagaattatgcctaaatgataaagaagaagaatttaaaaatctttgtatagaacttaaacaaaatgcatatgttgataatttcgtaatgatgtgcgacaatgaaaaggaaataaaattcaaacattattggagtaaacagatatttaaactagcatcaatgaatctgagagaatttatctctaatcatgaacaaagtaataaagaaattcaaaagctggaaggatcagagataccaaaagtaacaaaaatgttgggtataaaatggaatgttgactctgatgaacttgatcttcaaataaaaattccactaatgagtaaagacacaacaaaaagacaaattttgacgatgattgccaaaaatttcgatcccatgggatggatttcaccagtaatactgaaatataaactatttttccaaaaactatggcgatcaaacaaagattgggacgataaattagatgatcaagaaattattgaatggaataatatttcaaacacagatataataaccataccacgttcgcctttcacaagtcaatatttaaatcattcaatattacacattttttctgacgcttccgagttggcttatgccacttcagcttatttacatacaaacgaccaagtgaatctactattcgcaaaaacaaggcttactccattgaaaggcctaacaattcccaaactcgaattattggggttattgatagccgcaagagccgccaagtttataaaaacggaatccaaattgaaccttgaaaatacctatatttggtcggactcaaaatgtgtactcagttggttgaaatgtaaaaagaatttaccaatttttataaaaaatagagttgaagagatacaacaaattgccttggaattacacatcacttttcattatgtaaaatcagcagataatccggctgatttggcttcacgaggagcaactatgagtgaattaaaatacaacaaattatggtggaatggaccaaaatggcttaaactggaaaaggaaaattggccacctcacagcttttacagtcctgatcaagaagaggctccatatttagataatacagaggaaataattaacactcaaataaatttaataaaaaacgaatataacggaattatcgaatgggataaattcagttcatggcttaaaataactcgcatttgtcaaactttattaaaattcatatttttcaaattagagaactctaaaaaatttaaagaaaaatttatttactctaaattcgaaaatgcattacaattaaaaatcatggcacaaaaaatgctaattcgaattattcagagggaaatggaaccaaataaagaagaagaaagacagttaagaatttatctcgataatgatatgatactcaaatgtgaaggacaattaaaaaatgcacaaattcaaggtgtcaatcccatttttttaccaagaaaacactatggaactcatttgataatcatggattatcacacacgaaatttacacgcaggtacaatgacaacattatcggaaataagaaaaacttattggataccgaaaggaagaagaattgttgatcaaatacggagacaatgctatcattgtaggagatataatgccaaaccttttcaacaaccacaaatgccaccattacccaaatcacgagttgaaataacggaaccatttcagaacattggactagattatatgggaccaatacaaataaaaaatttcaatgaaaaatgctggataatcttatttacatgcttcacaacacgaggaattcatctcgaattagttacttccttatccgtccagcattttctcaatgcatttagaagatttatatcaagaagaggcacacccaaacatgtatggagtgataatgcagcacaaataaaacttgcatcaaaaattttaccagaagtgttaaaattaagagaaattctcaaagacgaatcaattaaaagttattttttaaatgaaaatataaattggacattctctatagaattagccccttggcaaaacggagcaattgaacgacttaatcagaatgtcaaaacagcaatgagaaaagtaatcggaaaaagatttattgagtttgattcttttcaaactctgacttgtgaaattgaagcgttagtaaactcacgaccaattacatttatatatgatgaaattaactcttatcaaattcttagaccaatcgacttcatacttccacataaaaatttatgtattcctccgattttggaaaatcaggaaactaaagacccaacatattacccaaaaaagacttcatacgaccaaacaattgaattatggaagaaaaccacgaaattattagatgactattggaaaatttggactgatgaatatataccaagtctaagagaacgttataaaatcgaaaacaaaaatccacgaaattgtatgaaatcttttccagaattgaatgaaattgtaataatacatgatcaaactcccagagcaatgtggaaaactggcattgtcaaaaatgtcataactggatcagatggtatcgtaagaggcgctaatatcgaacttccaaataaaacagtactaaatcgacccttaaaattaatttacccgttagaaattaattcaaatgatgataaagagcaagaaactctctctaatctaataattaatcaaaaacccaattatttcaacagaaaaaggaagatggataatcccttagtccctataaaaatgaatagactgtttcaaaactcgttaacaattatatcattattaacattaatttcattatgttcatcttattcatacgaatgtccaaaggaacctaaaatatggaaaacgagatatacaactctatgtatcgaaaacggttttacaatcagacaaaataaaataacaaaagaattttgctataaacaattggtatgcaaagacaaacatattattaaacgacgcccaccttattgtggtgaaaaatgtaaatgtccagagggattcaaattttgtagttttgcatcttacaataaaatcaaaaatgaatcagttgaaaaaattaattaccaaagcattatttcgttcttcaaaccaaatatctgcgcaccaaataaaactgaaaactgcccaatcatgaaaagaaaattatttaattcaattgttcttcatgacaattcaattcacatagtgaaaacattaaatttacttttttcccaaattgactcaataaacaattttcgttgttttggggagggcaatctgacgattggtactccaatttactgtcgagaacatgactgttttaaaaataattcattcaaacaaatatatggaacgaaattttgcttttacgatccatacgaaaaaatttaccttgttaaatctgatgaagaattaattcaaatcaaagcatggggaactattgaaaaaatattttacttgccaaataatttaaatcaaccattcattgaaaatagacggaataaaagagaagaaaactcttcaatcactgaagaatcaaccattgagtgtttaaaaggaggcattattattaaagcaataaatgatatacaagaattacaaatttccattgaaaattatacaattataaaaaagaaccctcaaaaagaggaaataatttatttacccccaaaacttacatcctttgaatataaacctgtaattaaatttataagtaacccagataaatcaaatgagaaacaaatcacatgtcaatcatctcccgtatgtgaattaattaactgtcgattttgtatggattatcttaaaaacccacaatgtgtagaccagattcactgggcattaatgcttgtaattataatgataattttatgttatttcattaagcctccaaattattcgaatactcacacgttttatccattggattttacaatttatttttaa

SEQ ID NO: 80332 - DNA, 2009 bp, Heterodera glycines
  unsure (1)..(2009): unsure at all n locations
atgccgcaccatccggtgagcccgcagcagcccgaaagaagagagcaccagcccaacttcatcgctgcccaagttgcttgccctgagtgcattgacaacggcagctggcgcagcaggacaacagcaggctgtcgaatttgtgggccgcatcgaactgttgccttttgtcaacgccgctttgtggacacgcacgtggaccatcaggtggtggtggccgacgacaatccattggtggcatttgtgcattggctcgtcttcgaactgccgatgagctacgacacatacgcctactcacactttggcggacggttcgacatggtgctcgtctttcgcgagctcttcagaattggctttaacccagagatgctgagacgagtaaaagcaaaacattttttatggtgataaaatttcaaatctttagggcaacaaaatgtatgagatgaaagtgcgtaagcagaagaggcgcaacccaaacgtcgtcttccgggactccttcaacctaatgccttgctcactgacagcgctcgtcccttcatatgggctggaggttgaggacaagccgttcttcccccacctgtcgaaccgaccggaaaactacggcagggaaatccacccaacgcccgacgactacatggccagcggtatgatgcccagcaaaaggcggcaattcgatgcgtggtacgccgagaaccgtcatcacccgttcaagctggatgaggcattagcaaggtggtgtttctaaaaatgttgccaaagcccactcattttggctctctcagctattgcaccaatgatgtggaaatcttgatggccgctctcgtcgcgtttcgccgtgaattcttcgacatttcccggcggcaagaatacgtggacggaatagacgatagggagaaccacaacggaatcgacgttctgcgcgaatgcatgaccatcgcgggtgcatgcatgcgtcacttccgcaccaaccacctgcccgctgagcatctggccatcgtccctgagcgcggctatgacaacgcgcagaaccagagcctgctcgcgttcaggttcttccactggtacgcggaggagcacggagcggaggtgcaaactgcccactcagccggaggagagaagcgaataggacagtattcgctggatgggtggattgaggcggaagggtgcgccattgaagttaacggtacacaaatttattttttatttttatttttatgaatataattttaggctgcacttggcacgggtgcaaaaagtgctatcccaacgacaacatgttgctccccagtgggaaaacagcgggggaggtgcgcgagcgcgacgccaaacgtctggaatttctgcggcggcaagtgaaccgcgtggacgtacactgggaatgcgatatccatcggatgctggagcggagcagagaaatgcgcaagtcgtttgctgattatgtggatgatgggccgttggtgatccgggacgcgttcatgggagggcggacgggaccgctgaaactgctgcgcaaagcgggaccaggagagaagatctcctactacgacttcacgtccttgtacccgtatattaagtatgtgtggtgctcgtcgtttttaaataataaaattttgaaatttagtttcgtcactcgctaccccattggccatccaaaagtgcatgtgttgaaccggcaagtggattggcgcaacgcagcagacaacccctacccattggcactgctcaaagtgtgggttgtgccaccccgtcgcgtcgacgtgcccgttctgccggtgaaagttggagagcggctttgtttcccgctctgcagcacttgtgccaaagagaatccgactggtggtgtgaatcccaactaccactgtgagcacaatgacagacaacgaggatgggtgagcacgtgcacttcgattgagctcaacacggcgctggacgagggctacatcgtcacgnagggtattccgcgtgctggagtacgagcagagcgacgacaaactgttccgcccgtacattga

SEQ ID NO: 80333 - DNA, 451 bp, Heterodera glycines
atgtcttcatcagaaacaaaattggatgaaaaatcaaacgaaattagcaacaatgaattgatgggagaaaacaatgccaaggatggaaatgtgaaaggtttgttggtactttttcagtttaacggattttaaatgttcgaaatttaaatataagtacatttattgcatttaaaaagtatgtgaaatctgtccgttaaactagaaaagtaccggtttctttacttcatttgatttttcaattttttaatatccagaagcaaataactcaactgacaaatcagctgaagcagaagttcacacagacgaagcccagctgggaattgctgcagttgacccaaaaccaacggacttttcggaaaaaccaactgatattcaaaagagtgggaagccagaggaacaacagcaacaacaggtgatagataacatctcaagtacgattattagatgttga

SEQ ID NO: 80334 - DNA, 655 bp, Heterodera glycines
atgtcccaaactgaaaaggaactactggcagaaaaggtggacaggcagcccaatgaggaggcgaagccgacagcttctctaaatttgttcgacctcagtgtaatgcccgactcagaaacggttagaaccatcatttgcctgtaattttgaaaaaaaaacgaactatggactcactttttatatggttttgctatttgtgtcagttttacaaagtaggaatggggagagtatggataacgaaaagcatttcaaggtctgattttagagcattgaactcaaccaaatgcgagtggacgctgtgccggacttggcaaggttcacccaattacaggttcgttcgaataaaatgtccatttttttataaaaatttaatggagccaaaatccggcgctatttgcaaagagggcctttttgaattttttttcacttttttttggtcaatttttgtttttgtttttttgacacataatgatgaatattaagtattaacagcataattatggcgaataaaaaatatattcacgattttttatctcaaaaaaattttgcaaaacaatagggtcccccctttggtttttgataaaactcaaaatttgtcaatttttaactagcgctaaattttcttttaaaatgtttttttcagtttattaaatag

SEQ ID NO: 80335 - DNA, 1051 bp, Heterodera glycines
  unsure (1)..(1051): unsure at all n locations
agacagaccctaaaagcctttattttttcataaaaatttgctcaaaatcgcgaaatcgtatagtattatagtatgattaccaaattttggctttatgttctacattcaaataaactgaataaacaaaacagaaacaaaaacccgaacccataaattgcacaaacccggaaaaaccagtaatgtttgggacttcataacaaaaaatattggaatgtctgctgctgtaaaaggatcatggacattgaaaacgctatttctcgcggcttttctcatccgtttattttttattttttatgctcgatttcatgattattattttgaggcgagtttttactgcttttttcattaaatttggtttgactcattttgtttcccggtttcaaatttattacattttcatttgtaattgcttttcccttttaaataggtaaattttactgacattgattatgaggtgtttaccgaagcggcccttttggctcgtgaaggacattcgccctatgaacagcctgagtaccgttacacgccattgatcgcttggctattggtgccaaatggacaattcgccgattttggtgtcctttttatttactttataataaaatgagaaaatcagacgatttttatctatgaaagcgaaccaataactttttgcaaaaatttaggaaaactagttttctgtgccactgatgttcttgtcgcattcctgcacttacttatattggaaagtcggcaacaaaatcaaagaaatccttcctcgcaaaatgaaggcaaaaccattcattcatcatccgtcgtcttccgtcattttggcgtccttttctggctgttcaacccattcaccgccatcatttccgcacgtggcaattgtgatgcgatcatttgtgcactcgttttgttggcactgtttttactgatccgtgtgtggcagcggaagaacgatggcataaccgccacatttctgcgcttggcactggcggncgttgttcacggngccggtgccacccattttcgcattttccctgtgnngtcgacgcatttattgtatttt

SEQ ID NO: 80336 - DNA, 208 bp, Heterodera glycines
atggttctgctatcacttttgccaatttaaacactgttaacgccaaaaatcagcaggtggttatagattaaattattataaaaaaataattatttggaaatatttaagcgcaaaaagatgaacaaccgtgatcattttgaattggaattgagtgccgaatcggatcaccgatcaccagacaaatcatcaaaatttcagtaatcaatta

SEQ ID NO: 80337 - DNA, 1706 bp, Heterodera glycines
  unsure (1)..(1706): unsure at all n locations
atgtacgaggaaagcttgttgggccttggacttgaacttgagcacgcaaatgcaactgcaattgtaaaatttttattcccaaaattttttttctttttttccactaattatttaattaagaatcccaacatcaaatttgtgctaattcacgccccattcaaagtgctaatgcgtcaagcggaattaatgatggtccgaatgccagtgcataggaatgacgtgagaaaggtggaataaaatatttattaaactattaattaatgattcaaaaaattcattaaataattaattcattcattaaaaaattgctttctatttaaattggttggtactacttccccatcgaattgtttttaaattttttagcgattttgtaaattaaaaagaaacagaaattcatcaaaattttaaataaattattgaaaaattattcaaaaaatttttcttgaaattttcgtataagaaaattatctaaaattttttttgaaattttctaagaaattctttttgatggttttgagtagcactccagcatcatttgtcctgtatggttcgaatttttgtttaattttttgaacggtatttttgtatattttaagtattattggaaaaaaggatttgaccctgctgccttggaaatgtttcaaaaattaaatgaatttattatttataaatttctccaaattttcaatgaatctgcgagattttttaaacaaacaaattaaaaataattaattaatttaaggaatggaatttgactgatggttttgtgaatgcctgcttgaagcggcttaaatttctggactttgacccaagaataaagaaacggattgagccagaaacttatttttgtcaaccatttgttgcgcaacactttgaatggtgggtaattaattaattgtggtactaattagcaaaacgcgaatttacatggaaaattttttaataacaggaaaaaaagctcttattttgcttaattgngaagcttttaagatgaatttttacattcttatttcccattaactaacataatattaagtaaaaacgttaaatattaaaaataaaattttttaattttattagtaaattttaaaaaaatattttttttttctttgacagttttgttggctatgaacacccggagacatttttcacccgagctgatcgggcccgtatggtccacgatttgttgatcagagcgcggtatgaccgtggtgaaagcatcaacaaattgcgatttggcatcgacaaactgctcaggaacaggacttacacagctgcattcccacttcatgatgtgaaatttggattttcttatacaatttttagtattaaaaattatattttaaattttaaattaattcatataatttttgtttacaaataattttttctgtttgttaccatttaacggttttaatttttttataaaatccatatgaatattttaattgataatatagaaattcttatttaattttggatttttaagaatgagttgagaattttcaaaaaaatttttagaacggaaatgttaaaatcaaaacacattctaggaatgggatttcttaaatgaacatatttgtttaaaacggaataattaaaatatttaaatcatatttttaatttactccaattatcattaaaatatgattaaaatttttaaacctaattaaacttttaatgcaacataattaaggaattga

SEQ ID NO: 80338 - DNA, 2346 bp, Heterodera glycines
cagaaatccccagaaaaccaccacaacacgggaagcgcgaagaaatgggcgcagcttctagagtcacgaaagggtgggctaaatgtaagaccaaaacttattattttacatgatccatgtttagggtggatcaaggtgctaccttcgtcgagccaagaaaactgccaggaacagccggacaaaaggggaggatgcaactcatcacaaacgtttgtctttttctgtagtgttcaaaagagctaatactgtgggtttaggcacacattctcaaactgctgggtacgcaagccatctaccactacgaggtgaccatcaacgcagtgagcagtcgttcggaccgaaagtgttgcgtttcagagccgagtggtccacgggatagggacgagtatgtatgcgttgcatgcttggtaaacatctgtttagtttcccattactcaaccgtcgtgacaaatgccgtgaggtcttctcggcattctacaggaccatggagcagtcactgaaagacaccgggaacttactctactacgatttatcgaaaacaatattcacgttgaagaagctacagatcgaggtttatggctttgggagttggcattttaatgataacacatcgtttagtcggaaggaaagttcatgtttaacatcggcacggtgccaaccgcagaacgcccagacgcggcacggtacaaacattatgaattcatcatcaggccagcgacgggcttcgaggttaacgacttgtccttcatcacaaacgacgtgtcgaaaatggaacgatcacttgagcaattccttgacattgcaacggcgcagaaggccaacatggacgggcatgaatttattcaaaccaataaacatgttattttaacaacattttaactattcaacgggctaaattcagaggtgtagtccaaatccaaatttcaaaaattaaggagtcttaaaatttgaatttaacccaactgttaagaactcaaatgacttcttattcagaaagcaattcatcgggttttcttcgtctcgtgtttacttattggcgccaaccgactatgggttcggagccaacgagtgtcctgtcttcgattccaaccactcattccttggtgtaggagtgaacaagggatgtcgaatcgttgaaggtttgttctttttcttttagttaactcattagaattcaggcgaccaaggccctggccaaatgacacctgccatcgtcatccaaactaaaaaggtttatctttatgggttccatcagtcgtgcccataattaatttataccatgttacattcattgtcttagtccgccttccacattccggacatgtgcattttggacaaagcaaagacgctcctttttcgagagaatcagggaagattcgagacaggcgattttactcaaagtgactacgaggcgctttgcaatggccttgtcggtatgctaattataatgcgaatgtgtttgatgtgaattattttatacccattctccaggaatttatgctgaaccgcgctatggaacttctggacgattttttcgcatcagtgacattacaaaaccaaacactggaaatggtcttaacgcggagaacacattcatcacacaccaagtcagcgggaagatcagcgtcaaacaatatttcgaggatacctatcggaaaacgcttcagtgagtccactatccaacacgattgctttcttaaaagaaacattttggtaattatttctcgatttcaggtaccctaaagcaccactcctcgtcaattatcgcagaattggggacccggcgtattatcccatggaggtacaacagacaaggcaacaatttaattaaaacacttttaggtttgctttgttttggatggtcaacgcgtcaaaagttctcaacaaaatcctgagcaaattcgtgtaggtgtttagcgatttcatttttaatcgtcattctattccaacattaacaataagtgtttaggaaatgatcaaagagactgccattccgcccaccgttttgcgagtgcacaacgaacgggtgaaggagtcgcttcagttggtcaacaacgaatacttgacgaaagcgtccgttcattttgacacaacgccactccatgtcgattaccgtgttcttggtccgccagcaactctttatcggaacaaccatcgtgtcactcctgccacgtcaaactgtgaatggcgtccgggtgacgctttggtgaatgcacaaattggcacctgggtagcctatgcgtttgggaaccctgtgggtgactcggtgcgacgattaggcttaaccgaaacgatgtggaggtaattagcgctgaaattcctgatttcgtttcatgtaccaaaaaa

SEQ ID NO: 80339 - DNA, 633 bp, Heterodera glycines
gtgagtgcgggtggtggtcggcagaatggtgagttttccgggcccttcagttcccatagtgtgctgccgtggttggaacaccaaaagacatcgcgtccttcttcggtggtgattgggcttttgggccagcggatcaacttgattcctgggcgtggccgttgttgtggacgtgatctgtacactgtagttgttcggtagtccatggtccgtgacattggtgtcgtcgtggttgtccaggcattgggccgtgtggttgctttggttgaccaaattgttgagcgtgttttggttatggtcgccgttgtgcgtggtggatttgtagtcgttgtgcgtggtggatttgtagtcgttgtgcgtggtggatttgtagtcgttgtccacggtggatttgttggtgccggtggagtcgttgtttgcggtggatttgttggtgctggtggagtcgttgtttggctcagactccgattaagggcgaggactttgtcaatgtatcgctggacgtatggactgtgttttgttgccgtcctcttgtcacgttccgtgaataggttgaggaagttggaaatgtagccgccgtgccatgttttgacttccgcaaattgcttttgtcgagttggttgtccttttgccgaa

SEQ ID NO: 80340 - DNA, 1574 bp, Heterodera glycines
atgccggagccaatggagttggaccaagagcccgggacgtcaacgtcaacaagttcagcccggcccggaacgtcaacaagtcaacaagtgatcagctcgttaatgctgatcagcctcctttgccttctcttcaccagttcggcaaaaggacaaccaactcgacaaaagcaatttgcggaagtcaaaacatggcacggcggctacatttccaacttcctcaacctattcacggaacgtgacaagaggacggcaacaaaacacagtccatacgtccagcgatacattgacaaagtcctcgcccttaatcggagtctgagccaaacaacgactccaccagcaccaacaaatccaccgcaaacaacgactccaccggcaccaacaaatccaccgtggacaacgactacaaatccaccacgcacaacgactacaaatccaccacgcacaacgactacaaatccaccacgcacaacggcgaccataaccaaaacacgctcaacaatttggtcaaccaaagcaaccacacggcccaatgcctggacaaccacgacgacaccaatgtcacggaccatggactaccgaacaactacagtgtacagatcacgtccacaacaacggccacgcccaggaatcaagttgatccgctggcccaaaagcccaatcaccaccgaagaaggacgcgatgtcttttggtgttccaaccacggcagcacactatgggaactgaagggcccggaaaactcaccattctgccgaccaccacccgcactcaccgcgcaatggacaccactgacaatcacgctgtacaccaagatccatcgaccggaaccaatcgcaacggcatggcactgcttcatcaaaacgacgaaggaaaattattacacaacatcgtcggcgataagttcgtcgaaatcaacaaagaatttccgttggtctccaaacgactctgccaacgaatggcacatcaacaagaatgcccactcgccaaaacggaaatgcaccacgttggcaaccacatttgggcaacaaacgaccaacttcaagtggatttccctggaccaatcactggactcttcaaagggaagcaaaccagctcagtaacaaattgttttgcgcaaccagcaacactgttcgtcaaatggcacagtctccaactactgtcgccaatccatcgcgcagaccactgcaattacgcttccgagtattgccagctgcaaaacaacagttcactcatctggacttcagcatgtccaaacgacaattgtttcatgtgcgatttccaagaagccgaagaaatccacggagaattcaccaagctcaacggtcaaacaacagcattttggatctcggatgatcgacaaaaggcactgaccttcaccgagacgcatgccgtgcaagcatgcgacgggagacaaatcgtcttatcagagcagaacttcggcattccaaaagagcaattcgacatcatcatgagcgaccacacaagaccgaaacgcaacgtgcaacccgaacaactcgcttcacagctttccgctgctcaacttgcacaacaatggcactctcacagctttacttaa

SEQ ID NO: 80341 - DNA, 1311 bp, Heterodera glycines
atgattggcggcgctaaaattcttttttccgctttcatttttatgataaacattgaaggcattttcagcacttacggagatgatttatatgcagatatttgggaaaaggcttttccaaaaaattcacaaaatttaatggcaaaatcaaaaaacggcaaaaaagttggaaatgcgcaaaaaattattgtaaagcaaaaaaagacggacgaaagacaaataaaattgggtgaaaaaaatgtaaaaattgaagaaaatgagggggggacgacagcagcagaagaagcaaaagtcaggaatgttcagaaaatgctgaaaatagtaaaaaatgagccaatttttgacgaaaagattcaaattgatgaaaaaagcggccaaaatttccaaaaaattcaaacgaatttaaaatttaagcaagcgaaaaattggccaattaaaaatttcgaaccaaaaaccgaaaaatatgaagaagaatttgataaggtgaatggggaaatattggatgaaatagccgaaaaagcaaaacaaaacgcataaaataagtttaataagaccattaatgctaataagtagagaagagcggggccgggaattttgggcaaaaccgggaccgggacttgccgggacctgagaagccgggatcgggaccttggaggaccgggaattctcgtcccggtcccgctctactgacaaaaaattattttatttttcaaaaggagaatcaaatgtccggaaatttgttgtatccggcattttaaattttctctgaaatccaattcctagtaataaaaaagataaatcctaaaaatcgcattgaattagtgagcattcccgagaaaaacaaatgatacgatcactgaaaagtcaatgtttaaggaatatgaagaaagcaatcggataaagcaggcaaattccaaagacaaaagcaaacattctgatcattttgatgaaaaagaaatattaaaaataatcaaagaatttgacaaaaggagagaaatattgaaaaacaaaaacatttacaattggaaacaactgaagctaattgaacgagaaattgccagggaattggggacaaaattttacagaattcgagactggaaaagggaatttggactggtgaaaagagcgaaaaaggaggacaaagaaacaaagttggcactgattgaacagtttgacagaatgaaaaatgagcgcaaaatgaaaaagggatacaaaaatgccgagaaagtcggcattgaatgtgaaattgccaaggaattggggacacatcgggacaaaatttacaaatggaaaagcgaattattaagtgggtga

SEQ ID NO: 80342 - DNA, 1884 bp, Heterodera glycines
atgctgttgccaaatggaaaatcggccggagaagtgagggagcgggacgcaaagagattggaatttctacggaatcaaattggtcgtgtggacgtttattgggagtgcgagattgagcgaatgcttgctggtgaccgggggatgcggcaaatgttttcgaaatatgttgatgatggtccactcgaaatccgagccgcctttatgggaggacgcacgggaccattgaagctcttccggaaagctcgggatggagaaaagatttcatactacgacttcacttctctctacccgttcatcaagtgaaaatatttattttattattttcataattataaaaacatagctttacgactcgctaccccatcgggcacccaagagtgcatgtgctgaacgaagaggtggaatggacaacatcggccgacaacccctacgatctttcacttctgaaagtttgggtcattcccccgcgaaactgtgatgtgccggttctcccagtgagagtgggtgaacggctttgctttccgctttgcatgaagtgcgccagcgatcacccgacaggcggagttgatgaaaattaccactgcacacataacgattcacaacgtggttgggtcagcacttgcacatctttggaactgaatgctgccctggacgagggttatcgggtcaccaaacttttccgcgtattggaataccaaagcagcgatgatcaattgttcaaatcgtacattgcggaatttatggcgctcaaaatccaagcatccggctttgacaccagtatcaaaggcaatcctgagcttgaggaagcgtttgtgagggagtgttatgagaagtttggcattacaatcgatccaataaagatggagccgaacaaagggaaacgatcgatagcaaagctctgcttgaataacttatgtatgttgtctttaaatatattatttttaaataaatttctagggggtcgattctctcttcgcaactttgggctgtcgcaaacactcatcacagatgaccctgtggttctcgctgaatatttggacaaccggtcgctcgaggtcacagcgattgacgaattggacgctgaacacatactgatcagttatgagaaaaagaaagagtgggtcgaggaacatgcatgttccaatattggtataataatttatgaaaacaaaattcaataattaatttagtaatatctctttggacaacttcggcggctcggctggtattactaaaggcaatgcagaaggtgaaaagggcaccaggctgtgagctactttataccggtaataaaaataaataaatttaaaaaatgaaaattatttttcagacacggatagcctcattttggtccatcctcttgaggtgtgtccattgcaaacggggcctcatctcggacagttcactgatgagtacccgaaccatgagattgaagagttctgttcaggcggagcaaaacaggtacatatttaataacttataatttactaatttaaaattcagtatggtctaaagcttcgccgaaaagctgctccagctgacgctgaaagcgaatatgttctcaaagtgcgaggaatgacgctcaactatgacgtcattcagaaccaagggcttcgatatgagacattcaaggaaaaagttctgcgatatggtgagaccggtgaacctcagccgatcaacattacttacccaaactttctccgtcccagcattaagaatgggagggttacgtcttatccccttcacaaaatttataaaccctttgtcggtaaaggtattgtcggagccgaccttagtgttttagattttggccacacattgtaatcatattgcgcatttcctttgtatttttcatttttttgtaagcatattaatgaatggaaa

SEQ ID NO: 80343 - DNA, 621 bp, Heterodera glycines
atggcttgggattatgagtggggtgatgagtataaaagctttactccttcagcagataagctcattcttgtattcttgtcaaaaatggttcttctcagtgtgttctgtgctgagcttctcaattgccgagtttcacagcttcgcgaccgactgaaccatcctgaagaccgcacttacatattaaattcactaaagggtcgcaaggtcacgacaacatacaaggacagaaacggaatgaccaagaccttcttcattggaggtttatcggaaaagggtgctgcacttacaatggcctacggttgtctctctcgccctttcaacatcaacatcgcagctcatttctatgctcggcatcgcatcaagcttcatcatccttatatagtctgcataattgaacgattctcaaaaggaaaagaggatcggctctatcccatggaattgcttgagcttactgaggacaaccctatttggcaacgatggtcaggacccttattcgcagagagggacccgaccccatcacacacgtcgggtcggtttgaaaatgatgatgatgataatgatgaaacgttaaaagatgttggccgcaatcagtgcacacaatcgccagatttattttggtga

SEQ ID NO: 80344 - DNA, 1027 bp, Heterodera glycines
atggatgcaatagaattaacgtcaattttgatgcaaaatcgtcgatcggcccaaatctttcggggatgttatgccagcgatcaattaccttcaccaggcactttggagtatccagcggcgttaattgtaaatcgagaccctcacaacaagaaaggatctcattggtgtgctatttacgctaggggattggaaggaccagtgatttatttcgatagtcttgtcttaaccataccccctcagattagcgaaaattttttaaataaattcaaaaatggtatacaaaggaatgccaatatgtatcaatcaccattgacatcaacatgtgcacatcattgcattgtatttatttaccacatgtctattggacattcatttccaaattatttacgaattcttgactccaattcaccacccgatttatttgtaactgtgatgcttaataaaataattgaaaattaaagtatggcttgggattatgcgtggggtgatgagtataaaagctttactccttcagcagataagctcattcttgtcaaaaatggtttttctcagtgtgttctgtgctgagcttctcaattgccgagtttcacagcttcgcgaccgactgaaccatcctgaagaccgcacttacatattaaattcactaaagggtcgcaaggtcacgacaacatacaaggacagaaacggaatgaccaagactttcttcattggaggtttatcggaaaagggtgctgcacttacaatggcctacggttgtctctctcgccctttcaacatcaacatcgcagctcatttctatgctcggcatcgcattaagcttcatcatccttatatagtctgcgtaattgaacgattctcaaaaggaaaagaggatcgactctatcccatggaattgcttgagcttactgaggacaaccctatttggcagcgatggtcaggacccttattcgcagagagggacccgaccccaccacgcacttcgggtcggtttgaaaatgatgtggatgatgatgaaacgttaaaagat

SEQ ID NO: 80345 - DNA, 559 bp, Heterodera glycines
atgatcccaaaactgtcctattctgttgcaataaccttcaaaataattacaaaatcgtcatccttttttaattttgatgaaaatgtttgcgtcgttgggctggatagaaccgcgatcacttttccttcaaccactgagccatacaagcgattgctttttgaaatgggaggccaaattgaaatgctgtgtttaataatgtgtttcggtgtctccgtctgttggcttctcttttcccactcaaattgttcttttagtccaaaatgggctatcgccagggcgccggcctcggggccaaagagcaaggcatcagcagaccgttggaagtgagtggaaacggcacagactttgcttttcttattttgtcgaagttaaggtgcaaagaacgggcaaaaacattgggctgatctttggcgaggaaggcgcctcgacggtggtcacttcgttggaggaattggtgcctgaacagcagcaccaaccgaacggatgatgaacaaaactatcccaatttgatttttttgttattttcatttttcctcaatttttaatttggaataataaa

SEQ ID NO: 80346 - DNA, 1229 bp, Heterodera glycines
  unsure (1)..(1229): unsure at all n locations
atgtctctgtacgacgacattggaattgaatcatcaacatcagtgcaggtcaaagaagagaatttggagaaaaaaggttaagctgacaaatgggacagcaaatgaatgaataataaaaagaaaaaaatgacaatttgacaaggatttttttaaattaaacatttgaaagtgcagctgatgactttccgacaccaaactctgctcaaaaaccccaaaatgtcaccgtctcagcagtgtcagcggtcaacaaaatgaatttgtcctttctcaaatcgcaactcgaagccaagaaagccattctacagaatgcggccgctgccgcttcgcaaaatgttcggcaatttttaaagctaaaaaatgcattttcatttggccaattttgccatttattcggtacatttttctcagaaatcagcccccggcgttgccttcgcgcagccgttacccgccactcttccgaatatgcctcagctgctgaacaagaagggcggcacgttcaagctgaagccacacaaagcaattccattgcccatcgattcgaccggcgctttcactttggtgccgaaatcgctgaaagaagacaaagtaacagactggaaaagggttttcggcatttttgttatgtcttaacgactattttttgcattttttgaatgggattggccatggtagaaaattaaatgagtgagtattacgtgtaaggattgtatttttatgatttttttttctttgatcatttctctgccaactccgtcggattgtccggcgattgcgccgccaaaaatatttttgtgtttaattgggcattactttttccctataaaggtatttttgtttggtgaactgatggtggaagacgagtacaacccaaccgcacccactgattattcgtcgtttaaacagaaaaggtaaaattgcaccaaatggatgaatggccccgacttaagagaattgtttcaacatttttttttggttttcttaaattgggccaccttttttcattttctgtcaacaaattttaattttagggagcaacaacggttaaaggtaagcatttaataatatgatttaaaacaaatttactcttaattgaattccattcattttgatcggtttttcctttatcggaattctttccaaaattggtttctaaaaatgtctttttatgtttctaaaaatggtctttttatgtttctanaaatgtctttttatattttattattaataaa

SEQ ID NO: 80347 - DNA, 648 bp, Heterodera glycines
atgttcgaaattttaaaagttgcaattttatcaatattttttacaagtatttttgctgaatatttatatgattctgtccgtatcagtgaagcacaactttctgttaaaatgaaggacaaaaaggacaaaagtcgaccattgggaaccgtagagtaagctcaaatcattggcataacagccaatatttaataatactttttatcggaattaaattaaaaaaataaaaataaattaatctcgaaaaaacatttttatatatgtataatatacgtagtacatatttattatttattcattaatttaactattttcaattttttaatattttttagtgtgccgctcaatgaaaaactctcaaaattggtgcgtctcagcaaaaacttcatcgctcaaatttcgtttagagttagcatataaaacactcaattttcaatgccatttgctaattctcagattgtcgacggtgccaacggtcgcccaattgaaaatttgcaacaaaaattccttcgcttttcccattcaaaatcaccagaacatgaagtgttttttgttgctaaagaacacaaagaatcgaatggtcattaccaacttgaaatggtacaaaattttctttaaatttctttttttttcaaaataatttaagaataa

SEQ ID NO: 80348 - DNA, 436 bp, Heterodera glycines
atgagggaaatggtaatttatcgcttgggcgatggtggtttgacggccagcattgtgaggtacataaaagcaatcaaatgattgattaactctttttgatttatgggtcatgacaacggaggattctctaaaaaatcaactcaaaatcatttgttttttaataaatttttaaaaatatttttttttcgttaatttaaatgtacattaaaaagttggaaaattgcaaaaaattttggtttatcaaatcatataaatgtcatacatgcttcctttttcaattttcagtttttcacctacaaaggccaaggcggaaacccgaacaatttccaaacaaagagacaatgtgacaatgtgtgtgggtgttgttgagagacaaaagagcacagcaaaaatggacaaatgggcgaaaatatgtagccaaaatatgaacaaataa

SEQ ID NO: 80349 - DNA, 113 bp, Heterodera glycines
cttggcattcgcactttgccctcctttgtgccgcatccgctctcctcaaatggcgacagaatggtaaaaggacggcgtggcattccattcatccgactggcccccaaaaatag

SEQ ID NO: 80350 - DNA, 6174 bp, Heterodera glycines
ttattatttcttttaaatagaatttaaatgattaaaccattcatgttaaattctggccacaacgaaatgataaaatgacaaaaattatcatttttaatttacaacactgtgtacatttttaatttttaacttttttaaatttttttaaatttactaagacatgtttatatttccaaaaatataaattcactaataataattgttgataaaataataattttcgctaccatacgtcatcggctggctcctaagatacgattgcagacagaaaacttattaagacaagaaatatactcaaaattcagaaataaaaaattattaataaaaaaacagggctggaacgcggacagaaagaaggcgtgagtagttactagcccccttttccgttgttggaaaaccaccgttccaaaccaaagcctattggttaaccaaaacctattgaatgggtgtaggagtgaacctaaacctattggatgggtgcgggggtgaacctaaacctattgaagggttttgattaataaaaaataaattaaattaaaaataaattaaataataaattataaataaattaaataaataaattaaaaaaaaaaaaaatttttataatttaaaaaataattgaataaaaaaagctaagattcattctctctctctctcactatctttcttttctttctctctctcactctctctcttatctctctctctctcacactctctctcttttttctttctatctctctcattctctctctctctcactatctttcttttctttctctctctcactctctcttatctctctctctcactctctctcttttttctttctctctcttatctctctcttttctctctctctctcactctctctcttttttctttctctctcttatctctctcttttctctctctctctcactctctctcttttttctttctctctctctcattctctcttctctctctctctcactctctttcttttctttctctctctcactctctcttatctctctctcactctctctcttttttctctctctctctctctctctcactctctctcttttttctttctctctcattctctctcactctctctctcttttctcttgctctctctaataccacacaaaaatataaataataataataataaataaattaaaaaattaaatttaattaaaattaaattgttaaaataataatagttaaaaaattaataaataaatttaaaataatagataaaaatttaaaaataaatgaaaaaaatttaagaaattgataaattataaaaaataataataataataaacacaaattataatagtcaaataaaaaaaaaagctgagagggcgctacctattgagtcctaccgtttcagtccttgactagtcaatccggggtcaaaattttgaatttggcgccaaaactttaatttttcgttatttttgaatttgagaaattggtttagttttggcggatgcctattggaatgtttttatagggcttcgctaatgtttaaaaggggaggggtgggcgtcagcttcgggagggaagcgacgccgggtcatttgagagcacgcaggggccatttgagcgctcgcacttgtcatctatgcgcccgcaggtggtcatttaaatgtccctttactgtcaccaatactccatcctaatggaggggtagaggccgtcccttatgacatctctccccaaatgaccatttcgttctcaccatctgtcgcgaaagcgaagggttaaatatgtctctttggcaacctgccaaataaccattttagctttagccccgcccactttaactagtataaatagccgcccatttccagccaaaagtcaacttctcccattcattcgcgaaaattctacccacattcattgcttgcgcgctccgtcaaaaaaatatttaaactaacaaatttgcaactaaattaccctttcatccaatattcaacttataaaaaaaatattttcaataatttttctattacaactataaaatttacatttttctaattcagaatattctttcatattatcttatatcatctataaatcataaatttttcattcatatattattattcaaataaaatgaagcgtttttccctctctcaaaattcttcctcctccttccccaaaaaatcccaaccaaataaatgcattcgtaaaattgataacctcacttcaaaaagtaaaaaatatcaactggtgcgctcaaaatccaaattcgtcatcgaggaaattgacaaatgtgctgaccccgctgcggagctgcgctcatgtgtgcaccattcgatcgaggaggcgatttcggatggacaaaacacactaggcgcaacaaataaggtgggggttataatttcatcggaacttttagaccagggtgacatcatcctaccaattacaccaattaccgcaaatgtcgtggacgctgttttcaaccagttttgcagtggagcagagcaaatcgaaacacgtcaacttatatggtgctccctttataataaccgtcaccgttctaaacaccaatggactaccgcgacaacggacaacaaagggaaaagggcgaccgcctgtctcctcacaatcgcacattttcaaagtcaacaacaacgacaactactgtcttttttacgcgctggaactgatgcgctactactcattatatatcaggggagtaatttcaaggaaacaatttagatggctcaaagataaccaaaccacggttttacgacaaaaggcgctacaactactccgcgaggcggggatccctacaacagagacagagtacgacgcggaagtttatatgcatcaagtgcaagggttgtggaacgtcaagtatcccggtgagtacaaaatatttatttttaatgactatcagatgcgcccaatcaccaaatccgatatcaccgactaccagtttcccattcttctctaccacaacaacaaccactttgacggaattaagacaatatcgaaatttttcaacaaaaaaaactactgtctctcctgcgagtctccgtactacaagaaaatcgagcactcattaaaatgcacttcactctgtcacgggtgccgtgaggtgggcgtcgactatccctgcgatccccagcaaggatacgtcaaaaagtgtgagcactgtaacaacaccttctacaacaataactgctatgggcgacacctccacaaggatttgtgtaccaaatttcaacgctgtgaagattgtggggtaatttataacataaaggttcatgggagtgttgggcataaatgtggggaacagttttgtaaactttgcaaacaatttcatataaaagaagacgaagatgagatgaacccctgcacgaaatgcttcatccaaccccttaaacaacaaagaattaagtcatacaggatcatcgcatacgactttgaggcgacacaggacaagaaggtggagaaccggttcgagcatgaagttaactttgcagcggctaccatcatctgcacagactgcattatcaacggcgactggaacaaatcacttcagggaaaaaagtgccaaatttgcggtcctcaccgctcaatcaccttttcaccctttgactacacggagacaacagtcgaccaaaaaatcatcactcaacaagcgctacgcgaattcgttgaatggctcctttttgaccacaacaaaaagtttccaacagtcgcgtttgcacactttggggggcgctacgacatgacgatgatcatcaaggaggttttagcgcaaggaattcacaacccggacatcatcaaacaaggaaatcgcctctacgagctgaaaatcagggaaaacgagcacggcccactcaccatttttcacgacagctacaacgtaatgcccatcaaactatctggcctcatcaaatcttttgggcttcatataaaagataaacagcactttccccatatgttcaacaaatcatcaaactacgataaggtcctccagcaccttcctccacgtgaagactattgccctaaccaaaagaagaaggcggatctgcagaaatttgacgactggtacagcaacaacctataccaaaaattcgacctcaaagaaaaattacccgaatactgctgcaatgacgtccaaatccttacccacgccctcgtcgaattacgccgggaattcaaacaactgacacaacggaacggaaagcacgggggaatcgacattctttgacaagcaatgaccatagccagcgcctgcgtcaaaaattatgcactcaaccatttgaagcccaattcactcgccatcgtccctgaaaaaggctatactccacaacagaatcaaagtgcactggccatcaaatttatcgactggtactcccacatcaataacgtcaacattcaaactgcgcactcccgttacggcgaatatgtgtttaagcgtgaaggacagatataccaagtggacggctacatcaaagggactaatgggaggcgggacaaaataatcgaggtgaatggctgtctgtggcacggttgtgaggagtgttttgacgagatggacgacgaaacgaagatgccaaacggaaagacgctgcgggagattagggaaagggaagagaagaaacatgaaatattaagccgttacgtcgacttggaggttatttgggaacacgaaataaatgagaagctgaaaaaggacacagcaatgagggagtttttcgacaactggaaggaccgctcgccaatcaaaatcagagacgcttttcatggaggacggactggaccaatgaaactactccacacagctaagccgggacaaaaaatcagctacaaggacttcaccagcctctacccgtggaccaatttctctacagactatcccctcggccaccctaaaatcatcagtgtcccaccaaatgagcagacggtcaactggcgctctccatccgacaacccctacaaaggacttctcaaagtgctgcttctacctccaaacaacaacgtcagcgtcactgttatgcccgtaaaatttgatcaacgcctcctcttccctctctgtgagaagtgcgccaaatacatcaccaacaaatacccaaatggcctcaaggacgacaactactccgcccacacttcaaccccaatgaccgcgccttcgtgtccacttgcacccatcttgagttaaacgcagcattggaggccggctacacagttcgcaaagtcttccacgtcctccaatacgaccaatggagtaacaatgtcttcaagtcttacgtgagcgaaatgatggccctgaagatccacgcaaccggcttcccgtcatggtgtgagagcgaagaggagaagagtgaatacattgaggagtgctggatgaaatttggaattcatctggagaaggagaagatgaaagctgaaccggggaagcggtacatcgccaagctctgcctcaactcactttggggccgcttctccatgaggaatctactttcgaaggcggtaatcaacaatgacccttttgttctccgccaatacaccgacgacaagaaaattgatattatggacattgagctgatggatgaggacaacgacgtattcatgctcacctacaagccgaaagaggagtttgtcgacgaaaacaaatactccaatgtcgtcatctcactctacacaacatcaatggcgcgtctatacctttacgaagtgttaaaaaaagtggccgacactcccggatgtgaaattctctactttgacacggacagcatcatctacgtgcacccagaagccaacgacccactcccgacaggaaaaggacatctcggtgagctgactgacgaaaagccggaccacaacattttggagttcatcagcgctggctgcaaaaactacgggctgaagttggaacgtaaggacaatggggaaattgagtacgacttgaaaataagagggataacgctggatgaacaaacagtgcaaacgatccattatgacagtgttaaagatcaaattttgcgttatgggtccgatgaccccgcggaccccattattgtaacttatccccattttattcgccctaatctaatccaaggcaaagtgtacactcaatctctaactaagcattatcaacctgtcttcacaaaaggtattattaatgattcattccaagtcctcgaatttggttat

SEQ ID NO: 80351 - DNA, 1251 bp, Heterodera glycines
atggcaattaattctaaaatatctgaaaaagaatgcaactttttgggtagcgataaaccttttttaagtaagtaactaattattacagccgcaaggattttagaaatgtataaaaacaaggaaaataataaaagatgaattttcggtagccaatactcggctctccggtagccaatacctaattaaactttgcccgccagtaaccaatacctcgtaaggttcggctctccggtagccaatacctaattaagtttggcccgccagtaaccaatacctcgtaatgttcggctctccggtagccaatacctaattaagcttggcccgccagtaaccaatacctcacaaggctcggctctccggtagccaataactgagtttgcgatggtaaggagcaataatgaccgaatatgtgttggagaggaagggtagagttgaggaaaccaaataagtgaaggagaggggggtgaggtcactgcgtcatcttatcctgtaaatcgattcctctaaaaggaacaaatggaaagaggctaacgccaactgttttcttaacaaaatcctatatttagagattttggtttcgggtttatttgaattattttccttttctccgtaatacactttctctactcttctatatctgtttactttcactgttattccttattaatttcagacctacatattgtctaaataatcgtttccattagctatttttcaatatattttcttccaacactatgttttattctcgaaccgttatcttccaagtgttcgtattcttgttctttatcaaactattctcttccctatacattacctaatgtttgccttactaactcatattaaattctcactatttaatattgactctcttcaaccacatttctgagttctctatctctatctcttacacccattattaattgtccttgattctatggtgcactacaatatcctcatatgatttcttcatttattcctattacaagacctgcttcacgcatacatttagcccttatctaccctttctcgtcacatacagtcagtcagctgtttgtcaaacctactttctattctcggttcaatcttagattcaaaattgtctatttctcttgtttcctttgaatattacttattcaatggaattgtaaatgttccttattataattagaattattttacgttgaattaggcaaggagcattgtttgtgtttatgattaaaattaacaagttttatataagttaataaa

SEQ ID NO: 80352 - DNA, 594 bp, Heterodera glycines
atgccggcatcagttgacagtggcaatccgcccaaacccaaattgaaagactatcagaaacagcagctgaaggatgaaggagagaaggaagcggaggagaaaaaagagtaaaaaaaaaaattaaatatttaataaaaaaacaaataaaataaaaattcaagcgaagacgaagaatggaggagggtaataagcacaatgaaatataaaattaaatacttaaactgaataatatttttatttttgtaattaaaaattctcagaactttaatcaacatagaaagggtaattttcgatttcaaatcattaaaaataaatatatttaaatgcaattttatatgtataatttttgccaaccaattttcagttctaaagaagactatgaacagaaagagcagcagctgaagaagacagaagagaagcaagtggaagaggaaagcgacgggtaaaaataaataataaaaaatgaaaaagtaaattatttatttattataatattaccatttttgctaaatgcatttggcatataatttataggaaaatgacggtgccaaccgacgaacacaccactcgtcggcggcgtgaggagagcgaagg

SEQ ID NO: 80353 - DNA, 516 bp, Heterodera glycines
atgaatacagttcgcccgtgttcaatttttacgacattacatacgtcacgaaattatacattggtaaaaatatacataatgataaactttctggggtttttaagagtacacaacggtttcataagtgaaataattaagaaaatactgctcgttttccctaatatttgataaagaaaatatttagcttttgatatttttcaataaatattaataagttgatttatttaaataacccaattctcattttctttattaaatgtttgattttttactagttttctcaaaaattaataaattttagcttgattttgtttgcattttttcttctaaattattttttaatatgatattttggatttataaatttttaaattaaatttaagaaaaattactctcaatttttgaaactgtatgcatttttttcatattttatatacataaatgcattttatgtacatatattatagcgtaagtgatttttttatccggccatccaaatacataattattacccaa

SEQ ID NO: 80354 - DNA, 372 bp, Heterodera glycines
ttctcaactggactgaacacaacagtgtggaaattcctgccccctctttctctctgctcctcagtttcttttttctctctttttctctctgtggcagcagcagagggcaccggccggccacatcaactatttctccacctcattttctctgtccacccaaacgactttggatttaacgacgtatacgcaccgcacttttactctcttccgtactgatcaacctccacatttactccactgtttctcaacttcacatttctctgtcacgacagacagcaaaacgcggcacactgtgggaatggtggggaatgccagacactgtccacgcccgggcgggtggggaaacggcgtcagtgaacacgagcgcgaccg

SEQ ID NO: 80355 - DNA, 1316 bp, Heterodera glycines
atgacgccggcggcacaatttcccggatttcggcatgccgagacggaagtgccaccgtcgtgccaaaatttgtccaaatttgatagccaaaaatccgcttcataccaagagacgaacatgacattttcgattgagtacggacttgggtttgcggccggcttaattggccaagaccttgtgcaggtgagagatggaaaaatgagacatttggatttgtacaattagaaaaatttacaaattttgttacaaaattgtgattttttaatttttaataagaaattttttgaaaatcgggaacttttttcataagaaattttttggaaattgtaaactgaattactaagtttatcaaaaaaaatcgctgaaaatttttttttataattcttttttgcaatttttaaatttccgaagatttttttgaaaaatttctgtttgaaagtttttgaaaagtatttcagtttgcctccgattccaacgaaacagatgggctgagagtgtgtcaagcctactttggccaagccaatcagaaggatacccaaacaccgacattcaacggcattttaggccttgccctgaacacaatcaagcaaaatgtggaccctcttttcatccaggcctacaaacagggcctgttcaaaaagccgttgttctcactgtatttggccacccaaggcgccgcgaatggcacattagggggaggtgaggcatggcatggcactttttgaatgggacccgcaaaaaaatgtaatcagaaattggttccatctatgttggaattagacgctctcgatcccggaattctttttttgttggtcaatccttggtctcggactactgaaaatggctaattgtggttttgcggaatttatgggtggttcttagaggcctatgggaatggttgaggaaatacttattggattttaatgaattttattaagaaagcgtttaaattttaaaattatgttggccttggtaaaaataaaaaaattactgaaacacagtccgagtgttttggtatgatgtcattttaattctttaaaaaatggtgttttaagattactgtacccaaaaaccattgccactatttttttaacgattaaggggcttattaaaaattaatgaagcctaattttggacgctttttactttattgatttagtcctgatatgataaaattatttgaaacttcgttttttttattagttttgactttgggtgatgtggatgatcaaaattgtgcaccaatcaccgattggattccaattacacccaacagattcggcttatgggagttccacatcgatgtgagaagctaa

SEQ ID NO: 80356 - DNA, 3404 bp, Heterodera glycines
  unsure (1)..(3404): unsure at all n locations
gacttatttctggttattggcagattaaaatggacgatggtcaagaataaacagcttttgttactgagtttggtttgcatgagttcacgtcatgccatttggcttttgtaatgcggtagcaactttccaacgcttcatgacccatttatttggagacaaattaaatgattcgtttttgtttatattgacgatgttcttgtggcatacgaaacgttcgaacaacatttagagcacttaaagtttgtttttgaggacataaatgaggctgggctaaaattaaaagtggctaagtgccaattcagcatcgaggaactccaatttttgggccatgttttaactcgcagcggaataaaaatggacgaaagtaaaaccgattttggacatgccgatgctaaaatcaaagaaggaactccattcatttttgggattcatgacctattataggatggttctatggctgcaccactatttaagctgctaaaaaaggacgtatcgtttaaaatggataacgccgaaattgctgcaatttcaaaattgaaaggaaaaattctgagttatgttgttctttatttttccgattttaaagctgctatggaagacctgacacgaaaatttttgattatgacggacgcaagtaagaccgggatatcagctgttctttgccagcctgatcaacaaaatcgcattcgaccaatatatttgcatcaagacaatgtaataaacacgaatcacgatacagtaccacagaattagaggctttggccgtcagattcggcgtgaaaaaatttgcacaatatattacaatgattccgacaagagtattaacagaccacaaagcattaattcctatgttcaaaagtaaaaacgagaccggtaatgcgcgcgttgacaaatggataatggaattaagctcacgttttattttggaaattgaatataatcccggcaaaacataattgcggatgttctttctcgttcgggcgcattaaaaccgaaagaaacagcagaaaataaaattgtgattggagaaatagtcattagaaatgaactgagctatgttggaaatgaggccgaaatttatttaaaaagaatatttcctttataaagctgataaaaattgattcttatgcaaaaaaaagacaaaataatttataaaaaataacctcgtcaccatttcaaaagttaaaattgatcttcacctttttgaaaaaaaatattatgaataaaacaaaaagtaatatattgaaattttttctttttaataaaataattagtagtaaaccatacgcctccgtagcaacctgacactaattagaagtgacaggtggctggagggcgggagtcaattagtgactaattgattgaccggatgggggggcactaattggtcagataattgtaggggtggagggggtcaaattaattaattattaaattgtgggagttcgaaacccaaacctattggaggttttcaaatttacatgtaattttgatggccgacatgaaaatttttgattgatcagtgatgtgacagctgctggatggagggggggggggggagcagatgctagaaataatgaaaaaattttttattaattaatgtgaatatggggtggtcccttaaacgatgaacggcagaaaagggaaaatgacgccgtcaataatcctttcccaccccctcttcgcttgaccccccaaaatgcaggagagggacgccaagccatcgattcactcataatttaatgcaatagcctcgccatttatcttttcatttatgtatttttcaacgttttttaatttgctatatttcttaattgtttatgttttaaatttaattaatttattatagaattcattcgctcttcaattttcattttatcaattcgatttcgactttttgtcttcaccaattacagtaaataatttaaaatttctttaaaaaattttcaacatttcccaaactaatttcagtcacgacgtgttcgaacgcattgctgcttaaagtgtttttgaaagtaaatttttttgaattaataataattaaaatccgatggtttcccaccgaactttcagcgttcatcaacacaatggtcaaattggttaactacgacgatgacgaaagcgacacccagcaaatttggcattcgaagaacgtccgttggtggaaaatgtgcagcaaaatgcgtgagtgaatgcgggtggggttggttcattttcaagaaaatttttacagttttgcatttttaaattattttagcgaagctgaacagatggaaaatgtggtggaaaatgcgtgagtgaggggaatgactttaactgattttgtcgacagttttcaaaaaattttaactgttccagtgaaactgaacaaatggtcctggtgatcccggacacaatttcagtggaaaatgcgttagttatggggggtgggagatagtcaaaattcttcgacgacacattataaaaataattcatttttaggctcgtgtcgatgctgaacgccacagggccattggatgagagttgcggcacaaatttggatgttcttccactcgagagtgttcgaccgaaacgccgagctgcattgcaggctcaaaaggcattgttaatgctggttgcgccaaaaaagtgagtcaaatcaatttaaataataatgaaaatattaattaatttttttatttgcagcagacgcagtttagcctcaacgccccaaccatccctctcaattttcacatacacaaatgatgctgcagatgatgtcaacgcaacaacgcagtcaacaaagtcccagctttccaacacntgcaccgaaaaggcgccgtgccgaatnggagagcgggtcatttttgaagtaagttttaagattttaaacaaagtcacatttactatntaataatttcagtcncaatgtttatcaattgggctttctcctgatggtgttgctacgcctacaaattcgcctcagccagctgcttcgtccgcttcttctgccgcttctgctcctctcattgcttcttcttcttctgctgctgcttcttctgctcctctcgttgcttcttcttcttctgctgctgcttcttctgctcctctcgttgcttcttcttcttctgctgctgcttcttctgctcctctcgttgcttcttcttcctccgtttcttcggttgtgtacaccgcgagacagaaacaacaccacggcaaaaaagagcgcgaagcaaaagtaagttttttttcatttaaattaatattactattatttaaaaataataggggcgcatgtttgtggatgcgccagtggggtcgttcggaaaaagggtttcaaaaaacccgaaaaagggtaaatatgaagttgctaaaattttggcaacttcaacatatcggtgccggggagaacaaaggagaatgtt

SEQ ID NO: 80357 - DNA, 449 bp, Heterodera glycines
gaaaaaatgtgcaaagagagtgaagagcccttcaaatttattcccgtctgctgctacgaagatgcgcaggttctttttttcaagaagcacagcgatttaagcatcgttccatgccgttaaggcgattcgtgcagttgcattccatcccagtggggggtatttcgctataggcactaactcgagaaatttgttaatatgccgatatcagtcttacgaacgtcgaacatcgcttaatgagtgaggtttaattgatttggtcattatgatttacgttagtcaatttgccaataatcagtgatttcctccatggatttgttcctcctccaactattctaatgagcagaagcaaacatcaccgcgggtctgtgtattgtgcagcatttaatcagactggcaatttgctcgcgactggctcaaatgacaaaaccattaaactgatggccatgcag

SEQ ID NO: 80358 - DNA, 2544 bp, Heterodera glycines
  unsure (1)..(2544): unsure at all n locations
atgggaaatgatgatgaagtttgtttgtttgtctttcaacaaattaaaaaatattatttgtagagctcgacattttgaaaaaaaacatgggacctggacttggattccatatttgccacgaaactggcttcctaaaaaaaacccaaaatccatgtcaaggaaaagcatggttttcttgggctggatccagggcctgtacctggatttcctaaacaaaaaaaacaggaaaatccaggccctagaacaacccaatctcgtcatgggctagatccaggcctaaatctgtttttttttgaaaattggttttaaaacgcaaacaaatatttaaaaataaattaattaacaaagaaaaatccatgcctcttggatccaggtccaagttgagctcaaatcatttgcttacaaattaaaaaatttatttatttattaatttaggccgaatcaagctcaagtagttctaatggaacgccccgtgacaatcattatgataatgaccataaacctctgatcaaggctgaaattgctgctgatctttttgtattgcttaatctcaagactcaactacaagtaagtaacaaaataatttcattcacaaattataaaataggcaatgcaaaaaaaaatttattttaattaacaaatttagttaacaaaaccataaaactcaatcaaaaattttaattttaattatatatttcaattgtaaatgaaatcattttgttttttgaacaaagaaaattttagattaaagatttttagcaagaaaaaaaataaataaattttaaggatcaattagggggtgtatttacgtttttttattgcttttatttaaaggatttattgccgaaagtactgaaaataggcaccaaaaatgacgaaaaagacataaaaatgggcgcataatccttaattattttataaaaaaaatatttgttttagatggattatatgacaaatgaaagtacaacaatggaattagtcaacgagttcaacaaaaaatatgccaattttgtgatggaattgccggacaatttgatgacaaaaggaaaatttgagaaaacattgcataaaattaatgaaaaattggagcaaattcaattcaaaaacgaaattgatattgttgcaaacaatttgttaattatggtaaaattagaaaacaaattcaaaaatggcattgaacaaattgaatgtggcgaaaatgtgtacgaagttgtccaatatcatctcgaaagagtgaattcggaactgtatcgccggtaaacagaaacaattgttttatttaataaatactatttaattagatttttaataaaaataatattggaaaaaaaattatttccttgcgaataacaactatattgtaaaaaaaaagtttttttttctaattaattaatatgattcaaaattatatgtaacttttcctggattctatatattttgggaatttgcacttttcgcgtatattttgtagttttctgaggattttttatagaaaattttggtggctttttgaaaatttatataaaaaatcaaaagcgatttttttgataaatatacacctaaaagtttattttaatgttaaatttttatttgaaataaaattttaaaaaatatttaatttatttaaaatttaaaataattatattctttataatttaagaaaacattacaaatacaaactattgctgttgtcaaaatggaatttgccaattagcacccaaaaattagtgaatgtgttcgattcaatccaaatcattctcactctttgtggctttatggatgaggttgcagtacatcaaggtcttaattatttaattcaataaaaattaattaatttaaaatttaaaagcagaatttcatttagatactcgatcaatgatcgcaaaaatgatggccgaactgaaggaagttgaaaaaagtttggcccaaaaattggaaattgatcagaagcttttggcgcaaatacaaagattggatcgaccaccaagtccttgggaatgccaggatgaaatgcagatgatggcgaggctcgttttaaggggaaaaaattttaaattaaaaaaaataagttatcccaactctcaaaaacctattttttactaaaatagaaaatctcgaaaattaaatttagcataattttcttatcatatttcattaaaatttccaaaaaaaaatttcagggcgcctaaaggacaccgccgaacaccttatgccttatttttttttgaaaatttgatttataaatggcaaaaattgtctttttcgatgcaccactaaaaattcctgcttttctccccggcgctgaaattttttgtaaaataataatttcattttaaacaattatcagccattttttttacttaaaataattaaagattggaccacaatgtgatgagtcatgaaaaaatttcgctgatttatttgcatgcatgtgcacttagactgaccacagaactcggcattttgatcaacgagttggaggaaattggcacagaatggacgagtgccgacgcaattgacgangntgttgaagtcggctgctga

SEQ ID NO: 80359 - DNA, 518 bp, Heterodera glycines
atggaactttccaagaatgatcagacgatgagaagcaatgtggtgcaacatgagggtccagcaatggaatccgttgcttatgaatcggacaatgaaattttaagacaggtaggtgtataaacaacttttgtaataaaaaaaagtgatcgtcaacaaaccccaataaatagcctgcacaagaattaccaagattttttgttttcgaacttttttagtaattaaatctgatatcattattagtagagctcgacatttttaaaaatgcctgtacctggacctggacctggattccatgttggacctggacctggatttcctggacaaaaatccaggtccaggaaaccaggctattcgggacctggattttttgaaactaattttaaaaatcaaaaaaaggtttgaaaaaatcaattaattgcttataaacctctaaaaatatctaattaataataataatgtgtttttaaatttatttaatctgtttttaaaacttgaaaaaacatcggtcacttgaaaaa

SEQ ID NO: 80360 - DNA, 1177 bp, Heterodera glycines
gtgcaatttaccaaaagtttgggcagaccaccgaggaggagctgttcagcaacgactcctccaactgcgcggccttcgacgaatttctctccgtcatcggccaccgagttcagttgcgtcattttgacggttatcgtggcggactggacaccgttcatggacagacgggcaccgaggtacggtggggcagagtggggcgggcatacggtaccgtttgcttaatttcctttttcagtcggtgtacacacagtttcgccagaaggagatcatgtcagtttcaattaacaaataattagtattaaaaataggagagtgagaggaaaccaataaatccattttattgtgtatttcaaccaaaaacttaattgtccttttaattcggacatcccattagcccaattagctcttccccggcttcttcaggttccatgtgtccacccttttgccgtttaccattggcgacgcgcaacaattgcagcgcaagcggcacattggcaacgacatcgtggccattgttttccaagagcagaacacacccttctgtccggacatgatcgcgagcaagtacaaaaaagggcaacattcagtgcctaatttaattattttctttttttccaaagctttctccacgcctatttggtggttcatcccattgagccgggcactgaccgcacgcgttaccgcgtgtcgatgacagcgcgagacgacgtgccgttctttggcccgacgcttccgcgctcttccataatttggaagtgccaactgcgcgactttttgctcaccaaactgatcaatgcggaaaacgcggcttataaggcggaaaaatttgccaaattggcggtattatggcaattttcattttctgaaaattaatcaaaagtttgttcaggaacgcactcgggcatcgctgctggatggactgtactcaaatttgaaagagcgggcccaattttacggcatggcatttttggattcggtggacagcgcgacgaaacagcagcaacaggagaagcaccaccaccaatggcaaaacaacgggcaaaaaccatcaccagcacagccaacagcagcaactgatgaacggaggaacgaacccaacgttttgttttccattggcactgcgctcgttctgatgctcctcttattcaatgatcaaaagagcaaaacacatttttga

SEQ ID NO: 80361 - DNA, 1262 bp, Heterodera glycines
  unsure (1)..(1262): unsure at all n locations
aaaagccttcaaccactttttataatttgtggctgtactgggacgggaaaaagtgatctcggcattgaattagcaaagcatttcaatggcgaagtaataaatgcggattcaatgcaaatttacaaaggtttgtctcgaatataatataaatcactaaatatgctatacgacaaggtcttgacatagcgacgaacaaagtgacaacggaagaaatgcaaggcgtaactcaccatttgatgagtttttgtgatccgtgtgagtccaattacaacgtccatcactaccgcaacgccgttttgccattgatagaaaggctatgggcgaatggcaaattgccaattattggtttgttctaatgcttaatctaagaaaattatgagtgctttctaattacgaattttttcatcatacatatagtgaacaaacagcagttttttttattagttggtggcactggttattatatggaagcagcaatttattatgacaatttggtacaaacaaacgcccaaaaatcaggtctttaataacattttgatgattcaaattgttgccatttcagacgacctaagaaatgagctgttacaaaaatttcccacctgcgacttattacacgaggaactcaagagagttgacccaatatcagcaggggaagtacacaaaaatgcaaagtttaaagtgctgcgagctttggaaatattttattcaactgggcaaacaaaaagcgaacaccataaaatgcaaagggaaggacaaggcaagcgaatgaactttcaattttatacaaaaatagcacatttatgaacaaatcgtacttttccgtttgggggtcacacattcaaagtttaaaaaagccaacaaagcgcatgtgaatattcaaaacagcgcttcagctttttaattcgaatgtgggcccgcaaacggaaacataccaccaaagcaattaatatttaaaaaaacaaaattcttatttttttttataaagcggaaataaatgtaatttttctttttacgagaaaaatcatacatctttttatgcatataaaccaattaagctgcgaattttcacttggctggccgtctccatacaaaaagcacattactcttcactttggacgccgacaaagaagtactaagccagcggttgaacagccgagttgacgacatgctcaagcggngcttaatcgaagaacttgactcattttacattgaggtaaaccaacaaattttaagaaactggtaacaaaaaataatcaaatgct

SEQ ID NO: 80362 - DNA, 395 bp, Heterodera glycines
atgccaaagaatatgtattacggttgtgcagcattgaaagtcgtagtcctcgacgcagcatgtgctcgccctcctccctgcttttcgtatgcagctcccccaaccgcagttgcatttctgttccagcatgtcacaggcgttggacacttgcacaacaagaggcggtgcctatgaaaacgacaatttttttttgttgaaaaattatgcataataaaatataaaattatcttttttgtgaatgtttcttaccggagttgttgttggggtctaaaagcagatatatataaaaattaaatttttgtacatttctcattttgtgtgccacatcgaataattctcattttaaaaataatcttttcgaagttaaatcttaataatacagataattgcttaaa

SEQ ID NO: 80363 - DNA, 1009 bp, Heterodera glycines
  unsure (1)..(1009): unsure at all n locations
atggccccaagcctcaaacttttgatccaattcgccatcctgatcgccgcggcatcgcatgccatcttgggtaagtgaaaaaaaacaaaatttttaatatgacaaaagattttagagacaagaaagaaacttttttggaataaatttgaattaataaaaaattaatctgatctttgtcttaatatgtgtgttagttgattcggatctaatgtctcaaggccaaagccaatcccgtgcttggcgaaccagcatcccggaaaccaagggccagaacggaagcgaaaccgaagacgagcaagccgtttacgaatccgacgcaagccgaatcaccatcccggaaaccaaggaccagagcggaaccgaaaccgaagacgagcaagccgtttacgaatccgaagaaattcgaaccagcatcccggaaaccaacggccagagcggaaccgaaaccgaggccgaccgacccaataatagaaaaacggatttggcaaccaacggacaaagtgcagccaaaaccaacccagtggcaaaacaaatctgggaagagctgtttttggtccggggaaaacggcaggcattagacccatttactggtgttgcaatcgagattgggaaaggngctggaaatgcgttgcaatacatgcatggaaagattgtggatgggatcgcagtggtggtgaagaaggctgcctgcaagggaatccaaaaactttgttcgtcttgtggctatggtgcatgcatcgaacatcccgggtacacagctgacgccatctgttgctcaaacaactttgaacttaagtgctgtgaaaaagtaagaatctatttattatcggaacattatagcttntaatggcacaaatccaaaaagggctgaaaaatgggcaaaagtttacaaaaatcaaaaatccagcaaaaattgtgctattttgttaaattttaaaactgaaacatgaattttcggctttggttttggaatacacaaaagcgaatgttgcagaaaaatgggattaaa

SEQ ID NO: 80364 - DNA, 1080 bp, Heterodera glycines
atggtggacgaatatttggaaggcattcgacgccgggcacggcccggggagcccgtgctgagagaaagggcagaaaatgcgcatgaaaaccgattgacatttgaaattgtgaatttggcaaaggcaagggagactaatacgcaattaattgctttatcaatttcattaattagccaattaattaattgctttatcaatttcattaattagccaatttgctttcccttcaggcgctggcccactttggcttctacgatttccaggaattgttaaaattgtcacagaatttgttggtaattgtcgacagttgttctggcagagaacagcagcgatcattcagttaatgataaaacggaagcaaaatttggacgtaaaaatgggcactttcagataaaaacaccgatcgggcggaaggaacgcggtccaaactgatccggcaactcaccaaaaagttcagtcaacaactcgcgtacgaccgcgcgtccaccgccgatcccccgccgctccttcagtcgctgtccatttcgacccatcatccgctgctgaagcgcacatcggccaccggcaaagacttccgcgccgaaacggaggcggcggagagtttggcctgcgcgaagatgagccgtgagatggtgctgcagacgaagctgctggtggccgagctgcttcagttcatcatggatatccgacgcgactttcgcattaccaccgccctcgccttcttcaaacggcacttcccctgcggcgacagtggcgaattgtccgcctcggcaccacaaatagacgagcaattggtccagcgaatgtgccgtgccgtgttccgatggcaaaacggcgattccttcgagttggacatggacagggagcacggtcagcaactactgcgcatccttctccagatgaccatgagtgacttcgttccgcttaccagcctgtcgctgcaaattctctttcgccactttacccaatttcaagaattggtcgaagacatgggccaggtttggcgaaatgtgaatgtcaatgccaattttgaatgtttgatgaaaggtgcaactgctggtgtccaacaaggaagtgcag

SEQ ID NO: 80365 - DNA, 642 bp, Heterodera glycines
atgcagtggattaaattcaactgcacgctttgcccgatcggtctgcattgtttttatccgcgcaagtacgcaaagcctgtgctttgtgcgcatcccagcgtccgtaacatcaccgactttttgagcaccgggcagcttgaggaagctgcaacgacagcaacaacaacaacaccatttccgacaactgccgtggtgtcggcggcggcggcagaatgcgcacctccgcccgcgcagctgaccgcatggatcgcggtgtgcactgcgctgctggcgcttttggtgattgctgaggtctgttaattttgggcatttatccgctaaacccctattcctcaattaagcttgtgcgcgccggattcaaagtgcgcaaatttttgaaggaccgcgccttcaaaaaagggatgctgcgccgccatcgccagcgtgagtttctcgctattacatttttagcaaattgtaattaacaatttatacaggaatgagcgccgctcgtcggaaccgccagccggcaagcgcaccgactccgctgatcttgccggctatgttggccggcgtttctctgcgcccgacgggcgtcaatttgactgtggaccgagggaaaatcccagaaaaaacatcaaaatggtcacaagtaaatcatga

SEQ ID NO: 80366 - DNA, 2608 bp, Heterodera glycines
atgcagaaatatacattcatcaagtgcaagggttgtggaacgtcaaatatcccggtgagtacaaaattttcatatttaacgattaccagatgagcccaatcaccaaatctgatatcaccgattaccaattccctattcttctctaccacaacaacaaccactttgacggcatcaaaactctttcaaaatttttcaacaaaaagaactactgtctctcctgcgagtcgccgtactacaagaaaatcgagcactcattaaaatgtacttcactctgccacgggtgccgtgaggtgggcgttgactatccctgtgagccccaacaaggatacagcaaaaaatgtgagcactgtaacaacaccttttacaacaacagctgttatgagcgccacctccacaaggatttgtgcaccaaatttcaacgctgtgaagattgtggggtaatttataacataaaggttcatgggagtgttgggcataaatgtggggaacagttttgtaaactttgcaagcaatttcatataaaagaagacgacgacgacgggatgaacccctgtacgaaatgtttcatccagcccctaaagcaacaacgaattaagtcatacaggatcatcgcatacgactttgaggcgacacaggacaagaaagtgggcaatcgtttcgaacacgaggtcaactttgcagcggctaccatcatctgcaccgactgcattatcaacagctactggaacaaatcacttcagggaaaaaagtgccaaatttgtggacctcaccgctcaattaccttttcaccttttgactacacggagacaacagtcgaccaaaaaatcatcactcaacaaccgctacgcgaattcgtccattggctcctttttgaccacaacaaaaagtttccaacagtcgcctttgcacactttgggggccgctacgacatgacgatgatcatcaaggaggttttagcgcaaggaattcacaacccggacatcatcaaacaaggaaatcgcctctacgagctgaaaatcagggaaaacgagcatggccccctcaccatttttcacgacagctacaacctaatgcccattaaattatctggcctcatcaaatcttttgggcttcatataaaagataaacaacactttccccatatgttcaacaaatcatcaaactacgataaggtcctccagcaccttcctccacgtgaagactattgccctaaccaaaagaagaaggcggatctgcagaaatttgacgactggtacagcaacaactatgaacaatgcttcgaccttaaagaaaaattacccgaatactgctgcaatgacgtccaaatcctcacccacgccctcgtcgaattacgccgggaattcaaacaactgacacaacggaacggaaaacacgggggaattgacattctttggcaagcaatgaccatagccagcgcctgcgtcaaaaattatgcactcaaccatttgaagccaaactcactcgccatcgtccctgaaaaaggctatactccacaacagaatcaaagtgcactggccatcaaatttcttgactggtactcccacatcaacaatgtcaacatccaaactgctcactcccggtacggcgaatatgtgtttaagcgtgaagggcaggtataccaagtggacggctacatcaaaggcacaaatgggaagcgggacaaaataatcgaggtgaatggttgtctgtggcacggttgtgaggagtgttttgatgacttggacgacgaaacgaggatgccgaacggaaagacgctgcgggagattagggaaagggaagagaagaaacatgaaatattgagcaggtacgtcgacttggaggttatttgggaacacgaaataaatgagaagctgaaaaaggacacagcaatgagggagtttttcgacaactggaaggaccgctcgccaatcaaaatcagagacgcttttcatggaggacggactggaccaatgaaactactccacacagctaagccgggacaaaaaatcagctacaaggacttcaccagcctctacccgtggaccaatttctctacagactatcccctcggccaccctaaaatcatcagtatcccaccaaatgagcagacggtcaactggagctctccatccgacaacccctacaaaggtctgctcaaagtgctacttctacctccaaacaacaacatcaacgtcactgttatgcccataaaatttgatcaacgcctcctcttccctctctgtgagaagtgcgccaaatacatcacagcaaaatatcccaatggcctcaaagacaacgactattcctgtccccactttaaccctaacgaccgggccttcgtgtccacttgcacccatcttgagttaaacgcagcattggaggccggctacacagtccgcaaagtcttccacgtcctccaatacgaccaatggagtaacaatgtcttcaagtcttacgtgagtgaaatgatggccctgaagatccacgcaaccggcttcccgtcatggtgcagcagcgaagaggagaagagtgaatacattgaggagtgctggatgaaatttggaattcatctggagaaggagaagatgaaagctgaaccggggaagcg

SEQ ID NO: 80367 - DNA, 934 bp, Heterodera glycines
catttcaatcactgggactcaacccaccagcatttcaatcactgggactcaacccaccagcattccaatcactggcactcaacccaccagcatttcaatcactggcactcaattctcctgcatttcaatcactgggacaacccaccaacatttcaatcactgggactcaacccaccagcatttcaatcactgggactcaacccaccaacatttcaatcacgggactcaacccaccaacatttcaatcacgggactcaacccaccaacatttcaatcactgggactcaactcaccaacatttcaatcactggcactcaattctcctgcatttcaatcattgggacaacccaccaacatttcaatcactgggactcaacccaccagcattccaattgccgggactcaatccaccagcattccaatcgtcgggactcaacccaccagcattccaatcactgggactcaacccaccagcattccaatcattcaacattcgaatcaccggcacgcaatctcaccaattattcggcatcactatcataagaactcaatatcattacttcaagttcttccctaatacgtttttatcttaatattagcaaggtacgcgatgtggctcggcagtttaacggcctcattttcagtcatcttactctccatttgggactctcttcaagcttcagcacttattattttaaaacaaacaacagaaaacaaattaaaataacaaatgcaaataataattttaaactatttcttctgcgctttgtgagaaacaaaagtcatgtcatcgctctttcttttcacaggcgtagtaagacaagaaacatcaagaacgactttacaattgcaaacaacaacatccgacgaaagcacatgaatctgcatagcctcatctaagcaacaaaacaaacgtcaaataggaaaaaataaa

SEQ ID NO: 80368 - DNA, 603 bp, Heterodera glycines
atgccatttggccattggctccctcagggaatggcctttccccgtccaattggccgcagttcggccccatttgtgggcctggggtgccgacaaagagcagtcagtgctcttccgttggttcggcgtcggccttttctcttcgctttccatgccaattatttcgcccggttttccccaacaaaatgccggctttaacatcaattttcacacagcaaagatcatacagaaagcgatgcacgaaggtcattcattcattcaaacattatgaattgttttgaaattaaattgcattttcagcattggcacaattggggggaaacccgtcggtacataattgggaaaagctgcttcagaagagggcattcagcgacatggtataagctagcagaaataggacgaacttcacactttgagcgaaaggattttcagttttcggcatttttggaaaggattttaattgtatttgtggtgaattaatttttgttttcctaaattttttgaaattgttatttcaattttgtcatcctaaaattcattccttggagggttgaataacgttctttcaaatattataaagagatcgcctctttccctgaaccccaa

SEQ ID NO: 80369 - DNA, 593 bp, Heterodera glycines
atgcctaaagcagccaaatcaaacgctgtgttaaatcgtcactggatttcaaagttcccggaaggaacttattcaactgatggaaaaattaatccgggactttacaaattgattgatatcgccaaaattttgattggaggtcgggcgaaaattgataaagactgatattaaatatgatttttttttgcgtaaatacacttggtttttccaatttttagcacatatttttgcattttttaacacatatttaggccttttttttggtttttagcacatattttgggtttttttagcacatattttattacatatttcaggatttttagcacataaaaattccagccctagtaatatgcgaatattttttgttgtgccactccttcatctccgcgctagtgaaatttgtggataaaaaggaaatgacaaatatgaattcgacatttacggttcggtacatgcaataaatttctcaaaaatcgctaaatttgctgatttttcatttttttgtgcctattttggtgcttttttgatgggtttttggtgcctaagctgtttttttgaattcgagaaatgtccattttataaataataaa

SEQ ID NO: 80370 - DNA, 883 bp, Heterodera glycines
atggacgtgttcaatcggttgctccctcggccgggcaatggcaatgttcagttcaaaaaactcagacatacgtcaaattccgccagcattttcgcatctgacgaagcgacgggtgacaaacagcacaacgacgaaacaacgaacaacggaatgatgccggcgacgaattcgccacgggttgaactcggattgatgctgagcaacatcagtgctgaaatgcgacacgggcaaaacagcgcaactgaaggaaacggaaaagcgaatgggacggggtgagaggaaatgaatgaatgaccaataaatatgaaataaaatgacaaaaaaggaatgcattattataataaatgaacaaaatgttatgacaataaaaaaaaggaaagaaaacgaagcccaattcatagtcggacgacaaccaactcgtaacaatgagtttgatttttgcaggaagcagaataaaagctttgtggaagaaaaggccaatggaaacggaccgtcgtcagaagtgaccgctttaagcaaagggaaaagcaacggaacggccaaaggcggcggaaaacgctttctctctgcgcttttgccgggaaagagaaagggacgacttggcctttcagtttcggagcctcgactaaattttgacatcgaaccgtccaaaaatgactttgagttcggcatttattctgagagcacatttcattctttcttttttaagacccacggaaatcgaagggggagaaaatgcgaaaggaggacaaattgcggaccatcaacagaattttggggagaggaaccgattatgcgatggcatttcggacggaagtcgcaaaagtcggccgaattttgcaggggcacttcaaaaggtggcattttggagaatacgctttag

SEQ ID NO: 80371 - DNA, 1114 bp, Heterodera glycines
atgccaattgaaccatttgaattggtgaacgaagtgacaaatgagaagctgacactgacgaaggatgaaaatggcactggtgaattcaattggctgttggagagatgcccaattattggggagactgcggcggcggttcagaaacagcagcagaagaaggacgaaaattcggatgccaatttgaacaaagtgttcttccgcctttacgatgacattgggtgagcagaaaggaggccttttttgtatgaaacacggatagggaacggtatcccatgtacagtactttcccagaatcttggcagggccatgggttctgttaagacagaacttcagtccttgttttgtcttttttgctctggtccatcccgaaaaccctgctggtccgggtttttgcaataattacgggctgtacttgcgaaaaagttatccgattcaaattgcgcttaatttaggccgctgtctccgccaggtcaaagcaatgaaaaagtgttctctttttccgggtccagtgatcagcggaagaagaaaaagtgatcattttgggaaatggccgatcattatcgagttatgaagaattggattgattgatgatgttttgtttgctctttgaattgttcaatttgacgctgacattttttgctattaaaaaattgaaaatttggcacttttttggtacttgtgggttttgtgtcaacaaaatttttctcttttaaagtctcgggattttatagaggcaagaaaagaacaaataccaagcattcataaaaaaatacaatgagaaaacacgaaattcaactttgttttccgagtgtatttgcgaattattttttccaatagccttaggtaaaaatttaaaaaaaacaattcttagactttaagcttatcaatagggaacggatttttaagcgcgaaaaagtccaaaataagtgcttaaataagggcgaaaaaagcgcgaaataagtgcgaaaataagcatgaaaaaattccaaatgtagaggtgaaatttgttaaaattgctgttttctctatgtaaattagttaaaattaagtcaaacaattttatttactgattgcagttagaaatgaagtacatttagaaattttcaggatttaa

SEQ ID NO: 80372 - DNA, 59 bp, Heterodera glycines; identical to SEQ ID NO: 58131

SEQ ID NO: 80373 - DNA, 299 bp, Heterodera glycines
atgaatcgacggtaaggaattttttaaaattacaaaattttcatttacccatacatttttttacgaatctcagttggctttgtagcgacgtgtggatggacattatgccatcgtttgaccatgctcaactcggcctcaaaatggcattgctttccgaccgtttcgatgttttggtggacaaacatttcgatggcaaaagcgaattgacaatttggagaacaatcacaattcgcaaggacgaaggaccaaaagcgaaactgtctgttctgatcgattctgttccccgatggaattgctga

SEQ ID NO: 80374 - DNA, 384 bp, Heterodera glycines
atgggtaaggccaaggcaaccgatgcagaaattaggtttcctaaatttttttgtatatattttttgaattttggtcaaaattttaacatttttgatcgcaaaacgacggaattgttcaaattttatttattgttaacccaactcaaattcctatttttacaaatttaaaaaatttagataagtttcaaaaaagttatggccaaaaatgtgtaaaaactggttgtttgtgtgcttttggccataattttgctcaaacttggccaaattttttgaaatttagatgagcaaatagaaaatgttatgcttttgaataataccaaatttttaatttggttcacgttgacccaacttatgaccagttttttgttgaaaatttccatttga

SEQ ID NO: 80375 - DNA, 450 bp, Heterodera glycines
atgattgccattttcttcgtccatttgttttttattggcattcaaggaactgaagaagacttattcgcagatttatggaaaaacctgatacccatgaagcaacaaaagttagcaaaaaattacgaaagaaacttaaaacgcgaaaattggattcatcaaaatatccgtaatgctgataaaaatttattaaaaacaagcttaaaagctgaagatgttagcagtgagcgtcaaaatgaagaagatattaagccaaaaatattagaagaaatcaaaaaagagacattttcggacgaagaacaaaatgcaatgaatgtaaggacaaaattaaagtttccaaaaaaagaaatatacgacgaaatgatcagtgatggcattgacgagaaacaagccggtgatcagagcaattcgtgttcttcaaaaactgacgatttgggtcactcttctgattcg

SEQ ID NO: 80376 - DNA, 755 bp, Heterodera glycines
cccttaatgaaattgtgccagaaggccctgagatgaatgatgattataacgaagaagagggaaaagcagtcagtttatatgagaaaatgactttttaattgacaagaagcattttccactattatgcaagacaataaaaaataggtaatttttcattgcttgaggacaaattgacaaagcgaagcatttgagggacaattataaatttaatggcagcctcatttttgttaatgagaaaatgagagagtggtcgaaggaaaaagtgggtcaaaggaacataatttgatgaaaatagatagggcaaaaaacctttgtaaaattgaccattttacattttgaaaaggaattgccaaaaaatgaaaaaggcccgacaaaatttataaaactaaaaaaattaagacaaaagtgtttaaatattatttgcctttttatccctattttgttttttgcatcatcaggagaccggaaatattaaattttctgatcccgctgctagattggtgcagtattgaaattccgaaaaactcataattgaaataaaaagttctccaaaattaagtaaccaataatttgagtcgtgggggaggagggcccgttggtgcctataggcaccaccaggaaaatgagaagaaaaaagaggtgtgtgggcggtgccgagaggcgacactggggaaaccttgaatcccgtacaaaaaccaaattttcagatcctgttgcgggattgggattccaaaaatcaggaaacaagtcaataa

SEQ ID NO: 80377 - DNA, 904 bp, Heterodera glycines
atgaaatgtccttcaaacgataaattctatccaatttatgagccattagtaagtcgtttttcaactcaagaaggtgaccgtgctgagctgtgtacggaggaactccccgctgatgaagaatgcccggaaggtttccaaattggcatttcgatgttgaacggacaaaaagaagactttacatggcagacttgggtattacattaaataaaaataaattttgaaaaaacagcttattaatatgacaaagttgattccttaggattacaagttttgcaactaattaaccttaattaatcaataaaaaaaagttttggtaaactgaagagtaaatgaattttctcattcatttaattaggaaaatatttttgcttaaatgatactgaaaatttgtacggtcgatttgaaaatttatgccaaatttattcatgcagaattaaagcaaattgtttaaaaaacaacacctgaatatttaaaaatttatgcataaaattattaaaaaactaaaataattcttatatagggcgcattttgggtgaataacatcaaatttggagagaataacgttatgtataaaaaagtagaatttggcgttcatttcaagctggatatatccccaaaattaaatgaatcttcgaatattgtctaccgagtgaatgtatattgcgctgacaacggcaatttggagttcaaaacattcacaaaatctgagacagatgtggtgttcagttccaattacaaaacctacgagcaaattggggcagaatatgtgccttccagctcagaggggaaaaaatgtaaaaaatatcaagtcaaagtttggccgagcaatgagaaacggttgagttacataaaagagaagcaagaagtgggaaatgcggtaacaaattccatttgttatacataa

SEQ ID NO: 80378 - DNA, 388 bp, Heterodera glycines
atgaaaaattttgggctatgtaattatttactgaaaaaggccccgttggtggtttttatgaacaacttagtatcttatttattgttaaagctttcatgagaactacatttagctcttggaacccgagtttgtcgcaagcggtgtgattacaaatggcaaattatataacaatgttaaattcccggttcacttcaatttgatcattgagccgtcgttggaccatgaggcagaaccaatttattacgtaaaagtaaaatgcaatggcaaagaatcgaacacattcaaaacatttactcacggcaacacgaaagttgtgttgaatgtgaaaggttgtacaaaatttgacatatcagtgagcaaaatggacagagaaagtgaaagccccgag

SEQ ID NO: 80379 - DNA, 1649 bp, Heterodera glycines
atgccgtcaatttcggctgcaatgattgccgctgcctcagcgtcaacccaatttcctccggcgacactgtcaaaatgtaagacacattaaggtatttgctgatttttcatgtcttttaagggcactccattgttacgcctccttcttcgttggcccagggaggggcactcgaggagtttctccgtcatggtctcctggcaccgcaggcttcgtcgtttgcgccttcttcgggcagaggagcagaaagtgtcgggacgagcgcaatggctgctccaacgtcatttgatgaactgtttcaacctaaaatgtccaacacttcttcgtcccctcggacctttccactgaatcagccacaaatgcaccagcaaatactagcgaatgtcccacagagaaatgccacgggcacaaacatttcacatcagcaacaggtggaacggatcaattgtagcacgggaacaaccccaggcatttgtctgacaatgagagggtgccggaaaaccaagcagtctatttccggtactattgcatttgttttttgtttagcaacggcagcaaacacaacaaatttctggggcgtctgcattaaataaacaaatgcacacggaccatcaacaccggcaaccccatcaagcagtgcaacaacacgcaatgttggggcaagctgcagagaaacagcaaattccgcagcaaatgcaacaacaaattctgcaaaatccggttcatcaacaacagatgcagcaacagccccaaattcagcaacatcaattggcccacaacagccgcattttgttcacacaaatgtgccgcttcagccatcgccgcaacacattttgcccattgctgaaccgcaacaacaccaagaacaagtgcaacagttagcgcagcagaaaatggtgaagaagcaaagcagcgcaaatgtgagcgggattattgggcgagggaagcaaaagaattgcattaaatgtcaaaatttaacagaaatacccagtgctgtggcaaggacaattggcaatgaaaaacgcggacacgctcgtccaaatgcttaaggtgtttagttgggtggaatggccttttgaatctccaaagttcacaggtctgtggcaatgaatcgctcgtccaacaaatgaacgccgaactttcctcggtcaacgaaaacggaattcccctcctgcgcattaaccaacggatgcgattggagcacactcatttggaaagtgagaatagctatcaaaatgggatcggtttaaaaaaacctaattgtcccctactgttagatttaatccgaaaaatggagagggaggacaaccaattggcgctgatttgtgttccttgcggccgggacagagaggacgtggtcatccaaacacagaaaatgaacatctcgttcatcgagtacttcagttcgaagagtgccgccggcattgtcagctcgggccccgtgagttcaattgttgcatttatcatttgactggaagaacgacccatcaataatagactcaacagccaagcgcaatggtggcacacatttttccgcccagtgatttcagtcggatgctcctgtcgcgaaatgcgccgaaccttttgaggacggtggagagtctcaacgcgggatacctctttgtgatactaaccaacaaatagagcactga

SEQ ID NO: 80380 - DNA, 106 bp, Heterodera glycines
atttatgagccacccaatttggcaaatcggtctttttaaacgcattaaagaagatttcagtcgattgcttggagtgtaagcaaaaaaacgctattaatttttcatc

SEQ ID NO: 80381 - DNA, 77 bp, Heterodera glycines; identical to SEQ ID NO: 59738

SEQ ID NO: 80382 - DNA, 899 bp, Heterodera glycines
  unsure (1)..(899): unsure at all n locations
atggctttcgaacgtattcgacatggcggcgataacaccagagaggcggnaagaacgaataagacanatgcggggagggcgtctaccagggatgggccgaggtttcgcttttcgcatttcgcattttcgcatattttggcttttcgcatttcgctttttttttcatttcgcatttttcagtttcgcaaatttcgcttttcgcatttcgctttttatttttcaatttggcccatccctggcgtctaccgctctgccttcaaatatgatgccttatgttgggaccatactcaacgctaagttcatctactcaaagcaaataagcatcaaggtccaagaatcgaatgattactatgcgataatttcccgattagcaaagctaccttttaagatggataatactgcgtatgcatcggcgcgtctttagtgaaccgacagatgcttaagttttcggaaattatgcattatcggtctcggattttgttatgtttttagaaaaaataattatattgacagtgcagcggtcaaactcatgtccttctgcgtccccttgtttccaaactatgatacggatagctactaactctttaactaacattaatttttgtaaaaaaatttaatttttaaaattattcaattttttatatttcaaaaaatagtgctcagtgatcattagggatgcgatttttaggtgctaaaaactgccaaaataggtaggttttaagttataaaaaaaccccaaaataggtgctaaaaatgggaaaataggtgccaaaaagtttcgaatttaggggtgtaaaatcgaaaattttcttcaaaaggcaaaaatattacgccaaatcattaatgagatacataattttcaaaatcaacaattctcgtcaaaaaattaaacaaataaa

SEQ ID NO: 80383 - DNA, 76 bp, Heterodera glycines; identical to SEQ ID NO: 59914

SEQ ID NO: 80384 - DNA, 793 bp, Heterodera glycines
atggtgagacaacggcggaacagacgaagaagggcgaaagggaattgacagcacgcgaaaagcgttttgacacgacaaaacacggggtagggaaatgcgtaaaatttgatgaaaatgaattggaaaacgaattttaaatcgaattattaaaagagaaaaatgcaaaaatgttttttttttaaattgggcatcaaatttattggagagagacttcacccattagactgcaatatcctaattaataatagcaattagtgacctaaaatttgttgtttttgatgttttgtctctccgcccgtcccggaattttttttaacttttttttctatcataattttctgcgctgaatacgaatccgagtttgtttccacgtgtggctcttttctatagcatgggagcagatcgtttcctgctccggaaatttagaaaaataaaattttatttaaaaaaattagatggagaaaaagacaggggaatgaattgcgcccctttggcatgacaattctcttttatcctacgctataatatgacaaaatgattagcgttttgttgtggaaatattaattcccaactcctccatcaccttaaattttttaatattcgggttttcccttttccaggtccccgactttcgccacgttgccgtcaccgatcagatacaaacgaagcgaagcgtttggcaagttccggtggccccacttggaatagtggcaaccgtgtaaaatttattttaaaaaatttcatgaaaatagtgaattttttgcaaaaaatcaacgaaacaatttttagaata

SEQ ID NO: 80385 - DNA, 320 bp, Heterodera glycines
atgaacacaacggcagcagtgccaatggcacaaaatttccgccttttttgccaccaaacgccaccatccgtcaattcggacggttccgaggcgaaacggcgccaaataaatgagccaccaaaggaggggtccggcggaggtatttttaatcaaaatcatgaaattggacactaattttttcaatttgttcagctccatccctttccgtcgacccgttcggctgggagccgaccaaatgggaacgctttttcctcgtgttgacgcggtgttacgagcgcagtgccgacattcccgcaattattccgttggtggtgcaatga

SEQ ID NO: 80386 - DNA, 570 bp, Heterodera glycines
atgaaaacgatcgcactctttgcccttttaccgctaattgaaatactgctgatcgccatggtcaaccaatgtttatgtatgtttaaaccaaaattaccagcttctaatttaataattaagcattgacgtgcaaaatagactctttcattgaaattaaataaaaaagtacagtacacagacaaaacaacttacaaaaacaaagtcccacaaatccaaatgataaaacacagcattttaattcattactgttcgttcgtacattgaaaagggggaggggtgatttaatcaaattacaaataattcattttcttcggtcatcagcattttactctaaaatttttgaataatttttatattttttaattacattttttctgggtgatttgattgggaaaaattatgctttattcatttaattgaaaatcatataatttttaggcattgattgccgcagtggttacttctttggtaacggttacggtcgaactgaatccatggaatgcgctgggggaaaagactgctttgcggccaaatgccacaatggttcctttttatattaatttcatttaa

SEQ ID NO: 80387 - DNA, 332 bp, Heterodera glycines
atgttgaaacctaacctttgggctcggtcgataaatggcaccagtgagtaaaactaaatttattatttaaagattaagtatgccacttaaataaaaatttaaacataattaatgacaattaacaaacaatgaaaattttcaaaattttcaggtgtttttttaaaacagataaaatcgttttcagatgagtcaatcccaacaggtgactccattgcgctgcttccctcgctgcttcccattgtcattatggcgctatttggtcactttgttaaaactcattaaaatattttaaaaaaatttttgatttaaagcatttaatttaaataacatta

SEQ ID NO: 80388 - DNA, 363 bp, Heterodera glycines
atgtgtatgtttccatattttggcatttttccgaaaaaggtaggagttaaaaaatcatatcttgatttaacaaataatatgattttcagataaagatgggatttattctttccaacataatttagttgatgaagttgttgcatagtttaatttcaatggaaaagcacagatttttgaaacataatgttttttgcgttattggtcattattcccatcatttgcgacgcccaattgcaacttgcaccagttagttgtacgctcaacgcaattatctttttaatttcaaaaatcacaacaatttaaaattttaaaaaatacccgaacaacacacggaaaagcgaagctgtggaaagaaagaataaa

SEQ ID NO: 80389 - DNA, 758 bp, Heterodera glycines
atgagtgatcattcgtcggacgattcaagcggggctgagggtggcgacattcaggtgctcgcaactcacaacagcacaatttttttcgtattttcggataaaaccttgacaaaaaatattatctcttgagaccgggtgggcccggagggtccggcgaatttttactgggccgcccggtcccgtatttttttttttggtaaacccaggcccgctaaattacctaagctcggtccctggttgttttgaacgggcgtaaatttcacaactaacttgacttatatttgaaaattataattttttgccatagtatcattactgcaaaagcttttttgtcctgtttcttccgtcccggtccattttccaaattcccgtgcccggccccattggtttcaaagttcctatatctaattctctcaaattttcaaataaataaataacatataaaaataaatatattttttaaaaacatcctaggattgcagtttttaacttcactcactagttttaaacaatccaggtgacgacttttatggccgacgttgtgtgcagtttgccaacagttccgatagagggagagcaaaaaatgtcgtattacacagtgcttttatatttcggaaacaataacaatgactgtcgtcattgggtttcaacaattgtgagtttaaatgggtatataaaaattcgctgttgattcgccaacattttcatgcgatttgtcacgggcgacgtttttttcgtgctatcaaatgataaataaa

SEQ ID NO: 80390 - DNA, 1039 bp, Heterodera glycines
atggtgagataagcgcaaaaaacacattttcttcgatcaatttcgatttagagcgactttttagcaactattttcaactatttttgcttatgaaactttttaaacaactattttgacttgtgaaattaaaaaaaaactatttttcaactatttctgcttttcaacaaaaaaaattattatgaaaaatgcaataaaaaataaataaaatgcacctctaagaagcgacgttaattttttcaaaaaatgcacccccccccaagaatctgtttttcaaaaagcaaaaattctggccatgatttggcggacgatcgaaaaatttttacgcttgaaaattttcaaatgtgttgatttacaattgtgcaaccaaaaaggataaagatgagaaattttgcaaaattcacaaatttattggcatgctttccaatttttggcaactttttagcaactattttggagtttttcagtttttagcaactattttggcagttttttagcaactatttaggtacctatttcgcgttttttagcacctaaaattccgttccctgataataattatttcataaaatattgggcataatgaatgactcttgaaaatttcagagtcgcgggattaatcccataaaatccttcattttcaaaatacgcggaattgcggattggggcccggcaaaatcacgcgcggggatcccgtttcgctacgggctcgagatacggtgattctcatttcaaaaccatcaaaaatctcggaattatcatatgattttaacattttatacttatcgggaacgtaaacccaaaatacattgaaagaaatgattaaaatattgtcttaaattactgcgttttagtcgttcataatcatatgtgctcattttgaaattggccatgtgctcccgctcaatttgacgaaaaagtttaactgcttgcacataaaattcagcctcttgatttgttggcattggacaaagagtgtaaagtctggtcttcagtttctgttaaaaatgtttgcccaagagatttgccaaatattaattga

SEQ ID NO: 80391 - DNA, 1305 bp, Heterodera glycines
atgtcaacaaatgaatttatgctgcaaaaatttaaaacaagtaattaatacaggggcagggctcggattctttctttctttcaatgggcatcctttattttggttttaatccttttgaaattttgaccgtcctttatttcaaagatgcccttttatatcggcatttttccccattcccagacagctcctatcggcaccgccggacacttccatttgtcaaaaaatttttgaagaactttctcatgaataagtgatcggtcctttgaaaagggaatttggcggatccgagtcccgaagcaaaatttatttgcatttgaaaatatattatgctttacctttacagttgccggagacaatttaagcactactcgtattgaaaaagagcttcataaattgcgcattgggcctgaacaggggtacggacataaattacaaatttaacacttcgattatgccaactgtatagattgtatattatgttgcggtattcattattggatgcagactcgtaaaaaataccataataaaaattcaaatatgggcagaatccatccctgaagcttaaaataaattttttaaaaacaaccctcataatccgcgggggaaatatggttttccataatttaatgccttaataatttttattgcacataattcttgggattcacgaaattggaaaaacaaaataattgaggtcatcataaacattcctttattgtatcaaattttttggtcgaaaattaaggtgttggcttaaaaccgcaattgagggaaatgaatggctccgtgctgaacttttacgttttgccgattttgcacgacaagaccttttgaaaacggtaaaaagaaattcgaacatatgtgacagctctgtaaaaaacagctattctatctaagttttaatgataacacacttaaattcaccttagcgtgttaattatttattgataaatctttagacactcattgccacacaatgtgccaatataaccaacaatggcaacatgacagagatcgaaaaagaaatgaaagcaatcgaaacgctactgggggaaatttctcatcatatggcagattggattgaagaaaagcttgtaagtattgagaaataatgaaatgtgacttctgacctttttggggtcggaattcaatttttggataaccaaaataccaactttgaaaatttttgggtctggatttccaagttccaaaaattttgagcgttggaattctatggtactcatggttatgtttatggacaaatgctaaaccgagacaaattattgtactttttcttggatgaaa

SEQ ID NO: 80392 - DNA, 1879 bp, Heterodera glycines
gtccgtctttcgccgtcaatttcgccgtctccgccgccccaaaaaaagccaacgaaagtggccaggcaattaaccttcgccagctcagatcgcacgcggacatcgaagtggatgacgaggaggaggagaagaagaacagacggcccgacgggagaagacgcaaagtgccaaaagtggtgagaaaccagcaaaattccaaaaaatttatcaaaaaatatatttttcccattcgttcgtcgtgaggggggggggggggggtcgaagcgaagcgggaaagagaaaaaattttaaaatttgaacaaaccccttagcaaaattcatttaaaatttcaaaaaaatttccccagcggtgcgtaaaaatcctaatttttcttataaaaaaatacgctcaaaaaattgcaaaattggttatttattggacaaaatctattaataaatcgcaataagatttcggcccgagataatttccgttatttttcagccccgccgttgtgataaatgcccgatggaattcgacgaagtgtggaagcttgaacgccattacagtacacattctgacttcaaacaattcaaagtaagtatctaaaaaatgtttattttcaaatataacaattaatttttaagtgtgaattgtgtccacatcgaacgcatcaaaaagcctacttgaagcgccacatgagccttcatcgctacggggaaaaggtgattctttattttcatggaaaatgacaagggctgatgatttgaatgcgattattatgggttttcaacaatattttttaaacaaatgtacaaatgctaaagtattttagaaatttcaagggaaataatgggcagggtgggataaatgttatggctaattaataaattaatttatatataaaaaaatattttatctttaaatgccttttcagtgtcgattttgtggggccccaattgtgccacaatggttcaaacatcatgagaagacttgtggtaagaatctctgcttatgaatttatttattctccttttcgcttttatgtatttgtaattaatgaaaagaggttttgcgtatttgaaaaggaccaatatctttccagctgctgggaccaatgccggtgctgctgatggaggtggtggcactctccggcgccaccaatcgccgccccctcccgcacatccgtcgcccgctcttccaccgccgctcctcgatcaccaacgggaccaacatgaggtgggtattgtttaaaaagcatttttaaacccaattttatcatgtagagcatactcgattctaattttttataacttaaatttttttaaatttcgaaaaaaaattacaatttttttagctatttttcaaatttatggttgatttattaactcttttcttacttttattactggttttttatttacaaatgcaaaacaaatgaaaaatttgatggaattacgaccaattttcaagatttactaacaataagttttttttaattttcaacaaattgctgaaaaaacttttttatttttttcgtgtggaatcctcctccctcccccccccccccaaaaaaatttattttttctcgaaaaattgcacaaccagcagagaaaggtgaaaattaaaatatgttttttttatttttaggcacttttaaatttccgccagaattattgcgatgccaatgcttgtcatgagaaactcgaaatcattggcgaccaaaaaatgactgtccgttacaagggaaatgagaagggtattttatcaaaattacttagtaaaatttaatatttccccttaaaaatggtatgggttcctgtttcccctaaaatcccgattttgctgttcaaaaattcctcccacatttttttaccacaaaattttcaaccgggaaataaa

SEQ ID NO: 80393 - DNA, 1260 bp, Heterodera glycines
  unsure (1)..(1260): unsure at all n locations
atggagaataataaatcaattgcactttctctctcagctgtttatgaagtgagtggaagagaaaaaaaatgctaatccgccgcgtgtgtaaagccatgaaaaagtaattaatttttaatgattgaaatatgtactgaaggggggggggggaattagaaatttttttgaaaataaaaaccaatgagaatcagtaaaaatcagttgttatgtatgacaaattagaaagtgataagagaatgttgatcagtcagtgatcagagattaattgcatgaaacccaaaaaccggaaacaaattactattataattgcatcattatatgttggattagcgaatagttaaattttatgacaattctcagaagaaagaggaacaaagtatttatttccaaatgtttttacgtgaaagtaattagtgaaatgccgaaaaaacattcgaaaaaattaaaaaattgatgagcctaattaaggtccctttacaccaacacgggagggggggggggttgcattagagggaaggagaaaatttccaaaattggtgaaaattcatttttttaaccccgcataaaattttaattccgccctttttcagtttttcaatgtaatcaacncacttccaggcgttgtcgaaagccctgccactgctgctgaaacgacgactccgtttgtcgatttgcgctgcgagcggcgcggccccgtgccgtccaccgtcgcggcggcgattgttgtgccgttgtcgtcctctgcgattgggatagcagcggaaagcgccgttggaagcggcgctgcttcaagcacatatgacggtagtgcagcggaagaaaacagagatggacggcgccatacgggagcggtggttgtggtaacggcactggaggagacggtgcatgacgaaaaactgcccgaagaatgggctgctgatgccaccttaaagcaatttaatttaaataattttttaaatcgaaaaaagtgccttaaaatgtcatttaatgaaaaaaaggaagaaaattcagtcttcaaaatgaaagaacattgtcgcttttcaatgtcaaaaattaatttcagttctgcccttaagctccacgagggacaacaaaataaaacaaaaaaagtggttaaataaatgcggggatatgatcagtggcgggaccaatgcaattagttttttaaaaatttttctcatagaattttcaacgaaaaattttttaaagattttttcttgaaaaatttctaagttttaaaattttaatggcactcgtaca

SEQ ID NO: 80394 - DNA, 606 bp, Heterodera glycines
atgtttgtgaagactttttctcgttcggttcgtaattcaactcgctttttctactcaacaaacaccaaattggatccctcaaaatggcgtattgaagtcgcattgctcatttaccgtcctccagttgttgctccaccaatgacggaagttgaagaacaattttataggatgtctgaatttgccaatcagaagtcgtcttacaaatgtgactttgaacttcagttggaaaaagatgaaaagtcggtgttttatttcttttttgtttttgttttttcatactttgctttaaggctattggagaagcgacgacaacttgaaaacgaaggaagggaccttagcgcacttgacgaagaaattaatgtctcttctgctcaacttagagatgattggttcgagaaaagtgaacagcttaccaagcagtacaaactggattcgccacaaacaacgacggatgaggacaaaaatctaaagacttttggaaggatgcagcaaaaaaagctggctttgcttgtgaagcaacggttccctgatgctcttaattctgattatgtatcgccatggattttaccacagttaatacgaactggcgatgatacattgcgacag

SEQ ID NO: 80395 - DNA, 765 bp, Heterodera glycines
atgtcgggtcaactcagagcaaaaataccgttacttaaccgagtgttaataaaagaaatacagaaaattaagtcaaaaatagaagaagggaattttgagtatgataaaaataattttgatgattgttctcgaatttttaataaaactaaagaaatcattcaaagaattgaaccaaattttgaaaaattaaaaattttgcaccaaaaatggcaaaatttaatgaggcaaatgaataaaacagaatggaacagtgaatggaaactacaaaaaatattccgggaaaagcataattatttaaaaacaattaaggaaattgacgaaatccttgacacaattaaggatataaatttggaggtaaaaagaaggctgaaagcgctcaaaccaaattccccttcagaatccgaccaagagaatgaatcaattgatgagagcaagaaaacgatgatgaagaagccggagaagaagaagatgaagatgaaaaagaatatgatagtgatcaagaggacgaatcacaagaaatgcattcaagtgatcaaacacatcgtaatcgcataccatttgttcatcaacgatcaagaataaagcttccggcacaaactctaactcatttttcgggaaaattttcccaatggcccagtttttgggacgattttaaatcctcagtacataatgatccgaacatggaaaatatacaaaaacttaagtaccttcgtggactgttacatgatgagccttatcgaattgtatccccatacccccttatta

SEQ ID NO: 80396 - DNA, 4771 bp, Heterodera glycines
atggaacgaatggaagactcaaatcgtcaaatccggaactttccttctaatcgaccaaacccaaacaagatacagagacaaccatatcaaaatttctctcaaaacaaaccaaaatttaaccaaagaaatcaatatcaaaccccaattacaccttttccatatacttctgcattaacaacaaagtcaaaaccattgcatccggcacagattaaaccaatacctacacaaaccaaaactcaatataaaatattttgtcgtttctgtgaaagagaaaaccatacaagtaaagaatgtaaaatatattcaaccccggagaaacgaaatgaacgagtacgtgaactcaaactttgtctcaattgtctaaataagggacatatggtcaatgaatgcaaatcgacctatttatgttataactgcaaacacaaacataatactctcctgtgcactcgtaaacaaactcagtacaaaacgaaggaacaaaaaaccagagtgaatatggctcaaaattacgaaaatcatgaagagactcagacattcatgacaatggagggtgataaaaatttaccaaattctgatgaagaagaattgcttatgactactgaagtaaactgcataaatcccaacaaatataaagtaaaaagggaaataattttgtttgataatgggtcacaaaaaagctatataaccgaagaatgtgctcaaactcttcaattaagcacaattgaggaaaaattattagcaatttccactttcaatcaaaataagccaaaaataattaaatcaagactagtcaaagttggcattaaaacattaaaaggtgaaatagagtacataacactacaaacagtggaaaaaattactgatgttacaaaaatggttaataaagaaactgttgatgtacttggagtaaaaatcccaatcagtcatgcacgtcctcaaattttaattggaatcgactattactggcactttatgctaccaaattcacaaattcaattacttccatcaggattttactcaataaatacaaaattaggaaaaatattatctggaaaaggaactattgaggacaccaattgtaactcagtgaccgaaaaaagaaaaaaagacgaaacgaaccaaatacttcagaaattttgggaattagaaaacattggaattatcgactcaccacatatgacggatgaagatgcagcaatgatacactttgataaaaatgttacatttaaaaataacagataccatgttcgatggccttataaaagagagaacccgaatttaccaacaaattttggattatgcatgggaagactaagaaatgttgttaaacaactaattaaaaacaaacaattggaaaattatgacagaatattgcaagaacaaatggatactgatgtaaatgaaattgctgaatttaaatcaaataatttgcttcattatcttccacatcatccggtaataaaagagagctcaaatacaactaaaatacgaccagtttttgatgcgtccgcaaaacttaaaggaaataattcactaaatgatgaaattcaccaaggaccaaaattactaccagatttgtgtggaatgattctccgatttagacttaaaaattacgtattaattggtgacctggaaaaagcatttttacgagttggattaaatgaattagacagagacacaacacgatttttatgggtaaacaaatcgtacttgaatgaaataagacaaaattatcgagaaattgaaatgagagacatcgaattgagacgattcacacggataccatttggagttaacgcttcaccatttttattaactgctgtagttaatctccacttgtcaaagataaatgaaatgtttgaaaaattcaagacaattcaagttaataaggaattatgtctaaatgataaagaagaagaatttaaaaatctttgcatagaacttaaacaaaatgcatatgttgataatttcgtaatgatgtgcgatgatgaaaaagaaatacaattcaaacattattggagtaaagaaatatttaaactagcatcaatgaatctgagagagtttgtctctaatcatgaacaaagtaataaagaaattcaaaaattggaaggatcagagataccaaaagtaacaaaaatgttgggtataaaatggaatgtcgattcagatgaacttgaactccaaataaaaattccactaatgagtaaagacacaacaaaaagacaaattttgacgatgattgccaaaaatttcgatcccatgggatggatttcaccagtaatactgaaatataaactatttttccaaaaactatggcgatcaaacaaagattgggacgataaattagatgatcaagaaattattgaatggaataatatttcaaacacagaaatgatagccataccacgttcacctttcacaagccaatatttaaatcattcaatattacacattttcgctgacgcttctgagttggcttatgccacatcagcttatttacatacaaacgatcaaataaatttattgttcgcaaaaacaagacttactccacttaaaggcttaacaattcctaaactcgaattattaggtttattgatagccgcaagagccgccaaatttataaaaagggaatcaaaattgaatctcgaaaatacctatatttggtcagactcaaaatgtgtactcagttggttgaaatgtaaaaggaatttaccaatttttataaaaaatagagttgaagagataaaacaaattgccttggaattacacatcacttttcattatgtaaaatcagcagataacccggctgatttggcttcacgaggagcaaccatgagtgaattaaaacacaacaaattatggtggaatggaccaaaatggcttaaactgaaaaaagaaaattggccacctcacagcttttacagtcctgatcaagaagaggctccttatttagataatacagaggaaataattaacactcaaataaatttaataaaaaacgaatataaaggaattatcgaatgggataaattcagttcatggcttaaaataactcgcatttgtcaaactttattaaaattcatatttttcaaactacagaactctaaaaagttcaaagaaaaatttatttgctctaaattcgaaaatgcattacaattaaaaataatggcacaaaaaatgctaattcgaattattcagagggaaatggaaccaaataaagaagaagaaagacagttaagaatttatctcgataatgatatgatactcaaatgtgaaggacgattaaaaaatgcacaaattcaaggtgtcaatcccatttttttaccaagaaaacactatggaactcatttgataatcatggattatcacacacgaaatttacacgcaggtacaatgacaacattatcggaaataagaaaaacttattggataccgaaaggaagaagaattgttgatcaaatacggagacaatgctaccattgtaggagatataatgctaaaccttttcaacaaccacaaatgcctccattacccaaatcacgagttgaaataactgaaccatttcaaaacgttggactagattatatgggaccaatacaaataaaaaatttcaatgaaaaatgctggataattttatttacatgcttcacaacacgaggtattcatctcgaattagtcacttccttatcagttcagcattttctcaatgcatttagaagatttatatcaagaagaggcacacccaaacatgtatggagtgataatgcagcacaaataaaacttgcatcaaaaattctaccagaagtgttaaaattaagagaaattctcaaacacgaatcaattaaaagttattttttaaatgaaaatataaattggacattctctatagaattagccccttggcaaaacggagcaattgaacgccttaatcagaatgtcaaaacagcaatgagaaaagtaatcggtaaaagatttattgagtttgattcttttcaaactctgacttgtgaaattgaagccctggtaaattcacgaccaattacctttatatatgatgaaattaactcttatcaaattcttagaccaatcgacttcatacttccacataaaaatttatgtattcctccgattttggaaaatcaggaaactaaagacccaacatattacccaaaaaagacttcattcgaccaaacaattgaattatggaagaaaaccacaaaattattagatgactattggaaaatttggactgatgaatatataccaagtctaagagaacgttataaaatcgaaaacaaaaatccacgaaattgtatgaaatcttttccagaattgaatgatatcgtaataatacatgatcaaactcccagagcaatgtggaagactggcattgtcaaaaatgtcataactggatcagatggtatcgtaagaggcgctaatatcgaacttccaaataaaacagtactaaatcgacccttaaaattaatttacccgttagaaattaattcaaatgatgataaagagcaagaaactctctctaatctaataattaatcaaaaacccaattatttcaacagaaaaaggaagatggataatcccttagtccctataaaaatgaatagactgtttcaaaactcgttaacaattatatcattattaacattaatttcattatgttcatcttattcatacgaatgtccaaaggaacctaaaatatggaaaacgagatatacaactctatgtatcgaaaacggttttacaatcagacaaa

SEQ ID NO: 80397 - DNA, 754 bp, Heterodera glycines
atgccgacggcgacgccttggcggacgaatgtgctgctgtggggggctgagggccgcttcggctccgccgtggtcgtcgccgtcgtcggcactgtcgtcgtcgtcgtcgtcgtccacttgactgtcgtcatcaccactgacgtcttccgcgacgactgtcaacggttcgcccgtcagcagatgccgacgacagagtggacacgcccggctctggcacgcgtgcgtccacaggcagacgctgcaaaagcgctgaccgcagcagcccgtacatagcagcacattgtccgccaacggctccatgcagatggggcacgcttcggctccgacacccgccgtccgatgcacaccgtcggacagtcgtttgagctccgaatggtcgagcggtgtccaatcggcgacggtctcgtcgtgacgaagccaatcgtccagtgggcggccgtcggccaggatcacgtcgcgtgcggtcgccagctggtcgccgtacagcagccagtcgtcttccaccagctctctgtgatgcgcttcgtcggcccactgttggtccagcaaccgccagaagggctgccgttcggcacgcaggcgctgccgctccagtcgctgtcgacaacgtcgttttgagcgacgttgctgcttgcgtcgttccgccacggggttcccggtggtcgacgaatggtggaagacgactcggaacagcggacgatagccgggcgcacggagccgtgcgcttcgccgcggcttaagaatgaaaaataaa

SEQ ID NO: 80398 - DNA, 1096 bp, Heterodera glycines
atgttcccaaatgacgatggctacgaatcggaagatgatgaaattctcttgccacctccgccgatccccccgcaacttggccaccctccgccaaatgtgccggtaatttcggtctcgcttttcgttgctttttctcacatttccgagtgcttttttcaggcagttcgtgttcagccaatgcatgttggtcagcagcggctgccgctgagagacttgccacaattcgaggaccatccgcaaaatgtgccggtaattttgggtcgattttcgctgcgttttctcaaatttctgcgtgctttttttcaggctgttcgggtccaaccgatacaacaaccattgccgctgagagacctgccgcaaattttccaccctccaccaaatgtgccggtaattttgggtctttctttcgattgctttttctcaattcccgagtgcattttcaggcaattcgtgttcaaccaatgcagcaacccgtaccaatgagagccgtgccacaattcctccaccctccgccaaatgcgccggtaatcttgagtctcgttttcggttgctttttcaaaatcccgagtgcattgtttttcaggaaatgggtgtgggaccaattcatgatgggcaacaaccactaccactaagagcgttgccacaattcgcccaacctccaccaaatgtgccggtaattttggctcgtttttttgttgctttttttaattcccgaatgcttttttcaggccgttcgtgtccaaccagttcaacaaccgataccactgagagacgtgccgctatttgtcaacccaccaccaaatgtgccggtaattttggctcgcttttgttactttttttcaagatcccgaatgcattttttcaggtaattcgtgtccaaccgatgcctcaaccgttgccgctgagagacatgccgcaaattcaccatccaccgcgaaatgtgacttcaatttggatcaaattgtggttgctttttctcagtctctgggtgtttcttcagggaattcatgttcgacaaattcaacgggaatacgcagtaccgcaatttgcccatccgccgccaaacttgccgtatcatccaccagaaaacgttccg

SEQ ID NO: 80399 - DNA, 606 bp, Heterodera glycines
atggcaaacattcgccgtaatgcggaggaacacctccgcagagaactacacgaaggtgccatgctttgcgcggcacatcttggcccattcacgaatgtccgtttcgacggatttttccgttatggaccggccaacacgcacatgtccccaggacggactttccgggagcattttcgtagacgcgggttccaagtgaacccgaatttgccatgcctccaagaatatggaggtttcagccacagccaacagggcattcatgtcgattattttccgatcgacatgatcaacattcaaaaaggactcggtgttggtccgagaccgcctccaactgaggccgaaattttacggcctcgccgcatccaagcctatttggcatttgaggaaattcctcatgagcaagaggagctcaacagaagagccctcttcttcgaggtcattggccttcgatcaaacagacccaacgatggcactgcaaaggaggaaggcgctcaacagacgcgccctcaagactttcaacgaaagaaagagttagatgatccacacactgatcgtcaccttgaggaccaaccaagaaagaaaacctccaacggaccaacgcgccattga

SEQ ID NO: 80400 - DNA, 575 bp, Heterodera glycines
atgggcgcgccgatttggctgattgtgatgaaacttctggtgctgctgctgctgttgctgcggaagttccgggatcatgatacgcagactgtgatcttggaccggacgaaggaaatcaaacatcaacgatcaaagaccaaaaagcacgtgacgaagaagagacgaggaaaagcagagagacagaagtggaggaggaggaagaagaagcggcagcgcaagatgaagaagcttttttggatgagttaatctaaaagagaagaaacaggatgaaatggagagaaagagagaaagagaagaggaagtaaaagagagagagaaagaaagagatagtgagaaaggaaaggaagagagagagggagagagaagagagagagagagagaaaggaagaaaaaaagagacagggaaagagggaaagcatttgtaaaggggagaaaggaaattagcagcaaaaagcgagacaaagaaagaaaatgaaacgaacgaaaatgatgataagaaattgaaaagagaggagcaaaagaaggataaatcagcagcacgaagcaagaaggaagcaattacaaaaacaattaaa

SEQ ID NO: 80401 - DNA, 949 bp, Heterodera glycines
ttttttcgatggttttgtcgccgcgtttttcaccgaacgaaagaagcaattgtcccgcaagcgtattgaactggccattttctctcgaccgactgatgagtcgaagaatgccttcaaatctttgtggtctcttttcaattcgcaaattggcgcaatcacttctgtttgtaatgcttctgccgctgaccgtcgtaacgcttctgtcgctgatgagcgtcgtaacgccgaaaacaccggcatctacgacctgggcccgtatttcgacaccgttcccgactggcttgtggctccgaccttgcgccctgtcgatggaatttttggcttagagaccatttacaagtggatttacaatgacgaaggaggcgacgttgtcaaaactttcaccatgcatcctccggaggaaggggccgaaatccccgcaggggatttcgaaagatttctgttggtaagcattcattaattatgctgtgttcatgagcgttggcagtcagaccactaattttggcggcggggggggggggctaactctatcttcatttagtccttaccgcgcttttattcacactttttagagtaacaaattttgaggacatgctttcaaatatttctttcattttcgattttatggggctgcccttgcctacacttttgttgtatttcatcgtccaccgcttgaaaaactcaaaattttgacaatttttttgcgactaaactttcgctttctcattttcctttaagcatttttactttctttttgcttttttagggttttttccgtttctgtgatgacgcacctccccgttacatcgcaaagttcctacatggtgttgttgccgaagatgtccgcgaattttctatcacaaagggcggacattctctgagcatggactcttacgtggaagctgatgggaccaccaaagattggactttgaagtgttccaaaaactaa

SEQ ID NO: 80402 - DNA, 426 bp, Heterodera glycines
atgaaaagcgcaaatcaaaatgggttcggcagggcaacaatgaatgtatttgtagaggattttgcaaatcgtgactcgttggaatctatactactaattcgatgctgtaaattagtgagtccccattttaaactttactttttattgacacgaaaacttgcgaaaaaataaaatagaaaatggcagaaagataaccttgaaaattaaagataataaataataatgtttatgaaattgtttgcctggccggtaggggtcagttgcgtttgagcaaagcataaaccaccataacatttttctttgttagccagatttcatatatccggcatcattcccaatctctacatggaatgaatactccgaggatataatgctaagtgagcgaacatataacaatatggaagcctgaacatgaaccatattgca

SEQ ID NO: 80403 - DNA, 501 bp, Heterodera glycines
atgtcaatgcactattttattgccatttttgcatgcatttctcaaatttttggcactgcaaaaggaatgaactcagaaatgggatttcagcctcattttcaacaaaacccatcatcatttttacggaaattaggtaataatgccttatctgagcttttaaagtaattatttttcagaattggctaatggggtcaaaatgttgataccaattgaaaatgttatagcttttttgaaacagttttcccaacttaattcattgctcaattccgatgattttcgcatagtttgtttgttttttaacattttaaataattaaaaatattttagcaatgcgttgatattcaaattttacaaataaataaagaaatcaatgagataatagagacaaatcagctgaagattggacgagatttatgcagaattctttacaatttgttaatgagttgtaaggaaattggatatgaattggatggaaattctcgcttaaatgccccttctgcc

SEQ ID NO: 80404 - DNA, 2374 bp, Heterodera glycines
atgcctgttccgacacacgtgtccgaggttcgatcatttttgggaatgatcaaccattaccaacaattcgtgaagaacatgaggttcatccgacagccattggacgaattgttgaagcaggacaaagtgtggcaatggtcggcagattgtcaaaatgcttttgagaacgtgatcaagattttgaaatctgatcagttgctgacacactatgacccggcacaagagatcattgtatcggctgatgcttctgagcatggaataggagccgtgatctctcaccgctttccggatggaagtctaaaagccatcgcacatgcatcatcgtccctgtcagcagcagaaaagaattactctcaaatcgagaaggaaggcttagcgattgtttttgccgttcaaaaattccacaagtatctcttcgggagacacttcgttctgcagacggaccacaagccgttgttgtccatttttggcaacaaaaagggaattaaggcttgcacagcgaatcgattgcagagatgggcaatcactttgctcggctatgacttcgaaatcgaataccaaaatactgctgattttggtcaagcggatgttttgtctcgcctaattgcgaagacaccagtgccggacaacgaagtgatcattgcaaacattcgtgagagcaatgaaacgggagtgttgaattttgttacgaaaactcttcctctcgatcacagtgatttggctaatgccgcgaaaagtgatcaggtgatcaaaaatgtgaagaaatttgtctgctcacattggccaacaaagaacaaaatggccgcagacattgttccgttccatcgacgacgagacgctttgaccatcgaggatgaatgtctgctttatgcggacagagttgtgattcccgcatcgcttcaaaaagatgtcctacaactcctgcacagaggccatccagggatgaaacgaatgaaagctctcgccaggcagtacgtttactggcctgggatggacgaacaaattgagaattttgtcaaaatgtgcaacgaatgcacaatggaagcaaagatgccggtgaagagtgagcttcactcgtggccgaaagctgacggaccgtggaaacgcgtacatttggactacgccggaccgtttatgggaaaaatgtttctcataattgttgacgcgtactcgaagtggcccgaggtcttcgaaatgcgttcatcgaattccgcggctacaatcgacaaattgcgatcactctgtgccagttatggccttcccgaaattttagtcacggacaatggcacacaattcgcttcaaaagaatttaaggaatttgtgaccgaaaatggcatcaaccatctgttctccgctccgtataatcccatgtcgaacggacaagccgagcgttttgtcgatacgttcaagaggacatgtaggaagatcaagggagaaggagcatcggaaatgttgaccacatttttggcaacataccggaccacgccttgtgaggctttgccggagtgcaaatgtccggccgaaatgttcctgcaaaggaaaccgcgcacgactttggacttgttgaggccaaagccaaaggcaccgataattcgagacgaggccatggagaagcaattcaataggcgccatggagccaaaccgagatcttttgccttgggcgataaggttctcgctcgtcatcgtctttctcagccttggcgtccaggaaaaatcacaaaatgtaaaggtgtgatttatgacgtcgaatttgttgatggaaagtatggacggttccatgccaatcagttgcttgtgagaagcactgacgaaaacggcacaaacgcattgaacgtgttcaatgatgcgtttgatttgccattggcaccaccgctggttcagcatggaggacaagcgcaattgcctgtagtggcacccgctgctgtcatcgcaccagccgtggccgaagaacccgtcgtggaggaagctgatcgagcccccgaagtgcccgctcaacgacgatcacagcgaaatcgacgaccgcctgatcgctacactccatcatgaacggacggatcagacggacgaatcgaacggacgtgtaagacggacggatcattggaagaaccgaggaaaagattttttttattggggaagatgttgggatcggtactattttgtccgcccattattatttttctctatttctcttccctccattctctcctctctctcttccctggttggtcccccataaataccccgcgccctctgacctccccgtcattcatttgtcacccatttattttgcttatattgttcaatcaatattcgccctttgtcctccgtctctcttctcttcatttatttatttatttgtgtcttcccaacttga

SEQ ID NO: 80405 - DNA, 1729 bp, Heterodera glycines
atgttgagcttcatttatacagatgatttgagcgaactgaacggagaaaatgcaatggctgtgctttacgccggtggatttaattttatgtgacaaaaataaataaattatttaattagccaaaaagtacaatatcccctctctggtcggctcatcttcgcaaattcccatttccgaattgcgcaatgttttcttcgcttttgcccaggcccgtcttctcgacttgaaagtgggtaggaaaaattgaaaaatgcgaaagaattaaaaatttgctaatttttaactattttgtcggtttacattttccagataaataaaatacataataaactgtttagagtgatttttttgaatgattaaactcaatctcgtgaatttttccgtcttgaatttcgctattatttgcatttttttgcaaatattttcctacactaaaatttttacaaacattttttcgtttatttagaatgtataataaattaaggattttaagaccaattaattgctgctgtccgattgtgagaccgaaaaaccattgactttagacttttttttgtaaaatatgttcctcaaaaaatgaatgtttttttaagtttgtcaaaagccaaacaatcattagagggcttaaagaaatctcggtcttctaaactcgaaaacctagaccagaaaaactcgattcttttctcgctttggcactctcagagaaagactacattttaaagattatttttcctttaaattttagaattttgccaattgttgtttggcttacattggcaaaaatgcggacactttgctcaaatcggatgcttttttgcaaattgaccaaaaattgttgtgcgaaattttggagtgtgacgaattgcaaatcagtggagaaatttcaatttggaatgcggtaattttaacaattaaatttaaaaactaaattttattagtcatttaattatttccattaaatttttttaaaggcactccgttgggccgatgaaaaatgccgtgaaaatggcattgattgttcagcagagaatcgccgtcaaatgcttggcccggcactgttcaaaattcgctttccgcttttgtcaaatgaggaatttacgaagaaaattggtaaaaaataagtcaaaatttcaaactcgttctctgatgagatgccgtaaaatattcatagtttttgtggcgatttttaaaaatgttttttaaaatttatttttcaataagttaatacatatttacagttcccttcggtgttttatcaaaagatgaagtgatcgccgtttatcagttcaaatcccttccaaattgtcatgggatttccgacggaattttcccaatgccattttcgattaatggacggatttccgatcggaaagaaggcacagttttgatggacattgaaaaagtgtcagaatttgcacgagaggaggttgagagcagtcggtacagcgaaaaagtgtacataaatggacttccatggaaaatattggcaaaaataaaagcgaaaagtggaagcactgtcaatgagaaaagtttgggtatttacctttggtgcgatgctccaaaagaaggtgcaaaattactaataattaatatatataagcaattaattaattgatattgagcagaaaattggagttgcaaatgttcggcaaactttcgaattgtttcgcaaaagagcggagtgtcggattttaaattagaattaaatggccatgtttttgacaataaa

SEQ ID NO: 80406 - DNA, 1734 bp, Heterodera glycines
atgctaaggcgtcccagggacagcagcagtggtcctgtgctccactttttcttcatcgtcctctgcaatttgccattccaaattgatgctgtcggattggcaccggggctttactgtggcacggtcacttgctacgatggtgaatttgaagggataggaaatgcgatttttaatttttcaattttaagtgctcgaaatttctcgggatgacttcaacaagacggatttgccgaaactgtacagaaggatggcacgccaataccatccggaccgggtcaaacgtgaagtgagtgctctactaaaatggcaaataaccaatttcggaattgactcctgaaaagaatttcataaaaattgggaactcttccagtttatatggcccgaaaaaccatagagaggggggactcttttggtttgcaaatttttttatgataaaaattcatgaacttttttatagaattttcggcgtcgctaatcacgaatcagataccaattttgacaaatctctaacccaaattcaaataaaaagttgaaaatttaaaattttcggatttttttttgttgctcaaatttaagttaagtattcgaaattggattaaatagatgtcaaatcttgatcaggccccaaaactccccgggaacaagttttcataagttattagcacacaaaaatttagcaaaccaaaagggtgggtcccccttatggtttttcgggccacctaaactggaaaagtgcccaaaattgtgtcaccttttctccgccctccaattccatttttcatgtttggctttattttcggtcattaattttgcaattttttacaaatccatcccctaattttaaatggattcactgtttttcccctccaaaggatctccgtgaagagacggaggaaaaatttcggctaattgccaccgcttatgagacgctgaaggacgacgagacgcgcacatattacgactattatttggaccatccggaggagcgctactacaacttctaccagtactatcggctgcgcaccgcgccacgcgtcgacgtacgcattgtgatcgcggtcaccattctgctcatctccgttgtgcaggtgaacagcagggccgaacaggacaggacaagatggtcttgtacatgataggacgggtcctttgtgtttttgaaaaatgcaacagggccagaaattctaaaaaaacaggaatttagccatctgaaaccatggtccgggttttcaaaaattcacgactatgaaggtggacgctccgccggggtcggaaaaggtttgagtcaagcccggattgtgaaaaaattttctcatttttttgctgttatttgcaaattgacattaaaaaatatagctaccggatatttagaaaattgaccaattttctgaaatttacttattaaacttgtctttgttttacagtatctcagcgcccatcaaaagtaccgtgaggcattacggtatgccaaggagcaggtcaaattccggcacatggccatcgaaattgggcgggagcgcggggtgctcgaatttgacaagcaaacgggcaaaatgaagaagaagcagcggaatgggcaggactctgagcaaattatcaggtaattgggcattttaatttgtaatgtgccgcggaatgcttttgccaatgtacggaaaattgggcaccactgccacgtttttggaccataaactcaacaaaattggtaccatttgaacgctattcaatttacta

SEQ ID NO: 80407 - DNA, 442 bp, Heterodera glycines
atggaggagtacatggcttgcgaactgtggaagcgggccgagttcgaccggtggaaggaggacaaggacaaagaggagaaggagcggctgtccaactcgggtcgctaccgccagtacaaacggttcatgaagaagcaggccgggtgagcatttttacaccgcactttttattgtacagtaccattgaacggcgtcgaattttgcaccgaaataattcaattttaattttaaaaaatgggaatttggcctgactttaaggggtctattgaaattgattcagaattttgccgggattagattacataattcttggttatcgttgtccccgcccctccatcctcactcaaaatccaattttagggattgctcattcttcaaacgaaatgaaccaaaaagcatgaaaagcgaaaaattggatgttgttgtcaaaagagcactataa

SEQ ID NO: 80408 - DNA, 1990 bp, Heterodera glycines
atgggtaggaagaagaagaagccgcaaaagccatggtgttggtaagtcgaaatcaaattagttttgatgggcatcattccttttgtttaaggtattgcaaccgcgaatttgaggacgaaaaaatactcatccaacatcaaaaggtttgttttatttgtacggtaacttaatttggaaatggaattgtcggatttcaatgacagagtttaattgccttttaattagctcgggttattaattttagattatatttctgagaataattcactcgattagttttcaactcccccctcaaaattgggctatattttaataataaatgtcgaaaatgcacctgaagaatgatgacacattcattccgactatttaattgcaggccaaacacttcaaatgtcacatttgcaacaaaaagctgttcaccggcccgggcttggccatccattgcatgcaggtcgaagaataatccttgaaaaatgccaaatattgcgaaataattccaccaattcgtcccgttgtattttgcaggttcacaaggaaagcattgataagattcccggcgcgttgcccggccgtgacaatgtgaacatcgaagtgtacggaatggagggcttgccgccagaatcgtaaatgaaaaacaaggaattaacggattaagagcatggcttttcagcactcgtggccatgtcgaggacgactcggacatgccaccctccaaaattccgcgccccgcctttccgcctggaatgtcgatgtccggcatggtgccaccaattgcggcgtacaaccaatacacaccgcgcacaccgtttggtatgccgtcctatggtcggtcatttttgtgaatactcactccaaatttgacgtcgaaattacggccaaaagggtcatttgcttgcttccaaagaattgtaagactcggcattaatgctgctctaaagcaaaacacagcaacacttattattggacatggattttgatttgtgtgtttgctaattgtaagccctataaaacagagcaattatacacttaggcaacgaaatgaaattttattccttcatccattcataaaaattctatttttatctctctccaattttggcattttgtttaagtcttttcccttttgaagggatgccgcgtcccggcactgttccgcttcctcaccaccaacaacaacagcagcaacaaatggccgcaatgatggcagcggctgccgcagcagcggcgggcgggcggatgccggcgacgtccacagccgcctcaattggcgcgattccgacaccaccggcgggcattgtgccaccgcctccgctccccgccggaataccgtcgcctgcgtcaggaggtgccattccgatgccaccgcaagcggcattcgccgcttaccaggttcgatggcgctggaaagggataaaaacccataattggacgagccgaaatttcaaccgacttcgaaatttttgatgtttgttttgctgatttcccgaatttttaaacgtctcctcgtaaaaatcagacaatttgataaacgaaatgcgtaaaattggcaacttttgtaggataaaagcatctccggtggaaagtatggcaccagggacgagccctctacttctgccgcgtcgtcgtcaacaatggtcaaaacattgggtgccaagacgcgcattgtgtgccaagatgaacagacatcgctggtaacagatggacagcaaaagctttgcaattttgaaaaatatgaatttctagttttctggaattttcgggggatttaccagctaatttcccccaattttccccacaataggaagagatgatggcccaacgcattgtgccgacctacacacgtgggctgatgccatttgagacgtagcggagccgaaggatcgcaacaacgaaggcgaagaatgtctgtctgtctgtcactgagtgtttccccacgagggcttttcggtaagtcttcgcatttccagatgccgagtgcactttctcttcc

SEQ ID NO: 80409 - DNA, 3085 bp, Heterodera glycines
atgatgatatattcggttttggtgattatttttatttctttcatcggttcggcaaagtctgtgaatttaggtgatttaaaataaatttaaaaaatatacatttatttttagaacaaatttttaaaaatattgacgagaattactcaaaattgttcaatcttccactcgatgaaaatgaaatttctgacagaaatttggaagcttttcaaatggaccaaaatttgaagttacagttggaagcagcaatattttacagtaatgcaaaggaaatggtaaatttgcgacaggatgggaagccaaagaaaattcgtgaacaaaatgccaacacattaaaagttttggttgaaaattttgctgcgtccagcacagtgtcccttgtaaatctgtgccatttgtggaaactttggcgcactttgggcgacacattgggtaacttttattaaccattttttgaaaataccctttggataggccaaaaaatcttttaattgaaaatttaagtggaaaatcccaaaattccaaagaatgtaaaaaattatttgaaaaatcgcgaccaaattgatttgaacggcgtggaatgtgatgaaagcattggccgaaaccgagtttttgtcagagacacggcacttgcgaatttcagtgcaattatcgcactgttgcaacttcaaaatggcaaactgacaattaaatttggaattgacgaggaatttcgaatgatgtatggaatttgaaaaataaatgcattttttcgaatttttgtgcctttttccgcttttttgtacctatttcatgccaattttttggcgtttttaataattacttaggcttaaaagtggaaaaattatttattatcatattatcagaatttttaatatttaaaaatatcaattcaactcaaaaacaaggttcacacattttctagttttttaaacaaatttaatgtagtttttttgccatattctggctttagatatttcataaaaagttttaaaaaacatttttttggcaaaaaaataaaatccctttcttatgcataaattttttatttaaattcgctgacaaaaggctcatacatcaaatttgcgcttaatattccgtaattctttatttttcagagatttgccaaattttttcaatgataaaagggcgaaaaaagagtcgaattttgcttttcaaatacgacatttacgttcaatggacaaaaataaattaatgattcgaatgaaggacaaattaagggaattaattggcccattttttatgaccaaattggaattaattcgaccgattgagatgaatttcggtgatttttattgaaaaataataatttaccgaattatttttaaattatttccctcaacagatattgttggtgacaatgaattggcgatggattatgctaaatttttgtcacaagaacatttggttgaggaaaaagccgtaaccaaaatatcagtgagaattatttttggcagaattatgcaaattttcgcccgaatttacgccatttgggagacaccgaaaatcaaaatattgaaaaaaacaattttaaatttgtggaatggaaaagaattgcaaacgattcacaccgatttgaaaatgccgggcctgaaagcagtgaccaaatatttcgaattttacctaaaattgttacgcattttcaattccagccaaggcattggcgagcaggaagagcaaattggggggttgttgccgactcaaacattcgccaaatttacatgggaatttgcggcaaaaaacaaaatgtttgagatgacatgggtcgcactgcttgaagaccatgccaaaaacattttgcggttgaccgagtcgaccacaccaaatgcattcaccgcacttttgaaggattcgctgatgaaggaaaagggcacaaaggccaaattgaacggcttttttacgaacaatacggaaaagggggacgaaatttacgaagcattggccaaaaagtaccccaaattgaagcagttaatcgctagagagggtttgtgtgtgcagggcttcggattggattccgaaggatttaccctcatttttattgcttatttgggggtcgaagagcatttttaggaaaatttttgtgttgttatataaaaaatataaacaataaaaaataattggcataatgtactttgtcagcttcaaaaaacattgagtatttttgatttcctaaaaatttggattaatgatagttttttatccattaaaaaacttttaaattcgcagttcagccctattcaaaacagaatgttttgcggataaaggaatgaatattaagtgatgatttcaaataaactgaaaatattctctccttttctcacaaattaaatttcataagactttcaacaattaaattttaaagcctacttaattgaaaataattcagagctatctgatgatcagattcgcgatctacaaattaggaattacatccgatttttaaacgtcacaagcagccgaaatgagtcgatgaaatcgagattcaagctcaatctattgctttattatcaatggtaaacattttggctgctttaattggggaaagggaaaagatcactggcaaattgaaaaatgagggatgccagttttgtgaaaatatattttcccctgttttctccatcatattaatagtaaggaaaaacacttccttttttgtatttgcgttcaaaaattttttctatgattttttaaaaacattttaaaatttttgtttacaatttggtatttatttggggcttttatacattttaaacaaatttatttaagaaaacttttttttttgacagggtgaagcaaatgagagatggtcaaaattcagcagaaggaaagaaagaatttgatgcaaaaatgggccaaattgaaattacgatggatttggtggcggatgaaaacatggcaattgaagcatatttagtgacagtggaagcgaacataatacaggaacttgagcagttcaagcagaacaaatttctggtcaacaatggcacgccaattaaacggcacaaagaaaagtggacgaaataacggaaaggtcgcccagattcagagaggcattgaaaggtgcaaa

SEQ ID NO: 80410 - DNA, 1228 bp, Heterodera glycines
aaaaaatttcaatttttccatgaacatatatttttatcccacccttatgaaaaactaagaaaattctttcaattctgcctaaatttatcacttttttggctattgtttgattgaaaaaaatttccagggtaaaaaaaaatttttttttttaaatttttccaatcattttttttgttgcgttccaggtggtatttcacactgttcaccctgagcggcctgttctccgtcacgttcagtgtcgtgttggcctacgtggcggacataacggagcgcagcgagcggacaactgcgtgcggtttggtgtccgccacatttgccgcctcgttggtcacatctccagtaagaaattggcatttttttccaattttttaattccaaaaaatcaaaataaaaatattacacattccgatatacattgtaacaagttttattttatatttatattaaattattggaaaatacggcgtgaaaaccaaaaatgttggttttaatttgaaaaaaaaaaaaatttttttttgctaaacctgcgaatttttttaaataattaaacattttgatttggagtgctaacatgatagcttttatttgactcataaaatggaggagaagggcttggtttttgaaaaaatttctattttggcaaaaataaataaaattttgatttgtgccacaggcgttgggcgcctatctgagccgtgcctattccgacgacgcggtggtgctgctggccaccggcatcgccgcgctcgacttgctgttcatcgcgctgtgcgtgcccgagtcgctgaagtcgccggttgccgcgggcggcggggacagtgccgagaccgactccggtggcacaggcaaaagtaaataccaaacacaaacacattaattataaatccgaaaaatgggatgaaaaatattccccccccccctcctctttaaattaaaaaaaatttaaaccgaaatttttcaaaaaaaaattttttcaacaattttttttatgaaaatttaaaatgcagggcggtatgtcaaaccctcgtctcacaacaaatagaaaaatgtaaaataaaattaaagcatttatggttgaaaatcggtactttcctcttctggggctacaatttaatattttttttccccacatattcatggcatttaggcaaatccgcccgatatcttcagtgtccatcctgaaaattgagggcaccgacccgctgtttgtgctgcgctttttgcgcga

SEQ ID NO: 80411 - DNA, 1452 bp, Heterodera glycines
atgggcacacaggtgaagaaaacggtgagcaaaaggaagggtttgcggccacaaacgtcggacagagcgccgatcagaggcgagctgagaaaggagagaatgccctgaaatgggggacaatttttgtcatggcatttgttagttccttgaatttttttagtttttccatgaattttcctgaatttttttaaatttttccttgaattttcctgattttttaaagtgtttccttgaattttcctgaatttttttagtttttccttgaattttcctgaatttttttagtttttccttgaattttcctgaatttttttagtttttccttgaattttcctgaatttttttagtaataatgtaaaaaatcttaggctggaaattttttgaaaattgattttgcataaatacaaaccttaaggcccaagatgagaccgttcattaagaatttgttggctggaaatgtttcggccaacacattgatcaccggaacagtcagaagaccccacgagaaaaatctgaaaaaaaataaaatggaaattgaaaaaaaaaaatattgctttgaaaaaatagtcccgtttttccataaattcccattaagattttacggaataattgcacaattaaattagccctcagcattaagaataagaaaacacagtcttcaattttattaggaatattaattctgttgtttgaaaattaatagtttttttacaaattcattgacgattaaatgatcagatacaatcacttttaatcgcttatttaaagctgtttaggcgatcagtgattaaaaaaaaacacttaattttgaacccgattttggacaaaggcgcaaaaattttgaatattttggacaaaggcgcaaaaattttggacaaaggtgcaaaaattttgaagattttggacaaaggcgcaaaaattttgaagattttggacaaaggcgcaaaaattttgaatattttggacaaaggcgcagaaattttgaagattttggacaaaggcgcagaaattttgaagattttggacaaaggcgcaaaaattttggacaaaggtgcaaaaattttgaagattttggacaaaggcgcagaaattttgaagattttggacaaaggcgcagaaattttgaagattttggacaaaggcgcagaaattttgaagattttggacaaaggcgcagaaattttgaagattttggacaaaggcgcagaaattttgaagattttggacaaaggcgcagaaattttgaagattttggacaaaggcgcaaaatgtttgtactcgagaaaaatgacgattaacgcgtgcacaaggctggcctcgcgccgtacgcgtgccgaaccgacagcggcggtgccgagcatggcggccgacgcggcggacattcgtcgacggctgacacagaacagtgagcgggcacgtctgctcatactgtgccaaaaaagtggggagtga

SEQ ID NO: 80412 - DNA, 1018 bp, Heterodera glycines
atgagcagacgtgcccgctcactgttctgtgtcagccgtcgacgaatgtccgccgcgtcggccgccatgctcggcaccgccgctgtcggttcggcacgcgtacggcgcgaggccagccttgtgcacgcgttaatcgtcatttttctcgagtacaaacattttgcgcctttgtccaaaatcttcaaaatttctgcgcctttgtccaaaatcttcaaaatttctgcgcctttgtccaaaatcttcaaaatttctgcgcctttgtccaaaatcttcaaaatttctgcgcctttgtccaaaatcttcaaaatttctgcgcctttgtccaaaatcttcaaaatttctgcgcctttgtccaaaatcttcaaaatttttgcacctttgtccaaaatttttgcgcctttgtccaaaatcttcaaaatttctgcgcctttgtccaaaatcttcaaaatttctgcgcctttgtccaaaatattcaaaatttttgcgcctttgtccaaaatcttcaaaatttttgcgcctttgtccaaaatcttcaaaatttttgcacctttgtccaaaatttttgcgcctttgtccaaaatattcaaaatttttgcgcctttgtccaaaatcgggttcaaaattaagtgtttttttttaatcactgatcgcctaaacagctttaaataagcgattaaaagtgattgtatctgatcatttaatcgtcaatgaatttgtaaaaaaactattaattttcaaacaacagaattaatattcctaataaaattgaagactgtgttttcttattcttaatgctgagggctaatttaattgtgcaattattccgtaaaatcttaatgggaatttatggaaaaacgggactattttttcaaagcaatatttttttttttcaatttccattttattttttttcagatttttctcgtggggtcttctgactgttccggtgatcaatgtgttggccgaaacatttccagccaacaaattcttaatgaacggtctcatcttgggccttaag

SEQ ID NO: 80413 - DNA, 277 bp, Heterodera glycines
agtttggcattttaaaaaagcctggacctggattccatgttggacgtggattttccggacaaaaattccaggttgccgaaaaatatggcctggacctagggatccaggaaaaatccagacctgacctggatccaagtccaggctgattgtgagctctaataattttcttcgttctttttttagtaatttttctctcggctcttttatggaaaaatttaaaatataggctaaggctgtgccaaaaattgactgccaaagtttttatgaatttaataaa

SEQ ID NO: 80414 - DNA, 1174 bp, Heterodera glycines
atgcgaaatggtgaaggtgggccaatctgatggatttcattaagaaaaatattttaaatttaattttttgaaaaaagaaattctccgtagcaaaaagagcatctgctcaacactccaatggaaaagcttaaatttagaaagtgttaatgatttgcgtgactaatactcaaaggcaaaaggagtgccaaaactgaagtttttgcctcatttgtggtgtttcattggaaaacgagtacttaaaaaataacagatttgataaatcattgatttacaatgtcatatgacaaatccaatatcagattcataatcaggagatcaacacctcggaaaatccccaatataccaatttttagcacaaaacaacaaagttaaattagggatacacattctgcagaattagccaaatttaatttttttttttctgcttaatcccatttattagctcaaaattatttgtttaggcattatttgaagtgaaatgtttgttgcgcactttctgcatctcattttgagggtgtgtatttaaaaataaattaaaattcgttgaaattaatgggacattcttccacaatcaatgcaatctctggccactaatcattttttgaatatttttattattttttttttgccaataagaacaacaacgtgtgctggcgaagaagccgctcattgagcactcagatccgctagtcggctgtgatctgaataaaatgccaacaatttgctggccaagttgtttcaggagcattcggagtttcgcaattactttgtgcagttagaatgaattttttctgaatttttggcccaaaattattcattttaatgtcatcgatttgcatggcttgaccccattcgcattttggctgttgtcgacccgacgccctcccccgccaaattctttttttttaaattggcctacaacaaagattaaaaaataatataggacaaccaaaaatatgtatagaaaaaatatgcgcatggaataaagaaagaaatttctgtaaatatttttatttaaataaaaaaaataattttttaacagcagaagaaaatattcagttttacaagctgagaaatttttggcaattcattttttaattttccttacaaatttcacttttatttttcaaatcattttgaccttttttctaataatttgtaaatttaaaataaa

SEQ ID NO: 80415 - DNA, 1559 bp, Heterodera glycines
atggctcccaaacgtcaacgcgttcgccctgcctcggactacgtccgtaaactagattccgaaagcgtcttcaacaaaaagtttaacgtccaatcgtcaaaatcgtcctacatcattgaagacctgcctggcaatcccgagtttctcctacgtgcgatattcaccaactgtattctgtccgctgttcgactcgcccacgaaaacggaatcaaacccgaccgtcttggagccaccgtttcatccgaacttcttaacccacccgtctggatcccaatacgccaatatacctcgaataccgtcgacgcaattctgaatcgtttactggaggtggcacagtcaaagtcgcgtgaggggtcactatggggagcaccttttaccataacaacaacaacacttgacgccagcactcttcctcgacaacaacaaattcgcggtcgtgggtttcgtaccccaaagaatgttcgtcacatcgttaaagaagcaaatctcctgcgtgtccgaaacaacgactctttttgccttttctatgccctcgaacttagccgtatttaccacaccgatatgatgagcaaacaacgtttttccgagtatctcaatcaatactttgaccggcaacgcaatgacgtacgacgacttatgacttccgcaggaatcccattcaacctcaacgaatacgacgctgccgttcatatccctcccatcgtagactactggaatgcaacgtacaataaaatcttcaaagttttcgtctttggagcatctggcgagtacaagcccatctataaatatggaccagacaacttcgatacatcgatctctattttttacaacaataatcactttgatggaatccgctgcggtgtcggaaaagctgtgtttgggcgtgattgctactgttttccttgtgaatgtccatttgacaatgccaacgaccattctcggcagtgtaaggcccgctgcacaaactgtggacgaatcggtgtcggcaggccttgcacaccggacgacaactaccggaaagattgcgtcagctgcagcaaaacttttatgaatgctgaatgctatcaacaccacctcacatctaattactgtaccaaatcgaaaaagtgcaagaagtgcggtgtcgtgtgggactttgaacggaatacccgtgacggaagaaagggacacgtatgcgaggagaaattctgttggacttgccgcaattaccatgacaaggggcggggttgtttcatcaagaaactcaagccgaagcatcccaaggcattccgtctcatcgccttcgactgcgaaacaacgcaaaacaccattattggcccaaacaaacgtgcacacatcgtcaactttgtctcagcccacgtggcctgttcaatttgcatcaaaggaaacacttggcgtcaatcactgtccggccgtacggcatgcaaaatttgcggtgaattccgcaccatcacgttctcacaccgtgccttcaacaacactcaagtggactcaatgcgtgtgtgcgaatcaccgatgacagaatttgcgcagtggcttctctcgggatttgataaaaa

SEQ ID NO: 80416 - DNA, 1540 bp, Heterodera glycines
ctcaaatgcaccaagaattcatgaagtcattcatggcattacttctccaacaacaaagtcacaattggataatgcatttggtggagaagaaaaaagcaaaaagtaattaaaaattgtcaaaatatttttaatgagtaatttcattttttcagcgtcatcaatgccaaccattgttcaacaaactattccaagcatccaagtcggccaaacccaacgcccggcgggagggaggagcggtgcccttcgtttggccaaatttccccaacccaacgcagttcaattttgcacgaaggagtaattaaatataaaagcattaatttattaaataataataataataaagtagctgtaactattcataaatatttagtacatcaaaagaaatccttgatttagtctttgcaactttgagaacaaatttaaatgagaaaagactcaacaaatgatttcaaaaatatataaaaattgaagatgaaaatgcatattattttatattgttcactttttgcattagatttcctttattttattaaatttctgtcttctatgttcaggattgtgactcggaagtgacaatttgtccaccatcggctcggaacagtgggcgaagtgcagcggtggcagtagcgagcggaaacggcgcaaaaaacgatgaaaatgccgtttatacggcatcatccccccctcgatgcacaaccgactcatttcgacgaaagatcaaatccatggaatgccttgggacattggtaagcaaaatgaatgtttttttgttctgttcatttttggctttatttgaaaaatggggcatgaaaagctttaaatataaaaattataacagatatgtaaacgagaaatccagtagggagggggaggggggggtcggagaccaaaaatttcaaagtcctccattttttgcttttcaaaactttttggcggcgtgcttttttaaaaaattttggtgaaggggggtggggagaggtccggtggtctgataggcgccgccgggaaaattttttggaaatttgagtgtgatttgttaacagattttcagcaaaaaagcaaaaaccttgttaaattatttaatttttttagtcagggggtgtcgactccctccccccctattaattaatgttattaaaagctaacagttcacataccgctcgccaataatcgtacaaaaacggcacaaaattcaggacaatttttcgacgatgacgccgaacaaataccgtaaaaacagtgccgacccgccggtggattgcaatggcagtgacgaggacgaaaatgaggaggacgatgaaaaacagtgccatcaaaaaagacgacaacggacagtggaggagggacaggaggaggaggacagtgccaaatatggacaacggagtctacaaaatttgcacaatttgcaccccacggccaatcgaattgctaacggggcaaaacagcagcaaatagggaaactgacaaaccaaaataacaacggcacatttggtggaggaggaggggtaacaacgcattggagcacaagcggcacactggg

SEQ ID NO: 80417 - DNA, 1615 bp, Heterodera glycines
atgacggtggaatcggtccgcccaagccaaagtcgccggccaccatcgccgctggccaagaggagtccaacaaggtggcactgctcacttgcgccaccgcgtttccggccgaaaaacggtggacccatgtggcgggcgtgcagcatgtgatctgtcggagtggggacgacagccaaatttatgggattggcaagaacacggacaacgcgttgggcctcgacacgtggcaggttgtgtatttttgaaatttttctaaaaaaaattcacgaaaatttttgatgcttttattaattatttccgaaagttttccaagaaaacgtttaaaaaaattgaagataaatgttatttcagggcaaccatgacgaggagcactggcgctatgacacactgcagcacatcccattgccggacggagtgaacaccgtggccggcgtggacgcaacgctgggcgccaccatattttggacggatgatggtcagtcagaaaaaaaatttctagcaataagattctcgatagaaaatttttttgtgaaaaagcaaattttttttttttttttttgtaaattttggtggagagattttggggtgctcccataataaaacacttttcaattacaaaatttatctacattttggactcacaattcatagctgatttccacatcaacatttttttttttgatttttcgataaaaatttgttttcaggtcgagtgttcggtttcggctgcgacacggttggccaactcgggctgggcatcaaggaagaggatgagaaggtggtgtcgaagccgcgtcagatcacttcggcacatttggacggatatcgagtgttgggcgtgtccattgccgacaatcatggtaggcatggaaaattagggtgcaccacgtttcacccctccaactttttggaaaaatttttgaaaaattcttattgtgttaatttgcaaaaatttttcgagcctttgcaccaaatgagaaaatggttgaaattttctgaaaaattgtatcaattttacagtagtaagacaaattttatatgaatttcatttcatttctaaatcaggggcctgctggatccaaaaaattggctaaaattttttgaaaaatttgattttttttttctttgaatttgtttttaagcgctttttctcgccgcgtcgattgaccaacaaccgccgctgtcatcagcttcaccaccaccaccaccacaacagcagaaggcccagcagcagaaacaactgcagaccaacggcaacggaatattggaaacaccgattgatggcaaagcttgattgattgatggatggatggatgatttttattttttgttttgatttggatcatcacaaatcattttttgtgtctgctgcccttctctaatttgtttgtcgtctcattttgtttattgttgctctctctctctctctctctcttcccccctctctctctcccctctccacactatgcgcactgcattgattggctttgtttgtctcgatttgtttggcttttcttctctctctctctctctcccgcttctcctcctgttgcttgcttttatcttcccttccttcatccctccctcactggtcaaaggcaaagcgtacaataaa

SEQ ID NO: 80418 - DNA, 823 bp, Heterodera glycines
tggaatactaaattttccttctttttttgtttaatttcatttcaacagtttacctccaataaatggaagaaaaacaagtttttgatttccgtaattcatcagttcaaatttattgttaaatttggcgaacacttaattttaaatttcatcggttgtttaatgtctgaacttagtatagatcggaattttcaattttataattacgattttcagtgaaataattaaatttttattggaaataataatgaatgaattttctattttcattatatttttagaaagttttaataaaattaatttttaaaaaatacaaattttttttaataaaagataattaatttaatttttttacagataaaaatgcattcaaaacattttaaaggtggaaaattcaatacaattcttcattttgttcctcatcaatatgcttgggttgttgaacgtgcgggaaaattccatcgcattcttgagccggtaatattaaaattaaaatttttaaaattatttttcggtatttattaaacaccaaaaaatttaatttaataataaatatttaaatttataacaataatatttttaattttaatgccgtagtgattttattttataaaacaataatacggaaaataatttatttattgcaagaagtaaatctttttaatttaatttagggggtgcatatcgtataccctctcatcgacgagatacggtatcggcactgtttgaaggaaatgtgcattgaaattccacaacaagaagcaattaccaaggacaatgttcagctggatttggatgccatcctttacgtccaagtggtcgaccc

SEQ ID NO: 80419 - DNA, 380 bp, Heterodera glycines
  unsure (1)..(380): unsure at all n locations
atgtctgacaaccgaaacgaagcggaggagaaaatggcgaaagcaatgtaaaattaaaatgccaattttcaatttcaatttttanattttgttttccttttttcagttttatctctggcgacggttggctttgtgtgttcgaattgcttccggcttcacaacttggccttgnaattgcgatgatcagccacccgtttgacttctacgtgnatgaacacttncagactcgctactggactctgagatccatgaaaatcaaaatgaagttcgaagcggatggcacccaagaaatggatgttggccatgccaattggaatcgtttggaatacgcaaaagcccgttgcaaagaaaagcccccgatttcaaggccctttcattga

SEQ ID NO: 80420 - DNA, 647 bp, Heterodera glycines
atggatgcttattttgatgttgacgactttggtcgagttgggtcaggaattgatccgacctttgcttaccaagaattaagtccaagcagtaatgagagtatagagaaatgtacggcaaaatcacacataaatctttaatttaattttttagatgacatctgggcccaaccaaaatcaccgtgtagaatttctatcccttcgaccatttctggagatcctgactcagattttttgatcaaaaattgaagctgaacttgcttgctttaaggcaggccaaaggttagaagtgaacggagacttattttcctggtggcatgaaaacgctgctcgtcttcccgagttgtcaaaacttgcaaggatggtccacagcattcctgctacatcagtcagctcggaaaggctgttctcaaaagctggacttatctttaccaattcacttcgaaataggtcaaaaatcaataaatatgtttaatttatttgctaatttaaggctttccggcaatactgttcgacaaattttgattgtaaaggtcaacttggatgcacttttactggcaccaaaaacgaatctgaatcagatgatgaaagtgaagacaaagaagtttttgagttttgaaaattttgtttacgggaattgaaaaaataaa

SEQ ID NO: 80421 - DNA, 190 bp, Heterodera glycines
atgttgtatcaaacatttttaataataaattattctaaattggtaggttttatcaaaatatatttaaataaatttttgctttttaggattggtttccagtcttattatataacataacttttttataagacaaaaaacattttaattgtttattttattatacagaatttactgaaaatttaatggctaa

SEQ ID NO: 80422 - DNA, 60 bp, Heterodera glycines
atgtcgaggcgcgacttttttgatgggccaacaccgaatccaagtctttctccttcaatg

SEQ ID NO: 80423 - DNA, 1854 bp, Heterodera glycines
atgcgccgtgataagagcacgttgcttgtcatcgacgaagtcatagacgtacttgctgaagctgttggtttttgtgaaattattgtcaaattattcaaattttgtttttaaattgtgtgtttaatagctgttaagtttgtaaatatgaatttgataattagccaaactcctaattaggcatattaactcatggatttagcccagtcgtgttgcgcgctcgctgatccttttctgtaagggcttcggcgaattgagcggcgtagaaacaccgggcattggccgtttgcgatcggcgagcatgtgggtattagactcggttaaatgatagtcttgaaaaaatgatagggccgacaagcactgcccgaaaattttttttttttttgaaaagagctaacaactttttgggctacaaatttcaaggtattttctttttcactaatatataaatgtgatgacaaataaatttaagtttttaaattcataaacaaatcgcttaaatttaataagaaagtttaaaatgatcaaatttcaggagcatggaagaagctgatcgaccaacgcgcaaattttcatcgccacccaaagaaacgatcgctgaagacggtaacctacagaaaaaagataccgtaaaaattgctcggctgacactgaaaaaggcaaccgcagtctaaaagaaaatgcagaagaaaatgagcttattataagacaattatttatgcatttatttgttggtctcttgacctattgatatttggtataatatctattccaaaaaataacggtttttggtgatttttattgtaaaaaaatgaaaattaagcaaaaaaaataaataattgctcggcactgagaatgaaaatccccgaattaaaaagatttatttatttatttttgcaacaaaactgggcaaatcaaaccaaaatgatattcttgagaaatgtaaaggaattgctgagatttcgtcccgatagtgaaaatggcgatgattttttggcaattgagtctcaaaaggaaatgaaatcccaaacacattaagcatcttcaaataaagccgtacttcctagcaaaccgctaattgctgataaaataagatataaaattataatttaaaatttccattattactaattttttgccatataaaatcgataaaaaattacatatatcttaaagatataataattttttttgttaatttgaaattatgacgtatgtatgatatcaataaaaatcaatccaatattcatcatatgcataaaattttatagcaaacgaaattcatttcatttattcattaattccatcaattttatttcattttcattttttcttggctaattttatacaagaaattattgcgagtaaaataatatgcttattaatttaggctttaatcattttcagcctaatacatattacacaatcctgacttttcatatgactacttttcccacaaccgtcgccttcctcacaattttcctagcgcatttatcgctattttatgatgcgagggtaaattaattgattgtttatttcaataattagtcttttttttaattttcagtgtgatgattccttctctgatacattcacctcgcacatcagcttatattgatacttccgctaaacaaccgcaaaatttggtggaattggacttggaagaagtgcgcaagttgcagcaattcatcggacaaaatgccatcaatcacattgttgttgaggatggcatttttgccggaatgttctcctgtcaacagaacatcgaattccgattagaagacgaggccattatgggtgatggcaaaatgcatcgaatgctgttctcattcggagcaatattaagtgccgaaattg

SEQ ID NO: 80424 - DNA, 1434 bp, Heterodera glycines
atgcgcgaagtgatttcgctgcacatgggccaagcgggggttcaaattggcaatgtgagtgacttttgatgggtggccaattgagcagcggtcgtcggttaaggcgtgctgggagttgtattgccttgagcatggcattcaggtgaaagggaagtgccgcgggttaattaggctaattaattagccatccgtcgattgaattgcgtttagcccgacgggcgaatgccgaccgacgaaaggtgaaaaggaaatgggggccgattgcttttgattcaaaaaaacgaatgtttggcgtagtgttggcgtcgaggaccattcgtacaacactttcttctccgagacgccctcaggtcatctgtgaaaaaggcagcgaaagcaacgaagtgccattttaggaaagcacgtgccacggtcgattttcgtcgatttggagtcgacggtggtcggtgaggcgattggccaacgaattcacatcatttatatcctccgattgttcagacgaaattcgaaccggcacttacagacaggtgaacagaacgaatggcacacaaatcatccgattgcaatgccaaaatgaccattggaaatgccaaattgaccccaacccccggaaaatgccgaaatgacaccctcacctccttttttagcttttccatcccgaacaatgtgagagttgtcgaggcattcattttgacgtgttaatgggctgaaactgttgcagtgatcactggcaaagaagacgcggcgaacaattacgcccgagggcattataccattggcaaggaattaatcgatgtaaggagaagagaatgagctaattaattgggcataatttgcgaactcaggtcacaatggaccggatcagaagtgggtgttgggccgatttgacagtgccattccgttcttaagaaatcgccgaacagtgccaaagtctgcagggctttctgattttccattcgttcggcggagggacggggtcagtgagtccccccccccctccttttctccttcatccatcctctttcacccccccccccttttcagttccggcttcacttctctgatgatggaacggtttgctgcgccgtttcacagtttttatttcaaaaaatcgttcagtctttccgtggattttggcaaaaagtgcaaactccaattcagcgtttacccggcaccacagatttccacctgtagaaacggagtttaaacaagaaaataaataaataactttcgtttccttcccgtgtaccgtaacttaccgtattcgccccattccccgaaaagcgatggtcgaaccgtacaattcggtgctcagcactcacacgacgttggaatattcggactgctcctttctggtcaaccgttatctgatcggatgcatttctggcaattttttataattcaggtggacaatgaagcaatttacgaaatttg

SEQ ID NO: 80425 - DNA, 880 bp, Heterodera glycines
  unsure (1)..(880): unsure at all n locations
atgttagctacacaacncatcggttagaaaatcgccttttaatattttattacttcattaaatttcagaacttttctcattgtcgttgaaaccgaagaccaaattgcgggcactcattgagattgtgtccaatgccaccgaattcagcactctcccaattcggcacaaagaggaagtgacgctgaagaagttggccgaccgacttcagggacagatgaagaaccaaaagtggaacagtcctcaagtcaaagtgggaattgcgcattttgaagtatccaattcacattgactctttgtttcctcgttcaggtcaatttgctgctccatgcgcatttaatgcgcattcagttgagcgccgagttgaccaaagacactgattggattgtgctgaaaacggtgcgccttgttcaggcgtgtgtcgatgtgctttcgaggcatgcttaaattagttttcactttgaaaatcaactttgtgcttcaaattccagcaacggttggctttcgcccgccatccacgcgatggaattgtcccaaatgctcactcaagcgatgtattcaaacgagtcgtacatgaagcaattgccccactgcacgcctgaactgcttgaacgttgcaaggaaaaagtgagagtgatgtttgtgtagcaattgttgttatgtctgtcatgtattcttttagaaagtcgaatccattttcgaactgcttgagctcaatgatgaggacagagacgagctgttgcaaatgaatcaggcacagcttgcggatattgccgtcttctgtaacaattacccgagcattgaagtccgacatgaaattaccacgcaaaagtcgacagtgtcagtgatgatcattttattacaattcagttggaacattaaa

SEQ ID NO: 80426 - DNA, 1168 bp, Heterodera glycines
atgaaaatttgtacgaaaattgcgaaattttggattttttggggcatttaataaaattttctttaaaaatcctcaaaaattcaggaaaatgctaaaaactcagcattaaaaaacactaaatatttatatacatttacaattgaaatataatcaattctttcgatttttttgatatattttgctacctaaaaaactttttttttgtttctcctatttttatgcctatttaatgcctattatgagatttttcctgcctttttagttgcctatttcgcgattttttgtgcctagaaaggaatccctaatgaaatcaattgacgttattttttcggtataaaaatttcctctttatttgataataatccgttcgccattaatccgttagcaaaatatggattataaaagacagttttacgtttattgacaaataaaatcctctcagattgcgtcggttcgctttcatcttctgatttttagcttagctcatcaatggttatcgcgtgatttgcaaattcaactcatttgcttttctaatcattgcattatttaaatgcccaaatgagcagaagaccaagaataatgcaaaaaatgtaaaggcacaaaaaattggcagagaaactttaaataacaaaaattcagagcaggggaaccgacgtgggggaaacgatgggggtgggtaaaaacctgcgccgtttaattcacctcaataaggtcctcgccagtgtaccgcgtcggtggctcctgcgcaggaaatgccacggaaaagtcgtcaatgtgaaaagtgccgaacctgccaaacaaagcctggaaaaatgttttgcattcagttttcataaaaacataaattgataaatgaccataaaatgaaaaatgaaatcaagaataaatgagaataattttttgcccatctaaatgaaattcgcttatttcagtcaatgcgctcgtccagcaagtgaaccgaatttgcaactgtaagagatttttgtaaaaattaattaaccaaaaaaaccgtccatggtggcgaaaattttttttcattttttgggggtacaactgtttaaagggttttcggttgtctgaggatccgattctggcacccatttgattttataagaatagcttcattttttctaaactcaatattgttttattttacatgtttgactga

SEQ ID NO: 80427 - DNA, 1554 bp, Heterodera glycines
atgggatcccgaaaaatcctgcgcggggtcccgtcctgcgccatttgttagtgtactgtatcgacatttttgcaccagcacaaccaaccatcttttaagcatctgtccaccgcattgtcatggcgcatcaattacatcatcgatatttccaatcttttggtggtgttcaactcgtccctcaacttcgtcatttactacaacttctcacgccccttccgtgccactttcctgcggcattttggcaaaaagaaagtactgctcgaatcggccgttgtgccagcaccgcggcagaaaagggacccccgggaagggaggaacggcacgcacaaagtgatggtcactgcacaacaactacgctccccactgatcggacgtaatttttggtcccatttaattttggtataattggtaccagtattctgttgaattttttccaaacattttggggaacggacggtaggcaccgcaccgcagaaaaaccgagataaaaatgaaaaaactttccaaatttcagtcgaacgctgcacctccgttgcgttgtgggaatcggatggccaaaaatggaacgaaactttgctgaaagaaattgagcaaaattcgctgggaagaatgggcgaaaatgtgcaacggacaaagagaataaaaatgaagcaaaaagaggtggaagaaacggatgaagaagaagaaatacatcagatggagaggaagacgaagaagagagaaacggaagaagaggaggagaaagaaaaagaggaagagaaagaaaagggggaagaagaggaggaagaaagggaagaccggatgaggaggagaacggaaggggaagaggaagataaaagaggacagagtaggaagatgaacagagaaacagaagaggatgacaatagacaagtgttggacagactgaccggaagaaaacacccatcacgaagagagtggaaaaatcaggaccaatgccacgaaagcacgaagcaataattttgtaaatattgttttttttgtactattaccacagggattttagtacgattgtatcaaaatacttctcattattttcaataatttaaagcagaaaatgcgggcaaaaacatgaaacataaagaagaggaggtgaagcgcgaaggaaaaaattaatttttatttaatttaaacaacttttcaggtaattccattttacactttaaattggctctaaattgcgaatcataatttgtcgactaattctgttcataattcacctaaaacttcataaatttcctttgggctcagcggcaccgtcagtcagcaacaaattttgaagaaatagcttatttgttaggaaatttccatgcttgacatcggaaatatgcgcatgggaagtaagcgcctaatttgtatttttttatcatcgtatagataattttgaataggccttatgaggattttaaaaatttaaaaagcgaatcacggcgtctgccagcatcaccgaacttagaattattctggctcatgagaacattgataaagttttaatgaagaccagaattaatttatggttttggaacacaaaataaa

SEQ ID NO: 80428 - DNA, 375 bp, Heterodera glycines
ttcttcaaaatttgttgctgactgacggtgccgctgagcccaaaggaaatttatgaagttttaggtgaattatgaacagaattagtcgacaaattatgattcgcaatttagagccaatttaaagtgtaaaatggaattacctgaaaagttgtttaaattaaataaaaattaattttttccttcgcgcttcacctcctcttctttatgtttcatgtttttgcccgcattttctgctttaaattattgaaaataatgagaagtattttgatacaatcgtactaaaatccctgtggtaatagtacaaaaaaaacaatatttacaaaattattgcttcgtgctttcgtggcattggtcctgatttttccactctcttcg

SEQ ID NO: 80429 - DNA, 870 bp, Heterodera glycines
atgaaacgccctaatcctttgaaccttccaatgagtgagaaaaagcccaaacttcgtcgacgcctgccggctgaattgaacagcgagctgatcagtttcgtgccattagtctgcctatttgccagtgtgaagcgagctccaattggtcctgtttgttaccaattcgagtgtttccgtagtcagcgccaaaagtgctttgaatatttggtattttcaccatttttattttattacataaattatttttagaagggtgttattgcattattcgatgtgatgtttgaggagaaaaggacaccgaagaagaagaaagtggggagactgcttctacaggaagaactgccgcaggacctcagccgaaatgagctcctgcactacctgtgctacggacgactgggaacgaatttgttcgagacttattttgtgatgacccatgcaacaaatgtaagcgaaaatttttaaatttttaatgacaacacaaaatttttagtcaattgccattgggaatttgtttgggcttctgctcgattttgcaatgagctcaccaactccttggctcatgaaacggcccatttgctgtggaattttctaccgtcaacatttgccgtggattctgcaacaaccgatgaacgtaatgctttctcatggcttttttccggaggtccgaagtgatggttttgaatttttttggctgttcaacccacacttgaaaaagtatgctgggtatgtcagaattctccctgagcttagtcaacctgacaatttgcattttttccttagcattttctaagcattttacttgaccaatttattcatcattatcattacatacagatcggaatttgtcgatttttccattttctcaataaa

SEQ ID NO: 80430 - DNA, 676 bp, Heterodera glycines
atgactaacaacactctcgacaccattctcaaccagttcaaaaaagtggcgcagtccaaacaacagaaaaatgtatcgttatggggtgagccgtttaccgtcaccataacgacattgaatcgcaatggactgccacccaaacgtcgagtcaaagggggagctcgtcgtccagtcaaaactgccgttcatcaccgaattaacgaccaatgtctgattaaaattcgcaatcccgatgaccactactgccttttctatgcgctgcaggcaacaatggtcgacaaaacgtgcaattggcctcgctggaagttttcccgttacttgaacaaccaatacggacagcagggacaacttcatcgtgatgcagttgagctcatgaagcaggtgaaagcaccaatggacttggatggctacgacgcagatactttcgtgcctctcattgttgatcactggaacaatatgcagcaacaacaccgctttgctgtgttcatctttggatcgttgggacagtataaaccgatctacaagtacattgacaacatttacgacactccgctgctgttgtacttcaatgaggaccattttgatggtgtgcagaagcagggcggtctttttgggcaaccatactgcttggagtgtgagcgcccgtaccgaagaatgtcgacacacagtaaatcat

SEQ ID NO: 80431 - DNA, 92 bp, Heterodera glycines
atcaatccggctgttcggtttttggagccctccgacattttgtctcaatgggtcgtcgcttttcctggtcatttggaagaatcgactgtcag

SEQ ID NO: 80432 - DNA, 1184 bp, Heterodera glycines
atggtggccatgttctctttgttctgcggtgccactgaacccatcttcagcagttgtttgcctcctcacaacggcggctacgactatttgttattcgatgccaaagggccggaagctgattcagcacaatcactatttgctgcaacatcggcagtcccttctgctgctgttgttggtccttacccaaaatttgcctctggcaaattgcctgccgaaaaaacggcgccagaggcattgtcggcacaaacgccgcgcagcaaagaaacggacaaaaattggcacagaaaatggtgtggtataaaaggaccttctttgtccaaatccccttacggtgcttttcattaggtcagccgcttctccgtcatgcaaacctttccatgccaaagcggcttccgaaccgccgcccgattgcttcaacataacggcaaattgcgttgccaaaaaacatttttcatcattccgtgttaataattccgtctcaaaacggcctaagtacaatttctcctccattgttgaggaggagaaaaaaccccgacgaaaattaacaacaaacgaaacaattggacgaattgggcgatttatggtcctcagaaatgaatcaaaaaaagggatttaattttttgtccttttcagcacttcctcgagtcgctgaatcctttgaacggctttaaggacaaagacgacctcgagaattacctgtacaaccaatcacataaagtcgaaccgaaaaatggagaaattccaaatgcggtaaaaaactaagtaaaaaaatgattttacaaaatttatttcagaaaccaaaacaccctcccgaagcgttgaaatcgcccggtgttaagcagcaaaagactccgatcagtggcagcagcggcggcactttccatcgtttccctacggccaaatcgagtgcaaaatcgtccgcctcctcgccccactcgccgtgcaatgcgcccagtggtggtggtggtggtggtgcattgctgtccccgtcacacattaatgtgccgactcggagtccggcttctgctggctccgcttccggctcgtccatgtcaatggcattggccgaggacccgaactttgccatcgttgacatcagtccgggtgagattgtcgagagtcaaaagagatgggaattaattgcctttcctcgattaaggccaattccctcgatggcttggtga

SEQ ID NO: 80433 - DNA, 544 bp, Heterodera glycines
atgagacattcatcttcaaagtgagttttaataaataaaaataaattaaataaataatttgctcaagttaagggcattttttgttaagaaatctcggcaattgccaaattagtatctcagatcaaaaacatttttaattaaaaaaaattttttgaaatttttgtcacttttcgttttcaattcatatatttattaatttttattaaattaatataaattattttatacaatctattataattgatgaaatatttcaaaaaaagagtcaaataaacattttacaaatttaaatttctattaaaattttagcttccgtattccgaattattgggcaaaacgttggaaattgttgcctatgattttgatcggcttagcaaagatgatcggtaatttatttttaaaaataaaataaaatttaaaaattatttttgaattttttttttaaagtttgggccaaatttcactgccattaaatggcatcgatttgggcacaacgacacaaaaatggacaaattttgaagcaccaaaggacgttgatgagctc

SEQ ID NO: 80434 - DNA, 456 bp, Heterodera glycines
atgaggcataaaaattataaaattaaaggacaaaaaggagctttttggtcttatcgtcattttattcagtcaaaaaaagactggctttttgtaagtccttgaatggtcctgaactgtacttgaaaatcagaaaatatgtaagtccttgcattgttttgaaccagttttatagtcagtccttgaatggtttttagtcagtccttgaattactttttgtatgtcattgaattttctttatctacatttgaaaatcagttagtccttgaatggccttttgtaagtccttgaatggtcttgaactatgcttaaaacaactctttgttctgtagattaaaaaataattgcttttttgaaatcaaattatagaaaatgccgttggaaaatcgtttttaaatttggtttgaatttgtcggcacagaaaaaagttatgacggattaaaaaaagataaatgtgaa

SEQ ID NO: 80435 - DNA, 949 bp, Heterodera glycines
atgcacttttatgtgaaccgtgccatcaacgacactggtcacaaaagcaagaactaccgtagtgatggtggtgccaaaacaaattacggtaaggaacgggggcgggcggtacagtaggacacagggacggtaccaaggtggtggggacagacgggagcaggacaaaatgtcgcagcgccgaagcgtcgccggacaaaatgtcgacgcaaaaattttttttattatttttttaaagtttgaaaaagaattcaaaaaaataccagcaattttaagttatctagccaaattagaaaaaaatcgactaataataaaagggaaaaaaatcaagttttctttttgttgaaatttattttcagtaacacctaagttttcaaaaaaaaaatcttcaaaaaaattttcttaaaatttttgaaaaaattttatttatttttttttgccgcgcgcggcgttttgtcccggcgacgtttcggcggcgagacccgggattttatttttaaaattattttatgaaaaattgaattattaattaactagaaatcttgtaaaatcccatctatttttttttattagattgaacaatcccaagatttttaatcattgctaaaaaaaatctgctacggattgtccattactgacgaattttccactgacggattgtctgggcgacgggatccggacaaatggactaaaaaaaattaatttttttttagaaattttaggaacactaaaaactagagctcggcctggacctggatccaggtccaggtccaggccatttttcgacaacctggttttttgtccaggaaatcaaggtccaggtcaaatgtgaaaaaaaaatccaggtccaggcaaaacaggaaaaaacctggatttacctggacaaaattttagaatttattttttcaagtgaccgatgttttttcaagttttcaaaaacagattaaataaa

SEQ ID NO: 80436 - DNA, 592 bp, Heterodera glycines
attttatgctaattctggctcttttctaagaacccgtgcggaaatataaaagcaaggaagtcttctgcacgcctttgcggcctctgtacggcactggggccaacacattatgtgtcgttaattttatgctaattctggctcttttctaagaacccgtgcggaaatataaaagcaaggaagtcttctgcacgcctttgcagcctctgtacggcactggggccaacacattatgtgtcgttaattttatgctaattctggctcttttctaagaacccgtgcggaaatataaaagcaaggaagtcttctgctcgcctttgcagcctctgtacggcactggggccaacactttgtgtcattaattttatgctaattctggctcttttctaagaacccgtgcggaaatataaaagcaaggaagtcttctgcacgcctttgcggcctctgtacggcactggggccaacacattatgtgtcgttaattttatgctaattctggctcttttctaagaacccgtgcggaaatataaaagcaaggaagtcttctgcacgcctttgcagcctctgtacggcactggggccaacacattatgtg

SEQ ID NO: 80437 - DNA, 563 bp, Heterodera glycines
atgcgctatgagattaagaaggactaccgggtgacgaacccacgcgagctgatccaccaatacgcgaccacaacgcccgtgacagtgatcgacccgagcctggagaccacgcggacaatcacccgccaacactacacacagaccgtagaggaatcgtaagccatcgatgggacggactcccctcttttggacaattgccaatcacagattcgggccctacccgccctacacatccccgccaaatgtgccaagtccattgaaatttgtgcaacagttgagggacgaaagtgagcggatcattctctgatctgtcattgtttggtattgacagcgtaacgaacaatcgcttttaagcaatgaccgaaagtcaacgccaagcgaatcgtcagcagcaatcgatgagtgcgagttcgagagattcgaacttcgaacaacgcatcgaagtaaaagcgaagccgacaattgcaatgatcaaaatgcaaatgctttcaatttgttttggcaggaaattcggcgctcgacaagccgtcaagcgagcagtgatccgatggtggaacagttga

SEQ ID NO: 80438 - DNA, 884 bp, Heterodera glycines
ttcacaggaacgggaaactccgttttccggatacggcgaccgcgtgggttcgggcgttgcttacacgccaacgctatggaagggaggagaggtgatttggcttgaacttactaagaaaatgaaccatcaaacattttgagattagcgagtgaccactacttaattagtcacccgaccaatccgaattccgtctctcatccctccctttctctgctcagcttgtgactgatccggcgcttgtcaacaaatcgataaagcctcgacgcttttactatgctccgatcggcgacggtgtggtggccgccgacggagtcgaattgaagcgattgccgcgcgatcttacgccaaaggtggaagtgatccaacaaagaattgttgagaaaagtgaccgaggaaggcccggggttcgcataacggagaagacatggagcacaggaggtcaattggaacgtaaaacttagaggatttagaattgaatttgaagctcccacggaggattcgttgaaaggctacgggcacagcgacaaccccaatgaatttcccgcttcggacgcagggcgcgggtcgcgcgcatcggagccggacgccttcgccagcctcgctgatcagctgggcccctccgttcgcccaacgtcggcacaatccgctcctcctccaaccaaaaacggatttggaggagacaccggaacggcaccgaaggactggaaaagaggacccgccgaagacggagcagcaggacatccgaaaaattgggagggagacggtgggccgcgaatggggggacggggagcgggaagaccgaacggtggaggcggaccatacgatggctcaagccgttcgactccgttggacttcggcaaggcccctgcgaccaacggattggg

SEQ ID NO: 80439 - DNA, 1111 bp, Heterodera glycines
atgtgggagagatgcaaattgaaggacgaagcaacggaattgggtgggcaaatgcaacaaatgacaaggaaatgagcgaataaaaggccaaaggttggcacagaataaaagcaaaaattggggggaaatgggaaaaagacggaatcagaacaaaattaattggcaggcagagaaaggcgggcaaagattggggggcaacccaaaaaagggacaaaagcattttcgtaattatcatttgccgggcttcccccccccccccccccaacagctagctgcatattcaaatgcccaaactaacaattagcatcgatcgatgacgggagaattcaaatttctatacttagcatttgcctcaattttttgaacttaaattaacaaaaaaagaatatgagtgcttttacaccaacttaaaattttttgcttccatacttttgcaccgccaaaaatttggtcaatttggttacggcaccttaactttttgatggcttgactaatcaggatagtttttctagattaatgttagtcttttgttttggcagagggaataatttcattcaaacacttaaatcttggaaaaccggtttttatttaaaaaattttttgcttccatacttttgcatttgactgtattaaattttgaaaaataaagccaaaaataacaactttttccaaatttttaatctattaaactcgatcattgcactttcacccgcgcaacgtccgcacgattcggcatatttctgctcgtgcattcgctgcccgtttcatcgtcacaggcagcactttgcccgaggcgaacaacgaacgcacggcaaggcgaatgatgttcagttgtgcccgtcaatggtcacagttaaataatcatattgaattggattttatctatgatgtagccacagttattgttgcatttgcaaaataatatttattcaaaaaggcaaatgtgaaaatattcattcatttgccaattcgttgactttttttacaaattctttttttacaaattgcggtaaattcccaccgccttttaacaaaaaaagtaattattattttcgactttgtttgccaaagcacaattgacagaatacttcgtggtcgagtctgaaacaga

SEQ ID NO: 80440 - DNA, 727 bp, Heterodera glycines
  unsure (1)..(727): unsure at all n locations
atgtggatcattgaaagatttggccaacgtttcaatttgaaatgccgcggaaaggcagaaattgtggacgatattatggacaatattaaggttggcaaataaaggggggggggtaattgactaattaattacctaataaaaaataatttaatttattagagagggatttatacatatattggaaatgttatacttacttttatggggccacacttcaaatgtttgactcgtaattattcatttggcgcctgaggactgcaggtcaaagaatttgaagtgtgccccataaaattaaaatataaatgtttttaaattgaaactaaatattcaattaattgcataaaaatgtttcaacaatcaatttgatagaaactccgttttaattttttaagtaatttagagtttattgggtcaaaagtcagaattccaaagtggcctgaagagaaagcagaaactggtgaatatggacatttacgttcggtatttgaacagaatcgacgaaaagtgccgaccattttatgccaatgcctttttggacggtttgccatcactgaaaaatctgttctgccaaattcgcttttttatccaatcgactgcaaatcaattcagcatattcaaacatgttgctgaaacccagggatttgaagtgatgaagcagcgaatttgtgaataatgtttatatgcctttttatctatgttttttttcattttcattttaccnaataaa

SEQ ID NO: 80441 - DNA, 752 bp, Heterodera glycines
atgactcacttgctatacattcgaatgaaagccaacgactgtccgggggtcgcttttatccgatccggtgggtgctttttaattgctgtgctgaagaagtgcctggggtaaaaattggcacactgtaaaatggcggtttagtatacaatcggactgaaaaattactgtatgtccgctatttttattttccacgctatttcacaggatgtgacatctcattcatttcggagtcgttcgcacggaaggccaaccttttgggaaacattgaccgttccgattgcgagacaatattcgtgccggcttttcgaggtggcaaattgcttggctggtgagtgggtttttttaattttgaaaaaaatcaaaaaaaaataaaattttaaaatgtttttctttatcacctaggtcttccaatatttatacttagttttcgtttcacgttttgcagggtcaacgatgttcaagttcgtattgatgagctcaatttgcaatttgtgtaccgtttgggagtgatggcggacaaacatttgggaatgtaagtttggcgtattgtcttttacatatttaaacatttatttatttaaaaattaattttaaggtattgcccgaagaagttcgacatgctgtatgttttaaaagaagaatatttttccctacaattataagaaattgaaaaattattgggtctgcgccgaaatggcagcgccgaaacggcacttatgacccagttttaagccaaattttccttaaaaata

SEQ ID NO: 80442 - DNA, 659 bp, Heterodera glycines
atgattgccgtaattgatatggtaggggcccataccataccccacgacgatgtcaatgactttgtttgtgaaaaagcattcaaattacaatttatgtttgaatccatcccgaactatagggagagaaaagtcagggaacatggaggaaatcccacccgcccccctcccccaaaaaaaaatgtcaatgttggtgggagaaatttaaaaaatgtcagggagtaacacatttattgttttttttaaacattatcaatctttttttcattttgcaaggaaataaaaaaccttaagggctatcgaatgataccaagaatgtttaggtacctaattgggccaaccttgacaaaagtaatgacaatttttttgtcgaagaacggggcattttgttagtacgagttggcctaatagtatgtacgacgtttggtgtcgtcgtccacaaatatgcacaaatgtcgaagaaaagttaaaatcgtttcttccatccaaatgaaaaaaggcgaggacaaatcaatacatgaggcagataaacttcagcagtagcagactgcataaactaacacaattatgtaaggtaatcctaaacaccaaatgacaagcaaacaaaaaaattaatgacacaaaattaaacaacaacaaaacgccaattttttgagaataaa

SEQ ID NO: 80443 - DNA, 105 bp, Heterodera glycines; identical to SEQ ID NO: 63572

SEQ ID NO: 80444 - DNA, 330 bp, Heterodera glycines
atgctgtcaaatttatctctacggtaaatattgatcataggccccaaactcaaaaatgcttaaaaacggtcagaatcgatgtaaaaaagtttgaaatggatagaaaaaatagaattaggggcgcgcttgcccattttcaggatgaaaagtgccgaaaatggagtgccaaactcagctggggctcaagtgaccgcactataaaaagcattcaaaagacattttaaataatttttctagggtaatttgtggcgctgatcacgaatatgacctttattttgcaaaattccgaaccccgaaccctaattcgaacaaaaatttgaaattcataaa

SEQ ID NO: 80445 - DNA, 1504 bp, Heterodera glycines
atggcaattaattctaaaatatctgaaaaagaatgcaactttttgggtagcgataaacgttttttaagtaagtaactaattattacagccgcaaggattttagaaatgtataaaaacaaggaaaataataaaagatgaattttcggtagccaatactcggctctccggtagtcagtacctaattaagctcggccctccggtcaccaatacctcacaaggctcggctctccggtagccaatacctaattaagcttggcccgccagtaaccaatacctcacaaggctcggctctccggtagccaatacctaattaagcttggtccgccagtaaccaatacctcgcaaggctcggctctccggtagccaatacctaattaagcttggcccgccagtaaccaatacctcacaaggctcggctctccggtagccaatacctaattaagcttggcccgccagtaaccaatacctcgcaaggctctgatctccggaacactgaaaacttcattcttttgactatgaatttttatttttatgcaaattgttatcctcgtggtctaaaatttatatgagaataaaatatacctttcctattgatttggcaaaacgcataggatggaaaagggagtgtgtaaactgagtttgcgatggtaaggagcaataatgaccgaatatgtgttggagaggaagggcagagctgaggaaaccaaataagtgaaggagaggggggtgaggtcacggcgtcatcttatcctgtaaatcgattcctctaaaaggaacaaatggaaagaggctaacgccaactgcttgcttaacaaaatccaatatttaagatatttttggtattggggttatttgaattattttccttttctccgtaatacactttctctactcttatatctgcttactttcactgttatttcagacctacatattgtctaaataatcgtttccgttagctatttttcaatatcttttcttccaacactatgttttattctcgaaccgttatcttccaagtgttcgtattcttgttctttatcaaactattctcttccctatacattacctaatgtttgccttactaactcacattaaattctcactatttaatattgactctcttcaaccacatttctgagttctctatctctatctcttacacccattattaattgtccttgattctatggtgcactacaatatcctcatatgatttcttcatttattcctattacaagacctgcttcacgcatacatttagcccttatctaccctttctcgtcacatacagtcagtcagctgtttgtcaaaactactttctattctcggttcaatcttagattcaaaattgtctatttctcttgtttcctttgaatattacttattcaatggaattgtaaatgttccttattataattagaatttattttacgttgaattaggcaaggagcattgtttgtgtttatgattaaaattaacaagttttatataagttaataaa

SEQ ID NO: 80446 - DNA, 694 bp, Heterodera glycines
atgctaaacatatccgcttacttctattgcagttctctctgtttccaactattcatccacagaataatgatcaatttgccaagtgttcagttgaaaagttattgatctagaaatatcgcatacaggccgtatactagtcatacattcctttagtacatcaatggatactaaaagacgctgcctttccttaataatgccttagttcctttgagacatcaaataattccctcctaaacgataccagcgctgtcattaaaattttgaatgtcattacattttttctcattaattgcctctgtaaatacaaattttccagttgagaagatagttgtggtagaatttgtacctagacccttcattatatttgaaagatttatgtggttgtttttagtggatggggatattaaataaattgaggagaaaagttttactatttattgtcagtaacaccataaattgaatttaattttagatataatttacttaattttaatcaatactattgtatttattatttttattatattttaatacaactttaatttaatttttttattttatttttatttaacttttatttttaattttaatcttttttatttttattttactttttatttgaattaatttgaattttattttactttatttattattcagttaatttaaaggagttgttcagaacctctatcca

SEQ ID NO: 80447 - DNA, 589 bp, Heterodera glycines
atggaagttcccgccgactattctcttcataaacacacttttccaaacgggacgaatggtttgttgggccatgggaaatgattgcaaaaagtacttttattcattttctcttgacattttgactcatgcttttggatacgattgatgctcttttaagagatgtcccagcagcggaggcagcaaatgtctcactcgagcgatgaacggagttgccaagaggaggagacggaggaggagcaggacgaagaggcgatgctttacacggccaaataccgtcatttgctcgagtattacaagcacatctccgaagttgtcattattagtggtacttattaaatttacggtatcaaaaagccaagaatttgaaaaaagtcttagataaagttgaaatggaagccggttttgtgctcgcaatcagcagtagtgaacttagcataagaaaaatattgtcagcttttttttttgcttttgattctgtaaacttaataagtaatttatttgctttgtttttgaaaagcattaatttttttgaattctaattaagatgaataatcgtctcagacatcgcatttaccatgtgaagaaggaa

SEQ ID NO: 80448 - DNA, 1024 bp, Heterodera glycines
atgccaacatcgtcgacatcttccgccgcctcttcccccacccgctgccttggtcccctcttcgtcctcatcggtttgccatcaccacccacaacaaccaaatgtaagtaacgggtgtagttttttgtaaatttccatttttccgccgctaaccattcttattctcattgtcagcagtgtagttgttgctgtgtcagttcctccaacaacagcaattacgaaccgttgtccgaatctgatttatccgctgaggaattggccgagcggctcatccaccggcgctcatccatcgaccatttactgcccgaggcgcccgagccggacgacgacgccgacgctggtgaacaggaaaaggggaaggatcgcaaggaggaaaagagcaagacggagagaagagacgccgtttttggaaacagtaaacacgaaaaggaggaaggaaaggacaaaggaaacggaggagaaacccaacaacaacaacaaaggcagacaataacgcaagaagaaaaaacaccttccagtgaagacgaacagcataaacaacagatgatgacaaatacaactggtaagaatatctgcactcctggcccctaaattcctctaagatttcaaaatttaacaaaataggcaatttcagtaagatctgttgaattcttttcctgttgactccaaaactccttacttttaatgatggactcataattctttttagttgtaccaaatttcatgaaacagtcctctgacgacctgaccgaagaaaaaagtccgctggcaagtcaatcgcacaaccaacaacagccaccatcaacaacaacggcgtcgtcattttcgccgtcctcggcagtgacgccctttgtgcctgctgctattgcttcagtgtcaatttatgcagcgaatgatggtgaaaagagacgagaaaccgaagaaaaaaatgttgaccaaaataccactgttgccgaagatgagaatgaagatgacgatgaaatggaacaggaactgtagcacataccatttgatattagtttaa

SEQ ID NO: 80449 - DNA, 2461 bp, Heterodera glycines
accgcaggacaatggcacaatttgtggacgaggaacgaccactagaaagtcaaaaagaggaaaaagagaaaagaaattaaaaataggcaaaatttaagggggaaaagcgaagaacgaaaaagaaaaaagcgacgaaaatcaaattgaaatggaacaaatgggagaacaattggaagcattgagaagagaaaatgaaagactgaaagaagaggtgaaaaagggaaaaggaattaaaacaattaaaaaataattaaaataaatttagaattcgaatttaatcaatccgacaaaagacgccgaccaatcggagaatgggcaggcagcagaactttactcgaaggagcacgaattggcacggagagagttgaacagactgatcatggagctactgtacacgaggtgtacggtaatttagcaaaataaaataaaagtgaaatttgagagtgggcagcagcagcagaaaagagcaattggaaggtcaaagagacggacagcaacttttgaatgacgaacaggtgattgattctgacacggtcgaagaatcggacggactgatcagacaatcgaagaattgatcaatttccatctctcttttgctgatcagatactccatttgttggcccactcgcgtcaatttgcgcacgtcgacggcgccgaacaatggcaccgccgggcgttggcacgcgtcgcttcgaacattcaaaacgcactgcacgcgctgcaacacccaaaagagtgcggaaaggcgcgacttctgttgtgcgaggcaaaagcaaaaataaaaaaggggaaggaggggtgatgatcgtcgaccaattcaaacgaccgatcgatcgattgatcaatcgataagcttgcctgatcaatcgatcgattgcttttgtttgatggatcgatggcactgaaaacggacgaatttcagctgaacaaagggtgcggcttcggctgtcagtttcaccacgtcgtttactgtctgttaatggcggcggccacaaaccgaacgatgcttttggagagggacggcgccgagtggcgctattcgcgcgacggatgggccgccgttttccgatcggtcggctcgtgcactttcgcagaacatgtaaaataacacagcattggacaaactttggacagtttcccttttatatcctcaattccgatttttctaagttttttatcccttcgaattttcaattttcgttttttttctacgctttttcccctcatttgtcaggtgcctttgtccgtcgtcgtcgatcagttcactggcattaatcagcccaactccccccgaatcgttcgtcttcccgtggtcgatgggctctcctcccgtccccatcaccttccactcgcattccccgcacaatttgccgatgttttgctcactcaccactcaaacccaccggtcattaattaattgattgattaattagtagtaattaattattatttaatattcatttaattcattctttaggtgtttttccttggacaatttgtcgcttttttaatgcgtaaaaatgaaaggacaaataaattcgttgaagaagcaatgcgcagaattcccttcgaattgggcaagtcaattctcacatttgctgtgctgaagaataataatttaaatgccttaaatattttcccttaatttaaatatttttattattaattattttccattttccctttttaggccccgtcgtcgggttgcaaattcgccgtactgacaaagtcggcactgaggcggcctttcatcatgtcaatgagtacatgcgatgggccgagctttggtttcgcacggagcaaaagaaattgggtaaaaagggaaaattataaaataaatacgaaaaataaaattaatttaaattgtttttacgtgcctttttaattctcttccctttattattaattttgttttttcattaatttaattacctttaataattaattttcttttcttggccttcccctgaaaaagcgcattttcatcgccactgacgacaaaacggtgatcgaagaagcgcggacggagtgggcaaagaagggattcgaaatttgggcaaacgacgaaagtgccgaaggtgggcaaaagggcaaaaaagggggaattggggacaaacgcatcaccgatcgtaatcattaaaattgaatttgtctgtccgtccgtccgatcactctctttctcccccactccttctctctttagccgctcttccctccaatcgatactccgatcggtctttgctcggtgtcattgccgacgtgcacattttggcgcattgctcgtaaattctaacatttttgcttattttaaaatgatttgctcctctaattgagcagatacattgtgtgcaccttcagtagtcaggtgagcctggggggggggggggggaaatgagacctaaagttaaaatagggacaaataaaataataccatttacatgctaaaaaactattcccgaag

SEQ ID NO: 80450 - DNA, 414 bp, Heterodera glycines
atggtcaaatatttccatgacagagacaaaagcttggaggaacaaagggaattgtggctgcagaaaattaggcatttgtctgatgaggaaacggtggatttattggcgggaacggacggaaagatgatgagtaatcggatattcgcgcaggtataatgaaaaccttattttttacaaaatagaggagttctggttttttagcgcaatgccgtgacccgacttgaggcctccggtgttcgtgtgggctatgtgttggcagagcattttgccaaggatttaccgcgcttctcgaacgaattggacaaaatgaagttcatctgcaaagagttctgggccagcactttcggaaagggagtggacaaactgagcacaaatcatcaggcaatttttattgttaactaccaatatttcaag

SEQ ID NO: 80451 - DNA, 370 bp, Heterodera glycines
atgcccatacaaaggccacgattgaccgtcggaaacacttcggaagtgtacacgaaaagacccgtgaaagaagacgaaatggcgaactttccgatgagccaaaggacgaggaaaagttttgggctgtcgttgagaaggacagccaaaaatgcagaagcggccaaaaagtgagtgaaagaggtgaaaagacgacgacccaacctgcaaatgcattaagacaggaggacagattggcatttagcaatgaatgcacttttccaggaggaaaggcgcgaataaatacgccggcacttcggccaatgccaccaaagtgaaattgacgaagcgattgccggccaattgggcgctgaacaagctgaggccgtagtaa

SEQ ID NO: 80452 - DNA, 1486 bp, Heterodera glycines
ccctcagggctgtgccatgctcaattgggtgctcgcacattaaagcattccgctccatctgcgctcccaaagtgcgttactgttcgggctgatgtgggtgctcggctactgtttggtggccccggtggcttatttcaccactaattggcaacaattaatcgccgctgcgtcggggccgtccattttatttggcattttctattttttgtaattcttccaataattttttatgtcaacaaaagcagcattttcagcacaattcctgaaagttttcactttttggtggccggaaagaaattgaatgacgtgaaaaaatgggtggaaaaggcgaataaatgcgcagcgaaggcggggacacgcgcaattggaagcacggaattggaccaattcattgggcaaattgccaaagagaaagaagagcaaagggacgaggaaaacgaacggcggaggtgggaacgaattgggaaaacgatttgactgatcagtgagggctaccgtaaccaacagaaagtgcagagatactgtatttcggaaatagacaattagcaaaagaaaaactaaagaaggaatctgatcgatgccacatttcgatcagccactcatttcccgccatcattgccccccccctcccctcccaaaatgccaacggtgatttaagcaatgcttcccaagtgcgccacttttggaccgatcgtactctgatcctctacctgaccgtgttctgctttctttggtcaacaaaataatttggtgcaattcaaagtgaaggtgaatctttccatgctcaggacttgcgacacttttatttactacggcctcagcttgttcagcgcccaattggccggcaatcgcttcgtcaatttcactttggtggcattggccgaagtgccggcgtatttattcgcgcctttcctcctggaaaagtgcattcattgctaaatgccaatctgtcctcctgtcttaatgcatttgcaggttgggtcgtcgtcttttcacctctttcactcactttttggccgcttctgcatttttggctgtccttctcaacgacagcccaaaacttttcctcgtcctttggctcatcggaaagttcgccatttcgtcttctttcacgggtcttttcgtgtacacttccgaagtgtttccgacggtcaatcgtggcctttgtatgggcatttgtacggccgtttcacaagtgaattcgtccaacaaacaaattctaatttattttacaattatttaggggagcagcatttttgcgccgagtgtccgagtgatggtaaaaaagtgaaaattcatctgaaaatcattttcgaaattaggcaaagttttcttccattgcgccaatgctttttttcggcgccttttcattcttcgcagggcttttcactcttttgcttcccgaaacgaaaggaaaggaattgccggagaattccattcgttcgtccgaataattttacgtattcgcaccgaaaaattatctacg

SEQ ID NO: 80453 - DNA, 1264 bp, Heterodera glycines
atgaaattaccgttaccggtttgtctagtaccggtaccgccggtaaaaatttgcactggtaagaatgggggtctggtcgagaaaagagtaggaatttgtgaagaaggagaaatttttgagaaaaaattaaattttatttcatttagtcatgggagtacacacatgcacatgtggtgtagtggttaaactttctacctttcataattttttgcctgggttcaattccccacttggatagaatattcctcacattttctttaccatcattttaattaaaattttaattttaaaaaatatttcaacttttttctttcatgttaagcatcctaaaaacccaaaacttaatcaattggtcatttttttacaaattctgttaacaaatcgcattaaaaaatacaaaatttttcccggcggcgcctatcggcaccgccggccctccttgtcccccaaaagtcttggaaaaaacgtgccgcgtaaaaagcggtgttgaaagcaaaaaaaggtcattgatttacattaatttacatggccggagaccccttcgcaaaattggaaaattggccgctgatcccttgttttgcaataatctgaattttgaggtctacatctgaattttagtgttctttatcctaaatttgaaaaaaaaacttggtcaccctcaatatacatatacttctgaacaattctaatgctaaaaaacaggcactcgcgcgaaaactgaataaaaattttgtatttggaaaattttgtccaaaaatttttatgttctaaaattaccggtttttaccggtaccggtaccggtaccggttgaaaaagttggtaccggtaccggtaccggtttttgcagtaccggtcagtaccggtaccggtttttttgcaattaccgattaccgctcaactctagttttgatttcttaaacatattgataattttgaaatttttggcacaatgtcattatttaatatagaattttttaagtttgacgcaaatttggaatggactaattatttaatttgctatatttagtcggcatccaattctacgaaaaaatgtcgttcagctgtttcgaacagtgcggtggaaagtaaaaggttttatctgtaagaatcgaattggcaatgtcgaaaacgaaatttgcgaaaagcggcgacagagggaaaacgaattggtggcgcaatttgaaatgaaacggcactttgaaatattgacaaaggcatgggcataatgcagcaaaagcgaagcccattttggaaaaatgataa

SEQ ID NO: 80454 - DNA, 75 bp, Heterodera glycines
tccaagtggggaattgaacccaggcaaaaaattatgaaaggtagaaagtttaaccactacaccacatgtgcatgt

SEQ ID NO: 80455 - DNA, 1170 bp, Heterodera glycines
atgccagcacaaggcactcaccaaataagtaaaaaattggaaccagcttatgctcttagtgctgttccaagcagtgctttgctccgccctgatcagcagattggcaaccattccgcagttagtttttatccgggtcaaatcgacccgaatgcgcagtcaactctgggtcttggccctgatcagtttcaccagtatctggcacaacaaagttatggcattggccccagtcaaataaaccaaaatttgatagaagcaaatcacctcattaactcagagcaattatttgggagtaatttgagagcacctcctgaagatgtgcagtattttaccaataaagagctcaaatcggacaaaacaatcattgattatttaaacagtcactgtgtgactgatcaaagccttttccttagccaaaatttggttgagcctttaaccgattcaaatgtttaccaagaccaaataaatatgctaattgcagaaaaccagttctttaatcccagtgatcaaacagagtcatatttgaaacatgatgaaaatttaaatcaaatgctaattaattttgtggcttcttcatcaccaaataatgatgaaggggattatcggcctcacctgctcaattcatttaatcaccagcagggattgttgcagcactcacctttggacagtgattatcatctgaatgatccctttggggcttcttcatcgtcgcaaatgcaaataaatccgtccaattatttccattatcaaaatgtgccgcaagattcagctaatattgatcaaagtgaagtcgaaacaaaaaacacggagcaaatggcaaatgaaaatgagaagcgaaagatgaaacgactaattgttgaggacgaagcaggcaaaagtgaggccaaagcgaaaatggaaaagcggacaaaaaatcagccaccagaagcagtgggacgacagtccgcttctgctggcgaattgccgggacggagttcaatcagtcaaagtgaaaagcaaattggtaattagaattcaattacctcttttataaagcattttgcaaattaagtccaacaagtgcttcacattgttggcctgactttagctgctcttggcaaagattcgccctccattgatcgcgttttgaatggctcaccaaatcatgatcaattttttgccattatgagagaa

SEQ ID NO: 80456 - DNA, 782 bp, Heterodera glycines
aaagtggaagagaaagtggaagagaaagtggaagagaaagtggaagagaaagagaaagagcaaccgaaagtggaagagaaagtggaagagaaagaggaagagaacagaaagtggaactgaaagtggaagaggaacagaaagtggaagaagaacagaaagtggaagagaaagtggaagaggaacagaaagtggaagaagaacagaaagtggaactgaaagtggaagaggaaccgaaagtggaaaagaaagagcaagaggaaccgaaagtggaaccgaaagtggaagagaaagtggaaaagaaagagcaagaggaacagaaagtggaaccgaaagtggaagagaaacagaaagtggaagagaacagaaagtggaagagaaagtggaagagaacagaaagtggaagagaaagtggaagagaaagaggaagagaacagaaagtggaagagaaagtggaagaaaaagtggaaaagaaagaggaagagaacagaaagtggaagagaaagagaaagaggaaccgaaagtggaagagaaagtggaagagaaagaggaagagaacagaaagtggaactgaaagtggaagaggaacagaaagtggaagaagaacagaaagtggaagagaaagtggaagaggaaccgaaagtggaagaggaacagaaagtggaagaagaacagaaagtggaagagaaagagaaagtggaaaagaaagagcaagaggaaccgaaagtggaaccgaaattggaaaaaaaagtggaaaagaaagaggaagagaacagaaagtgtaa

SEQ ID NO: 80457 - DNA, 2874 bp, Heterodera glycines; identical to SEQ ID NO: 16104

SEQ ID NO: 80458 - DNA, 1380 bp, Heterodera glycines
gaaaggcaaacataattgcggatgtgctttcacgttctggcgcactgaagccacgtgaatgggcggagaaaatttttagagttgagcaagtcgatggaaatataagtgcttctgtgccaaaaatggaaatgattgagtgggtcaacgcaattaaggaaagtgagctcggaaacctttaccaattcctggaaaaaaggaaattgcctgaagataagcgggaatgtcagcgactttttgacaccattcataaattcacactgataaatgcgccagaattaagaccagtgattacggcggaaccttttgagctaatatgcatggacattttatcaattggaatgtcagacggggaaatcgatatgttttagtaatggtggaccattttacaaaatatttgatcactgcagcaattcccgataagagcgttgaatcagtcgcaaaggcttttgtcgaacaattggtgcttgtatttggcaagccaaaacgtattcattccgacaagggcgctgaatttgtgaataaaacaatggaagaaatcagccaaattcttggagttgaaaagagtacaacggcagggtacgacccaaatgccaacggacaagcagaacgggccaatcaaactattttaaatatgcttaaaagttcaactgattcaaattggtcctgggatgaccggctgccttttgtcacatttgcttttaacattactccctctgaaaccaccggattttcgccttacaatttactttttggccggccagtaaattttccgtcgtctgataatgttaattttactgtaaatccttcatacacaatcgatgaagaaagttatctgcagctctttcgtgaaaatttgttaaaaattttggaaaatgcaaaaaataattcggacaaatcaagagaacgaatggagaaatggtttaattcgcagccaaaagtgattttgcataagtaccaaaaaggcgaacgcgttatggttatttttccgggagctaacaaacgcttaacacataagaaattaaagtggaatatcttcggccctaccaaatcctcgaaatttccaaatcctcggcaaaagtaacgcctgctgataagaaaaatgctgatccgatttgcgtcccattagaacgtctgatcagagcaccagatggacttcctaatatttcaacaactccgcgcggcaaaaatgcttataaaaatgtgttaaatgtgatgacttttttgatttttgaagaaaaaagcatggaatttgaacaggaaaattttttgggaaaaacaaaaacttcatcagggacgatgaatttttcagaggaggaggaaaaaatggacattgccgaagcggagattaagtggacgatgacatgtgaaggcggcggacat

SEQ ID NO: 80459 - DNA, 399 bp, Heterodera glycines
atgtttccgaagccatcaaatccaatgttaccaaacccgatgatcccgaatctatcaaatgcaatggagccgaatccaatgattccaaatccgtcaaatccaatgttaccaaacccgatgatcccgaatctatcaaatgcaatggagccgaatccaatgattccaaatccgtcaaatccaatggtgccgaatccgatgttcccaaatccaattgtgcctaacccgatgagccctaatccatcaaatccaatggtgccgaacccgatgtttccaaatccatcaaatccaatggtgccgaatccgatgttcccaaattcatcaaatccaatgatgccgaatccgatgttcccaaatccatcaaatccaataatgccgaatccgatgttcccaaatccaatg

SEQ ID NO: 80460 - DNA, 56 bp, Heterodera glycines; identical to SEQ ID NO: 52733

SEQ ID NO: 80461 - DNA, 660 bp, Heterodera glycines
gttttcggggcagtccccccgaaccgatgcgcccagatttatggggagaccgaatccttcgggaatagcttccctatagcctgtactttaattctgcgttggatttttgctccccataattgtttgagtaccccaaacggacacttgaaaaaatcgatttttttgttttcggggcagtccccccgaaccgatgcgcccagatttatggggagaccgaatccttcgggaatagcttccctatagcctgtactttaattctgcgttggatttttgctccccataattgtttgagtaccccaaacggacacttgaaaaaatcgatttttttgttttcggggcagtccccccgaaccgatgcgcccagatttatggggagaccgaatccttcgggaatagcttccctatagcctgtactttaattctgcgttggatttttgctccccataattgtttgagtaccccaaacggacacttgaaaaaatcgatttttttgttttcggggcagtccccccgaaccgatgcgcccagatttatggggagaccgaatccttcgggaatagcttccctatagtctgtactttaattctgcgttggatttttgctccccataattgtttgagtaccccaaacggacacttgaaaaaatcgatttttttgttt

SEQ ID NO: 80462 - DNA, 306 bp, Heterodera glycines
atgaatttactaatcactgttgtacctctttttatcacagttgtacctcttctgatcacagttgtacctcttttaatcacttttgtacctcttttaatcacttttgtacctcttttaatcaccgctgtacctcttctgatcacttttgtacctctttttatcaccgttgtacctcttttaatcactgttgtacctcttctaatcactgttgtacctcttctaattaccgttgtacctcttttagtcactgttgtatctcttctaatcactgttttacctcttctaatcactgtgcacctcttctaa

SEQ ID NO: 80463 - DNA, 808 bp, Heterodera glycines
atgccaaacattttcaaaatccttctgattgtgcttttggccgtcgtctcattccgtctctcggcttctactggtgacaaaagtaaaatattgaaataacttttgaatattccttccaattgtgtcaaagttcaccattttggtggccatggaaatccttattctgtgatgaaccctaaaaataattgacataaaattggtatttgctttaagaaactgctaatgatgggagtggaaacaactcatcagctgggattggtacgaagatcaaaagaattgtcaccgctggactgctcttcacttccctggcgacgggtggggcggaagcgattgggcgaagcaatgctcagggaggaaatgccgccggattggtgccatcgcatgtgaccaatcgctcaatggtagctaattgtgccaagttaacatgatactactgtaattcacttttccatgctccaccacctcctcctgtgcaatttgaaatgggggcaaatcgattagaaaaaatgagggcacacctacgcgaacttgctgagaaaatgccggtcaatgaatcgaaggtaggaattcggcttcagtaattgtctttttattatgccatttagcgtctgtcaccgagtggacccgacccacatcatcattagggccatggatggatctaacggaggaagaaagaatggatgcttagttttcagattttattctatcctcttttatttattagtttttcaaaacaaatttcttccacaactttttaaactatttgttgtattgaatctttttagataaatctaaacccctaaataaa

SEQ ID NO: 80464 - DNA, 1002 bp, Heterodera glycines
atgtcgaatagtcaagaaattcgtagtaagattttggacaacaaactaacagcaatctcactcaaccgtcaaaggcaaagcgacttgccaagaatttaatcatttatacgataagccacaaaagaaggagaaaaaaaaatggtacttttatttcgggccaggacgttttcgcgtggccattttcgcgtggccgttttcgcgtggccgttttcgcgtggcagttttcgtgtggccgttttcgcgtggcagttttcgcgtggccgttttcgcgtggcagttttcgcgtggccgttttcgcgttggcatataaaagagaattcataactcgcgttttatttaacgcgtggccattttcgcgtggccgttttcgcgtggccgttttcgcgtggccattttcgcgttgccattttcgcgtggccattttcgcgtggccgttttcgcatggccgttttcgcgtggctattttcgcgttgccattttcgcgtggccattttcgcgttgccattttcgcgtggccgttttcgcgtggccgttttcgcgtggccattttcgcgtggccgttttcgcgtggcagttttcgcgtggccgttttcgcgtggttgcatataaaagagaattcataactcacatttatttaacgaaaatttgtttcactcttttttctaacgaatatttattttataattaagtgagtttataaactaaattaaggttctttcaattatataatatggaccagcagcaaaaaattaaaacaaaaagaaacaaagttaagttagaacatgacggcgcactctatgttttcgaccaattgagcgcagattgacttaagaaattttggcgatgtgagtttcatggcccgtcagacaagtgcaagggtatgttaatatattattttgaattttgaaaatcttttaaaattcaggacgtttgcacacggatttaaataacgttgtgcagaagttggtcgtgagttcaagattagaagaggtacaacagtga

SEQ ID NO: 80465 - DNA, 768 bp, Heterodera glycines
atggtcaacaacgatgaatcgccacaaaggagtaaagcggctcagaggcagaaaaacattcaacaaaaagaaaaggacgaactgagacggcatcaacgcaacaaactcttgtctagcattgcaacattgcgatcaagacggaagagagaatcggctcccatcagctcaaaatcaatcgtgattgatctttcatcagacagcgacgcatccggcattgagatcatacaaaatccagtcagggatagacaagccaaatcaccaaatgagcattcaacggcaccaattcctatggcagtgcaacggctaacaccaacaaggaagagttcatcagttgccaagcgaccagcattttcttccagcaaacaaccaaaaggaaaagcagcgaatcccgcacaaacaagccaaacaaatgaactcaacagaaaaatgaaagccttgtcgccaaccgcaagtggatcaggcgccaaccatcattgcgtcgctacattggccagaagctcggactcaacaacagtaattgataagggcagtcaacagaattgcccaaacatgagctcggcaacaatcagtaagacaccatgccaacagcactcgtccgagaagacgttaaactaagctacccacacaacaatcgtccgcaatgacgttaaactagcctaagccatcaacaactgtccgaaacgctaatcacccggctgccacgagtccggaatgacgttaaactagcaaagcatcggccaacccacacaacaatcgtccgcaatgaca

SEQ ID NO: 80466 - DNA, 1600 bp, Heterodera glycines
  unsure (1)..(1600): unsure at all n locations
atggccattcaccaggaatgcccattcgccaagtctgaaatgacgaatcacgaagcacaattgtggtcaacgaatgacgaattggaagtcaacttccctggaccaatcgccggacttttcaactgctttgctcaaccagcaacacttttcgtaaaacggcacaatctgcagatgttttcgccagtccaccaagttcagaactgtcaatacgcaaccgaattctgccaactgcccgacaactcaaccctgatttggaaatcaacctgcaatggcaacgaatgtcaaacatgcgactacgagaaggcggaagtcatcaacggaaaattcactgcggcctacggagaatcaatggccacttggatctccgaagatcaccaaaaggcattaactttcgccaaaaatgcgccagaactcatcacctgcgatggcacacgcatcgtcatgtccgaacagaacttcggaattgccaaggagcaatacgacgacattgtcagcaccacgacaagatggaagaggcatccgaccagaacagctcgcatcacagctctcggcatcccaagtggcaacaagcgttgcgttaaatcagctctacacgagggaatgtcagcgaaacacgagggcagccaacccgactcttcaggccagacgcttactacggcaaccaaacatccaagctcgttggatcggcgaaacgacaatggaagtgtttccatgtgtcaacatttcgctacaggacatctcatacaggccaatgaatgactgtcgcctctacattcccgtgactgcgcactttcccgaccgagctatcgcagctttcttggatccggaacttcgcatcatctcgctgacagcacaacaggcaagctgtaatagctaccggttccatcatcttcaactgcgaagcaatcccaacatctggttatggattgactctcgaaccggcacagcacgacgaatgccgaaagactacgtccacgaattgtacgaaacaacgatcaaccaaacgaacagcaatttggaacttcatccattgatcttccacgcatggcaactcgacaatgagtctgacgcgacacgcttcccgcacatcaacgaattcaacaactcggagcagttcaaggacaagctggaacagcacattacagcaaggactgaagctttgggcgcgttgaagggcggaatagaaggattcactatgcgctggctaaaaagcctgatcgacgaagcaatcacgtggtggattcgagtcgcctgcgtttattcaaccttcctcatgctgcgcgacattgttctcccatgcactttggcgtatttgctcaatcccatccgagtgactcttctcagcctcgttggagtacgtccgcacccgacattccgacccaccgtttctaaaccactcgggatcgaagagggaatgccgctgcgtgaagtgccacgaacccccaaaccaccagcgcgcagggcagagcaccgatccatgtcaccaatcaaattggacatgattgccagaacggctcggtaccaacaaccacgaacacagagccatctcgacctcacagaagactcgccctttgngaggccgagacgaanagaattctga

SEQ ID NO: 80467 - DNA, 1045 bp, Heterodera glycines; identical to SEQ ID NO: 16110

SEQ ID NO: 80468 - DNA, 258 bp, Heterodera glycines
atgggaaagaaaacgcaaagcaaacgatcaaagccaatggcaaacatcaaagtgaagatgtttacgagaaaggcaaacagaacggattggaagcaaaaacatgtggaattggagaagaagcttcgctggtcggaggagggccacaaaagcacagagagagggaggaaaagctcaaaaaagccgaaaatgctggacaagcgttgcaaagcgatcagaatgtgacaagcgttgtgcaatgagctaaaaatggaaaataaa

SEQ ID NO: 80469 - DNA, 1063 bp, Heterodera glycines
atgtgtacgatgggttcttcgttgggccatgacggtgttataattgcaacatttgctaatatttgtattatttactcttccgtcatttgctatttgattctttacgccaaattaaaatgggacgaacgaaaagcgaatggaataagtgaaatttaaaacaaattaaattaaattaaattaaaagcattcattttaatttatatttttaaatacatttgaatgttcaacccttctccatttttagctgttgtcgcctcacaacccttcattttcaagtcaatttcgctcattcttttgctccaagtcgtcggttggtccggcggaattatcgcattttttgtcgtttcaattcattttggggatgacgacttaaacctccaaaaatttctggccaacagtgtgattaattgcttcgtttgtgtgtgtgggacttttgaaacgcctgtcctattttttcacaggtaaaaacaagcaaaacattaaatcatcgtcacaaatgccatctctagcttaaaatggtggcaagattttcaaaaatggtggcaaaacagtggtcaaatggggtttttgttggatggttctgtctgtgacaaaaagacatccgttcgttaattaacccaacaaaataataaatataaatattaaatacataaatatttcagcagcgaacaccaaaaagcgatgcgaaaagaatggagaaacattgtacaattggtgaagaagtgttctccgacgacatttgggcgtaataacaaaactggcaccgccgttgttttggtggtcagtcggccaggcaaaccgacggcgaaaatacggggcgaattcggaccgttcaacccccgcattgtttcggcagcaccgaaattggcagaccaaacaacggcacactgacaaatgagtgccgtcggatcaatgcaaggtcagttcagcccccgggcactgtcagcagcagcagaaggcacggacaaaatcgatcagatcctgacggattcaactttccgtaatcaaccgattcgaaattgtttatttgctacgctcatacagaatgttcaatgataattca

SEQ ID NO: 80470 - DNA, 711 bp, Heterodera glycines
  unsure (1)..(711): unsure at all n locations
atgggcggctcaatgaatcgacttagtgagaatctttgggccacggaaaatcctgaaaagttgacatatgcctggactggcgaaaaatgcgagacaacagtaaatgactttttggaagaaggaaaagggggaattttggactttttcctggtcacttcttttgggcataatttaaacccgtataaaaactgggaagaactgccaagaaagacattcatttgggaaatccctgagccaaatgagaaatattgggctacacatttttcggttggcgaattcaaggccgaaataacagaaaatgcagtggtaattgaaagtgagcaaagtgtattttatttcgaaaaggaggcgactgacgaaagggagggcataatcggtgttcccgaaaatgcctataaaatgtcaaacgatgcttttattgtcttaagcaaaacggaaatacgggaaaaacgagaaacacctaaaattgagccaaaaagaaaggaaaggccggtaaaacaggaagttcaactgaaaagtgaaattggtaaaaaggaaaacgttttgaaaacaaaggaacaaaatgctacagtatatgttttaccanagagtactgtaaagctggtcaaggacagtcaacaaaaaatgccaaatccaattanaatcttacctcanagtactcnaagtacagtaaccacaacttctaaacctcaagtcaaaatctccacaaca

SEQ ID NO: 80471 - DNA, 1551 bp, Heterodera glycines
atggaaattgaaaatgtaggtgaaaagtactctttcaacttaaataagtatcgtatttaaataaaatggtaattttattaaatatttatttattgtgcagaaaattggtcttgtaaaagttcggcaacacttcgaattgtgtcacaaaagaatggcacggaggatttaattggaagaattggtgatcgcatttttaataaggaattaaataatcctggatttccttatttcattagttttgcggtgagtgggattcaaataaatttaataaacttcctattttgaaattaaaatttttaaaattttaaaaaagaaagtgacaaaaaaatgaatagaaatttttgaaattttttggttataactctttgtaaattttttctagattttaaaaaattaaataagataggatttgataggatatgtaatgcatcgtttaataccaattttattaattgaactaaatttaagctaagttatggtttcttattagcaataaaattaaaactattaataaatttaaatgtttctatcattgacacttttgtaactttggctcaccatgattttatattacataattgatttaaaattaaagttataatcggaaacattgctgattttcatgcatctccaaataaaatcatcaaaattaaggaattgttggatccgggcaaaggattttacgacaaagatgaggacaaagtcacattggccattgatgtcattgtggatgagccaaaaactgagaaaattatttccgatccaaacaaatccaacggcacactttcgatggaaattgaaaagctatcggaatttgcacgagaaatcgaagaaagtgaccgtataagtgaaactgctgtgtacataaagggaatgccatggaaaatattggcatatatcaaaatgaaaaatgaaagcactgagaaatggttgggcttttatctttggtgcgatgcttgtaaaaaaggtttgcttatcaaattatataagagaaaatgttcggcaacacttcgaattgtctctcaaaagagcggtgtggaggattttaagagagaatacaatgaaaaagtttttaacaatgcaacgctgctgagtttgggttggcactatttcatttcttttgcggtgagtggaaattaattagttaatttacattttaatattgtaatggtaaattaaggaattaatggacccaagcaaagggttgtacaacaaagacgaggacaaagtcaccttggcaattgattttacgtgtgaatagcgtaaacatttcgtgaagaattgaaaagggaaaggaaggaaatcagcaggatgagaagagagtcttggagggcacaaaattttcttggtgcttaaattttatatttttttatgttttgtaagtattttggtttcataaagcaacatattccaatgatagggatggatttttatgtgctaaaaatcgagaaatatatatacctaaagagttgataaaaaggcagaaaaatttgctaaaatgcagaaaaatgccaaaatagttgccaaaaaattggaaaaaatgtcaataaa

SEQ ID NO: 80472 - DNA, 1341 bp, Heterodera glycines
atggacggctccaccagtaccaccaagggcacccaaacggaaaatgccacaagaagaccaagcgccggaattaaatcaaaaatcccaaaagctcagaggaatgaggcaggcgagaggcagggaacaagaaggattgacacttccgtttccaacgaggggagtcaagcggaagtcgacggctctgtcagcagtagaaacggaaattccaaccaaaagccaacgtctccgaccaaagaaatggacaaatcaatagaaaaggtgttagaacggctctacaatgacccaaaatcccctgctgcgtttgccggtgtcgaccgattgtggttggaagccaaaaaggaacttggaaataaaattcgtaaaaatgatgtaaaacattatctggagggacatcgcacctacacattgatgcgtccaagacgcatcaattttccgcgcgctagaacaacggctgccggttttatgaccgactgtcaggtcgatttggctgactttcaaaccctttctcgacacaacaggggaaatcggtatttaatggtggtaattgatgttctttcaaagcggatttttgtgacacctcttcgtaccaagaaggctgatgacatggtagacggctttaaagaagtgttttcaacgatgccaatgaaaccacacagaattttctccgacaagggtacagaattcagaaatcagcagctgaaaaaacttttcgatgaagaggaagttgagaaatatgagagcacacattctgagaagaaagcagcattagccgagcgcgcaatacgacaaatcaaaaatcgggtgtatcgctactttgcccaaacaaaaaccctaaattgggtggatgtaattgatcaaattgttaatggtattaataaatcaccgagccgggtgcatggaatgcgacctattgacgtgaactttaaaaattcacaacaaatatgggaaaaaatgtttggagatgatcagcatatggctctttttggaaagcccagaaaacgagccagatttgtccctggtcagacggtaagaatgagcatagcaaaaggtcaattcgagaaaggttatatacccaattacggcgacgaaattctcgaagttgatgccgtcaaacgccacatgaaaccaatgagatataagctacgtgattcaaagggggagaaatttaaaggatttttctacccggaagaattggcacccgtacgtaaggatgccgagacgacgtacagaattgagagagtttttcggaaacggaaaatgcctgacggaacgacagaagtactagtaaaatttattggataccctgaaagggaatggattcatgagacccaacttgtataa

SEQ ID NO: 80473 - DNA, 1187 bp, Heterodera glycines
atggtcattgttttatttggttagttggagatgcgcaagttcggatgatcagaacaaccaatgcaaaaaattgcaatgatcagtgatcactgactgatcaggtttttttgaattatcgccccaaaatatcgctatttggcattatgagtcattgtctaacactgacactgggtttgacgttttactcagttataccaacctaaccttttaaaaagtacgaattagaaaatgaaataggaaactttatcatacctaatactaacaccaaaatttcttattaatttttaaaaattctcaatagtgtcgaatttactcattgtcgaaatggtccagtgtcgaaaatgctggaaaacagtgaaagtttttgaaatagttcagtgtcgaaatttctctatgtcgaaaacgtagtgtcgaaattacatagcgccggtcccaacgctaaatagcggaattggcgtaattttttgcgcgttaattcaaaatttacactggtaaatgcctttttgaatttttttaattttggtctgccataactcgcttcattctgaactaaacttgacaaatttagtatctaaaaaaagttttgaaatgaagaatcttttcttagcgaatgctaagcaatttcacatctcacaaaaagttgtgagcctttcaagaaataaactggatataatattcatgaacatgttttagttctttattttgatgtttagaattctttaaacgaggagaaacgcaaacagcgtggttcacgtgtgatctctgttcctatttcaagtggaattcgctctgcttctgtgctattggctcccgttttggcatggatcgtcattctctcgaccaagtttattctgcaatcatccaaaaagctttggaccttcgggttgagagtctttcgatgcctctgcttggtacagttttattgtcatactttttatattctttaaatttaggaactttattttcctcgcttgataccgcatcaaattatttgtgggcttgccttcagcagttttcttcatttggtcgtttaaaggtaaatggaaattattttcatttagccaactccacattttagaaaattcaaatcgtggacaccaatgatttccatatgcgatctcttcacaaattcatcattgccaaattgcgtgctcagtcacaactccaaaatggttcatctgcttcaa

SEQ ID NO: 80474 - DNA, 1306 bp, Heterodera glycines
atgaacagacggtaagcaatttcttttgaaaaattacaatttcgttttacccaattttttttcatgtttcagttggatttgtgcggatgtttggatggacattctgccatcttttgaccgtgctcaactcggactcaaaatggcattgctttccgaccgtttcgatgttttggttgacacgcattttgatggaaaaagcgaattgacaatttggaaagcaatcgaaattcgcaaggacaaaggacgaaatgcgaaactgtctgaatggatcgatggcaaaagggtggattttccgatgccggaccattcgctgcccatcaaaattcgctttaaggagcttcggataaagcaattttatacttttgtatatattaaagcaatttttatatttcttcagttacatcgaccattccgtcattgaatttctccgttccaacaagcaaatttgggacagaagtggcaccaaattggaagtgtatattgaatattgtgaccagcgaatttgggatgttttggaccgtcaaatttggccactttttgcgacaaacattcgccatttgagctttaccagtggcgatgctttggacaatttgcgtcgtctgatttcaccaacgattctcactgatcttgatcaattgaattcaatcgattctgttggtcttttacccgatggaatttctgacgatggaccaaatgcaactgctggccaagcgttgaccaaatggcttcacactccgagcaaaaatggccaaccgaagcgattgtatcgctataatttgttgggtccaccaaatttcgaatgggtcaacagcttcaaagaggtgtgtctcgccatattttcgtcaatttgttttcgttttaccaatttttgtgtttaggcattccgtcgtgccaccacttctgtcagttacacaattcaactgttttttcatgtggaaccaacgtcaattgaacaatttgaattggtgaatgaacggacgaaagaaaagctgacattgaaacatagcgaagaattaggctataattgcctgtataatttgctgttgcaacgctacccaattggagagacggcgacggcgccagttaagtgggaaaaccgcgaaaattcgggtgccaattctaactatatcagatttgctctacggcatgccaattattcgggtgccaatttgaataatatccgatttgagttgtggggtggaaatagttgcattgggtgagcagcaaaagcaatttttgattgtcgaaaaaacataaataattttaggccattgtcgctgccagcggaagaagaagaagcggatga

SEQ ID NO: 80475 - DNA, 1678 bp, Heterodera glycines
atggttaatggatttagcagaaaaaagcatttttattcaccaaatcagggttactccgtctccttgttccaagaaatctctttatttacaactatttaaactttatttctccacaaacaacagcatagatgaaagaaaattcgaaaaaacataaaaaacagtttattaataaaaaaactttattcttttaaattttatcattaccgacatggcggcactaataccctttttaacaagataatatttattgaaactcaaccaaaattattataaataataaatatataactatttacaataaaaaaatatcatttttaaattctaaattttttaaaattgctcttatttaaaagattagtagttacccttgtagatttcaccggattacggtagccccccataggtgtgggaggggtgcatggccaactgagcgccagccatttgagcgccgccaagtgagcgcgggccatttgagcgccagacttttcagtactgaagccaaaacctattgcgcgacttttttttgcaaacccaaacctattgcgcgactttttcttggaaacccaaacctattgcaggggtgcgcgacttttttgactgcgcgactttatgcaaattattttaattaaattaatttaattttaaattaattttaaacgtcttaaaggtcaaagccgttgaatttaaattcatttaaaattcatcaaaaattccccgcaccaagcggatccgaaccccaggggggcggccagactgacgcactaaccactcggccacattggcaatggataataaacattaatttgctctcataaagggaaaatttgacgtcaccagtggcgggaggggggcgagagcaggcggcgagaagggggagggggtcaaataaacaaatcaattattgaattcacaattttctcttttaaaagcaaaaagaaatgggggaccgtataataaaatataatttagaaattaaaataattaaaaggttaattaattaattattattcctaaaataaattttttattacttctaaaataatataaatatttttcagtgaattaacaaatacatttaagtttaattattgatttgtctgttaattttttatctcctcaaaaataattacagcaccctttcaggtgttgggcgtttgtttatttgaccaataatttttaatttcacatctttacgttgcccctccctcacacctgctcatttgtgtaatttgacaccgtttcttttatcttttcgttaaaaattaaaaagattgtctggaatttgtcttgcgccacaccgctgtgccattcatttatgtaatttgacaccagtctgataataatttcgccaaaatttatttattatttgtccatttattacgaattattttgcatctatcactccaaattttgttaaaaaattttttttattgtcccaatttttaccattttgtgttttttcaacaaaataaatatttgttcaaatttaaagaattaatttttaaaattttagacacaaaaacaaatcatgagccaaaaccgtgacgaaaactcgcagccacctgtactcgatggaccgtacccgctggcacaagagcgcaatgagtttgtggaagatgaagcaccggtgctgcttgagatgttggatcgtctgtcacaaggagtggttttgttttga

SEQ ID NO: 80476 - DNA, 1735 bp, Heterodera glycines
atatggtctttgcgaggagcatcttttcatttatattttaccaatgcttacggttacatttggatacagtttctatgtgcttggcgaagctgcacaatgggcactttttgtctaccccgactggtaaattaagctaattttttaatttaaaaatatattcgttttttcaatttttaatttaattttaggccagttttgtgcacaaattctgacatgttcagttttggaatgtccacaatgctgctgagaaacggtctggtgatcaatgggctgtcattgatctgttatttatttgttggtttgtcactgttttgggcttggcagaaaagttagttggactaaaattcaattattttatataacttgcatcttaaaaattaaatttgcattcatattttgcaattaaattagcatttagtaattgaattaataatggaaaaacattgaccatttttatttaattatttttacttaattgtttttttcacataagtgaatttattcattagacgaaattttcgttgctttttgtatatttgattaaaattaatttccattctttccgcacttgctttcatttatttttataataatttatttaaaaaatttataaatattcactttttcttaaaatttttaccgttaaattgacgcgatttttacgggacacaaaaaaaaattttgtagcaaatcagctaggtgtaaaaaatttggtattcatttttctgatttaaaaattttttaaaaattacgtttgccattcatcatatttttaccactgatcctttatgcaaaaaaagaataatataaaacaatagtaccaaattggaacgtagtcttttaaagaatccttaaatatttgtcaatataaatattttttgctaatttttccatttaagacccgagttcagtgataaaacatcgcatcttcaaatccctggcttcgataatgactttggtggttggcacttattttgccatttgcttcatccgattgctgctcgcttccgtcagggacccaattttcattttgcacatttcgccttccattagcgcactgcttacggtcacagcggcgagcagtaatgcgcccgttctgtttgcatttaggtgaaatttgataagttaaaatccaaaccaaaatttccattgtctgtctcttttttcaaataattgatcgattgggattaatattttaatttttaataggttaacaaaaattgcccatagatacaaaaagaaatttctaatttgtgctgggtgttttgcatataaaacgtatttcctcgattataagccccctctcgattagaagcgcctccctcgaatatagccccctttgaagggggtttcaacaatagagcccgggggcttatatcgagaaaatacggtatctatttgttttctcagtaattagttgaaaaacacccatagcaattttttcttatacaaattcttttgtttttcatcaaatattcaatcgaatttctaactttttagcactgaatatcgacaagcgttccgcaaacatctcagaaaattgccattggccggcatttgtttaatgcgaattggacaacagcagcaacaattgccaaatgctgtctccatggttgccgttttcaacaatgcaattcctcaaccgagcagtgttggtcgagttcggcacatcacaacaattgggggcggtggcggcaccgcggtgccaaaaacaatggcacccattgactcataa

SEQ ID NO: 80477 - DNA, 1694 bp, Heterodera glycines
atgtctaattttaatcaaaatgattttgccattacttcggtgcaccaaatgcgcaaccgacctcggaatacaattggtgaaatagcggaagtgcgctttgctccacttgaagaagtggaacggcccgatcgtgtgctcgagcgtcttgtacagcggctgtttgacagagtgcttgatggacgtccagcaccgatgttaattggtcttcaactgcatccacctacctttgagaacccatttaccattcctcttcgtccacccgagcaaaacaatccggctgctatcgctgatctgatccaaagactcaatgatcaatctgctgccggaattgatctgactggcgggacaacagtcacaaaagtgcttgcagtttggccaatgcaatcggaccacagtgaatcagggagagcaggttgaactttatttttattttcttttcatattttcttttgctgtataggcgcatgcagccttgaggaagagcaccgattggtgaacactgttcgctcgttgatccgcattaagaatccgaatgatcgactctgtttggccagagctgtgttgctaggtcttcacgattggcgttcacggtcaccaggcggaggcggaccgacagcattcaaaagtttcgcaaatcgccagcacacccacgggcctgaggcacgtaacttattgagacgtgccgcaattccccgcaacaaacacatgtacacaattgatgacgtccaaaaagtacaagattggattgatcaacgatacgggccaggagaaattcgaattgcagtttttgagaaggaacgtgagtaccgaattgtgttcaaggcagcatccggcgaggcagccaagttcaacttgtgtcttttgttcgaaaatcaacacttcaactacattggtcgaattgagcaactgtttcgtgtgcaaggatattgtattgattgtgaacgtcgcgtgacacgctggtaccacccgcaggaatgcaaagtcgtctgccgtctgtgtttacgttttggcgcagggtatccatgtaaacaacaacaacaacagcaatcccgagcagatgggtcaactggcaatcgtctttgccgttattgtcaattcgtttttccaaatgacgactgcttcgcctatcatctgagcaatcaggcacccgcaagcatgtataatcagggaggacgcacttttcgcccaatatgtgaatggagaagagcatgccgacaatgtggagccataacctatgcgaattatccacataaatgtccagcccaaattggccaaacggaatgggtgcgctgtgcacgatgctctggaccccatcaaagtggagacccttgttttattcagcctctcaaagatgaaccaatgaggaggagaaggagaagaagagggcaacaacaacaacaacaaaataataataacgatgacgaagacgatgatgatggtaatgatggtaacgaggagggagacgacgatcacggtcatgatgctgataatgaggaagaagaagaagttggaacaaatcggtcggtcagactttgctttttcgacgctgaaacgtcccaagatttgccacttcaactgcgtacaaaggttgtacagaaacatgttccgatgctcattattgccgaaattatctgcgaagcgtgtataaatgaaggaatttcggttcattctggtgttggacaatacgcaaatgg

SEQ ID NO: 80478 - DNA, 2313 bp, Heterodera glycines
atgactcatccgggggtacatgttcggtctgcccaatggtcaattggtgaggctaacgtcgaagacactggctaccgccttgatggattagtcacacgtgaaccccctcaacgcaaccttgccattgaatatatgggttgcttttatcatggtaaaaaaaaaaggtcgcccttttcaaccgaacaaaaaaaaatgcttaaaggttgccccaagtgttacgctaacgacagacaacaaaaattggcaggtggaaggacagccgaagacctgtatgaacgaaccaagaggcggctatttgaactgcagaatcagcatggctttgagctggaagttgtctggggatgcgaaatgaagcagcgtctgcgtgctgatccagaatttcgccgggtgtacaatgactcattcgttccaagaccgcttgatccaagagaggatgcactacggggtggacgcactgaaccgtttattcttcattacacatgcagtccagacgaagagataattctcattgacattgtaaaaaaaaagttaggagaaacaaaaaatattttttcattgttaaaggtgagcttatatccatatgtgatgaaggcattctcgtttccggttggtaacccacgcgttctcacgcgagagacacttctatgtgcaccgacatcaccgcttccctggtgttctgtcgacgcgaacacattcaaagggctgttgtttgttcgtgttctgcccccagatccagctgtacacccgctaaaagttcctttgcttccctatcgaactaccgacgggcgcctaacttttccgctttgtgcacgctgtgctgacaaccgacaacaacgggcatgcaaacacattgatgcatcaagggcatgggtttccgcgtaattttgtgaaattaatccatgtcaatttactttttttgtcccggtgtttagatacacccatgttgaattgaacaaagcactggagcttggctataaagttattgatttatttgaggtaaaaataacgtatcgtttattgcacataaacttcaaaaaaataaggtatggcattatgaagaatgggataaccaactgtttcgtgactatatgaacacctttgtgggtcttaaagttcaagcaagcggttggccatccggttgtgataccgatgaacagcgcagagcctatgtagatgaatttaggcgggttgaaggcattcagttggaccacaacaaaatttcaaacaaccctggacttcggatggttgcggtaaaaaaaaatacagaattacaattttttaaacttaaaaaaaaaaaacacacacagaaaattcttgcaaactccctctggggaaaacttgcgcaacgagtcggtggaacggaagttcgttatacccgaactccagctgagtttcatgcactgctcgagaatcgcaacatcgacattattgactttcatcacgtctctcaccatatggacagagtggtagtgaggaaaaaggctgaatttgcaaaagcaccgtcaaccaactgcttaccaattgcaatttttgtcacttcatatgctcgtctacacctttatgactatatggaacaagtgctgcgtcttggtcataagctcctttattgcggtgagccaaaaaaaaaattttttttcacctttattgacctattattcaagataccgattcaatttattacgtgacaaacaacgggagacagcaggtgcctgaaggtgaagcgctgggaaagatgaagagggaacattgctcgaggcgaatatacgaatttgtgtccggtggtccaaagaattatggttttcgccattgtgatcgcataaatggagaggatgagcgtgctgaattgaaagtccgaagttttcgtctctcatattctgcgcagcaactgctcaacttcgagtccatgaagcgcattgttttggaacattacaacattgatggacaaatgttaacacatttttctctcacataataatccagaaaaaatacactaaaattctattccacagagatgatgtgctggacatggaaggtgttcatgttgtcccgggaagcaacgcgtcgataagaatcgaatttccacaaattggccgaactccatgttcggatctgtacacctacgacgctcacaaagactaccaacctcattatgtgaaggggcgcattcgccccagcatggaaactgtaccattcggatttcgtgaagcacaaacggatcaagaacaagctgaacatcaccaacgacagctgaatgattttgataacaacttattaattgttaaccttcccggatgctcaaattggaatcaataa

SEQ ID NO: 80479 - DNA, 721 bp, Heterodera glycines
atgagttggcttaaaatcatcgaggaggaggaggagcgggcgagggaattgcaaaatgatcaaatggaactggaacaagtgaaaggtttatttagttatttttagacattaaaaacagttttttaaatttagacaacattgagttgccaaagcacccgcaaccacaaaccaagtgcagttgcaatgaaaagcagaagagtgtgccgttgattgattttctctgcaaacactacaaatgttcaatgaatgagcttcacgttctgctgcagacgctgagcaaacgtagagaaatttcggaaatgttgcgttccaatcttcatttacgcaccaatcatctgcgccctgcctggaaaaacattcgcgtccattgcaacgaactaacaattcatccagctcaaactgcatatgctatgcgcggttatcttggcattacggtttgtctttgatttatttaaatttaaccaatctatgtgtacaatacactttaggtgcgcgtctactactatgtaaagcatggtataaagctggcttacccccaactgccatgtgttcttcaatttggtggtggtgatcatagctctctgttcccgcttgagtgtcttagtgttgttgttgttaaagaaccatgatttagtgatgatgatgatgatgcatgatgaacgggtgttttttttttaattcaaatattgtcgttttttaatgtcagattaaaaaaaataaa

SEQ ID NO: 80480 - DNA, 1138 bp, Heterodera glycines
atggcagacaattttcaaaaatttgatgaaaaacacttacaactcagacacccgtttacgctgacaatctcagggagcacggggagtggaaaatcggaatgggtgttacgaatgctgaggaatgtgaatgcgctagtttcggaacccatctcggagattttctactgttatggggagttgaatccaaatataatacagcttcagaaaagtggacacatcggcggttgtagggttattgtacatgctggaagcccaaccgaagagcaggttaatcggcgcgcaaaagagtgtgatggaaaactgttgatggtgttggatgatctcatggttggattgggccaacaatttcttgacactgtgttcacccggggatcgcacaattggggggtcagcgttgtgttggtcactcaacatttgttcgcaaaagaactgcgggttgcgcgcaacaactcccactatttggtgctgatgcgtaacccggcaggcgcgctccaagtgcggacgctcgcctctcagctatttccaacgaaaagcaactatttcacggaagcataccgggatgcaactgaaaagcaatttggctacctactaatcgacatgcaccccgagagtccggaattgttgcgcctgaaaacgaatatatatggagagcagggtggtcttcccccattggtttatgttgcaaaatgaagcatgtcaaaagaagaaaaagactaacagataaacatactatgaatgttagcccgctgatgttgaaaaatgctgacttcttacaccactttcgctcaaaatatcgctcaaaaagcagacagcgcaaaatgatagagaacgctttggatgagcagttgctctgttttgtggagatgggtttcaatgtgttgaagggtcgtgttccgttagggaagcgacaaattcaacggttgggtgcattgaagcaccagttgaggcgcttagcacgcgcacgttgcgcaaaaaccgcgcgcagagtactattattgaatcgtcaagaccaacaacaacaacaacaacaccaaaccggtgctggctttccggtggtagccagtatgctgacaagcattctcttaccagtgttaatggacaaattactgccaaaaactaattgataaatagataaaaa

SEQ ID NO: 80481 - DNA, 1018 bp, Heterodera glycines
atgacgtcatcatgcaaagtaaaaagactccgccccttttcttgttggtcacacccattgatttttgttttgctttactaagaagttgactccgccttttttgcttttagtttcttttgtcccgccccattttttttctatttaatcacagtttttctaaataaaaatcattcgtgttccattttttaaaaaattccatcctccttcgttttttccgatcttcctgcaatgaattctcttaaacgctttcaactcccggagcaagggacacgacagcaagaggagttggattcagttgaaccgaaacacatcagcgatgtggtcaacttcaattcggccggcgttttttatgttttgggaaaagtgacaaatatgcagtaccgtgtttacaaagtccaaattaaattaattaattaaattattaattttttctagtttaggcatgcccatttcgttccaaggggctcatttgccgccgaaaattgtccgatgataacatgtgtgaggcttgcggccaaaaagcgattgctcccatccacacggtgtttgtccgtcttctgctgcaggatgttgaacaagcagacattgctcaacgtgtcaccatgttttcgagtgttgccgaagagtttttgggaatgaaagctgctgaattgctcgccaaggagaaggagccggaaagccttgcgaaacacttggacgatttgattgctgtgaagctgatcgcaaaagttaacattaaggtttttttttgttgctatttattatgtatttgacaaaccacgccctaggcgaacaatcagacgtacactggatttgattggattgtcaaccttttcaagaagtgcccagggaatgatgacagtgatgtgccaaaagaaaaaaatgatgttgatgagattgcaaccaagaaggccaagaaaaattgatagagagagagagagagaaaaatgattcatttgttgtgagctttaaaaaaaagattgagcatgtcctttactttttttttaaatccattaaa

SEQ ID NO: 80482 - DNA, 600 bp, Heterodera glycines
atggcgatgctattaatttggacaattatggacaattatttgatggaaaaaacagtgaacaatcgatcactgatcagcaacagtttaaggtggactaaagaacagaaacaattgggagaagtatttgaatttataggagacaaaactgattttttaatttaaatttaggaattccatgaaaagtttgccagaatggaaatcgaattaaaaatggccaaattggaactcgaaaatgtgagatttaccttaaaaaataacgattaaaaatttgtctaaaaatttagaaggaacaaaagttaaagctccacgaactgattggagaacagaaggcattaaaggaaaaattggccaaattggaacagaaaaagggaaaaaatggtaaaaaaaaaagtaattaaatgaaaaaagttacaaattaattttattttattaatccacagattgttgtcaaaattaatttattttcagcaatttttccaaatctgagcacatcggaggaaatgattgttctgattgccagaattgctgagctgaatcgagctaacacagcggaaccatcaatcgcaagttctgctgatttgtttggacaagacggaaacg

SEQ ID NO: 80483 - DNA, 2700 bp, Heterodera glycines
atgtctacatcagggggctgttcaagtgagcccgcctctggtacatcccaagcctgcgggcaggaaacaaaaatgtttttgagtggaaaggacgatgcgtcctcaatcacggctattgatagaaaactttggcaaggaaaggtcactgtaaaaatttctgacttagaaaaagttcaaaatgacatggggaaattggaagatggagtgaatagagcttttcgccacttgaaccgttccttaaaccaaaaagtcacttgggtgaatgatgttgtggctaatacaaatgccaattttgaaacgctgaaggtacaattcgagaccctaaccgaaagagtcgatattttggaacgtgacaatgatggggcgaattcaggtggaacttttagtcttattaatcaaaacagagcatcgctcgcgccgtttgtgatgccaatgggcaatgcacagcccaaccaactcatgccgaatcaagtgccaatccagcaactgtcaagcgaagacgaagatgacgggccgactctttttggcctgaacatgctaatgagtggaccggcagtagggtcaggtttggaaatgttcagagaagagtcagtttttgcatttgacgattgggctgaacgttttaaggactacctttctgtgtcaggcaaggcttacactgagcgcgaaaaagtcaccagactcaaattggctctgaaggacacgccactggcattgtttaaagaattattaccagcacaaacggacactctcgacacagcactgagtgaacttcgacggaaattggactcccctcaacgtcgggaaattacaaagcgaacattatcattgtgcaagcaaagggaagatgagacagtggcacaatttctgaggcgtttaactccgttggtggatgcgacaaattcgtcattgaccggtaattcgcgaaaagaaaaaatttgcgaagaatttttggatagattgaaaccaaatataagctttctcattcgtctggtgggattgtcacgagctaaagatttggacttggtaagagcacaagctgaggagttggaggctttactgatgatgagcaagagtgacgaggcagtgcgcctctctgacgtagtcaacgcgctaaacaatcagtcatcacagtcccgttggtttacagaagcgaacctgaacaatgactttgctggacagtgggcatcaggtaacaatgtcagaggattcagttctttttcaggatcggatgaacaaacccagcaacaagggggaggagaaggacaaaatcgatctcgcaactggggagaaagccatcaagaacaatttagtcaaagaaattggtcaagaaatcccagatgcgattattgtgaccgcgttggacatgtggcttacaactgctatcaacgccgtgccaatttcagtcaaggaagatggtccaaccaacagccacaccaatcgcaaggacaatggcaaaataggcagagttccgttaacatgatggatgccccaagttcctcgaatgcttcagctgaattttttcaaaacttggctcaggctttgctagatcttaaaattcaggagcgtcgcaattacaaagacgaagagccgagatccggagcaatgaatgcacttacacacattaaacccgaaacggaagtaaaaaagtgtcaagttggtgaagaactgtcaaaaaaatcccaagcctgtgggccggaaacaaaagcaaaccgtcttaaaacagcaaactgggaacggccaaatgtgcgttcgaaagtcgcctccttaatgcaatttcattaatgcttattggaatgactttgccactcactgctgctgttaggcctaatctgccgatgtctccttgtctataaagcccaaaacgtagcaaaagtctggcaatttactggtgctctaacccgtcaattgatcactaaaaagcacctgtggtttaaaccgaatttaattgaaaattcggcgaacacttgactgctcattaatgactcttggactcattcattaccgatttgtaggtaataagttattcaatccatgcccttcgctttaagaaatatgttcatgtgaatttgaacattgcttgatttagaattcattatttaattttttttttgtgaatgattccgaattcaaactggggcccaggattacaatgtaattgttggttctgatgtcaaagagaaattgcccaaataaaatttaaagagactattagtgattagcaatgtctcacctgcgggtcagaaacaaatcaaagtggcggtagtgaacctttttagagatttatcttagtaattttgctatggtttttgtattcaattcctttgcacattcattttgaattttgtaaaatataattgtaaaaaagaggtaataacacttctaattttcaatgtccactttattccaagctggtgggccaaaataacaaaagcgcttttgtaaaagcacacaaaacattaaaaggacaggagtgttaaatttataattgactaatttaaaagttcaaaatttaattgacataaatatttcattctgccagaaagtattgcctttttgcagaaccatccttaagtaatctatattttttcgtttcagtatcatggttcttgctgaagatggccaccaagctcagccatggtccaaatgtgagcacactccgaattctctcgaacactaatggaaatgaatatttaacat

SEQ ID NO: 80484 - DNA, 1091 bp, Heterodera glycines
atgaaaaaacaattgcacaaattaagaaatgaacaagagtcaaaaattatttcccaggggcaaaattcagttaacaaatttattcgaaataaattatcaaaagttaatgaaattcctacgttaattgatagtgctggaaatatgttttccagtaatgagcaaaaatgcgaaatattagcagaaatatttcaaaaatcttttttagaaaattcaattgttaatggttcactgactcaatcagcacagaataagactaaacttttggatattgaattgaataatggaacaatttggaatatattaagaagacttccccggcgtaattcaacttcaccagataatgttccttacattttgttaaaaaattgtgcagagccaattaccaaaatattagcggatttatttagattaattttggattccggtcaaattccggaaatatggcgaacatcattagttgtaccaattttcaaaaaaggcgaaaaaatccgatgaattatagaccgatttcattaacaagcactatttgcagttttcgaaagaattttgagtagcaaaattttggaattttgaacagtatagaattttttgataaagaacaatttggctttttaaaaaatagatcgactacaacccaaatattaaaaacgatggacgatatatataattatctacaaaagaatcaacaaattgacattatttatattgattttgtcaaggcgtttgattctgttcccgttgatttattacttaaaaaaatcaaaaagataggaattgaaggaaaaatttataattttttaaataattttttaaaaaatcgaagttttaaagttaaaatcggagaagaattgtcagaaaatttcaaaatattttcgggagtgccccagggaagtgtcttagggccattactctttttaatttttataaatgatctgccgtcctttattgcaaatgaaaaggcatcagttggcataaaaatgtatgccgacgatgttaaattatattatgcccatgaaaatgatggccattcaaatcagttggataaagcaattgaggctaattgaggctttggaaaaatggtcaaaaataaa

SEQ ID NO: 80485 - DNA, 2470 bp, Heterodera glycines
atgtcaaatgaatataaacaaaaaggaaaatattcaaccaaagaatggtaccaaaattatgccgaaatttgtaagaaaattggagtaagccatttcataattaaaaaatggatgaaacaatttggaattgccagtaaaagaatgacggagaaagaaaaaatgcaaaaaataaaaaagtattgggaaattaaaaaagaaaatacaaaatgagtaataatgaaattgcaaaaattttaaacacttctcaacagaatatttataattggaagcgtgccaggaaatttcgacacacacatatatcaattttcattaagcatagtgattttttaaataaaaatgactttttgggtcagtttgaccctgaggcagtttgcttcgggcaaaccgtggattccggcttgttcatgtgaatacataataataataaaataataatttaattctctgtcgaaatcagccactgtcgaaatgttacagcaccaatttagacagattaaatttttgattaagtactaattgcttaattcatttataaattttcattcgattttcccccaattttttcgctatttttacttctattttactccagtattttttgtgaatattttctccctttttgctttattttttcttttattttataaaattttccaattatttctctttttttgagttcatttcgtttttcttcttctttttcttcccatttttctccaaatatttcatcaaatgatttttgttccaattttttcttttctgtttcaatttgattaatttgggtgatcaaaaaaataattaaaatgaataataagtggagtttcattttcttcattttctcaaaaataatttgatattatttttctcaaattttaatttatacaattttattttttataaataataaaaatctaaatcccactgatttcttacaaataagaagtgctatttaattgaaaataaaaaataattaaagattttattaaaattcattctactgaacaaattattggcaagaataagtaaaataatgattaatttttatttattttttccattaattcacattttattataggttcctggaaaaattaaaatcctaaatcaatattttactacagatttaagcattttttattttaaaatctattaagagctccaaaataccctttattttttaaattgactcaaaaaccgcgaaaaaataacgaatttttgttttgtgcgtttttgaaatgattaatattgtaccaaattgaatcaaaataaaaaaagcaaaaaatagttaagaatagagttaaaagaattttttaaacaatttttaagcgaatggaaaattttttgaaaaaagtctcgggttttttgggtctcggtctttttgtttccatataaaaattaattttgtacacatatttattcatttattgcatgaaagaaaattactcctaaaattaaaaatttttgatttgaacagaaaactttcttttgtgatattttatcaatttttattttgatgcttttaataataaaatcaaaacagttactaattgattgattgtaaaattaataatttcaagaaaaaagcctgcgcattccgcaaatataataataacacattattgccattatttgaacagaattagaattattttattcagcaacatattttatctatttcattttttcatagcaattgtaattttttccaattcactgaagtgatcgtagacattctcgcccgtcttgaccggcttgaaaagttgttagaaggttcagggaatcccacactgaacccaatcatcgaacggctcgaaaagttggaaaggttggtggagcggctcgtggagggcgagaatcgatatggacatcgatttggtgacccccagcacacctcctccacttcggctcccacccccacaaacggcaattttcaatggggtcaaccgccgccttttgctggcaccggcgcagtgtcgcggatgataaccgacgccatcatcaactcagagcagctgaaggagaaggcaaatcgtgcggtcattgagaaattgccggaggcaatcgatgaacgggcactggtggatcaaattgccgaagaatgcggtgtcaaggacaaactttcgccagacattcatcgccacccaagaacgcggcctgatggaggggtaaaaaaggacagaattctgaagttccatttttggacaaattttcgcgagacaaatttatctataatttccgcaatgctctgaaaaaattgactaatttgccccaacatatcaaagtccgcagggacatgacccaaaacgaactcaaaattttatattcccttcggcaacaagcctatcaggccaatattgctgctggtgaatataaatattttgtggttgatttggaaatcaggtccctgaaaaacccccacccgctcagaactcgctagggacacgcgagcaaaccaaccgaaaaaaataaa

SEQ ID NO: 80486 - DNA, 818 bp, Heterodera glycines
  unsure (1)..(818): unsure at all n locations
atggccagcgatgggcgccaattgcgcgtatttaagcgccgaaaatcgcagaagaaaaccattcgaaacactcacatccaacaagctcaacagaacaactcggcatcaaatggcttctttctgctgctccccttctgcttgtcgtcttctctttctgtctttgctccttgccactgtctttttggcactttcaaatgcctcgggtttgccttcccccattttttggtttttacttctttcgtgaacgctcagagcatggcacaccgtattggcacggaagtgagcacggaggatggcatggcgaccacgggcaccacgaccacgacaacaacccacgggaaatacggacacaaacgggactggggccacgacaaccacaagaaagacggatgggaccacgggtacaaacatggagacaccatgntaagaaatgggacgaagcgaacattggcaacggcggactatgccacagatgatggacacgccgcgngctatgccaaaggcgacnagtcggactggagcagttaccaatacggaggacagggaaacaaagcccagggcgactcgtacgccaaggggtacaacagcgcatggaaagacggacatgacgacggacacgactacgccactggccatggggacggacacgacaagtaacaagccgaggaggggggggggggggtggagttggacaaaatgtaacaaatgctttagtggttggggaagccatggatcacaccacggagacggggactacggtaaccatggaggacagcacggatacggtggatatggtggaggagagcacggccatcacg

SEQ ID NO: 80487 - DNA, 2341 bp, Heterodera glycines; identical to SEQ ID NO: 16123
  unsure (1)..(2341): unsure at all n locations

SEQ ID NO: 80488 - DNA, 547 bp, Heterodera glycines
aggcattcctttggcttttagacactttcgccagcaaagtgtcagctgttcaagacaaatacgccgacaattccattggcaacgtggtaaaaaggagcggctaattgttgtaaaatgactttgttgtccaaaagactgggtccaacgcggtcaacgttttcctcggcattggcatcgcgtggacattggccgccgtttaccattggttccagggctccgtgttccgcgtcgacccggggtgccttcgtccgactgtacctgtctttgcctaattacccccccccccccctcattaggaccctcgccttttcggtgaccattttttgcatcgaggccgtcatttgcataattgtgattgtggctcggagacataagtctgtttagctttttgtttcattttgaatttgtcccattttaaagggccattggcggcgaattgggcggtccgcgcaacttccaaatggccaccagtgcgttcttcgcctgtctgtgggccttttacattggcatctccgccctcgagtcgtactgtgtcatcgccggcttt

SEQ ID NO: 80489 - DNA, 1589 bp, Heterodera glycines
atgtcatcggatgacacttttaccgagaaattaatagcacaaattatcaaaaatctccaagtgcatattaaacgggtccatattcgttacgaggacaaattctcgaaccgcgaacgcccatttgccacgggaattactttggactcgttgaattttcaggtgggggaaacaatggaagaattattttcctaatttattacatcgctttttagactacggatgagaatttcaaactgatagtgcaaaaagaaactgtcaaaatcttttacaagtgagtgcatcgttttactatcatcattatgtgttgtttgttcattaattttgttttagattggtgtccatgagcagtttaagcatttattcaaacgccaactccaaattcatctccgacctcaaaagcaaagagaagataatcagcgctttgcaacggacaatcgcagtccacgggaggaagcccgccgggtacaaatacggtgggtactgaattggcaattccaaaaacaagaaattgttgcccttttttccacagtgttggaaccgttgaccattgctgcacagcttaagctgaaccagaagccggagagtgacggctcaaattggaccactcccaaaattgatttgtcaatgcaattggacaaattgggactgtccatcggcaagtaccagtaccaggacatgcttctgtttctggaggcccaagagcgcttcactttggccgagaaattcctcaaatatcggcccaatctgacacactatcgtcagcactacacagaatggtaagcatttctgtcatgtgtatttaaattttaaactaaatttattattttgccaatttccggtggcattttgcatacaattgcattctcaatgagcaagtcttgcggcgccgaaacaattggtcgtgggacagaatgaaaaagcatcggcaaatggtgagggactaccgagaggcgtggattcacttcagaactcacaaaacgcccagaaaagcggtgatggacacaattgaggtagagagagtgcagctgatttctcttcaaattgttcaattaaaatttaaatttaatcgcatattattattgcctttttactctgaaaagcacttactctgttcacaggaggctgaggatgcgctggacgtgttcaacttgaacatcgcgcgacaacaagccgagttcgaaatcgacaaacagactgacctcgtccgtgtcgaggaccaaccgcaggagggatgggttggttgggccaaaaattggtggttcggcggttcgccaaagggaaaagaagcggtggaagacgcacaaattttcgaaaaattcgagaaggaatcgaccccaatggaaaaaagtcgcctttataaatccattgactaccaagtgagaatgaaaaaggaaattcaaatgtttacaataacaaaaattgggcaggaaaatgtgccaccgatgaactacccaaaacattttgtggacaacgtcttcaaagtgcacctgaaaacgctaaagctgaagttggacaatgtgatggaactgcgtttttctcaactgtccgctaaattggagcagagatcggctgcgagtgcaatgcggtaa

SEQ ID NO: 80490 - DNA, 2342 bp, Heterodera glycines
atgccttctaaacaacaaaatttgaaaaagaagaagcaagatgtgtatcggcgacaggcagagcgatctgtcagtcgggataactcacccgtctcagacgggagtgcagatgggaatggagaggcatcggcatctctccggggcaccaccaccccaagcttaagtgctttgcaaataagcacgccggcgtcttctattggaagtaaaaaaagaggcaggccctcgaaagccggagcgaagccaaacttggctacgcaagaaagtgtgtctctcattgacatacatcgaactgtggtcactcaaaatgaccaggattcgccgtgcaaaaaaagggaaaaggtcgccgagtgtgaccaacccatgtttgccaatgaagctattgctttaacacctgtttcgactcaaagtcgtggagggcgacctgccaaaaaaattggaggcccaggccgaggcagactcagtgattccatgagcaaaagctctgaaatggataacaatcttgaaaatgccccaattccggcaacctcgcacattgtgtctgaaaaaattgacttcagcactgtgccaattaatttcgccacatcgcgaaattttgcctgtaaaatttggagatgggcagcaattggcctttatgagcgtgatggcgaaacagcacttggcccacgctttattgttgcctatttagcttacattgcaagcatttcacaacgaaaaacagtagttgtggattctttggcatcgagaactgatgtttctcgattttccaacgtgaagaattacactttcggctatgatccgaatgctgttcctgaagttgtgcttatgccgcttcacttcccaaatcattggactctcatcgtctacgatgttgcacatggtgcatacttccttgactcgctgcatatgagcagcttgagtgatgagagaatggcactcatccagtcaataattgctgagatagtgcccgggaatgcgtcattcgctgttgaatacgtgcagcaattgacaaagcaaaatgatggtaacagctgcgggtacttcgtgtgcctgtatgctgaatcctggctgatgaacaaccgtacatttgttctgccggatttgaacatcaattatgagaagaagcgcattttatggcacataaatgagctttatggctcagatattgtgccgtttcatccaagggaaggtgtttcaacatctttcgctgttgtgtctcatcacaatggggatgtagcgcaaacttcctccaaggacatagtgccaattgaagtggatgattcagcagtacttccttcctcggaagaaactgctgttcttgcgcaagcaccagtgatcggcgaaaatcaagctgacacccacggtgttgttgcggacacaattgtccagcaagaaccaatcgcgcaggctgatgatgtaatcttcgtcagacctaagacgccaccaaggcgatcactgcgcgtgcaaaaaaggctttcagcttctgttagccgttcgccttcaccggcgccaaaacgacccccgccagcaaattcgctgggaatggcaacgccgatcacacggcgttgctctgcatttcacaaggggtggcaatgcgctgcagcagcagccaaacatttcccggaatattgtgactccgggaaactcggtgacaaaaaatgcgccgattgcggtgcacatctcttctcacatgaagacagtaacatttgctgccggaagggaagagttgtgctgccaatgcttaacccgcatcctgatgagctcaaagagctgattgtggggaataagcaatcccgtgaagggaaagaatttgtgcgacacatgtcgcgttataacaacctgttccaatttgcgagcgtttccgctggcaacaaaccaagccctgctggcggtccgatggccgttattcttaacggagaattccatcgccgcataagcagcatgcaggctggtacaactcagattcctggctttggccagttgtacattctggacccagtcgaggctatggaacagcgtcgaaacaaccccaggtttactggggagaaaatcacaaacgaagatgagtttgtgcagggtcaccagctaaatgagcagactcttgagatcttagaacaaatgatccaagtgcatcatcctgctgcccaggcatataagcaggcgcgtgagcagctcactgagcttctccaacaacaaactccggaagagcttcgcttctttcgcatgactttgttgaatgagcgcagggctccagctggtctgaaagacccaaaattgcacccacaccaaataatcaccccttctacgggtgaagggatgttcgctattcatgcggacccccactg

SEQ ID NO: 80491 - DNA, 1235 bp, Heterodera glycines
atgggcaattcatgcttaatttctgattcaacaagaggacaaacaatttcgccgccgtccaatgattttgtcgcaattttgcgtcggccgagtaataaaaataaaataaagaattaattaaaatgaattaattatcttttagttaatacaacgatcctcatcaaacgacaattaaagaacaaacgaacgctgacaaaaatgctcagtaaaccaaggacagaaactgcaattgttttgcctgaacgagggtggacactaattttttgtcgccaaaagaccgagaattgtacgtcaatttattagtttaacaaataataagaaaaatatatttgattatttattattaattaatcatggcattgaagaatttttggctcattaatttttagaaaaaaatatttacatcaatataatattgtttttattttttttcagaatttatttgtgttggcacaataacattgtgacaagtcgaagcgatctgttccacaaggcaatgcattattgcattcatgcgagcccaaagatgaacgaaattatcgcgtgcggccactattgctatagagacctgacaaaatggccaaaacttaacagaatttggttaataaaaatcaattttaaaaaaatgtttcttttgatgtggtgaaagaaaaaatttgagtgtgggagaaagtcggataaaggacatgggaggaccccttaaaggagttgcccgtagcgcagtcggatagagcattccacggtatggaagggcgccgtgggttcgagtcccatcggagcgagtaaactttattttctatattttttcttgcctttttcgatatatatgaccttatacaaaattgttgcgttctaaacatatacaatttaataagttatacccaaatttcataccatattttcttaatgagttaaatttatttattatgaaaatcaaattgaaaatgccaaaaattctaaaatattttaaatgataataatttaaaaatataaaagtttattataaattatatatttatttaattttcagtcaggcaatttttaagtttttcgataaactgatcaatgaatacaaaatggatgaggataaaatgtacgatgcatgtgtacatcttggcgaaatgcatgcaaattatgcccagtatgggcttaagcaacattttatggacctttttcaacaacaattattaggtgggagaattttaaatataaaatatgggtttaaaatgaattag

SEQ ID NO: 80492 - DNA, 549 bp, Heterodera glycines
atgacaattctatttgataaatgcaggttaacatcagaaccaaaggtagatgaccaaatcaaattattaattattcttgaaagattgtgtaaataacctaaatttacatcaattatgtatagatgagagaattattgtttaaaaaaaataaataaaattgttaaacggaatttttaactcaattgcactgaatcaaaaaagttaacgctaaattcatttattaaaattaatttttagctaaatttgggtttttggaagagggtttgttgaatcaaaaaaggatttgaaaaagttagcccttttttttgctccgggttcggaattgtccaaattaaaccaaatattcatgataatgtattatggtactccggggaacgtgtatttgtgaaatattatgtttaattgtcatattactttatttaatttaaagataaaattaaaatcaaatatttaatagtcataatatttatttaaaattaattatagattagagtttttttaatttaaaaagaaaaatatttttataaaatattaaattccattataaaa

SEQ ID NO: 80493 - DNA, 1422 bp, Heterodera glycines
atggtcgttgcgcgtcggggattggttgcaccgcagaacacttttttggaggcggtcgtgcgacgctgcaacaacaccggtgaagcacattaatgataatgagatcattttcaaaattgtattaactgacgaattgtttgatctgctcagattcaagcttcattttggccaacgctcaaattatcgattttccaattgtttactgtaacgaaggcttctccaaaatgatcggttattcgagggccgaaattatgcaaaaaaatgcctcgtagggaaatacaaaaagcaaaaaaatgaattattaaattaatttttcagattgtcttttatgtacggagaacacaccgaccaagtgaaacggaagtaaaatgaaaaattggaaaaaaaaacattttaagatggccatccaaaagattcaaaatgccatggagacagaaaagacggagcaagtcgaaatcgaactgtgcaagaaaaacagtcggaagcactcactcccccaattgcttatctttaaaataattgtgctaattgtcagagtccgtcctgtggctgctgatgaacatttcgccaatcaaaaacgatgccaaccgcgtggttttgtatttgtgccaattcaaagacatcactccgctcaaagagccctttgagggggaaaacaacaaaagtgggcgggggagggggggggatgagataaaaaatgagaaacgaaatcttgaaactgtgccggctcacgccgggacttaaaagcattgcacagcggaattaaaagctaaaataattttcgcatatttttcacaatttatttcaaaaagccaaaaaggccggaaccaattttaaaaactaaaatagtgcacaaaaggggagccgccgcacggcggggcttaaaagcattgtacagcataattaaaaccgaaaataattttcgtatatttttcacaatttatttcaaaaagccaaaaaaaatgattaaattttgaaacgaaatagtgcacaaaagggagggatggttagacgaaaagaggaatttttagaaaagagcgcaccccatctgatattcccatttttccgttccacaactggccaaaggcgactgtgctaattgacacgtagttgtccaataaggtacttggactttccacagtaaaatgtggtacaaaattttggaactgtcccgcctcacggcggggcttaaaagcattgtactgcataattaaaagctaaaataattttcgtatatttttcacaatttatttcaaaaagccaaaaagtgcgaaaccaattttaaaaactataatagtgcacataaggcgaggcgtcgcacgacggagcttaaaagcatcgtacagcataattaaaactgaatataattttcgaatatttttcacaatctatttcaaaagacaaaaaaaatgattcaatttt

SEQ ID NO: 80494 - DNA, 107 bp, Heterodera glycines
atggcccctaattacttcgtcgtcctgtttaaacatatagaaaatgtcataaggcaggcaggaaaggaggtcgatgaggaaccaagacttgaagtaatcttgggaaa

SEQ ID NO: 80495 - DNA, 1677 bp, Heterodera glycines; identical to SEQ ID NO: 16130
  unsure (1)..(1677): unsure at all n locations

SEQ ID NO: 80496 - DNA, 2852 bp, Heterodera glycines
cttacaaagtgtacggccaagagaaagtgccagcgggcggcgttgtcgccggcattggcccaatctgtggccgattgtgtgtcattgtggcaaacgacgcgaccgtaaaagtgagaaaaaaacgtacgaatttcgatgtttttttaataaaattccgtttccccggtttagggtggcacttattatccgattacggtgaagaagcatttgcgggcccaggaaattgcccttgaaaattggtcggtttttgttcccattttttggggtttccgtttttaatttccatcgttttgcccttttaattgcattaattattaattttctgctcagtttgccctgcgtttacctcgtcgactcgggcggtgccaatctgtcgcgccaagcggagattttcgcggacaaagacaaattcggccgaatctttttcaaccaggcacaaatgtccgccaaaggcattccgcagattgccgttgtgatggggtgggctaacaatgggaggggtattaattttcatggcatttttacgatttttcttgtattaattaacacattttcaacaaaattgtatcaaaaactctctctcattttagttcgtgtacggctggcggtgcctatggtgcgttttcgttttactttaaatttttgttgggattttggagaacctttttttgaaatggtcaaaaatggggccttcctaaccttcgctcaacaaaagtgaagtgcccgcaatggctgaccaggcagtgattgtccacggcaccggcaccgttttcctcggcggccctccgttggtcaaagcggcgacgggcgaagaagtacagccacaataagttttaaatttgttcgtccgacaatttggcaaagtccaaaaaaggggggaatttaacgaaccaaaaatcgatttgaaattgaaaagtgatcagattggccactgattgtgaactgttcaggtgagtgccgaagatttgggtggtgccacgcttcactgcggccgcagcggagtctccgattatttcgcctccgacgaccgccacgcgttggccatcgctcgtcgcatcgtcgccggccttcccgcccaacggtcttttcccccttcggtgcgttttgattgcctctaattgatttgtttgtctctctcattagtctaattgattggtgtatttctctcattggcatgccatttggttttgatgagttttaaaattgtttacttcaattggtcagcaaaacgatccttttccgtcttcggcatttgtggaggagcccatttaccctgctgaacaactctacggcatcgtcggcggcccgaaacagcgaaaggcgtacgacgtcagagaagtgatcgcccgcgtggtggacgggtcgcgctttgacgagttcaaaagggtgcgccttaattagcatttaattgccttgcttatactatttactgctaattgtaagcaattgatcggtgtgtccatttggttgataattttccctcttttttcagatgtacggcgaaactttggtcaccggatttgcccatatttttggccaaattgttggcattgtcggcgagtgcttttcaattcaaataaaaaaaacaaatttttccacccctccctctttcattataggaaataatggcattttgttcagcgaatcggccatgaaaggtgcgcatttcattgagttgtgctgtcagcgccaaattccgctcattttccttcaggtggacaatcattttgctaaaattgtcaaaataataaattactttaatttgttgccaattttatccatccgttgcgatttcaaaaatatttcttcccttttaatcatttgttttttttcaaatatttctctgatttctgttcaattaattcgcctttttgtcttgaattgttttgtttcgtaaatttttgcctttttcttgtgcagaatatcaccggttttatggtgggtcccgacgcggaggcgggcggaattgcgaagcacggggccaaattggtgaccgccgtttcgtgtgcagcggtgcccaaactgacggtgctcatcggcgggtcgtacggggcggggaactacggaatgtgcggaagagcgtactcaccgcggtcagaaaaaggcgattaaataaaatggaaaagcaatatttttggccaaaagtaataaaatcagggaccaaagttcggtttcaagtggaggaaagtgtggcaaatttctcattcgtcaggtttctgttcatgtggccaaatgcgcgtgtttctgtgatgggcggtgggcaggcggccaatgttttggcccaagtgcagcgcgaacggcgcttgcgcgagggcggccaatggtcggaggaggacgagcagcagctgaagcagcacattgaacaacgcttcgagcgcgaggcgtcgccccttttcgcatcggcgcgcctttgggacgacggtgggcaaaagggcgacgcatttttgaaaaagcgtggacatgcatttaatcatgatgcccgaccgatccaactggatcgacattttcgggacaaaacccccaagaaaattattttgtatggttttccagattttaaaaaccgccgaaaaagacccaggcttggatccatcggtccagcagaatcttcacgttggacatttgtgatggaaataggaaaatgccccgggggaaacagtcgacgaaactccgtttttaaaacggcggaaaagaggagaaattaagcatttttcacggagtaaccccctcatttgtcaggtgtgattgatcccgtggacactcgccgtgtgcttggcctcgcccttcaggcgacactttccgcacaaaaaagggaaggaaaggcggcggaaacgaaattcggcgttttccgaatg

SEQ ID NO: 80497 - DNA, 997 bp, Heterodera glycines
  unsure (1)..(997): unsure at all n locations
atgatcagccgcagcttcgtccattgttcgtttcctgcggctcccgtccttctcatcctccttcaacccgacnccattggagcagtacctgcgccaccgccggcgctggacaatggctcttatgctgttgcttccggtgatgctctactgcttcaacatcatcattttcctcctcctccaccaccaccgttttgttatgcttcttcacctacagaaaaggctttgaacaatggtggtgttcaaaatgggggactctccgtcaatttggccagcaataataatgatgatggtcaaacggccatcaatggcggcttagcaaccgcgggaccacccagctacgcggagtatttggctttggcagcaacggctgctcatcatcgtcctggcccaccgcggacggaggaatgtgcagcggcgaaccgcagcggtggcgctgctcattgtcagcagcgcgaaagcaaaagcagcaacagcacttcaaatcggcgacggatgaggatgaagcggggcagcaatgcggggcgggggagggggaagccgttgaaaaagggtgaagcaatgattacgttgatgaggaaaagcattggcgaggagagagcggaggaggaggaggaaaagcggcgatgtggaggacggctaatagccgtcaaagcggtgaaaggggaggagaatgttggacgagcatgggcagcagcagcagattgtgatgatggggatgatgaagtggcggctaatagtgcggatgatcgaccgtcgcgaggacaaaaacactcatcatcatcatcctcattggcgcaccaattcgactcatcctcagcagattcggcttctcctcctccaccgcctccgtttgcacttctcctccgggacccgcagcagcggcggccgcggcggggactgaaaaacaacaaccatcttccccatcccaatcccaatcatccccatcatcaaaagcttagccgttgttatcggaccaatagcagcagtagcagcagca

SEQ ID NO: 80498 - DNA, 3883 bp, Heterodera glycines
  unsure (1)..(3883): unsure at all n locations
caacgaaattcgtgattttttgaaaagtcagtcgaagagtatgttgattgacgaattttcatcatttgaggaattgatctgtaatttcggagaaattttcgcaatttctgaaaacgaattgacacaaacaaatttggtcgaacacaaaattgatacggttgatacaaaaccgatcaaagcaaaacataggcctgttccatacgcctaccgagaaaaggtggctgaaatgatcaatgattatcttaggagaggtctgatcagaccatctttttcaccgtgggcatcgccaatagtgattgttccaaagcgcgacggaaccctccgtttctgtgttgattacagaggcctaaattcagttacagtaaaagacgcatttcctttaccaaacattgacaatactcttttggcacttgggggacgaaaatttttctctgttattgattttatgtcaggttactggcaaataaaaatggaacccgaatcagtcgaaaagacagcttttgttacggaatttggattgtatgaatttacagttttacctttcggtctttgtaatgcagtagcgactttccaacgcttcatgacgcgacttttcgatggaatggtaaacgattcagtgttcattacattgatgatattctgattgcttccgagacctggagcgatcatttaagagaccttggaacagtttttgaacgcattanagcagcgggactgaaactcaaaatcacaaaatgccactttgccgcaaaggaaatccctttccttggccatattctgacccgtaagggcataaagatggacattgacaaagtcaagccaattatcaaccttccaactcctaaaacgaaaaaagaattacattcactcctcggatttttcacttattacagaaaatacattttcggttttggagcattggccaaaccactttttcgcctacttaaaaaggacgtgaaattcgaaatgggagaaattgaatttggagcgattaaaacactgaaaaagagtattttggatcaagtagttctgtatttgggtcagcttaggccaatttatttcgcgtcaagacaatgtaataatcacgagtcacgctattgtccaacagagcttgaagcgttggcaattcgtttcggaacaaagaaatacgctcaagaatttaggcctctgtaatcaacacagaaattatgttttgttaattggtttttctcaattcattttgggttttttctgagttcttcggattgatattttttttttgctgtgaatgacttttttgcttctcaatttctctctcctccgatctttgaatattttttggaaataaatctctctcatctggtgaagtcgtttggattgtcgtgttcgtcttttgtttaattttgtttggacagggttttaattgttggaatttgccgtggtgtaattgttggtcaacgagcgaaaatttgtgcctgtttcagtcgaaaattggagagtatttgactggccgtataattaaaataaaataaaaatataaaaaattaatatttgtgctgttaaccagggcggttgctttaaagctccgtttatcctggcagcaatttgccttttagggcctgaggtcgttttaattacacacacaaatttcccgagccgtttaggtgccctgtcgtcttgtgcttcatgggtggcggtgtgctgctcctcaggccatagttggttttctaatacatgtcaaaattggggggccgtataattaaataaataataaattaatattttttttttgctgttaaccagggcggttgctttaaagatccgtttatcttggcagcaatttgccttttagggcctgaggtcgttctatcgttctaatttctgtcaccaatttcccgagccgtttaggtgcactgtcgtcttgtgcttcatgggtggcggtgtgctgctcctcaggccatagttggttttatggccaaatgatttactttgaactcttttcaatgcttattccctatcatccccttcacccctcccttccatttatttaccgccatataaattcattcatttcatgcaattcgccattttgaaaattaaaaaattcatctattctcaccttcctatgctgggcattgtccaacagggaaaaggagctgagacaacatcgaccaaaaaactaccggctgaatacgtggaaaagatggactgcatcatggagcacgttgccaaatttcatttcaccaaagtgaagtcgagatttgtcataaaagatgtgcctgcagaccccgaaggactgctagcggccattttccaacactgcattgatgaagcaaagaaggacagtcgcgaaaagggaagcgaaccgacacaccttggctgtgtcatcagcagcccactgctggatggtggcgacataccaattccgctacgtcaaattaccgacaacacaatcaacaccatcctaaatcagttcatcaaggtggcacaaagcaaaaagcagcaaaacatgactttgtggggcgagccgttcatcatcgccataacatcggttgatcgcagtggacttccgatgaagcggcacatcaaagggggcgccagacgtcgcttggcacaagttcagcaccaagtgcatgagaagtgcttgattaaggtgaagcgccatctttgtttattgtatgacacctactcatatatttaagatcaacaaccaaaacggggacaacactgacaattattgcttgttttacgccctacaagcaacaatggtggccaagacgcgcagatggccaaagtggaagttttacgattatgtgcatagtcgccgtggtcagcgaggacagttccagcaagacacattgaaagtgatgcggcaaatcagagcaccactcgatttggacgcatacgacgccgacacttatgctccattggtcatcaatcactggaacaacgcgcagcagcagcaccggtttgctgttttcatctttggaacgaccggccactacaagccgctttacaaatacggcaacgacgactacgatacgccattggcgctttatttcaacaacagtcattttgatggcgtgcagtttctgagtggtctctttgacggcaaaaagtactgcctggcgtgtgaaggaccatactcgagaccatcaatgcataatcaatcatgcaaagcgcactgcctcatgtgttcccgtgttggccctgagtttccgtgtccctcggaagctgacttcttccgacaatgcaaagcgtgccacaaaaacttccacaacgcgggctgttacaatcaccacattcagtccaactattgtgcgcgttcaaagaagtgcaaagactgcggtgtcattttggacgtcaataacaattctcaaaaagggcggaaggtaccaaactcaaaaaaaaatttttttaaccataaacactttaagggacacgtgtgcggagaaaaattctgtcagctctgcaacaacttccacagcaccgagcgtggctgtttcattgcaccacttgagcctaaggaggagatggagtcctatcggttcgtggcctttgatctggagacaatgcagcatctccctgttgaccctcgtctacctgagagcgcaaccacgagccaaacttcattgcagcgaaagtgatttgtccaatgtgcattgaaaatgggagctggaaacaaggaactgccgggtgttgggtgtgcggcccacaccgaaccgttgccttctgccaacgaccatttaacggcacttctgttgacaaacaagtggtcaccgacaatccaatgcaagcgtttgtgggatggctgatcaatgacctaccgaagaaaaccaacacgtacgcatactcccattttggcggacgctttgatatggtcatcacattcagtgaactattt

SEQ ID NO: 80499 - DNA, 1650 bp, Heterodera glycines
tctacaccagctactccgacaaagcagcctacaccacctcaacctgctaagcagcctataccaccaccaccacctgctaaagagcagccatttacggcaccaacaccggcaactccaaaattgcaaaagcctactccaccccctgcaataactccagcgcaacctattagtaagcctacgtcaatccccccagtcaatccttcgccagcccaaatacctcccaaaccaaagtccattacaccgattactcccgctaaagtgactccgagctctccagcttttaagccgtccgctcctgtttctacaacacagccttttttaagcaaaccaaacatcgtctcaacccctcccgctccttctaaaccatcagcatcaattgacgcaataaaacatccagttacaactgttaaacccacacctccttttgctaaatctgcttcatctcctactcagactacaaaaatagcttcaccgactgcttctgcaaaacctaaagataacaaagcagcggataaagacgttaagcgatcagtcgaagccccaaacaaaaacgaaaaggaatcgaagagaattttagatgtggatgataggttttttggcggtttacctgccggagacgaatttcctgacgacgatgacaaagagtccgagtggccatatgagcctttcaaaaacattgttgatgatgtagaaatacaatatcttgatgactttgagcgattcaaggtggtgctcaaaagtccaatcataagccacttgtcattctcacctcagctaggctatgtgcttggctttgaaaacccccaacacgttggagatcaagaaatggcaaaatacggttgtgacttacggggtggcttctcaagttttgctgtctattccaaaggattgactgagaatatgattgtgggtaattcgctgagttcgctgcttcgcgttgtgtcagttagcggtgccacacccggtgactacaatgagaagatttatgattcgccaatatacgctcgagtgttgcagcgggagatcaacgaaattgagattgagttgcgcacgatggacaagggtcgactggtcccatttgcctacggcacgaccatggtggtattaatatttaagaaagtgataaatttttaaactcactcatttgtgtttttaaagcatttttacgtaaataaaatggttcatattgtgtttgatccaagcataatcggatatgatgagtacatgcaatacggaagtggcatagagagcgaggattacttccgagggtccagccccttccagcgagggtatggacaacgaggcgcaggggtgggtgatgtttttcgtggactttggcgttttttccttcccatccttcgtcgtgttggcactacagtaggatcggaggcgttgagcacggggcaacgagtacttgagcgagttggaaacgaaggagtaccgtttaaggaggcatttgtgagcgagggaaagaaaggaattgacacggtgttggagaagggcggcctgccaaaacagtttggcagtggtcgaagaatgggtataaaaagaaagagagctcatgcaccaagccatcagacaataattggacgggcaatcagcaaagcaggaaataagcgtattcgttcggacgcttttggactttattaa

SEQ ID NO: 80500 - DNA, 65 bp, Heterodera glycines
atggcgaagaatcgttcggcgtcggctcaaacgtgcaaaccattctctataatgcgcaaggagaa

SEQ ID NO: 80501 - DNA, 1001 bp, Heterodera glycines
atgattattgatgcaattttattctctaaaaaacgacaaaaaaggtaggttttatgtctaaaaaaccaaaaatagtcactaaaaatggaaaataggcactaaaaaaatgcgtaaaattttacccataaagcaacaaaatgaagccaaatcagaattgggacacatattttttaaactttaaactccttgtcaagaaaaataaatagattaatttttgagaaaatttttaatttattaggtgtgtgttttttgaaatttttgggtcgattttttagaggcgtatctttcttttttattgtatttttgctaataaattttccaaaaaatgttaaaataagttttttcaaaattactttttgacaaaattaattttttttaacctattttgacgcaaaatcttttacaaattgcacttaaatcttcaaaattttcctctacggcgtctatacgcaccttcggtcacgccaaatctttttaatatgcttttaaattgcttataaaattattgaatttttaaaataaaaatttgaaaattattttaaaaaaataaaattttgaaaattacggattacgggttacggattacggaaaattacggggttttttgacccccgtcatgatggattacggaattccgtaattgagaaaatcgccgtaattacggatttccgtcaatccagttacgcccagccctgttatcgtctccacttttcaaaatgttgatgaattcgatgagatttttgaaacattttatagagtgaaaatagttaggacatgagaaactcaaaaaccaagtttttttaacatttttggtcataactttttgaaacataataatattttttgaaatttttgcaggataatagaaaacactttggctatcgaatgctatcaagaattaaaaatttggttcctacttattttagcggtttttaaagcctaaaattggagctctagttgtaacgtgggctcacttaaaatgccatttttccccactttta

SEQ ID NO: 80502 - DNA, 161 bp, Heterodera glycines
aatttataggtaaaattttgaaaaattttatgggaatttaatccaattcttaggggtgtaaaagtcgcgtttcgcgccaaaaagcgaaatgcgaaacgccaaaaaatgcgaataatgcgaaaggcgaaatgcgaaaagcgaaacctaggcacatctctgct

SEQ ID NO: 80503 - DNA, 938 bp, Heterodera glycines
atgctgctcaaattggccgactacttccaggtgggtgcccttacagatggaatattagacattacattaaattttattccgtgagcacttgattttcaaaaaaatgatacttaaatttgaatatcctttatcaaagagagtttacccataattttcaataaaaaattaatttttactatttttaaattcattagggtaattattagggacactaattgctctgttttcaggtggccgtgttgaagtcgcgctgcgaaacgcatctgatcaattgtgttgaaattccactgatcgaccgtttccttctgattgaacgcttcggactcgacaatttgaaagtgatttaattttcaaatatttaattttttaatattttaaaatagtttttaaatgatttattacattttattttcccatttttagaattattttttgcatttgaatgttgacaaattgcgtttccggcgcgcctgccgcctgggcgacgcgggcgccgcctactcaaaaaagtcggtcgatggaaaattggtcgacgatgggcggcgtcagcggcagcggctgcagcaccgctcagcgcttgccgtccgccgccggcggcttctatcgccagtcgccaacgcccggcgcagcgaccgctacggcgacaacggcgcgccagcagaggccgctggcgctgccgtcgctgtcaatgcgccggtcgccacgccaaaagccggcgcggctccaaccccaaaatgagcagacggcgggaggtcataaagtcagtaaaatgtttcaaaaatctcattttcattaaaagttgttttttttacaattctctcatttttaatgcttgatgagtgactggcgatacaaagcttattgccgtggtcaattagtggggtcaattagtcacgcgtttttccattatgaaatcaattagtgatggtatgaataaa

SEQ ID NO: 80504 - DNA, 1352 bp, Heterodera glycines
atgaaagcgtcgcgcggtctgatcgttcgtgattggaaacccgacgtggtttatttggtccaattcccacgcacccataatgtgctcagtccatccccatttgcactcaaattggagacatggcttcgcatcaatgggcttaaataccgcgtaatttacactcataatattaaatgcattaaataaaaataataattaattgaaaaaggaatgttaaaaattaggcaaaattttatatttagtcttaaaaaatacaataaattaaattggcattttgactgtttaaatgggagcaactcgtacaaaaggcaactcgtacactgttgtacaaaggcaaatcgggcaactttttacgttaggcctaggcttaggcttaggcctaagctttaggccaggcctaggcttaggcataagctttattttgtaaaatccgagtttatttttttgccattgactcgtttaaatgaaaaatattgttcaaaactgttagtgttcttttcagaatgtgaacaacgaattcacaaaggcgtcggccaaaggtcaaattccgttcattgagctgaacgggcgccaatttgccgactccaatctgatcattgatcatttgcgcaaccatttcaaagtttccatcgattcgcgcctcagcacgcacgaacgcgcgttgggtcgcgcattcactattctgatcgaagaatcgctttttcggtacgccaattgcccaaactgataaacgaaagtgccgaaattggaattaccaaagcgaagggaccaaaaaaaaaaatgcatggcactctcgacgatctcgagccgatcaaattccccccttttttgcgaggagggcacgaaggggaggggaggaccttttgttgttttacgaggcccaattcagtcctgagtcattgacaaatgccaatcgctgaacactaatgaggatgaactgctaaataattttttaggtgccttcagtacgaccatagcattgactttgggtggttggccaccgaaaatggttgggccgttcacatgagcggattccaaaagtttctgtttcagaagatcaaactcaaaaagttccaaggatttgtgagtgttttaattaaataatttctttttcaaagcaaagcaaagcaaataaatttaatttatttttaaattatgttttccttatttaggtgtcctttatttttattgaattatttgtaaaaaagaaaacaaattttaaaaaatatgatgcaatatgcgttttagtacaaaagcgttttgatggcacaaggctatggacgccattccgagacggaggtggaagaaatcgcgaaaaaggacctgatagcactatcaacgtgatcaaataa

SEQ ID NO: 80505 - DNA, 661 bp, Heterodera glycines
atggccgatacggtgctgaacattttgcagaagtacgacggagttcgggtaccgaactatgaaagtgtgtgcgagggactgacaggggacgattatttgctggcaattgttaaggtataatggtgaaacatttaaaactgtttctgtttctccatttatcatattcgttcagttcctcgccagacgtgacaaaatttacaatcggatttacaacgaaatcttcgaaagtgtgagtgaatcgctcaaagttttcactattttcgattcagaaaatggcccttaaagacaaattggcatttgctgccattcacatggacgacgattttctcggcactgccctcgaaaggctcgtcgaacggctcactttggaatttccactgaccactttatttgtcaatggcctcgacgaccaaacggaaagtcatcaattgttacaccggtcagcaaaaacaatcatttgcaaattgaatgcccaatgggttctcctcatttggcattttaagttacctcgacctcaccggtgacctccaaacggtgtctcttcttctcgtcattggcaattgttttcgcggctgcgctgtgtttcgggaagaaacgcccaattcgcccgttggcggcgttaaggcggcggaacttttggagtgcgcaatgtaagcggaga

SEQ ID NO: 80506 - DNA, 2249 bp, Heterodera glycines
atggaccaaaatgatcacaatattgttggtgatgaacaacaacacatttgggttggccgttacaacgaaaaagtgagggcaaaagcgaatttggaaaatgtccttttttgatgccggaaaaattccgtgaatttttaaataaatttagaccggatggttcccagcgaaatgcgtgcgaaaattgactgctacaagcggtggaacaacggatggtaacaacatgctcaattatggcacaattgagctaagcgggacaacgtttaaacaggtgcaagcaaacaatggcattttcaaacttggaatttggcgcaaaattttgttatttcaaacaactgttttttaaattgcattgatcgaatccttctcgatctgttgatcagtcgattatggctcccgtacaacatttatggaattgtttccgggatatctaaagataattggaacggagaaatgcaaatgccggaatttaggaggaaggcaaatgagaaatcgggatcctttttgggccgcctttcccgatcacttgtcttcacatattcttgcccgataacttttccactagtcttttccgatcacttatcccatattctattccgatcaccaatttatccccccccccattgggacagtgctcctccgattcctcggccgatcaccccgccgaggacgaccattcgcgccgcggtcgtcgtccgttcgccttccgcgtcactttggccccgtcccattgggacgtgtgcgactacgttttggcggcgaacagtcgcgaggagatggacgaatgggtgaacgcgtgccaacaagtggcggccgaggcgagcaacaaaatgcgacagttgcgcagtcgcgagaaacagtcgcgcatcgccagcgaactgtccagcctcgtggtagggcaatgacaattttaattttgatcaatcacatatattgaaaacaaaaaatgaccaacattggcagggcaatttcgcataaatgcggactgatcagatagagtttgagctgtgattgtcattttcaagattatcttctgattaagaataaaaagccaccttgacgtgtgacaaagtctctgaacaataaaaaattgatcaataagtcagtttgccattctctgattaaatttaaagctgatcagtcgatcagaagatttagtctgaatttcatcaaaaatggatctttgggtaatcaggcgtgatcggattcgatttttctgatattgagaattttcagctttggtgatcagaatttgttagatgcaaacatttgcttttcggacttcaataagctggtcaaattttgtcctttttaacagatttattgccaagcagttccgttccatgccgatttcgagttgcaagacccgcgcagctcattctacgaaatgtgttcctttaggtgcgtgccatttccgaccaatcttatcaaattttggttaattcaaatgcaaaaattgcatttttggcttttgtctgatctgcaatgatttaaaattagcccttttcgatcatttatccaattgtttagcctaaatttcggccattcgtccatttcagtgagtccaaacatgacaaattggtcgagcgtgggcttcagctgttcaacaagcgtcagctgtcgcgcgtgtacccgcaggcgagtcggttcacctccaccaatttcaacccggtgccaatgtggaacagcgggtgccatatggtggcgctgaacttccaaactggcgacaaatccatgcagctgaacacgggacggttcatggccaacggacggtgggacaacgggcacaaattggaaattagcactatctaatcgggccttaaaaattacaaagaattgaaaaaatcgtctaaaaattttaacagaattaggccgagagtaattttagttacaaaactcgagaatgattttaattagttcgagactgaactcgaacaatctcttatttgtagctgtggctatgtgctgaagccgctttatctgatggacgaaactttttccatcaatgctcgtgatcaccataaccacagccaacaacagcagcaccaccaccagcatcagttgcagcgtccggcgttgtcgagcagcacttttgagaatgtgccgtcgtcgccgtccaacgatggcacggcatttgacaaattgacggaggatcgggacgacgtgccgacgaagctcatcggggacgatggacagaaacaacggcaaaaaatgagcaccggcaatggcactttttccgcagcggcaatgcc

SEQ ID NO: 80507 - DNA, 712 bp, Heterodera glycines
atggggccctgcctggtcgtaggagggggaagggaattgagacagctgttaggcaataggcaacaaattcacagaatggcgagatgggaaaacaagggagggagggatgggactggtgatgcgggcatacggtagcgacagtaggcaaacgacagaccaaatttccttctgccggccaaaagtaaattgtggaaaggaaaagagaaaaaaaagaaaagagagagagagagagagaaaaaaaggaaaaaaaataaaataaaattttaagttaatcgcatatggtgttaatgcgcaaaacattattattcagcattggatcgtctggaattctggaggatcccctgcgcgggatacaactgcacttaaatgtgctttgggattaacgaatgggcgagccctgtaatttgctctgttggcccaacttcctgtgtcgactcatcacgctgggacccttttgtcaccccattaatcgtttcggcaatggccgtgctccttttccttgtcggcattcagtctgtgactttggctgcgcttctcctgcgtcgtcgtcgtcagatgggcacaagcggtttgggcttttgcagtcaatgccgccgattctccgccaattgaaatcagtgaactgttacggcgggggttattggtgttaatgacactctcaggatttgttaaatttttttttttttttacatttgatttttaactgaataaa

SEQ ID NO: 80508 - DNA, 846 bp, Heterodera glycines
  unsure (1)..(846): unsure at all n locations
atgctttttcatttcatgattcttaacacgccttatctcctaatacgtttaattgccggcgacgactacgacgaaggctgcgaacagcgcaactgttgcaactgtgtggcggtaaaaaagtcggtcaatttcccatgcatgtgaattgcctatttcagcaagcaaaaggcgaccagatgtacttgttcgaaatcacggagagcgcgtggctaccccactgcaacggtagcaaagcatactttcgactaaacaattcggctacttacacaacttgttttagcgtgcaaaaagtccatttcgggcagaatggccgcggaattggagtgttccaagttcaactttcatgggaaaacgttccacgtcgaatgctcaaaactcgcgaatgacaaagtgtgattgtcaagatctctattgtgttatttccgtcataataatgtttatgtgcctctctctctctctctctctctctgctgtgttttctttaatacccaagtgctaattattggtccgaaattcttcaatttgtatgcgtttcgtgccaactgtttaattttaacgctgcgtttttgatttaaatttttggcattagtttcaatttttcacttaggtatggttgggtcagtcattaattnaggtaaaccgatcgaaaatttggacaatctaccgtaggtataatggtccaattanaattcacatggaaantagattttttttcgtgcatccattcagcatataaatttttaccatttgaaaagtgcggcccaaaagcaccaaaaagcgctgattaaaagaacattttgtgggtttcactaacaggcaaaaaccattcactaaaatcaaaataaa

SEQ ID NO: 80509 - DNA, 967 bp, Heterodera glycines
atgcatgggggcatcagcaacaaaatgcgaagtttaagcggccttcgttttaatcagaaattaatgtttccccatttgcagttcatcccatccggatttgagccaatgttcaaccaacgactcatcaccgttttctctgcacccgcctacacaggccaaacaaacacgggcgcggtactggaagtgaagacgtcgagccactttaccactcactttttcccgccccaatcccagtgattgattgtactttgttgtattgttgttgttgttgttgtgtttataataaatgctcttttgtgcttcaattgagatggttttgtagggaagagggtggcgagggcggtaaaattttgcgtctgtttggtcggagggttagctctcgaagaactcggtctgcttaattctagtaaattcatgtcaaaattatgatggattttcacttttttaccgttgttcacccactaaaaaaactcatctaatatactgttttgtttataccttttatgtatgtacttgaatatgcataaaattaattgacaacataaaatttgtcgaaaatgttttcatgtgaaagttggatttttgacttgtgtcattcatctcgaacaactattccagctacatacatattgatggaatttatttttgtgaatgaataacagtaaaagtgaaaatccatcaaaaaatttttttgacgttatcacttgatgaaaaatcatagattagatgatttatatgataatctgatgtcagattcgtgatcagcgccatcgataacccccgagcacttcttagaatcgaaaaaacgaccttttttatgggaccaatgatgtgaacgattatgtcaataaaaatatttaaattgaattattttaaagctattttttaattgaatattaataataattttaaaattcgaggttcaacttttcttcaatgttttttaaatgctagcttcgtaccatta

SEQ ID NO: 80510 - DNA, 1373 bp, Heterodera glycines
  unsure (1)..(1373): unsure at all n locations
atgcgttcncaatgtcaaacggacgggccaattagggtttcctccgtttcttctgatggtattgccaatgtgacggaacctatggattcacagcgacataagttgctatttttatggacgactgtcgtctatataagtttttttaagacgccgactttacgaacttttcgcactgattgagaaggaaatggatgcgcttttaatggaaaactgcgcacttcgcgcacaattgggagtacaatcggaggaaaagcctgcctttgaccctccggaaacccctaccagcaagaatgttgcctccgttcaaactgtggaatttgaatcggaacagaagccaagcgggactagcagcatcaaaaaaaattgtaacaatcggtacccaattgtactcaacaatcaatcatttcagcatctcaaagcaaacagcagcgttggaagtcagcattcaaaaacccttcaagcaaattgacgcttaaagtcggcgccaatttcccggaatcaaagcacaaagtggtccaatccttcaaaggccattccgacggagtttggcacataagcacagcccaagttggaaattcaactcatgttattgccagtgcaagtgccggtaaagaatagaattgtgcagcagcttttgagcatgttcataactaattcagaccaaacttccaaaatttggtttgccgaccatggctcccacccattggttagctattctggccacaaaggttccataaattcggtggctattcgtcctgaaacaagccgagtgttttcttccatctatggcaagcatttgacgttgctcacttgtggaggggacagatcggcacacatttggaacgttaacttggatgaacttatggagcggcgaaaagagaaggaaaatggtaaaatttaaggagcattactttatttcctccaaagacgagagggcttaattttttcggctaattgggcgaaagtaaaaaagcatttacaattcagaagaaccgacacagcaaatttctcatcccattacgctgttggatggccattctgacgtcataatggctggggaatggctgatcggcggagatcagatcataacggcatcgtgggatcgaactgctaatttatttgacgcagaaagtgggaaaatcatcaaatgtttatcaggtgaatattatatttaaaaaacaagacgtaaagtacttggttttattttaatgtgaaaattaatgttttctttaaggtcatgatcgagaactgacctcatgttctgctcatccatcacaaaaattggttgcaacggccagcaaagactttactttccgtttgtgggacttccgagacccaatccattcagttgcagtttttcagggccacaatga

SEQ ID NO: 80511 - DNA, 708 bp, Heterodera glycines
atgttcaattacaattgggaggaagtgcctgaacgggttttatggaaacaaatgggcactgaactaattccactcgtaccattgccaaaggccgttttgagaggggcgagaatggcaaagtgagagagaattaaaattaactgccaacagagaccaattccaataaaaaaaatgcaagttttcaagagtaaagacactcccacgtccccaccccaacatcatcaaaatgtacaccgcctttgtcgatcgtatgccaattcttcccgaagcggagaaactttaccccgaggcgttgccaaacgcagccgaaaaccctttgacttatgagttgaaaacgcttcatttggtgatgaaacggtgaaattcgtcattttcagaacaaaataataatacacttttttaagctatcgaatgactttgcatgactatttggaactgaagaacgattacgagaaaagagacccaatggtgggccgacttttgttcggacaattgttggaagctgttgtctttttacacaaaaacaaaatttgtcatcgggtaaagagagagagggataaattagaaggaaattgaaaaaaatatttaggatatgaaatcggacaacatccttttggattttgacagtgaaggtgctttcttgcttgtatttttctccatcaaaagtttcccttttcagctgaagtgccacacctcgtcctcagcgat

SEQ ID NO: 80512 - DNA, 462 bp, Heterodera glycines
atgggaatggacaagcatttgcttttccgattgatgtgctgctgcttcacctgtgccggttggaatgccgaaaccgcaacaaatgtgataaaagccgtcctcgccccgttctcccacattttcgtacatatgcgggttgcggcgccgatggagccaacacccgttgcagagcaagcagcagaagaaggagaggaggatggacaaaaaaatggagaggatgaggccgatgatgaacagggaccagtcgaccctttaggggcgaattggacgaaacttttaccatgccgaaaaacgaactgaaaaccgccgccgggggcgtacacggcagcgaaacgttcctcccttttgtgttggccaaagtcggtgatttggccggacgattccacaacattcacattgtcaggttcacagcagaaataaccctgtggtaaagccaatttccggtggattgaccccaataaa

SEQ ID NO: 80513 - DNA, 711 bp, Heterodera glycines
gctccgatgcgcaagggcatgctgccgaagccttgagggggaaaatcaggtaattaagaggcattcttgtcattttctgttttattggggtcaatccaccggaaattggctttaccacagggttatttctgctgtgaacctgacaatgtgaatgttgtggaatcgtccggccaaatcaccgactttggccaacacaaaagggaggaacgtttcgctgccgtgtacgcccccggcggcggttttcagttcgtttttcggcatggtaaaagtttcgtccaattcgcccctaaagggtcgactggtccctgttcatcatcggcctcatcctctccatttttttgtccatcctcctctccttcttctgctgcttgctctgcaacgggtgttggctccatcggcgccgcaacccgcatatgtacgaaaatgtgggagaacggggcgaggacggcttttatcacatttgttgcggtttcggcattccaaccggcacaggtgaagcagcagcacatcaatcggaaaagcaaatgcttgtccattcccataatttcagtggtgttcagcacccatcccccgcagttctccgacggcgtttatgccccgccttcgtctctgagttcggcctcgcgaagccgagtccgtttcaacgaaggcgccgcgccgaagggagtgctgaaaaacggagactttcagcagcagcagtacccaacgcca

SEQ ID NO: 80514 - DNA, 852 bp, Heterodera glycines
atggcacctccgctggacactgcggctgatcagttgcgcaaactattcatttcgacgcgcactcgcgcagtcagtcaaatcaacgaacagttggccgactttcgtcggcggggccaaccctttggtaagcgattggcagggctttacactattgaatcataaagctgaaattatatacatattttgccattcttttagagttttaatgggttcaatggataaacactccaacatcaaagagttttgacattcatttttttgaatttgcattagtaaatttggcggttctgccaaaactgttcccaatgctttacttttgctgattattttttattttgctttcatttggggtttggcttctcccttctactcccaaatcccttctctttcccagacccggcggatggcgttgacgcggctctgctcgactcgctgacttcgcgcgcggaccgcggtgccgaattgcgcttggccagtcgactgttgttcaaggccctacaaagcttgaccaaatcagcgactaccattggtgaggcattatccataaaatatattgaattgcttttcaaattttcagctggcggaatccccgactttgagaacatcgaccgccgcacactttcactaatcacttccatcgcgacactaattaaggcattttaacactttttgataattaacaaatctttttgattgtcttccacaggtcgttttctgtttgcgcactaccaattcagccctggaggcaagtcacttttttatgagctgatggttatttgggcaattaatttgtgtgtgatcgtggataattaccgttgttaatttcctatccatggcttaatgctcccataa

SEQ ID NO: 80515 - DNA, 914 bp, Heterodera glycines
atggactcgggcatttgtacccaggcaagcagccatagtgccgcaactgcggcggctatggcagcaacgccacccgctgcagcggtggcatcgccggcggcgtcggcgacgacggcaccgccgacgcggtcgcaaagcataaaaaaagtggtcgaatttcttggattttaattcatttttcaatccaatttgaattgttcccaaaaagactgaacatggcagttcgttgaagcggggccccggcggaagtttgggcgcggcggacagcagcggggcaatttcgcaactcgccattccgacggtgggggcgctgaaggccagctcagccggagacatcgcgcaacagcaggtggccattttgaattttgaaatttaatttcaaaaataaaatgaatcgacaaatggcattttgatttgtcttttccaattcacttcttcctttttgctcagtctccccactcttgcttggctggaaccagctcgacctcatgtgttgagctgaacgcggaggcggaggagcgacgcctggtcgagctggtggagaagttcgacatggactggggcagcgatttggaggtgaacagggaaaagcgacgggcgcggggcgtacaatccattaatagaccgggagaactgagctttctttcgtcgtttctccaaactttttactgccaattcaaaaaattattttaatttagattttttaaaattatatttagtccattttaaatttatttattctcttaaatttaatttttcttttccatgcgaaggttgacactgaaattccgagtctcgagtcgctggtcagttgggaaattctcaagcatctgaagccaaaagagaagaagcgccaggaagtggtcaacgaactgtaccaaaccggtaaagagcttcgtattactggcaaatga

SEQ ID NO: 80516 - DNA, 475 bp, Heterodera glycines
atgggaattgacccaaatgatcaacaaaaaagagaaataattaaaaaatttgatgcaattaaagaaaaaattagagaaaagggaaaacttgaaataaaaaataaaaataaaatcgaatgtaaaattggaaaattattaggcacaagtcgccataaaatatacaaatggaaaaaagaattaaatttaaataaaaataaaatgatgaaaaagagtttttatgaacagaaaaagaaagaattcattgaacgaattgatgaatttaagagtttatatagccaaggcaaacagaaagaatttgtgaatgaattgggaattgatgaaaagacatttataaaatggaaaaaggaattaatgccaaaatactataaaaagtatgagaattgatgtatttaaattttaaatattttatgcattaagtaattattccaatgaggacaaattaaaaatgatgaagcaatattccgaaattaaagaa

SEQ ID NO: 80517 - DNA, 49 bp, Heterodera glycines; identical to SEQ ID NO: 51181

SEQ ID NO: 80518 - DNA, 1422 bp, Heterodera glycines
atggacacgacaaacgcgccgactttcacccgtccaacgacgtcaaaagacaaattagtacagtactttgaacggagtttggacaattttctcgacggtcgctaccgtgcaatggagcgaataccgtacctaacggagaaggagaagcaaatgcaacagcagcagaacacaaaaacggatggcatcggaatggcacaagcagcacacaataaaacggtccaattttattgaattcaaagaagcatccgctagctatacaactcaccaaattagctgctgtttcaggaggaggagcacgacgagttcatggaaggctctggcgaggaattagtcgaacttgaagagaattcagtgccgtctttctcctcgtccattagcggcattccaaagcaaattccattcatcccaaaagtccccatggatttcatcgtaccgcaggaagaccaaccaacagaaatagtgtcaaaactgcttgaactgaatgctaaaaaggtggaaaagaaaatcgacggaatgacaaaatccgtgaaaagctttggaaatcgcccaaaagcaaagggcgccgttttgcatgggaaatcattggcggagggcgacggacggatggccaagccgacgaagcagtacttccaagtgggggatgcaagttaagttggaaataatgaagcataaacagtatggagacaagtcaagctatcagcaaggggtggtcagcagtttgttgcagtttatgggcatcaacaacccaaaggcaagctccgaattggatcaggtgcttaccgaatggatcatggaccattcttcacgacatgtcacaaaggtgactttggaaagcctaaataccagcggaagggtcgaatgtccatggatggaagcagtgccattctaaaattatcccctcgctaacggttaagcaagagaagaaatcctacggcgaagagagcacttacacgcgcatacaaaagttcctcaactcgccattggctccgctttgttctgttggggaaacgatggacaacttcgaattggactctctgatgggtcaatggtttgaagtgggccaaagaaatgtcacaccaaattaatcgggcaaaagtgccgttaaggtgatgcacagtccgttgatgtcctcttccatgtgtacaatgttctcctacgaaatgctcagccgttcttcctccaccgaaggcgtcggttccgtctttcaaaccctccaatttacgagtccaaaaggaaatcggacaacgccacgcgacggatttgccaattggcacgaaagcattggcacaatgccaatgccaatgcagcaacagcctctgctgagttcgggctatgcccttatgccacggcccggacaaattgtgttcagacgttcaaacacgccggaggaagtcaatggttgggaaagaagtgcagaataaa

SEQ ID NO: 80519 - DNA, 1252 bp, Heterodera glycines
atgttgcggttggccaacaaaaatgccgagacggagacgacagagaattatgccaagcaaaacgatgacggtggcggcgatggatttgccaacaatgccaaagaaaacggtgccggacaaatggcggcgccaacaatggacaaacaacggcacggacagcagcaacagcggggggctgccgtggacgcgacggcaacgacggatggtggggaggcggaggtgaaggaataatcactcatggaattttaaaatctaaattctccttttaaattttcaaaattggcctactttggttatttgtggggaaaacgaaaaaaaaaaatttttcatccaaaaatatctaaaaaaaggattttccacatcactcgaatatgaatttttaaattctgaataggactcccatgtccacgttttttttcgggcttaatgaaccataatttatctcatttaataattgacatttttccctcaatttttagttgaccaaatgcttcctcaattggctgcgcagtgccgagaacagcaaactgtacaacgaactgttgtcactgaaccctgtgctaattgtgcgttttttcaattttggagtttgcttttttgaggatttctcacccccatttgacttattttcccctattttgtcccttttttaaattaaaattgacctatttttttttttaatttttgaaaagtaccagactgggcagtccccagaaaaatgacatgcttccattttggcttttgaaatcgcatcccatgatcggatttcgaaaatgctacgctctctcattacattacattttacatttgaaaatttattcaacgaattttgcattttgaaaacgttctgactgacccacactttggcattcattactgacaaattcctaatcactggcccctcgaattttagtgtccaataattttgaactttttcgagaccgggctctttcaattgaatctatgtttgttcgggtttcgggattcaaatagccgtgtgtgtgtgtttttctggaatcaactcgatccatgtgtttggccccttttccaggaccgtttgttcgccgaatttggcaccgaaatgaagcgtctgaaggcgtccagggagcgcatggcacaaatgctcgactcgctgggcataacttattgccttcggactgtgcccggcaacaattacgaaacatgacgacgaagggggaggaaaagaagaagcccacacccacccatttttaaatgtattccaacaaataaa

SEQ ID NO: 80520 - DNA, 1236 bp, Heterodera glycines
gtcattggcactcagctaagcgatttcaatcagcatgccctgaagggaatggccgctggcgcatttgcggctgccatttccaaaacaacagtggcaccgatggacagagtcaaattgtgccttcaggcaagaaaaaattgagcaaaaaccgattggaaatgggccgctaaatgcatagcgcaattgcctccgttctttccaattttgatataattaccctaatgaagtcaccatcctcagttaccttaccccatgtcattatccctaattaccccccccccccctcgtctgcttttgcttactctttcgcccattcagttgcaaaatgccgctgttcccaccccccatatgcccgttgttcgcctcccctccgcccattcgctcccttaccgcggcatcgtcgattgtttgcggcgtttgtgcgccgacgaaggcatccgttcgctgtggcgaggaaattcagcagtgttattcgctgctttccgcacaatgcgctcaatttggccttccgcgattggttccgtgtcgcctttttggatggcatcgaatgtcgcaaaaggcccattcgctttgtggcaggcattcatttatttgccttttgtcggcagtcattgactctgccctcaggcaatgtcgctgcgggcggtgcgggtgccgctttgaccctcgtcttctgttacccgttggacctcgcgcgcacccgacttgccgttgacggaggtgtgcaccgcggcttgtttcactgcttttcggtgatacgctcccgcgaaggcactgctgggctttaccgcggctttctcgcttctcttaacttcacctttctctcccgtgccgtttttttcggcattttcgactccattcggctgaccttagcggaggaacggcgacaagcgctgtctttcgcggcaatttggtcattagctcaggtgagacggccttttgggtttgcttttgtggcaccatttgcccattttaattgcccccccccccctccctccacagttttccataattgtgtccagtttggtttgctatccgctggatactgtccgccgtcggttaatgttggaagcgggcagtgaattcaagcagtacagtactcaatggcaatgcttttctaccgtatgccgtactgaaggcgtactgtcactgtacaaaggcgcgctgagcaattcgctgaggtgcacttcaggggcactgattctggccatttattacgaagtgctcaaatacatt

SEQ ID NO: 80521 - DNA, 136 bp, Heterodera glycines
atgagtacagtcccttccacctcatcggtcattggcactcagctaagcgatttcaatcagcatgccctgaagggaatggccgctggcgcatttgcggctgccattttccaaacaacagtggcacccgatggacgga

SEQ ID NO: 80522 - DNA, 710 bp, Heterodera glycines
aaagtgctctgaaacacacaaaattttatttacaggttagtttaggcactcagatgctttcactatcaaaaagggagatgaataaaaatctaaaaatttttaattgctttttaaacgagcgaaaaactttaggcttaactttttttttataaactgatcagaagcgaaccagattttgcgagggcatcaaaaagacaaggaaaagcactgctatgatgctaactccagtaattctgaatttaaaattttttattaatttttaaagcttcactattttatttttttagcaaaattaattcataaatattttttcacaaactgctctgaaacgcaccaaattttatttacaagttattttaggcactcagatgctttcactatcaaaaagggagatgaataaaaatctaaaaatttttaattgctttttaaatatgcgaaaaattttaggcttaactttttttttataaactgatcagaagcgaaccagattttgcgagagcatcaaaaagacaaggaaaagcactgctatgatgctaactccagtaattctgaatttaaaattttttattaatttttaaagcttcactattttatttttttagcaaaattaattcataaatattttttcagaaactgctctgaaacgcaccaaatgttaattaaaagttaaataaggctctctgatgctttttctatcaaaagggagatga

SEQ ID NO: 80523 - DNA, 721 bp, Heterodera glycines
cagagagccttatttaacttttaattaacatttggtgcgtttcagagcagtttctgaaaaaatatttatgaattaattttgctaaaaaaataaaatagtgaagctttaaaaattaataaaaaattttaaattcagaattactggagttagcatcatagcagtgcttttccttgtctttttgatgctctcgcaaaatctggttcgcttctgatcagtttataaaaaaaaagttaagcctaaaatttttcgcatatttaaaaagcaattaaaaatttttagatttttattcatctccctttttgatagtgaaagcatctgagtgcctaaaataacttgtaaataaaatttggtgcgtttcagagcagtttgtgaaaaaatatttatgaattaattttgctaaaaaaataaaatagtgaagctttaaaaattaataaaaaattttaaattcagaattactggagttagcatcatagcagtgcttttccttgtctttttgatgccctcgcaaaatctggttcgcttctgatcagtttataaaaaaaaagttaagcctaaagtttttcgctcgtttaaaaagcaattaaaaatttttagatttttattcatctccctttttgatagtgaaagcatctgagtgcctaaactaacctgtaaataaaattttgtgtgtttcagagcactttctgaaaaaatatttatgaattaattttgcaaaaaacaa

SEQ ID NO: 80524 - DNA, 1564 bp, Heterodera glycines
gtaatttgttgtgcaggcagtgaatgattggggcgaacgaatgcttttcttgcgcgactccaaacattttgttgaccgtccaatgaaaaatgatgccaagaatttggttgaacaattcaaaacagtgttcaatgtggcggaatggaagcaatttatggtgtcgaaaatgaacgaaacccaagtggacaatttgtccaaatttatacggcaaaattttgggacggccgacagcgcattaacggagtgaattttgaattggcaatttaaatttaaaaatattttaataatatttattaaatattgggaatataattttaaaaatgcctcgaatattttttgtaccgaaaaaacccaatttaagagtaaaccgataaataaatgttacaaaattaaggcatttgccggaagattgggtcgaaaatccccaaaatctaaagaacatcaaagacaagaatttgaagcaatgggccattgaattgaacaaaatgtggaaggaattgagcaaaaaaatgccaaacgatgtaaaaaatccaattaattaatgcgcataataaattaaaaatttaaaagatgaacaacaaggacaatcaaaggcattcactgatttatctatccgatccttttttcgtgcccggagggcgatttcgcgagtttcgctattgggattccttttggattgcgcgggggctgctcgcatcaggtggaaagtgatcagaaaaatgaaaatttatttaaaaatctaaattataaattaaacttttttgtaaaatttttatttatatttttgactatttaaaaaattaattttaaattacatattaggaatggaaaaatccgttaaaaatatgtgcaaaaactttgcggaattggtcaaccgttttggttatgtgcccgccggtggacgcatttattacagcaaacgatcgcagccgccattcctcacttagtgtgtctatttttggaccatttatttattacatttttacttaattaaaatttttatttttattagtttggtttacgattatttcggtgccactggggacattgagtttctgaaggaaattatgccaacacttgaaaaggtaagtgtagagcaggggtgggacaactctcgcctctcgtctctcgcctctcgttttttgggacgagaggcgagagttgaaaatacacccctaaagattgaacttttgagcagccagaaaaattttcaaatttacgcgaaaaaaaatcttaaatctctttctttccttccttaatgttttctctatttttggatagctctaattcaaatatggtctgctggctaaaccttctgcctttcattatttttctcttcggttcaattccccaacggtacagaattttttaaataatttctttaaataatttttcaattgaaattttaattaataaaaaatatttcaatttaaaaattattattttttcttttttttaaacagcctaaaactgcaaatttaaccaaaactttgatcattgggggacaagttctgttaatatattacactcaaaattcttggggggggcggcggcgcctatcggc

SEQ ID NO: 80525 - DNA, 743 bp, Heterodera glycines
atggcgatgcgttactgtgagcagttgctgaacggaaatgaccattttaagcgaaaagcaacggacgaactgttggacagccaattgatccggataaagttaactattaaagaactgccggcagaacttggcacattacgtgtgcagttggaggctaaagacctgttggcaatgccgcaaagtttggtatcgctcaagaaacactgtgccaacattgaacatttgttagtgaacgcagcatactgtagcattgaccgtttccaaactgcaagagaccgtctcctttcgtttgctgaacagcttgaaaaggatggactggaaaaaaaggatgagggaatttcaatgattggagaggccacggagaaatttgttgttgagcttaaattggccatttttgaagcagaatttcggcacaaaatagccgcttttgctgacccgtgcatttacggcgaagcatttgtcaaactttcggagcaaattgccaatgaatttgaagacatttgctatatgtgcaaaaaatggaaaaatgcaacaacaaaaatgaatatccaagaacagttgtcgaattttgtcagtttggcacgggatcaatcggtgccgctaaaacaaaaatttgaacaaaaatttgatgaaatttttgagaaaactaaatttgacttagagcaattaaaacgccgatataacacaaaccaaatagcagaaaaaacagaaatggaatcaggtttataaattttaaaattaaa

SEQ ID NO: 80526 - DNA, 1129 bp, Heterodera glycines
atgcctcaagttttcaaaaattggctatttttgggcataatctggcaatctattgtattcaaatattcaatttttttccctgcggcgcctatcggcaccgccggcctccctccttttccctggaccccaaaaagtttttttttcaaaaagtacggagcaaaaaattgttaaaattaataaaggattcggaaataaaaagtttaaacttttttgttcgaataaattgatttaaaaaattatttgaagcaattttgaaaatttatttctgattttcgaccctaaaatctattttttttatttaagttttttttctttaataaaaggattgtccttcaaatttgtgcattaaaaatatttttgtgattatttaattaaattttcgaattactcccgctcccgcccggcactcccgttaaaaatggacgggatttgtacgggagcgggagttttacgggattcccgctcccggaaattattttttaccgggctctaattatgactattttaataagtctcaatctctatcttgaccatataattcgagttagtctttttttacccgtttaaaaatttttcaaaaaacaattcctttttttgaccagaaaataaagttacttaagacagggcaagagaatatgttattttttaatttcgagctctatttaatatcttccaattaattagttaaagaccgggcagaagtaccaacgcaacaaacatttgttgaattggcggaaaatttggcaaatttgaaggaattggcagagaattggcaatctgaaatgagcaacggcgactcaatggtgggctcccggacaattcgacagtgggcactaattagacagtgaatgacaaaatttattattagaaatcgatagacctaagtgtattctaatttgaaacatagcaaaattttttgaaattttgcaggctagtaaagatttctaagggctgtcgaatgatatcaagaatttaaaaatttgctttgctttggggcaaagttatgagcaaatttttgttgaaaatttttcatttgatggttttttataacgctctttttggtggcttttataaatgtctcagcacctttatacacaccgtttcaaaaaacgagagatgaaccaataaa

SEQ ID NO: 80527 - DNA, 797 bp, Heterodera glycines
atggcacggtttttttactgttcggtttttaattctaagctccttttattatttcaagaattaatttatattttaatttttctttttttttaagaaaatgctatgaaatttatcttttttataatctttacatttatttttcaatgttttttatttagaaaattgtgtttcattttgctatcttctcgcgaacatgattatttttataactattttttacctttctttctttaaaatattttgattcaattctctcttgtcaagagcttttaatttttcattcatccagttttattttatgacgaatatactcgatttcggcactcagctggttggacgcattcagcttcgattcacgagccaacatgaacaagattcgggcctcgatttcgttcatctttgccttcagctataaaaatatttctatttgtttcgttttaaataaatgtgtttttttaaaattaaataataatatttttcattatagtattttgaaaactgaattaatttttttttttaaaattgtcttttagttctttgaaattgcaccggagatatcaccccttgcaattgttcaatgcaatataccaaaatgaaaattggcaaaaacaagtacttgccttatatcctgcagaatacacccaataccaataaaatttagtgaatttgttatcccttcactttatctgtataaccactataattaataattttagaaggttacctcatttttttttacttttatttttaatttattttagaattatcgtgttttatccaatgtcattttttatcaa

SEQ ID NO: 80528 - DNA, 1318 bp, Heterodera glycines
atgatttgcgagttttccactcatctcctcactgagcatcaaatctttatcgatgggatggatataatcgtggacttgaaacgttacattgagtattggcgccagcaattcaccaagcgaaacattgcagagattttcccaaaaatttgtcctaagcccgaagatgatgtattcggtaaagtgggtttctactttttgatggacgaaagtgtgaaagaaggtggcgagtggggacttcacagttaaatggtcattgcctttcacagattacggattacgccaacgtttggccatgcgtcgtctcgaggaggctttggcatgccaacagcgcgagagagaagactccgtcttctcaattcaatgcattttctgtcgctacatggcgcgaggaaatcgttctaagatcatccaccatctttataccatccatcatctcaaccttggctcaccggacagtacgttttttccctattctttaactaatttcctacaactttttttttttttttgctcttaagagggtaaaaacccaattcatactaggccaactcgtaccatacatggaaacgggggggggggggtcgccggcgaagggaaaaagagggaaatttctgaaaaattcgcctattttcttaacaaaattgtttaaaattctgaaaatttttccccggcggcgcctacaggcaccgccggcccccttttcttgaaaaaacctcgccgaatctttttgaaatatataaaaatctttcttgaattatgcatgtagaaagagtacctaaagggctatcgaatatactaacgatttacattattttttttgtttagctttaccataatatggtaattctagtaaaaacctttccttgtaaaaagccaactttattcgagaatcataatcaattaaaaaatccccttttgtaccttttccgatataaatcgccactagtgatacttattgttacttttatgaggtttcttgttaagacctcgtcttcgtcactgaatacatcgaacatttgagagagaaacttttgcgaaatgagtgtatttactgcgagaaaacttttgccgaccgaaacgtattaatggaacacatgcgaaagaagaatcaccgagaagtgaacccgaagaataattattacgacaaggcaacattcttttcactttatatggaagacaattgggccttttagttctacatcatcaactacttggaattgggcaagcgttggctggacgttttggctgaggactttgaggacacaatgccaacatttgtcgactctgacgatgaggaggaggaagattcgtggcacga

SEQ ID NO: 80529 - DNA, 1992 bp, Heterodera glycines
atgatgtattcggtaaagtgggtttctactttttgatggacgaaagtgtgaaagaaggtggcgagtggggacttcacagttaaatggtcattgcctttcacagattacggattacgccaacgtttggccatgcgtcgtctcgaggaggctttggcatgccaacagcgcgagagagaagactccgtcttctcaattcaatgcattttctgtcgctacatggcgcgaggaaatcgttctaagatcatccaccatctttataccatccatcatctcaaccttggctcaccggacagtacgttttttcgcctattctttaggtcgtagcgaagggaaaaagagggaaatttctgaaaaatttgcctattttcttaacaaaattcatttaaaattctgaaaatttttccccggcggcgcctatcggcaccgccggcccccacaaaaatattatttttttaaaaattaccccaaaatctcaaaatttggtcattttttagataaaatctgctaacaatagcattaaaattacaaaaaattccccggcggcgcctacaggcaccgccggcccccttttcttgaaaaaacctcgccgcaaaaatctttttgaaatatataaaaatctttcttgaattatgcatgtagaaagagtacctaaagggctatcgaatatactaacgatttacattatttttttttgtttagctttaccataatatggtaattcgagtaaaaacctttccttgtaaaaagccaactttattcgagaatcataatcaattaaaaaatccccttttggaccttttccgatataaatcgccgctagtgatacttattattacttttatgaggtttcttgttaagacctcgtcttcgtcactgaatacatcgaacatttgagagagaaacttttgcgaaatgagtgtatttactgcgagaaaacttttgccgaccgaaacgtattaatggaacacatgcgaaagaagaatcaccgagaagtgaacccgaagaataattattacgacaaggcaacattcttttcactttatatggaagacaattgggccttttagttctacatcatcaactacttggaattgggcaagcgttggctggacgttttggctgaggactttgaggacacaatgccaacatttgtcgactctgacgatgaggaggaggaggattcgtggcacgagtggcaggcattttccgggcgttggcatcatgtttcgcaaatgctcaattcaggaggacaatgcggacgagggggacctttttgcggtgtgtcttttctgccctcacgcacgggagaaactcgaggaaactatcaaacacatgaatgagactcacaaattcgaccttatcggttacatccacgacaattccatggacacatacgaccggatgaaattcgtcaacttcatccgaaaacgagtaactgaatacttaattcagctcgtgttctctcctcgtcacaattttatatgatttagactttcaacactcggactaaagaccaacagacaatggaatccaaatgcgttgaaattcccgacaaagagcaatgggacaatgaggagaatttggtgccgctgtttgggaatgtcggttttggttttctttgggtctctctccttcacatttgttaacttttcataggaccatttgctttggatgttggagagttggcatttggagcaggaaatggagcaaatcggaaaacaaaaggcgactgaatgtgatgaaccgatagagaaggctgtcactgaaagtgttgtcgattcaccaaaaattaacatgggcacattggtcgaggagtcgaagcaaaacgccgtggaaggggtgcaacaaattatactaacaataaaatcctgactttgtttgggtttgattaaccggatttgcgcccttttacatttctttgcttttcaggtgattgccgaagatttgccggatctgacgggcagtgtcttggccaatgccgagctccaacaa

SEQ ID NO: 80530 - DNA, 1836 bp, Heterodera glycines
atgacgacgactcgcgagagttcgacagagatcgctgatcggtaccctttcggctactccaccgaactctcttccaaccacgaatcgtccatttgtacggcaaaacggcttcgacaacgtctgcagaggcaacagtcgggccaatcgggtcattcttttcttttttgggatgaccaaataaagcggattttatgtgaaggacggcgttacaccggcgaaagcagcgaaggatcatctcttgtggtgggaaatggggggggaaggccgagcgaatagcaaagcgacgttttgagggcactccgacggagtcgggccgatgtttcactttcaccgccgcccaacgcattcaccgaaacggagccacaaacagcaccaccacaaccaacaacaacaacagcaccagcatggacgaccagcggaagccgtcgatgaatcaaaatttgtcggaaatgttattggacgtgagtgatcggaaggggccgtaggattgacgtcagccttctcacaattagcgatcctttcgtgtcaattggcccatttaaggccattcacatggaagacgccaatttggtcgaccgtttgctgctgtcccattgcagcaacaaagtgaccaaacactgctcccctcctcaatttctctgatgcctttcaaaggtcctttcctcgtccccctccatcggcagcacaaacactttcaccgatttggcccaacgacggcacggcgccaccggcggaatgggttcgatgcagcaccgacgctccaatgcctcgagcacattgtccacacattcggggggacgctcaaactgtgctgcaatgagcacattgtaagaaagtgaattgtaacggatggaacgaaaaaagcaaaaaaagggacggatttgaattttaagaaattcaaaatgaatgcattttcttcaggcatatggcagtggcacacaaacaacgcgaaattgccgagctgttgctgaagagcggctacgacccgaatttggtggcgttgtgccattgccggggcgcgtgcattaccagcggcaacattcctttgtcatccgttttgccaccaaggcatgccattcactaccaaacgaactttcgcatattaatcttttccctctttaacttcagtcgctcccattcggcggccattaccagcgacatttgctcagtctgttcacatcttcgagtcgtttcaattctcgatcagacccctctggcgattgccgtccgaactcagagtgccgaaatgatgtaccatttgcctaagggctatttaatgagtttgatacttaattgcagaaatttgctggtctcatacggtgcggatgtcaactcagtggacgaggacggcaattcccctttgatgttggctgtccgcgactcgcctttgagttggcactgtcttcacatgttaatcctattcggagcaaagtaataaaatgccgaggaaatagaaaaaagggaccaaattaaggatacaacagaaaaactcacgagggatctgtcctttggatttggctccggaactgcgcaaaatccaagagacgtgtgtggaggccctcttccaaatggcctgctcccggccaaacaatgcctcccaaaacgcatcccccgcggcattacacggcacagaaagtacccagggtcatcaccagcagggctcctcggccacaggtggcaatggcactaacggagcagcagagcgtacggaagaacgcgacgcaaatgggacgaaacaaacggcgggggccgcagcgagtacgcaggagagactgatgcgcaccgcggcgatgatctcagccacgaagcaatcacgaaaagcgcatttggacgcag

SEQ ID NO: 80531 - DNA, 398 bp, Heterodera glycines
atgggtattttttcaaggttactgtattttactcaaagactgagcatcaattttgccaggtgccgaaggcaccgccgggtcccaatcaaaatggctaaaattacccgtttttcccaaggcgccaaaattttggtaattacttttttccctcttcaaaaatgaccaactttattttggcttcataaatgatactaacttcacatattcaaaacaattaactctacaggttcgagctttttacgtttaaaaaagcattttacttgtaattggtctatgaaatccaaaataccaagatttagagcattatttttggcatattgcgaaaatgacagccggggaatttgccaaattgaggtcatgctgaatttctaagtcattgggaaaatatttataataaa

SEQ ID NO: 80532 - DNA, 943 bp, Heterodera glycines
atgctttttgtctcgccaaaggttggttattttgtgctgtccgaaatccatccatggtattttttgccgtttttaatagcattttttgccgtttttaatagcaactcgaagttttagagacggaattcctctgggaaattttggtgtgcaaataccaaatttatttatttttaatgccatgaaaaattgaattttttctattgaaacacattgggttcttttctggcggtgaccaattttatgctgacagtgattttcaacttaaaaattgcctattgaaattcaaggctttctctaaaaaaattttttttttcttggcattcaaaactattttttttgtttccttttcatggttcatcgtttattaaggagtcaacaacaacatcaaaaaccggcacttttggcaatttgttacttggacaaattttccacccaaacattggcgatttggaggcggaaaagggttgcattttggatggagaagagaatgctgatgccgatgccaccaacactgatgaagacaaatgccgtctccgattggccaccgtccgcgcactgttcgccacaattggccaatacgcgcgcaaatacggcaccaccaccaccgacgaaagtgtcgccgcctcaggggaccaaccgacaaacgactacggcacactgtgtaccgcattcaatgcctgttttgggtccgtattcctatcgttgattttttgaaatttattaatttttttttgtgaaaatccctgcttccctaatgcctccaatccgtagaattttgaggaaaatggacaatttgtttttggaaattatgtcccatttttttagactttagaatgcttgaccattgtaaaaaattttccagcaaaactttccataatttgtgtcttttttaaaaaatcattggaaccaccgtttttgtgatagccataccccattaaataaa

SEQ ID NO: 80533 - DNA, 797 bp, Heterodera glycines
  unsure (1)..(797): unsure at all n locations
tcaatccttccgaggttttcttcaaaaagcttagcaattgttgaattgatctaaattaatcagtgccaaagtgagaaggatttggcattgtttcggcaacttttccgccaatttttggaggatccgcacaaagtgaattggcaggaaatacaaccaatggcaaaggaaaagcaaatgccatacgaacatttgccgaaggtggagggatcggaggagagaagggcaattttggaacgaattgcggtgataaaactgaacggaggattgggtaagcgaagggggacaaaaggagaagcgaatgatcggatgaaaagcaaagggcggggaggggggagaatgatcagcagaatgagtaaatggacagagaaaagtgggaaaagtgatcgaaaaagggaaaatcaaaggatgacaaggaagtgttcggacattgatggctttggcaggcactacaatgggctgttccgggcccaaatcgctggtccaactgcgtgacggactcacctttttggacttcgccctgcagcagcaccgcattctgttgaactgcgccgacttgcgctcccccgttccgcttctgttgatgaactctttcaacaccgatgcgcaaaccaaagccttcctctgggcacaaaatgccaattctgtcgctgctgtcaaatgcttttgccagtcgaagtgtccccgaatatttgccgattctcttcgtccggtgcccaactcgtgggatgaccgtgccgaagaggggtcggtcgctctgctcngtgcttttctttgttttgacgatttttggtttttct

SEQ ID NO: 80534 - DNA, 896 bp, Heterodera glycines
atggcaaaattaattgctgttaactgtgcaaaaggaaagttttgtgacgggtattgttatcacaaacacaaaaagacaaaaaataaaatttggtggaagtgtgaactttatcaacacggatgcaaaggttggggttatgagagtaacggtgagtttttcggcactcgaatgcataaccatcctccatgaccaaattctacttcaaattgagggagaacaatagatttgaatatgttaaacatataaatcagattttacattggaatttcaaaaatatcacgtgaaattatttttcctctcagcgtgcgtgattttgggtaactcaaaacttgaaaaaaaagtttgatatttccctactctgagcttttgaatgagcttaatttttgttcataccggttcaatttcagggattgaataaatgacaattaaaaattgcggctaacaggtgcttacctacactttaggtcgttcccaattgatggtccaccagaaagttggcaccgggtgtttggaaatcaggaagtttgggcatcagaaatttaatcaattagtacagctaattagacatagggtaggttaagcgtctacttttttccgccttagaccatggaaacgctggagactgcttggctttcaaatcacaatgccgtcggtcggacatcgtcgtcttccccagccgtcggtgtcagctcaaaaagttgagccattctcgtcaccacatgctaatcactaattttatttctactaattagaaaatttttcacccacaaatggttgacaaatagactgaactgcgttttattttgcagtagtaaggcctaattttgaaaaataacagaaattttttggcagagtaaaaaaatagattaaatgaattgccatttaattgaacaaaa

SEQ ID NO: 80535 - DNA, 1550 bp, Heterodera glycines
atggacttcgaatgggcggaaaaacgcgagactgactttgtcaattttgtcgagcagtgcgttgctgaagttggccgaaaatttgatcaaatttgtcgctggtacatggactcttatttacccgcctttgattatatcgccgacacactgaaaaaggtacaaaaattttttgttttattccttgttttctcgaaatttaaatttgtaatgtataaattttttattattatccctcctcactctccttctgcaaacttcgatcaaataagaatgttttagagttttcaggctaatgaatttggctttttgttcttcgacttcaatttttcaaaagtgacactcgacgacttgctcataagggctggcaacaatttgcgattgcctcgtctgctcattcgccccaccctcaacaaattccgtatcgattgcgtccgaatggtcaaaccgatgtgagcggaaaaagctcaactcatttgcgcatttaccataatattttgctgattctttaagtttgtattttccacgcgaatgggttggacgaagtgatcacgtgacagaaaccctggacattgagcacatcgattacatcagcagtgatcggacatatgccattgcacagacactgaaagcagctgaacaattggcatttcatctgttggcctatgcgtaagttttcagatttattttaaaaatagtttttgttaattaagagaaaagaacagcaacatcgtgacctcgcaagaatgttggctgacctccactaatgagggcaaaaaagtgattcattcggcgcgttcattgccaggcactcggaaaaactcgacttcacgcaatttgctaaatgttgtcacagataatgaacaatccgaagatgaagaagaacgcagcaaaagggaaaaggcggcgatggaattgaaggcattggcggggatagaaacaacaaataatgacaaagaagcaaaaatggaggagcaaagggacgacgaacaaatgcagagaaaggaaacgccatgcaaaggaacggaaaacgaaggcaaaagaccaccgaattgcagtgaggacaaggagaacaacagtccggtgcttttgcttgattttgacgatcgcagcagtgcgccgggggggtcatcttccgaagaacggcggacggaggaaaacgcactgaaaatgaacgccgcaaacggagagaagcaaaaggtgggcacagacttcgtccaaatgtttcttctccttttgttctcccatctcttctctccaccgttcgtcggtctttggggtgtttttgtgcttcgaaaattcctttttgtggcgatggattcaaatgcctttgacattagttttagttagatgtttaagatgacgatgactgactgagctgaataatcgattgttcatcccttttataaatgtgtgaatgtgctttattatagtacccaacaacagttggattgacacgacggattattattattcttctgacacttctgcatttgctaaaaatttatttcttatctttagaaagaactatttttttaaattaaattaataaa

SEQ ID NO: 80536 - DNA, 609 bp, Heterodera glycines
atgaatttcgaattcaatgcatcgaaaggtaaaataaaaataaatgaaatgaaaaaccaataaataattatttaagatatccatgagagattggaagattttttgatttattggaccaaaattttttctaatgagataaatgataaagaatttggaatggaaatggaaatgtacaggataaatgaatttttaaagaaaatatttggggaattatttccccaaatagaggcattaaaagtgagcctaaaaggagaattggatttaaaaggattggtcaaaaaatgtgaaaaactaaaatttgcattggaaaaagcggaagaaaagcaaaaacaaaatgaaattggaaaaatggagatggaaacgaaacaacaaatagaaaaagcaaaggaaatggtcaacaatattttggaaatgttagaggaaaagaaaaattcatttgctgaggaaatggcgaaagaggcgccaaattctgaatgaaatggcatttatttgcggaaagaattgccattggtatcagccggttccgtaccgcgccagttccatccatatcagaaaaatttttccccaaaataagtttaagtatttgccgaaaacaatgcaaaaattaaa

SEQ ID NO: 80537 - DNA, 913 bp, Heterodera glycines
atggccgatattgtggaaataattatggataatcctgaagatagacctttttttacctttaaaattgtaaatgattttcttgaaaaattatttaatttttcaacaaaagaaattttaatggtcgacgaaaacccacaaaaacaaaaacaatttaaatgccgggcaaagaaagtgttattgaaaaatgtcaatttcgaaaaggcaattagtgtaatattaagcagagaaaaagccggccaaataaagcaactaattaactcaattaataatgagcaaaattatgtcaaattagcagcaattaaaaataaagaaatgcacaaaacaatcgaacaaaaaatgaaatgggaaattgacacacttttgttcaatttgcttttttcatttgctgttcgacttgaggcacttgttcatggcaaaaacgaagaaggaataattattgtagaagaattcggggaaaattcaaaggacaaaattcgtgcattttttgctgttttaaaatgctttccaatggccgagtgggaaaacgaattaatgtaaattcaaaaaaattctttgaattaaatttgattttttatgatagagaaaaattttgaaaaaattccaaaaatatttattagtaataatactataattttaaagcatttgtgagcataaaatttttatataaacagccaactacatctcactcatctacgaaaatccgaatccttaggtgtgtaatttcacccccgcacccccgcgggggcggagttcgcagggggcgggggttgcggacagagctggccgtgattgcatttccaatcacggtaatccgtgagccgtgttcacggggcttccaaaaaaatccgcgtcccgttgattttttatttaattttattaacaaaaaactgaatttaatcgctggaaaaataaa

SEQ ID NO: 80538 - DNA, 762 bp, Heterodera glycines
atggaatctttgaaaaaacaactgctcttgcagagagagctgagccggggtgaccaattctatatgaatccgattgacggaaaattggtgtgtcggcacgattatgaggccggaggaaagggtgagtattataatattaaaaaaaaattttggcaatttttccgtaatttttgaaaaatcggataaatttttcaattttttaaattttaataagttactttgtattttgacttttgtgagagcttattcaattcactttcttgtttattcattttgatttatatttgtcagtttccatttggtgccgccaaatttatcaaaaattcctgtgaaagtgccataatttttcaaatttatcaaaaattcctgtgaaagtgccataatttttcaaatttatcaaaaatttgtgcgaaaatactacatttttcaaaattgtcgtaaatttaagcgaaaaggccacagtttttcaaaatgtaccgaaaatttaagcgaaaatgccacaatttttcaaattttcgaaaattcatgcgaaaatgccacaatttttcaaattttcgaaaattcatgcgaaaatgccataattttttttctcgcgtaaatctgtgccaaattttgtgaaatttcgctgcaaatttatctcaaaattttttgtttcatatcataattttacgaaactttgctgcttgttttttcgaaaaattcttggcataattttttgcaaaaaaattggtgccgcttaaaatttaattttttttttttgaa

SEQ ID NO: 80539 - DNA, 2250 bp, Heterodera glycines
gttttttctcaatttaatttttgaatttattttcttttccctaagcgtccaattccgtcccaacatttttccgtccattcgaatggttacggcgccatcgccgccgatgcgacgcggccatcggtcagcggttcgtccaattcgtcgtccgatggctttcattgtcacgcggacggcgaccgacggccaacggacgcgcaaaacggcgcaagtgatcagaggagggcacggacagtgctgtggatgtccgtgggggtgtgctttgtgtttatgatttgcgaagtgatcggcggagtgttggccaattctttggcggtcggttggattcattagtcaaaggttcaattagtgaatacttcagattataacggacgccgcacatttggtaattggcaattagcagtggccatacggaaaatgaaacatttatttgaaagtttttgaaaccatttaaatgctatatttaaatattttaacaaattattctgcttcgtccgataaataaaaacaacacagctgaccgacttggccagcatgctcatttcgctgttttcgctttacattgcctctcggcccgcttcccagcgcatgagtttcgggtggcatcgcgcgggtgcgttaaaagcccccgcccccgctaattaatgctaatgctaatatttcctgcatttcatttaataatgatgcaattccatttcccttttagaggttgtcggcgcttttatttccgttgtgatgatttgggtgctgactggaattttaagtgctttcaattgacaatttggcctttccacgactttccggtcgctttagtgtatttggcgttggagcgaatgatcacttccgactacgacatccaagcggggattatggcgatcactgcagcgatcggagtcggcgcaacttgatgtgtgttttttgggtcgaaatgagaaaaatactcgacacgaatgtttcctatttgagcatgggcctcttactgtaccttggcggacattcgcacagccattcccaccatgggcatggcacacattcgcaacggcaaaccgaccgtacgaactttgcagagcacgagtggggtacggtagacggacggccgggccaaaacggtggcaatcgccagacgcacggcacgcggagacagacgaacatcaacgtcagggcagcatttgtccatgtgctcggtatttgttgagaaaggcaaataaacaaacttcgaattttgaggtgatctgatccaaagtgtcggggttttgttcgccggattgctaatttattggaaagtaatttcgaattttatttggggcaattaactaattaatggtcagccgaattggcacattctcgacccaatttgcacgttgcttttctccgcaattgttctcagcaccaccatttatatcatccgcgatgcgctcgttgtccttttggaaggtccgctttttatatcttcttttatttatttcaacttttttaggtcgtccgtcgaccatcgattttcgccatgtttttggtaatccaaattttttgcttacaattaacacttttaatgagtttcagacgcacttgagcacattgaaggggtaagttactaattgttccttcccctttgacagcaaaattaagcattcgatttttcctaagatttccgcttactcgtggacaaaaaaataataaaataatccacaaaggaagcaaatggataataaataacacaaataaagagaagaacaattaatagaatctcaaaatataaatattatatctatatttttaaaaaaaatgcaattttaagaaatatataaacttcgaatatgcaccaaatatccaataaaaaatttttggaaattataataattaattaacaaataattggttttcgcacttttttcggtcagaatagaccgatcctttcattaatcgttcaggtcaaaaaagtgcatgaccttcgaatttgggctctcactatggacaaaggttgtttttttgtgaaaaaagaaatttttaaattttaattaaattatttttcttatttttacataaataaatgtgaaaatgacttgaatcgtttctttggcagttgcaatttcggtccatttggaggtcgaatcggctgcggactcccaacaaattctgagggccaccactttgatgcttcgacgcgacttcaacgtgcacgagtcgaccattcaaattgagggctatcagcccgaaacggccaattgtggccaatgtgtggtgccgacaaag

SEQ ID NO: 80540 - DNA, 481 bp, Heterodera glycines
atgtcatctatattgacgctgttgttatcattgtctttgttgttgtttttgctagttttagctctatcatttgggcttttcgttcttgaaaatcggctgaacgacggcgatgaatccgttttttctattgttttagcggaattttgccgatttgattgttttttgttttttggtccgtctaatgatgatggtgatgaagaagatgatgatgataatgatggtgatgaagatgatgatgatgatggtggtaatgataaagcttttttggcaatttttgatacaaaattgggttttcccatattatcgaagtaaatggtcgggtcatttattggcatatcatttggcggcaaaggtcggtgagacttaaaatgcaaaatgtggaaagtgatagtgaacatcagatttatttaatataggcaactacaattttatcaaaattttaagcaaagtgtctatcctatattaattttacaaaaataaa

SEQ ID NO: 80541 - DNA, 1271 bp, Heterodera glycines
atgaaagaaatcacagaaaaatataaaactgtccaattatcgggcaatgaaactgataataatgatgtttggctaaacgaagacgagttggccaaatattcagaagtatggtaatgagaaaggaggaaacattgagcaaaaagaaaaagaacggaattgaaaatggaaagaaaaagaaagttgcaaaaaaaaaaccgtatttactgaattcgaacccccgggggttcatttttcaacccccctaaaaggggggttataattcagggggaagagggtttcaaattcagtaaatacggtatttaaaattgcattcccatttattataaacagagcaaataatgcctaatcaatcagaggtggagcgcgactaagacccgcgaccgcggcatttttcccaaaccagcgatttgcaatcgcgacaatttaaagtcgcgatccgtgaccgcggtattttgaatccgcgagcgcggcacttttgtccgcgctccaccccggtgtctgcaattcatcacggcggggctgggcggaaatccactgttttacctacatattcactgaaacggacagaaggaaaaaatggcaaaatttaacagaaaacggcggagttccgcgcagccatctgatcagtgatcacattgttattctgtacctcttttctcaaacattttgtgataagtgattgtgtgggattgtgagattttttgaaaattttgaaaaattcgcacttaaataaaaattctccaaaaaatataaccaattttatcggacatttttgctaaaaataagataaaaaggagaaaagtaagaatagaattccaaaaatttatttctgagataaattttttaattttttacccaattaatttttcgtcgcgtgtctctttttgaaatcgtttgagtggagggcggaggaccgccgaaaaatatttaaaattgtctaaatcagcaaaagaaagttaacaaatttttgaaattttagatgggaatagcgatgaacacttatgactatcgaatgatatcaaggattaatttttttgttttgatggttttttaaataaacccattatgattagggatgcaatttatagtttttcactatttttttcctgagctccccgaggcctgaaatgcacgaaaaacgtgtttttttcgactgttgttaagctacttttcgagttattagcaactattttctagttttttttatttttagcaactaaaaaactataaaatttttgaaaaaaactattttcaactatttttgcttgtga

SEQ ID NO: 80542 - DNA, 982 bp, Heterodera glycines
atgttttgcttgctccatttcactcttttcactgcgctttatgtcggtgcattaggaggaatgtgttcatcaaaaaaggaaaaggtgcatgaccccttaccaagatacatgcaaccaacgtactcgtttagccaaagtaattaggggaacatttgataaataaatttaaaataaataccaataaattacctgaaatccgcatgtgaactgggattgcaagtgttttcattagaattgtcatgaatttttaattttttttaattttgagggtttggtaatttagggtatttttttttttgaaaatttgaacgtattaattgggattaagggataataggtgtcgataattgtgtgaaaatccccaaaaaaggcaaattaagcaattttcaaattttctgagagctttatcattattcagaatccaatgccgccaaaagttatcagagtacgcctgagcatgggtacaaaacgcctaatcaccccagggaaaatttggcaaaattacgacggacggttgcgcgaaataacacaattccaatgagtggtgcaaaacgcggcccattagcggcatcatcaagcgctgggagctatgcaaattcaccgctaattacccatcaatcgcaacaaaaaaacaaatatttacaacagcgagcatctgatgcatcaccggctgatcgaatttatttgtaggcaaaaaaccaagggcatagcttagccagacacttggcttcgggaggggaggctaatccccgcccgagattgttctttggccttatattttttagactcgattttttaaaaattttttttgtatggtaggatacagtagatctagatccgaaatgcgcctgcctggaaaattttggaattttgccgattttttaactgattttcaccaaaattgcgttttttatgttaagttttaaattataatgaaaactcgcaacaaaactttgtatttttcaaaaattatttattttca

SEQ ID NO: 80543 - DNA, 2378 bp, Heterodera glycines
atgggaaaaaggccgcttcaacaacgccggcagcacgaaatgaaccggtccaaaagcaccagaggcatgttacagttggaaccgacatcaccgcggtaccaacagctgctaacaccccaacagacaccacaacaccgtgccatgattaaggtcggttggatgggtgtggagaaggaatggaaaattatagtgatgctcgaaagtctcatttctcgagaaaagtctcgggttttttagtctctgactcgagtctcggcttttcgtctcggtcttcgagactatacgagacttgagaatgagaattttttattcccctaatgattggctttcttgatgctgacagggattgattttaataaatgaagcttgatcaccagggatgggagttatatatgctaaattaaaaaatcctcaaaatgtgtgctaaaaccccaaaaagagccaaaataaatgggacgaaacaaaaatgctttaattggctttaatatttttatgcttataattcgtcaaaattttttttaattagaaaaaatatttaaaggtataaattaatttatatttaaaaccatacaaataccaatccttactgatcattaaatatggtggcgggtgttttaagctaaaacagtcggtttaattttcaggttttcgattgagtaagtttctttggttcctggcttttcgttgaatatattaatggaaaattattttgtcctgtaaattgagcattattaataatgcttcctagacgcatttcgatgaattaaaaaataataatttataataattaattacccttttaatttggtctatctaattaatgtcatagaaacgatttgaaactccgccaccccaattgccatcgccggaagttgtgttcaaacaacggaacaatcagctgaggattgaaggaggacaacaccagcagcagccgcagtcgaaaaggacgctcacacgagtgaattccatgggcagaacgcaatcgtatgccaacgaagtaagggaaaagccgccgaaaaactaagccttcaaggcagaaggaatctcgacgaaccattaaatggtcgagagtcagtctgagcctgtggtataatgtaaataggcttgaattagttctaaattttctatgtaagcttgcaaaatttaaaaaatttgcatctacttaaatcaatttttagagatttgactggtcacaggttgtttgatctgctagatgaaatttgaaattttataggcgaataaagaaaacagagctaaaaaaacttattttttgctcaaaattttgttgggttaagttttgaattgaaaatgcacaaccactaaagacgaaagaattttttaaaaagacttggtttgaatctttcatgttggtcagatagctaaaattatttttatattaattttcttatctaataaatcattttaagatttccaaaaatatgcggagtattgaaaaattcttgtaaatttaaaaacttttataaacaaaatttagctgattacctatttttacttatggaaagtgcctggattttatttgctaaaaacccaaatatatactacatatatatatatatgtgccaaaaacaccaaaaatatttgctaaaatcctaaaaaggccaaatatttgccaaaaattgaaataaaactgctcaagaaataaatgaaattatttaaaaaatatcattgttatccatttcactagcacaatgctaatcaaaatcatttcaatgcttttaggcgataattcatgaaattttaaatccaatgacgatcaaagcagaattaaattgggtctttaggcatctctcatctctgtaagaataaaaattaaaaaccaaatttgactcaattgtacatttatttttttaactgggccctgtttatggaataacctgaaattaaaactaaatgaaccataaaaaagtagcccgagggttgcttgtagtaataatttttaaaattttcctgataaaaattttcattatggaatttctatttttatgggacgaatgccgcaaagaactgggacggaactggcgtgatggaactgaccctttttcatttatcagatgaaggtgaaacatcgccaacgtgctttgcccttgccttcgtcactgtcggttgttggtgcccaaattggggaccgaatgaaacagcaacaacaaaagcttcaacaaaatcgccaaattgcgcaactccaaattgactcaccgcgcggaatgtttgatgacaaacgcattttggacgagaaaacgaccgaagaaaaggaggaactaatggactcactttgggaggagtttaatgacgaaaaactcattagccaaatggacaaccgcccaaaagctggcaacatgaagaagtcgggctcatggtga

SEQ ID NO: 80544 - DNA, 575 bp, Heterodera glycines
caattgagtcaaatttggtttttaatttttattcttacagagatgagagatgcctaaagacccaatttaattctgctttgatcgtcattggatttaaaatttcatgaattatcgcctaaaagcattgaaatgattttgattagcattgtgctagtgaaatggataacaatgatattttttaaataatttcatttatttcttgagcagttttatttcaatttttggcaaatatttggcctttttaggattttagcaaatatttttggtgtttttggcacatatatatatatatgtagtatatatttgggtttttagcaaataaaatccaggcactttccataagtaaaaataggtaatcagctaaattttgtttataaaagtttttaaatttacaagaatttttcaatactccgcatatttttggaaatcttaaaatgatttattagataagaaaattaatataaaaataattttagctatctgaccaacatgaaagattcaaaccaagtctttttaaaaaattctttcgtctttagtggttgtgcattttcaattcaaaacttaacccaacaaaa

SEQ ID NO: 80545 - DNA, 136 bp, Heterodera glycines
gaccaattgctgtcggagacggatgtccacctggacactctgttggcaccgccgctggagcgtggcctcttttacatgtcaaaatttacgttggcgcgaaagcgatggaaacaatcgccggcggagaatgaaaaag

SEQ ID NO: 80546 - DNA, 1706 bp, Heterodera glycines; identical to SEQ ID NO: 16183
  unsure (1)..(1706): unsure at all n locations

SEQ ID NO: 80547 - DNA, 861 bp, Heterodera glycines
cacgtggttccgtgccagttgcttcatccgctttattcctggatggcctttgtggagcattcgtaggactttcgctcgaaattttggcgggatgacgactcgttctccgtacatcagacattcttttgtgatggagaggtcatcttttcgacgaaagaacaattttatttcttccgtttccgaagcaattgctttatcattgggtcatccatctttgacaaatttcttaacctttttgatggtttcgtcttcgttccctgctgaaattatgtccttcgatgagagtgacattgtttccaaagtgttgatgaagaaattttcggcttccttctcaaattccatggacgcgatgactcggtcttcttcaggactggtgctttttgcaatcagccttgagagcgcatccgcttgtccaaattctgtggtgttcacatactcaatctcgaagtcatacgccaacagcataagtgaccatcgtaaaagacggttagcactcatttggcggattccctttttgttgccgaaaatggcgaggagtggcttgtgatcagtttgaagaacaaattttcttccgtagatcattttgtgaaattttcgcactgcgaaaatcaaagccaatccctctttttcaatttgggaataatttctttcagcgggtgtcaaagatgatgaggcgtgttcgatggccttaattgctccgtttggaaatcggtgggaaatgactgcgccaattccatgttctgaggcgtcagcggccacgatgatttccaattttgggtcatagtgcgtcaggagcaaatccgaggacaaaatttccttgattttaatgaatgctccttggcattctttgccccagtccca

SEQ ID NO: 80548 - DNA, 2819 bp, Heterodera glycines
  unsure (1)..(2819): unsure at all n locations
cctcacactcacggtaagttgtcgagaaagagctcgtttggggggagagcctaggaatcatcacaaaaggtgagcacttggattgggcggcaccgattctaatcgtgaagaatgccgacggaacagcccgtatgtgcatcgactactcgacgggcctcaacaacgctctattggaccatcagcacccacttccgttgccaaatgacatttttgcgacgttgaatggtggaaaagtcttctctcaggtggacttaaaagatgcctacctgcaaattgagctgactgctgaagcgaaaaagctatgcacggtcgcaacccaccgtggctactacaaattcaacagattgccattcggtgtgaagacggcaccaggaatttttcaatccgttatggataagctcctggccggactcgagtttgcgacggcgtaccttgatgacatcataattgtcagcaaatcgaaagaagagcactttcaaaatctggaaagtgttcgaacgaatccaaagctggggatttcgggtcaaaatggacaaatgttcgtttttccaagaacaaatcaagtatcttggccaaatcatcgactaagatggaagacgacccgaccaaggcaaaatcgcggcaataacgaatatgccagcaccaaaagacgtcccgtcacttcgcacgttccttggaatggtaaaccattaccaacaatttgtgaagaaatgcgattcatccgataaccaatggatgaactactgaagaaggacaaagactgggactggggcaaagaatgccaaggagcattcattaaaatcaaggaaattttgtcctcggatttgctcctgacgcactatgacccaaaattggaaatcatcgtggccgctgacgcctcagaacatggaattggcgcagtcatttcccaccgatttccaaacggagcaattaaggccatcgaacacgcctcatcatctttgacacccgctgaaagaaattattcccaaattgaaaaagagggattggctttgattttcgcagtgcgaaaatttcacaaaatgatctacggaagaaaatttgttcttcaaactgatcacaagccactcctcgccattttcggcaacaaaaagggaatccgccaaatgagtgctaaccgtcttttacgatggtcacttatgctgttggcgtatgacttcgagattgagtatgtgaacaccacagaatttggacaagcggatgcgctctcaaggctgattgcaaaaagcaccagtcctgaagaagaccgagtcatcgcgtccatggaatttgagaaggaagccgaaaatttcttcatcaacactttggaaacaatgtcactctcatcgaaggacataatttcagcagggaacgaagacgaaaccatcaaaaaggttaagaaatttgtcaaagatggatgacccaatgataaagcaattgcttcggaaacggaagaaataaaattgttctttcgtcgaaaagatgacctctccatcacaaaagaatgtctgatgtacggagaacgagtcgtcatcccgccaaaatttcgagcgaaagtcctacgaatgctccacaaaggccatccaggaataaagcggatgaagcaactggcacggaaccacgtgtattggccaaaactggacgcggaaatcgaggatttcgtcagaaattgtgagccttgccagctcgcggccaaatcgtccatcaaagcggagctgcattcatggccgaaggcgagcaaaccatggcaacggattcacatattagatttgttgcgcccgccgcagtttcagccaatggagcgtgatgaactgatggagcggcgtttcaacaaaagatttggcgccaaaccaagagagtttggccaaggcgacaaaatcttcgcccgtcaccgaatttcgcagaattggcgtccaggaaacgtcgtcaaaaagaccggcgtaatttacgacgttaaattcatggatggcacgaccaatcggtttcacgccaatcaaatacgcccacggcaaattgaggacaaaacgatggaccaattgaacattttcaatgatgtcttcggccttccaccgcaggtaagagccgaaccggaagatgtacagcctcaagacgaagccgttcgaagtgaagccgatgaggatgaaatcggccgggcagtcgaagaacagaatgatggacggatcgaacaggaggaacagccgaatgaggaaaggccgatcactccccgagtataccctcgacggaatcgacgaccaccggaccgctacagccctcattaagcggaagcggcacttcttaaaaggggaggtgttaggggcagcgcccttcggctttcgagtgtggtcaacataacgccacacgcaatgccctttgacccaatcgatattcccttcccctctgttcgtttgttatttaaattcaccctttccctcattcatgttcactcttccctattcagttcactttttgtgcaattgacattattgttcttccccaatttctcttcatttattttcttctaaataaattgtattgtctgcacccaaaataaatatttatatttgttggacactaaacattggcttagcacccattgtgtggaccgaacagtgtaaaaacttttcaatcggagaagtttgggtaaatataaatttagaaattttttaatttttcgttttacgagtgtgacgtgaaagaggaactgaagaaaaataaggagatgaaaaagttttttgncacgtgagccgggcccgggnccgntcnntccgagggatgctccctagaaagggagaacgatgcctttttgtttgtacgcaaaggct

SEQ ID NO: 80549 - DNA, 236 bp, Heterodera glycines
atgttaaaatttggaaaagtacagtggaaaagaaattttggggtaaagatcaaaaaaatacttcggattctcctctgattttttcagcttaagcgattttttctcgccatacacgtcctcgtatttcatcattctccatgaattctgtatgatcagtagaaattgagtttgatctgacccctgagttagcaaatttagttaaaattttcattgtaaaatattaatatcaacgtaaa

SEQ ID NO: 80550 - DNA, 1141 bp, Heterodera glycines
atgaactgcacatcactctgtcacggctgccgagaggtgggcgtcgactacccctgcgaagcccaacaaggatacttcaaaaaatgtttgcattgtaacaacaccttctacaacaaagactgctatgaacgccacctacacaaggatttatgcactaaatttcaacgatgcgaagagtgtggggtagtttacaacataaaagttcatgggagtgttgggcataaatgcggagaaaaattttgtcgtctgtgtaaacagtttcacatcaaagaaaacgaccaaatgaatgcttgcatgagctgtttcattcaacctatgaagcaacaacgaattaagccgtatagaatcatagcatacgactttgaggcgacacaggacaagaaggtggagaaccgtttcgaacacgaggtaaactttgcagcggctaccatcatctgcaccgactgcattatcaacggcgactggaacaaatcacttcagggaaaaaactgccaaatttgcggtcctcaccgctcaattaccttttcaccatttgactacacggagacaacagttgaccaaaaaatcgtcacgcaagaaccgctacgcaaattcgttgaatggctcctttttgaccacaacaaaaagtttccaacagttgcctttgcacactttggtggccgttatgacataacgttatttatcatggaaattattaaccaaggtaatgaattcaattttaaacatttttaaatatttcttaaggaatacacacaccacaaataatcaaacaaggaaatcgtatctatgagctcaaaatcaacgacaatggacactgccccctcacaatcctacgcgacagctacaatctaatgcccatcaaattatcaggactcatcaaatcgtttgggcttaaaattcaagtgaaaaaataatactaatagtaaatacaatttaatttaaaataatttttctgttttccaaaaaaatttttttgactattcttgttttttattgtcgatttttctgggagtaatctacaattttatgtgatcttattagtttttttaaaagatttattaattcttaggactaaaaaaaacatataagaattagagaaaacatgtaatttgtgagagaaaaaattaacactatttctaaa

SEQ ID NO: 80551 - DNA, 1035 bp, Heterodera glycines
atgaccatagccagcgcctgtgtcaaaaattatgcactcaaccatttgaaaccgaactctcttgccatcgtcccggaaaaaggttacactcctcaacaaaaccaaagtgcactgtccatcaaatttcttgactggtactcgcacatcaataacgtcaacattcaaactgcacactcccgttacggtgaatatgtgtttaagcgtgaagggcaggtataccaagtggacggctacatcaaaggcacaaatgggaagcgggacaaaataatagaagtgaatgggtgtctgtggcacggctgcgaggagtgtttttgtaatattgacgaagaaacaaaaatgccaaacggaaagacgctgcgggagattagggaaagggaagagaagaaacatgaaatattaagcaggtacgtcgacttggaggttgtttgggagcacgagatcaaccagaagctgaagaagaacaagcagatgagggagttttttgataactggagggaccgctcgccaatcaaaatcagagacgcatttcatggaggacggactggaccgatgaagctactccacacagctaagcctggccaaaaaatcagctacaaggacttcacaagtctctacccgtggaccaactttacgacggactacccacttggtcacccaaaaatcatcagtgttccaccaaatgagcagacggttaactggcgcaccccaacagacaacccctacaaaggtctactcaaagtgctgcttctacctccaaacaacaacatcagcgtcaatgttatgcctgtaaaaataaatgatcgccttctttttccaacttgtgaaaaatgcgccaaatattttactaaaaaacaccctaacggcctcaaagacaacgactattcctgtccccacttcaaccctaacgaccgcgccttcgtgtccacttgcacccatcttgagttaaacgcagcattggaggccggctacacagtccgcaaagtcttccacgtcctccaatacgaccaatggagcgacaacgttttcaagtcgtac

SEQ ID NO: 80552 - DNA, 506 bp, Heterodera glycines
atgccttggaaaggaagaaggagttagtgggatttcaatgttgatgaagctttttcttctctgctggtccaccactgtgtttgtgcttctatccgaatgcaaataattcctcacaaaaaaatcttttattttcagcttgggtccctgaaaagttaaattttaaacaaattattttaaactcggattttggcattccattcattttttgcattttaaatttcaattaatcatttttactgattcaccaaagtccggcgattgtccgcagcagcgggtgccctttggccccaactttgtgccaattgcatatggtaaatttgcgcattgttcgacactaccaaattttgtcctaatgcgtttctgatttgtattccgtggcgctcatttgctaccgtaatgttcgggtgtactgtggccactgaactcggagagccgaaaacaaatttcctgcagaacaaaattgatacagtaaaatagccaaaaaagtctgtttcaattcagacaaa

SEQ ID NO: 80553 - DNA, 600 bp, Heterodera glycines
atggtaagtaattatatattatttaaaacgatttacaaaatgttccacaggcattattgaaacagtgccccaatttgctgtgctggaagtgattaacattatcagttggatggtaatttttatcccaaattttagagcaatttttaatcaagaaaaaatgtttttttccctttaaatagacagagtaaaaaattatatcacttgaaaaaattttcgaggaaaggagtgtctttccgaatatgaaattttgtttagaaaaaggcataatttaaaattgtaattattggattgtatactgtataataaatatgttttatatttaaggtattcttgcgactgtacttttacaatcgcaaaaaatacaaaacgatgcgtgcgatcagtttggatgaaagatatcaagtaaaattggaaaattaaagccaaatatatcaaaataatagcaaattttgagcatttttaaatatttcatattatataaagaaataattaaaataaggaaaagatgaaaagcaattcaagaacatttatagcaaaatgaacgaatgggcaaaataattgtatgaattaaaaaaatgaaaatgttcgaaagccaataaa

SEQ ID NO: 80554 - DNA, 412 bp, Heterodera glycines
atgggcaacataatccaaccgatggaacacacggccaaaaattgcagcgacgcgtacgaaatggactcgactcggctcggcctttgcatattcgaaatgttcgtcaacgtttgcgtgatcggcgcctcggcaccgtttgccaaaatggtctccgccatcacttcgttcaccggcactatgaaagtgcttttcctcaacatgcttttcgccgcctttggcatcgccgccacgcggtcggacatttgaatttgaatttaaattaagttttgaaatatttaggcttttcgtgctcatcccccagtacatttccatcaattcgctttacagcgccgcttttgtggcgcccgtccaaattttccacgatgtcagcataaacgtgtgcgtgaaagcattgcttaattgtgtaatttaa

SEQ ID NO: 80555 - DNA, 102 bp, Heterodera glycines
atgatttgtatattgacaaagctaaaaatatttttacaaagtaaagaaaatgccattatccaatggattggctattttaaatgtgcgcaagcaatgccaatg

SEQ ID NO: 80556 - DNA, 102 bp, Heterodera glycines
atggtctcacacgcagtaaatggtaaaaaaaggcaaatgaaaattgagtcaaaatgttcgtccaccctcggaaacactggcgaatcacagagccaacacaac

SEQ ID NO: 80557 - DNA, 137 bp, Heterodera glycines
atgtgggatgagcatgacgcgtccaacaaaggtcgaccatcattatgccatcacatttggaaggcgggaaagaatggtcaacaaatggcaccgtttcggcctgtctattggtcgtcaacttacgttgtgttggctct

SEQ ID NO: 80558 - DNA, 84 bp, Heterodera glycines
atggcaatgattggactaatccctcgccaatgtaaagaaatgaatacggagccaacgagctcaattgttccggtgtatctgaag

SEQ ID NO: 80559 - DNA, 1586 bp, Heterodera glycines
atggttcataaattcattattgttttggcagttctatttttctactggtctacagcatcagccactgaatatcatcgtgctgtattcgaagggtgccattatggtaatgacagccttgccaagtttcgccatgtgaatgcacgaaactcacccgtaagtagaccatcagcagctgccgctttaagcgccttgtcgaaaaaggaaaggcatacaaatacgctttagtttattagctatttcaaattaaaaacaattgagaataattttaagcaaaattttaaaagaacgcattttttgattttttttatattttaaaaagatttttatatttacattaaaaaataattaaaattaatttttgaaatatttttgcctacttttcgctattttctttccgaattgaaaatttcggccaggtcccggcatttctggtccatgacaatttcggtccataaatttcacaaaaacaagaattaaaaattttatttggaagaataagagtaatcgcatgctgttgtttgaatgcttgagaataaaaagggttctactttaacgagggctaggatttttatttttaattacaaaaaacgccaattatgcatttaaatgtgcgaaaaaccccccaaaatatatcctataaaccattaaaaaaatgtcacaaaatctgaaaaagtaatgaattagtttctttcttaattttcagtttattaaaaaatccacatggttggtaagtgcatcgggccctacaaatctttggcgtggtacacaaataaaatttcctgaaaaataaatacaataaattgtatgaggtagaaaatgctaacaagatgtcgtgatcaggacccccaaaaaccgccgtgtgttgcaaaatcgctcaaaagcagttaaaaattttgcaaaaattttccaaaaagagcatttcgaatttgaaaaacagagttgaaaataaagtccatctatgttaggtcaataccactaaattaagctcttcttttgggtgtgggagttgaaaaaataaaagcgatactaatacttaactcacttgccgaagctggtcttgccaatctggcaaaactatggaaaatcacaaccataaactcccagctgtaaaaaattgcttaaaaaaatttattattaaaccaaaaaatacgatagttgacaagttttccctctacccagttaattttattaaatattttaaagttcgtgtcagcaatgatgcaatggaactccattgctgtggaagaacaacggcctagtttccatgagactggccatgctgtcgcgtgttggttagatcgtcattgtaccaaaattgtcattgtaagaaaatttaatttttaaattgtttttgtttaactcagatgaccatcgaaccagccgagggttcgcaaggtgaaacgcggatcaattatcgcaagctgtacaccaaaaatgaattaacggcttacatgaaatattttcttggtaattttaaatcaatctttttgtttttgtatagaaacctttaagggtcaacaatcgccgaaactctcatcttcaacaacctgaatcggaacggagcattctctgacttagtcgctgcg

SEQ ID NO: 80560 - DNA, 253 bp, Heterodera glycines
tcagggatgggccaaattgaaaaataaaaagcgaaatgcgaaaagcgaaatttgcgaaactgaaaaatgcgaaatgaaaaaaaaagcgaaatgcgaaaagccaaaatatgcgaaaatgcgaaaagcgaaatgcgaaaagcgaaattttttctacaactttttaatagttaaaatcataaagcaaaaatcattatttaaaattttattccaaatttaaaaatcaataaaacgcttttttgaggcgcgctttttc

SEQ ID NO: 80561 - DNA, 522 bp, Heterodera glycines
atggttgtgattttccatagttttgccagattggcaagaccagcttcggcaagtgagttaagtattagtatcgcttttattttttcaactcccacacccaaaagaagagcttaatttagtggtattgacctaacatagatggactttattttcaactctgtttttcaaattcgaaatgctctttttggaaaatttttgcaaaatttttaactgcttttgagcgattttgcaacacacggcggtttttgggggtcctgatcacgacatcttgttagcattttctacctcatacaatttattgtatttatttttcaggaaattttatttgtgtaccacgccaaagatttgtagggcccgatgcacttaccaaccatgtggattttttaataaactgaaaattaagaaagaaactaattcattactttttcagattttgtgacatttttttaatggtttataggatatattttggggggtttttcgcacatttaaatgcataattggcgttttttgtaattaaaa

SEQ ID NO: 80562 - DNA, 691 bp, Heterodera glycines
aaaccccaaaaaaggaaaagcaccgtttttatgcccgattatataataaatttttgttacaaaataatcccattggaaaatggaggacaaaaattacattggacaaatatttgtacagcgaatgggcagaaaattattttaacaatgaactcaaaaaatcagatgaagctggtaagaaaaaccgaaaaaaaatttattatttttaaaatggcgaaaaataataaataaataaaaatatatttaaaaaagaaaataaataatttgtcacgaaataattaaagaccaaacaaacaaagtgagaaaaaggcaaattattgatgagctgaattcgatttggaaatgctttgaaaaatacttttggcttaatgaacgaaaaattcgtgaaaattttgaccaatttatgcgaaaaaatcgaggaaaattttccaaaatgaaagagccaattcaaatttgtatagaattcagtgaaatagagtcggtaagaatgcttaaaccattaaaaaatttcaacaaaatgccagaaatgtaaattattttatagtcacaaaaacataatcctgtctttagatttattaaaagcagggcggtcaagtttttattttcaaaataaggacagatgaggctaaaactaagattcggaccccaaaaataagattttttctaaaactgatagtagcgcgaaggaaacgca

SEQ ID NO: 80563 - DNA, 971 bp, Heterodera glycines
atgaacagcgtgttgggcaaaattattcggatggaatctgtcttaatcgcctacttttcaaaacctgacaaatgtccggcacttctttacgacttttttttcgttttttctgaacaatcatttgcgatcattcattttttacaccacgtgctaggcctatttaacaagacaattgacttttttcaggttgttttactaattttaaatgaaaattctgttcataaatttagaaagaaaaagccattttgcccgaacttttgctggaaatggacaaatttagagcgaaaattgagcgacgaaaacaagaacggttttatggtgccgatttggcaatggaaaaagtcggggagtgcacacgcgaagcgttggaggaacaatttcaagtaaaaattaatcggttttttattaaatttccaatttttccagtctttttacacctcggttttggcatatttggacaaatggcatcgcattgaccgatttccggaaaagttgcaatgggttgcgctggcatcccgcaaaattccccacgacgatgcattggctctggctcgacaaattgcgcccgagttaacaaatgatttgtttgacgatgttagcgaagccaaccaaatactgaattcttttccaaatgatgaatttcaaaaattaacccccgaacagaagtggaataagctatttgaagcaaatttgccgcatctgctcaagctggtcagcattgttctttccattccggtctctaatgcatttgtcgagagagtgttttctctttgtggctcacaatggactgacacgcggaatttgttgcaagtcgaaacagtcaaggcgttggtccaaacgaaagccaattttgatctttcttgcccacaaatgtaccaaatgctaatttccaatcacaaattgttggagaaaatcggcggatgggaaaaatacttttgataatcactttcaattgtttttgcgctaataaa

SEQ ID NO: 80564 - DNA, 4980 bp, Heterodera glycines
atgaaggcaaagcccatgatatgtctcccggatgctcccaccagtatttggtcattgcctgtcgaccctatctgccctaattgggttccaacgcaggtccccgttccttttgcattaaatatatatcgaccaaacactgtacaatacaaaaccgaagctacagcctgcagctgcattttaacgcgcatttcaaggaggagaggattttttggtggaacatatgaagaaataagtgcctttcattcggtagtgcctacggcaatttgcaggaaaatggcagttgataaggactctccagcaggcgaattatacgttaatgacgaaacgttaatggcaacaaataattccctagaaattgggtggggaaaatggccatcaaatttgttttggagaacggaagaaatcgataattgttatgtgtataagacaattgtttttacacgtcatggaatggaggggttgaatacaccaatcggagagtgctctaattgcttttataaatcaggcgaatgtcaatgcataaaaattagtctgatttggacccccgacaagacccaactttgcccttttgtttggttgtcaaaatggtctggtgaatatgcaagtctaatatggacgacggaaagtggtgattttgcattgagttttgaaaatacctcgtctcatagtcagcccgggtgctatgccgagtcgggcgaactaattgtgtcggaccaagcgtttgccgtacctgtttcggacttccaagaaatggtcgagaaagccaaaggaagcggcaccaggaaaacgagagaaacaaccgaaattggtcctgtttatagttctcagcttgctgcacagcttacagccttaagcacaaaaatggccataacgactcagcggctatttacggagacaattcgtaaaatttgcacgagcatgcaaataatggcagaccaagctttaaccttgtctataacaaacccatcgttattagcgaggtttttcctgggaaatccttttttatcggctcgattgatcacggaaaaactaatggaggtaaaaacgtgttttcctatttatgagggcgaagtacattttgactggcaaaatggtcactgttttgagtttcttccggtaacattttatttataccgtcagcaaaagcacggttttatcgacccaaacacgttaattatccatacaaaatctaaagaggtggattgcggtaatggaagattcatttttatggagatttttggcatgataatacgatacgatcaaaaaacaggaaatgtcagccaaatttcaacagaaggaataagggaaatcagccgatatggaaaaatagacatcccagaaataaacctcccttttttcaaaaataaagttttggccaattttacggaactttactcgcgtgaaaatttcaaagaaacagtggaaggagccaaaataattcaggagatttcccgcttatcgcgagttgattcgtggaatagtccctcggaacacaaaaaccgtatttcgggtggaatagtgagcagcggactgttttcatttttacgtggcggtattctgagtctaaaccaactttgggtttttggatgctgctgttatgttacgctaacaattataatccaaattttgttaccgtcgacaatcgctcaggccttacagtacctcaatcttggaggaattttcttcagattctttcgatttgcatggcatattttctttagggggaagagaagaggtaaaaaaccccgagatgaaattgaggagggagcctatcccgtggaaaagaaaaccatacaaaagaaagactcaaaaaatcggaaaaggctaactcgtacgcactcagttccgctaacggaaagatggccatctccggaacaaaaaccgaccataccagtaaaaaagggcttaaaagtgagcgtgttggcaatcattgaatggaacacaaggtgcgatgaaacttttaaaattgaaggattcgtttacgggaaaataactcggtttcaattggacactggcgcacatgtgtcaatctgcagcctacgcactgcagaaaaacttggaataaaattgcttagtcctgaggtggctggtgttatcggaattagtggtgaatttgcaccagttattggcagtggaaaaattgaattggaactggccggagtgaaaatcataacagaagtggcggtgattgataaggaaattggtaaaggaggtgcatatgacatgctaattgggcgcaacacatttaaaaagacacccttctacctcgatttacaaaatggttacctgatcaaaaaaggcagcaacgaaataatggagtgtggcacctcacagagaaaaattgaaaatttggagcagcatgtcggaaaatcggggaaccgagaagcagaacggaacgaaacggaagacaggcaattgaaaagttgcttagaacaaaataaaaatgccttctctaagcacgaatatgacttaggaacttgtaaaattatggcaccaaagattttaactacaacagaattgccagaaagggttaaaccgtaccccgtgccggaaaaatacgaaagcgaattgaaaaagcaaatcgataaaatgttgagagctggcgtaataaaggaaagccatacgccttgggtgcataatatggtgcttgtaaaaaaggcaaatgggcagttaagaccatgtgtggattttaggccattgaacaaagtcactattcccgacccttaccctttaccgagaatggaaaaggtcatttttcgggtcgcagggaaaaagttttattcgagtcttgatctcgcctcgggcttttggcagatcccattggatcccgagagttcatataaatgcggaataattaccccatggggtgtttatcaaatgctaaaattgccttttggcctgtgcaacgcaccaagcatttttcaaagaacgatggacaaagttttggatgacataaaaaatgtaaatgtttacattgatgacatattgatacattcgaacacattagaagagcatttggaaagtttggatttagtttttaatcgcctacaaaagtacggtctaaaattaaagggagataaatgcaattttcttcaaaataaatgccattacctggggcatattttgtcggaagcaggctatcaaccgtcgttgggcaataaagaagttattgataagttcccggaacctacaaatgtgaaagaggttaaacgatttttgggaatggcatcgttttttcgaaaatttattccgggttttgcctcaatcgctcaccccctcaataaattgacaagaggaaatggcacggaattcgtatggggaggagcagaaaaagccgcgatggatgaattaaaacagcatttgttgaaagcaccttgcctacgcccgccaaactacgacttggccttttacttattcaccgacgcatcagcaatcgcttatggcggggctttaatgcagactaaggataataatgagatgcatgctgttagcttttggtcccgtacactcactccaacagagagtaaattaccacccactcatggggaattagcggcaattgttcatgcgatacagaattttcgagcaattctgtatggggcagaattaatcgtactcactgatcatcgaccattaacattcctcttccaaaaagccagtacaaatccaaaattaaaccggtggctcatggctctgcaggaatttgagccgaaagtaatatacattgagggtaaagcaaataaagtggcggatgctttatcacgagtccctatcccatgggaaaatgtggaaacaaaattaaaagaggatgtcccttatgtgttggcaatagaaagtagtttgaatagacaaacatttgtaaaagaaacaaaagatgatcaaattatgtcaaaagtaattgccaaaataaatgaaaactgggcagagccaatagagaaggaactggaaatatattttaaaaaccgagataaattgtatgtcgaaggcggaataattcgaaaacatccccagggccaatttgtggtaccaaagaaactaaaagttgccattttggaacaaattcacaaggctcattttggaatcgtacggggaaagtcaaaggccagaaggtatgtatggtggccaggaatgtcggaggacatcgaaaattttgtgaaagaatgtgaggtgtgtcaaagaaatggcccaagcccgccccgattggatccggaacaccgttggcccgcagcaaaataccccttcgagaggctccatgccgatttggcaggcccggtttggggaacgaattttttaataatggttgactcgtattcacgctatccatttgtctttcagacaaattcaaccagtagcgcaactttgatcgcatttttccgggacatttttgccttatttgggtccccaaaaaccttaattaccgataacggcccacagtttatttcggtagaattcgaaaattttttgtgtgaggaaggggttacccatttaacctcgccaacatatcatcccgccagcaacggagaggcggagcggttcgtgcgaacctttaaagaaggaattaaaaaattgttggatgaggggagaaatctccgtattgcacaattcatccttttacaggaataccgatcctcaccatgcccaattttgaaaggaaatagtccggcacaaatgtttttgaaaagagaaatgcgcacgagtttggataaaataagaatttcccaagtggaaagagacaaaggcactcctacgggcgaccccgtgagagataaaggggctcaaaatcagcaaaggcagttgccgaaatatgagccaggagattcggtatggatgcgcgaccaacaggacaaaaagtggacgccggccatactgcttgagccaataggagagaggatgtggcgtttggagatggaagggggcggagaaagaactgcgcatgtggagcaaataaaagcgcgtcgaatggtcgccggacgagcctag

SEQ ID NO: 80565 - DNA, 193 bp, Heterodera glycines
agaattcgcatttgtccggcgccaagtctttgttggatttgctattgggcaaaggcaaagagcaaccgccgcgggaacattcggtggctaatggcggcggcgctggtcgaaaaaatccaagaaaggcagcagcaccctttcagaaaagaagagagcggaaaaccaatcaagcttgagccgtttgttgttattg

SEQ ID NO: 80566 - DNA, 884 bp, Heterodera glycines
atgccaattaaaaagttaagcgagcgaagtgtcgcgcaaaacagctcgacggaacacctgaagacggaactgaacgaggcaaacgacgaaatcgcactgctgagacggaccaacggagagcagaaggggcgaaacgccaaattggaggcggaattgatcaaagtggaaaagggtaagggaaatcagtggaagataattaggggtaattaaaactaattaggctaggggaattcataaaaaaattaggggtgattaaaaatgggcttccatttgatattgtctttcagcttacaacagagaaagagaattgcgtattaaaactgaagaaaatttgaagaggaaagagttagaagcacaagcaactgaagaaagaagagtgagtaaaacattaaaagtgaatcaatataattaatacaactaatggttaacatactaaacagcggattaattaacaaatattaatcgtggctagtttactaaacgtccaattaacaaataattaatgatcatttacttattgttagctgtccgaacagcgaatgtcccaattgacttatgaacgtttgagccgaatgggacaaagccgaaattggcatgaagaagcgggggatgacaattttaattgtaagcatgaaaagcaaatccacgcaagcattgacaaatggggcggaaaagtcggcataaaaacaatgccaaaaagaacagacgcaattgagacactgaatgaactgctgaacgaattatgggacaaatgcgaacggtgggagaagcgcaaagaaaaagcagaagaaggcaagcgaaagagtgggaaaagggagagaaagggatggatgagtgatcagagaaaagagggactgatcaggggggaagggatggatgagtga

SEQ ID NO: 80567 - DNA, 943 bp, Heterodera glycines
atgtcctgcagttatcactattggtgggttgggtctgacaaatgagagaattttaaacagagcacaaatacatatcccatttacgtaataaaataccaataaatcggaattctctttaataactttgtttctcctaaattatttccgtccattttagtcagtttttggtaaagcccggccagatccatctcggaaatccgagtcctggttcgggtccgggttttttgacaggctcaagtctatgtttactatttgacgattaaccgtattccaataacgtattcccccgccaggtaccattatccatatttcaaacgatggtatctcggaggcctcggtggagtttcgcaattccacaaacaatgaaagtgaaaatggatgtatagcacagaaacacaatgacgcgtaccgtaccctttaccgtagttcgcttttctttgacgaaacgaatccctgcaattattgtgacatatttaagcagttttattactttcacagtttagtgtttaaaatcatttttcacaagaaaaaaagaagggcaaatgcgcgcgcattcattcgcccgcccttcgcctttcaatgcgtttagaagcaaaagccaacaaaaaagcaatttgggaaaagcaaaaagccaacattgcatttggggtgtgtttctggcacggcacaatgaatggccacggtcccctccccatgtcgttcttcaaaaaccataatgcttataaaaggtttttgatgagtaaggaggacccagcacccgcctatcggcacctccgcatttattacaccataaatatttttaatttaaaatttagtaatttttcaatcagaatttggcctcctatttttcgcaggtatcgcgtatttcttattttgttcgtccataataattaatttaccacaacccatcaatcgtataattcaataagagagaaaaaataaa

SEQ ID NO: 80568 - DNA, 135 bp, Heterodera glycines
gctaatagagcatccgaagggctctcgaatgatatcaagaaagttggattagcgtatttggcgtaaatttttgcgcgttaattcaaaagaaacgctgatcactgccttttttggagaccaattaacattaataaa

SEQ ID NO: 80569 - DNA, 188 bp, Heterodera glycines
gacactgctaaatgcacttcatgatcgaggcgtcgacaacaaccaagagaatacaagcgattacccaaatttttgatcaaatttcattttttcaaacattttcaccatttcacattttccatatctgaatatttaagtgaacacattttttcggtttcaaatagcatttttaaataaagattttagtc

SEQ ID NO: 80570 - DNA, 752 bp, Heterodera glycines
cacaacaaacggcgccagttcaacatccccaacaacatgttggagcagtacgaggaagccaaacgctgccaaggatagcacagccggcacgacaaggacaaaatggaactgttcaatcgtcacaacttcagcgtggagctgttccattgccaagagtcccaactccacaaccgcagcaacaacaccaacaacaacaacagcgccaagttgtccgaacgccacaattgcagcaacaagttggagctgtgcaagggcaagtgccaagacaggcaccccagcaacagcacgaaaaacttgttggagctgttcagttaccaagaatgacatcgcaacaacaaccatctactgggacagtccaaggaagtcaaaccttgccgagaatggcaccgaaaaatcaacaacagccacaactacaacttggggccgtcccattgccaagaatggcatctccgcagttacaacaaaatcaacgggaacaacaacacgttggagctgtacaacaaccaaaaatggcaatggcggcacaacaacacatgccgcaacaagttggagctgttcaaggaaaccaacaggtgccaagaatgatggcaccacaacaacagcaacagtggcagcagcagcaagaaattggcgaattgggagcggaaaatggcacgaatcgttgggaagaatggcaagaatgctgcgtccagttgcccgcaggcaattcagtcctgggcaaatgcatggcgaaaatgataatctgggtttaa

SEQ ID NO: 80571 - DNA, 2007 bp, Heterodera glycines
atgggcgaaccgcaggcgatgttcatgcaaagtcgcaaggacgcgtgcgcaaaattgggcgcgccaaatgaatcgtatttgtgcagcaaatcgcaggtgagcgccaaatgagtgggagccacggccgaatgggcaaagtcggagtggaaaagtgccaaaattagtggcggatgccaaaaaattccatgccatttatatgccaaggcacttcccattaacaccttaatttaaatgggcagaatttgctctttttctgctgaagttgaccttcaccaacaaataccctttctacgtgaatatgccaacttcgtccaaacaaagcagaaaagtgtcacttctggcaaatgcaattcgcacagaaaattcattcattgccgcacttcgcaaggagcaaagttcaaaagaggacggaatattgtcattaattagctaattgcttttcctttgattagtgtccgaatggaaaaagaaaaaagaggagggaaaaacgacgcggggaaatgcgacgagcgaaacgaacggcgaaactccgaaaagggcggaggtgcgaacaaagagatgtgccttttggcatttcccaactgaaataaatttctcataggaaaagcctccttcgatggtgccgaattcggtttcttcgccttcgatttcgccaccgtatgccaatgtcacaccaacagacgatctccaatgtaccgtaccaatgccaattgcgagtactgtaccaacaaaatgtgaagaacaacaaacggcctcagaaacaatgacaactccagctgaacaaagtgctgaagaagcatccatagtggagaatgtcaaaccaactcttcctaccgtaatggtcagagcgaaaccgttgacaactacggtaggatggacggggcgacaaccgccacaaaaaacggccatttcgccattggcacccgtggaaacgacgacagtgccagtttgagacgaggacacagccttggcgatttgaatggccaacccatgggccataaacagtaactcatgacatcctatcgtatcgcattcatactgtattttctatgattttagtagagcaaataaatttctttatttatgaccttcttttttcaattgcgcgttttgctttcaatcatattttgacgtaataacaccagtttaaatcggaaatttcgaaaaaaaatcctatgggtaggcaaatttaaatttggcgttgcgatcttagaaagacttttcggcttttacttctttttgtcttcgtttccctttttttcttcctccgtcttggtatcgccaaattttttgaacttatctttatgtatttactttttatttgtttttcaaaggggctatcatgtttaagtttattcatatccccctttttgtcatttttttggcattcaaaagttgtgaacacatgtttccggcgggggttttccgggatttaaattagggaccacaattctttaccattgcccaaattcgaaacaaaagtcgtagttctatttttctattttatgttcgcgttcgggttaaaaatggtcttggttttaaaaaagtggacccaaacttaacctagtgccttaactattcagttgttttcgttcgttataaattcacaaataaatctccaaaatgctcctttcttccaactttgttggcgttggccgtgtcgcgtctcgtgccgttcaccgtttcttcctgtcgacttccgctgtgcgccttcagcaacaatacaaagtggcggtttcattttttatttatgaaatacgaaataatcgaaacaaagtttagcattgcaaacattttttttaggaagaagaaaatatggacattgaaaatctcttctcggaacagcaaaatctgccgcaatcgcagagcgaagaccaaccgcaggtgttcgatgcaccgaagcgtcgcttcaacaaagggtttgtcgaaacgatcaaaagcagcccatccccgggggaggggggaatagaggcactgcccatcaagcacaaattatattggtattga

SEQ ID NO: 80572 - DNA, 235 bp, Heterodera glycines
atgcaatctgttccttatatggtgagattgataataatattatttacaaaaaaaatatttgattatttcaggatgaactttggcaatgcattttaaataaacaacacgattgggtactgattaatagggatgcaatttttaggttttagcctatttttagtgcctattttctatgtttttattttcagagcctaaaacctaaaaaaaatgtgaaaaacctattttggcaaatgca

SEQ ID NO: 80573 - DNA, 1777 bp, Heterodera glycines
ttatggcgtcatggagatcgttccccaaccggaacgttcagaaccgacccgaaccaggaagaagtgtggcctcagggctggggacaattgtctccggttggcattcatttgtcattcgttttagaattaatttcaataaatgttacagaaaggaatggcccaacacgtcattcttggcaggaagctgaaggcacgatacattgaccagctgcattttgtcagtgaacgctatttaaacaaggaaatttacattcgaagcaccgatataaacagaacgctgacaagtgccatttcaaacatggtcggattttacagcaaagggatgccggggacggattatccgagtgaacgcgagtcgcaatggtggcctcatgggtcagcaatttaaacatacttctaggggtcagtgatgaaacgcgaactttatttgtttgtctttttgctttttcatcctacaatttgaatttgattgtgtcatattgtaatttattttttagtttcaccccagtggctgttcacacgatcgcttcctacgaggatcacattatccccgacattccagacgtcccatgtccaagacaaagcaaaattcatgaaattatgcagaacacaccggaatatcgtcagttgatggacgataataaagtaatttttctagcctagctctgatttttttacgaaaaattagttattggtggtttctgaatccaattttgtgcttaaaacaactgggttttccgcttttaacgagaaccttttcagcaacttttctccgatttgtcaacttttaccggtgagaaaattgacatttttaactttgggctggtcgctgacacacttttcattgaggttttgttcattcgcttataaaattatgtccgtttgttgaacaatttgattattgaggatcaataccgcgacaaattgcctcatccgatgccggaatggactcaaaaccgaacactgagggaaatgatcacaaagatggattttttgttggaagaatggattaacgggagaggcatgtcaagataaccactgtttttgtgctcttttttgaattgctttgcttctattaaggcttgtccgctttcgacggtgtgcactttgacatcgaattgccacggataaggggcgggccaatcctttggattttaattggaaatatgcaaaacaaattgaaatgtctgtccgagaatgtgacggagtctttttcgggttggttttggttctctcctacattgattatgtctatgtgtcttaattctaattgtaaggtctgaaatcgccaattgggtcgccactttgcgattggattcgtaccaggaaatatttcgcatattccgcggtgcttttagacggttctaattaatagcataattaatagtccgtcatttagcatgacacaacaattgccgcactgttctcagccctgggcttcaacaaaacgaattttgacgttgacgggtcggatcctcgttcctctaataaattatggttttaccaattattatttagttatccccattattccgcctgtgtgacgtttgagctgtggcaaaacgctactaatctcgagcactatataaaggtgctttcaaaatctgtttgttgtccgatattcacaatcattttcaggcgttttattggcctcccaattcgcccagcttcgaggaaatgacgagaaacatcaccggttgtgagacaaactcaactttgaatcgctttgtcgagcgttcggaaatctttaagcctgtgccctcgccagatgagtact

SEQ ID NO: 80574 - DNA, 175 bp, Heterodera glycines
atgaaaatcagtgtaattataattggactgacaatttttgaaactttgtttggcacaatatttgctgggtttttcgattgcttttttggtcgtgacagtgatgagcgcaaaccatcgacgactaattacagaaagccggccccaattacgacatcaagccgatgggatatggacg

SEQ ID NO: 80575 - DNA, 928 bp, Heterodera glycines
gtttgatcaaccaaggtaggggagctcagcatgcttttgatcaatcattgaaaagctccacaagaaaaagccccgagtaccaatcaattctagatgagtggaacaaaccaaagagcaacaacaatcataataataatgatattgcaaggcaaaaaacaaatgtatacaatcgtagaatttcaagaatagaccatggaaagagttcaaagcaattgggccaagtttatgctgaacagcgaacagcaacaagccgaaatcgtggcaaaaatgttcagggccaacgttcaaagccactgggccaaaattacactggaacaccaagacgaaatccgggaaaaaatgttcaaagtccaggtttattaacaaggctatttagtcgaatgtccaattagcttataagcaaaagttcaggcagcagccgtttaaaccgaagcaagtcgggccattatgccaaagagttagggcaagtgccaaaaccaaagacgcaaaaagtgattcgcattgatgcacatgaatatacaaaaaagcacatctatgggcaaaataagagtaaaattattgtttcaaatttaataacttaaattaattaatagttttattaattccaaaataaaggatgaatgaaataatattaatattaatttttatgtatgcattaataaaatattttagaagtcaaacctcaaaaggatgaatataatttgccatcgcatgcattggctggcaatggtaaatcatcacgtggaaaaagcaagaaacatagtcaaaaacaaaaaatcaaagaagagctttatgaattgagtgactattattaattgatattttttttaaattgttttattttcaaattttagtgaaatttcggaccgtctatgtcattttctttaaatttttggggaacgttttgtaaagttattatttattctaa

SEQ ID NO: 80576 - DNA, 618 bp, Heterodera glycines
atgagcgaaatcaattctctgtacgaaatttacaaattttgtggccccggagggaattgcgcagcaaaaaagacccaattttaccatcacattcacaacattgtgcaaatttggcgcgaatttgaacaagtccttttgccggacgaagaatatgaacgaatggcacgtgaaaaggcgcatttggtgaccaagacggaatggccgcaacaaatggacggtgagggaatgggaaacagggacaattgggcaagggaaggatttgctaatgggacaaacggtcattgggacaaacagtcaatgggaaattggtcagcagtagactattggccaatgggataatgagctaattggccaattagacaattgatcaatgagacaatttgctaatggaactgtgccaattagataatcggcagtctttcattcatttactttacaattcttcaatcggataggtcttactgatcaggactgatcaattctttggggatatctctaagttcatccgaaaatgggacccaattgctcgattatgtcgagaatgaccactcccgccttaaaattgtataatttgaggagaattataattaaaatatttcttttttgaaatgcaataaa

SEQ ID NO: 80577 - DNA, 1034 bp, Heterodera glycines
atggcactgatcgcaatgtgcttcaaactgatgcaggacgacgttgtgcagaaggcgcgatggttgggacaacgcattggcataatcggtggtggacaaattgaaattgaattggaaaaatagtcactaattctaatttgcctgtaaatttgaaaacctagggtaaatttcgaaaatgccatgaaatttaatttatattatctttattcataactttaaacataagggatttttaatattttgtttgcttcagtgcacgacgaagttggaagcgaagagtccgactttgaggaggaaggcattgcgatggatggggaggatgactttggcattttcggaggtgtcgaagacggcgacgaattggtgggggcggacgacgacttgctgagcgtcaaaacggagcaggtaaggcacaattaatgaatgccattattcattttggtgttctgcaggagaagcgcactctctcctcaacttcgtccaccaataaagcgctgcaggaggaatttctgctcgccgccactcgccagcgaacgccgcgagggcgacgcgtcgccggggggcgcgccaatggcaaacggacgcggcacacgcgcgcggaagagacgggcgacggcgggggatgagcggggcggaaaaccggcccgcacgcgcgcgagcggagtgattgatctatcgatcgaccggataatcaatcgattgattggcataaaacgattttcaacaatatgtatcaatctgctggacagaaaacccaaaataaaataaaataagattaaaaattaattaattcatttagcgatgggacgtgtaaatatttgctaatcgattttcatttttattggaattaattatttatttattttttagcagaatttttcattctctagacagaagaattaagtttcagattaggaaatataattgcttaaaaaattgttttttatttttttaaatttaataatttacaatttttctttttaattattatttttatattttgttttattttacaatttttaaaaccaaataaa

SEQ ID NO: 80578 - DNA, 1015 bp, Heterodera glycines
  unsure (1)..(1015): unsure at all n locations
agtgaattcattttccgtttgactgtcgtcgaatgctcacnngttcncaaggagtacacggacgtgtttgtcagtttcaagtaggccaaatgcgaatgccaatggcatcncattcttcgttttataattatttccctccagttttctccatcggcacgacgaagcattttcaacagagcccagtcaaagggattgcgaagggcgaacatcgcacgttaccgtataattatgtgcaggtggcataattagcaaacgccattgccctatcaatggaccatttgcaatgattgcctaattgttccaattgcccttttgaggagttcaaagcggtggtcaactcggcatttatccattacctgcagcactttcccatcattttcgaagtgttcggccatttgactaaagtagacgagcagagcatgttcagtgggacgacggcgaacaatcagtcggaaaagtaacgaaggatggcataaatggtggcactttctggttttgacaggtgcaaaatgtcgaagaatctgagcaacttgcagccgtcgttggtcatttcaactccgctgaagagcaaattggtggtcagcggcaacggctgcccgaggcaaagcctaattaattaattaatcgacgataaagagaaattccagggcaaattcggtcaaatcaaagtatgacttgctgatttggttcgaaatttgcgaattcaccagcaacggagaataccatccagcggttcgattttgcaaagaaaaccaatcgttgttattcccccaaaataaatgcaggtggttgaccatgccaatggactgccaacccatggcattttccttctccaccagggcatccaacggcgcattaaaatcacaatttgccacgaaaaaggttttgttttttgggcaaaaagcattataaaaaagacataatataattaattgcaggagacattcgctggagagactgtcaagaggtaaaaagggacacttttaattaccccctcctctttcccccccccccc

SEQ ID NO: 80579 - DNA, 358 bp, Heterodera glycines
atgacgcaggttcagtttacgtcaaatgtcaatgccattggcgctgcttctgtcggttgcactacggtaagtgccgttcgtggccgtgccaaattccgtcgtttgttttgtcgtgccgtcaccttcccggtcagtttcactcagctacgcttttcatttttgatctaagttttgctaccgtataccctccctatctccttttattacagtacttccaacgatttttttaggtgaacgttgtcaccaattggccagaaaaatgtgtttagtaagtgcgcattggccaacaaaggcaaaaacaacaaagaatgaatggtcaagaatgggcaaacggaagaggaatttgatgacaattaaa

SEQ ID NO: 80580 - DNA, 210 bp, Heterodera glycines
atgctcaaaatgatgccttcttcagcgctaacagcagcagatggacacaaaaaaaagagtgagtaaatgcgaaatgcgcagatggaaaatggaggagcccaaaggtcacacaccccaagggcaatcaatggaagaaaaagtaatgagcgtattaggtgcaatatggaacaatataaaaattaattattatttaaataatttttagattaa

SEQ ID NO: 80581 - DNA, 491 bp, Heterodera glycines
gcattgttgtgatcggcttcaaaccgttgcatttgctgaaggattcgcatcggatgggcgccgccgtttttgtctatcccatcgaatcggtcggtgtgcttttcgcttttgttttcactcaacatttccccttcgtcgtcggttggtttaggtaatctccggcagttccgccctttaccgtgcccttctgaagcgctgtatggacaaacaattgtttgtcctcgtccgttatacgcataaaacgaacactgtttgtttttcatgtccattagtcgataaaacccttaattattcgcttcgtttagcctccaaagctttgtgcgctcgtcccccaatcggccgaccgaattccgagtggttgtgtgagcagttccatccgaatggatggtcactctcatcagatgcattttttagacactcgcgcgcgaatatttctacgacggctttcatttggttgaaattcccttcgcggaaaagtcgcgatcgatgga

SEQ ID NO: 80582 - DNA, 400 bp, Heterodera glycines
atggaagacggagcagcaccacctgtaggtgaacacgatgttgaagaggaaggaaaagccgacggagccgaggtaacagaaggaagtgagcaaacgccaaaactgaacggagggacgaatttggcgagaagtacaaaacgaatggaccacctgccattcgcgaatgatcaaatgccaattgaagtagagatgaaacggggtgaccagctccaaatggaccgccaaagtggtcacctgaaaaagcaaattggcaattaattggctactgccctttttcgattggctttcaccacacaggcggtcacataggcacgagtcacctgaaaaaatggactaattatggtaatgaaaccaacgaatgagccaaaaaaacaaaacacggaaattaaagggaccggga

SEQ ID NO: 80583 - DNA, 190 bp, Heterodera glycines
tgttccatctgagaacattgggaaaaaaccttatgggagaaagaacgcaacctctttgatttccgtaattcgaagcatatgacgagcagcgcccatatcagcagaaatggtgatctgtcaagtcaattaaaatttattacaataatttttacgtcagcaacatccaaattttcactattttatgcatagg

SEQ ID NO: 80584 - DNA, 1263 bp, Heterodera glycines
atgcaatcagtgatccaagcatatgctgagatgccgccggtagcttttcgtcttatttcttgttaattgctttagtctttgattggttttattcccggtccctttaatttccgtgttttgtttttttggctcattcgttggtttcattaccataattagtccattttttcaggtgactcgtgcctatgtgaccgcctgtgtggtgaaagccaatcgaaaaagggcagtagccaattaattgccaatttgctttttcaggtgaccactttggcggtccatttggagctggtcaccccgtttcatctctacttcaattggcatttgatcattcgcgaatggcaggtggtccattcgttttgtacttctcgccaaattcgtccctccgttcagttttggcgtttgctcacttccttctgttacctcggctccgtcggcttttccttcctcttcaacatcgtgttcacctacaggtggtgctgctccgtcttccattatttgtttttcgtccttttattccttctccccccccctcttttaggcattgttccatgttggaagagggctctttccgtggtcgaacggctgactttgtctttatgttcatttttggcgcagttttcatggtcctttcttccatttgttcatcatccgtgccattttcagattatttgtgcctgttttgtccatctcattttccttggccatgcatttaccattatggtaatatatttttatttttttttacattgttcagttttcagttggtttacgtttggtcgagaagaaaccctttcattggtccgttttcgccatttccttttttgcatttatttatttaaagggatgaattttttcggcattttctccttttctgccccttatttggtttgtcccccctttcctccattttccctcatttttcgctctctcccccatttagccttgggtgctgatgttcttctcacttttgctcggacaaactgttattgtggacattttcggtgagttatccgtgtgtttatttcccattttcatggaatgtttgttaattccccccccccccctcaagggattgcctgtggccatttgtactactttctcgaggacgtgttccccaatcagcccggaggctttcgcgtgttggaaacgccgcgtgtgctcaaatggctgtttgaccccgccccgttgccgcgggtggaccccgaccaaagaccgggcggatacgaatggggcggtcagggagacgaagaccgactgcaaacc

SEQ ID NO: 80585 - DNA, 2750 bp, Heterodera glycines
atgagcagggacgagctcgtcaatttgctcggcacaattgccaagtctgggtccaaggcgtttcgagcggacgagaaaaacgccgcggctgccgaggcaatcatcggttggtctgatcattgccattttccttcattttttaaaacatttttaggtcaattcggggtcggcttttattcggctttcgttgtcaggtcttttcttgtatatttttgcaatttattcgttttggtaaacgcgttttagtgagaaagtttccgttaccacccgaaaacttggcgaagaaatggggcacatttggagttggaatggcgggacacattttacggttgaagaaaaagcagatgccgacattgggacgaaggtcgaattgcacttgaaggcgggagaagcggagaaattcgctgtgccgcagaaagtggtcgatgtcattaacaagtgagtgggcaatgccaacatcagcaaatgcttaagactgattgattgcgtttaaaggtattcctattttgtgaccgctccaatatttgtgaatggcgagcgaataaatgtgacccgcgcgttgtggacaatggcaccgagcgaaacgacgcccgaaatgcacgagacatttttcaagtggctacaacccacccatttacgcttttaattcaaaactgttacagacaattggccaagacgcaccacccccacttggcagacgaccgtccccagtacaccatccaatatcagaccgattctccgatcaacatccgtgcactgttttatggtccgttcgtcatcccatcttttttgttgaacattttccttcattttagtgcccacaaagcgcgtctcccacttggaatttgcagcagattcacagcgggacatcgccatttcgctgtacaatcaacgcgttttgattaagccaaatgccaaagagttggtgccgcactatttacgcttcctaattggggtcctttgcactttgccatagcaaaattaatcattcattccccttttaggtcgtcgattctgaaggtattaattggccaatgtttttgttttgcgatttaacgccataagtgtcgctcgctttaacattatctcgtatcttttcagatgtgccgttgaatttaagccgagaaatgctacagactgacctaattctcgagtatattacccccctctttatatgctttattacattatttttcagaaaaatcagaaaaacccttaccgaacgatgtgtgcgcttctttctctcacaattgtccaaagaccgagtcaaatacaacgacttttacatgggctattcaatgttcttcaaggaaggcgttgtcacggaacagtccaacaccaccaaggtgttttccattgccatttatcccatttttcttcatcaaaactttgttcaggaagaaattgctcagcttctgttgttcgaatcgtccagttttcggtctggcactttgaccactctgtcggaatatgtcgaacgaatgcaatcggaccaaaagaacatttattacatttacgcaccaaggtatgacacgaagacatatacatttttgtcacttttatttagccgtcaactcgccgaaacgtcgccttactttgaactgttcaaagacaaatacgaagtgttgtttttgtcgggtttgtcactccccccccccaccctttttccatttattttttccattttttcagacccagcggatgaactcgtctttttgtcaatgccccaatttcgcatgaaatctttgcagtcgctggagaaatggacgaaggaggagggactgagcattgactctgacaaagaatcatcggctgaattgatgagggacagctccaaaaagggtaattgcttcgtttgttcgttggctattgccactcggattggctctcactttctacatttactgtatcatccttttctcggcattcagaatttcttggctggttgcgcgacagtttgggcactgtacgcgtcagtgacattaagcccagcggaagacaatcggaacatccgtttatggtaggtaaaatgggaacaaattgttcttgtgttataaggtttagggaataaataaaatactaacaataattggcaaaaccagggggaataatgaagatttgattggatatataacagagattaaatgagatagaaatggcacaataacattgggaatgagaagaaaaggatggcttggaatggaatgagacagaaagacaaatttatgggggattaaaccgggagaaaaccagggcaatttacctatgcataaaatagtgaaaatttggatgttgctgacgtaaaaattattgtaataaattttaattgacttgacagatcaccatttctgctgatatgggcgctgctcgtcatatgcttcgaattacggaaatcaaagaggttgcgttctttctcccataaggttttttcccaatgttctcagatggaacacctcgtcatgctccgtcccgttttgcatgtgaacctttcgcaccccgtcgtcgctggactgatgcgtctgaagcgtcaaaatgccgaattggcaactgaaattgctatacaggtgtggcacggcgcatgtgatgggagggcacattccttaatgaacacacaattcaaggtgtatgagaatgcgttgtgcactgccggactgttgaaggacaccagcaaaatggtgggccggctcaacaaaatttttgcggaattgctgcagttgaacgcggagaaatcacaaattttgactccatga
